United States Patent Application Publication US 2014/0057251 A1 - sequence listing, part 84

SEQ ID NO: 138789 - DNA, 633 bp, Cannabis sativa
actgtagcgtgccttagcattagggcgttacaatactaactctacaaaaatatcttaataagtctcaattacaataatactttgtcgtgttattaaaaaataccttaatttcaaaataatattcctgaaacgaaattaatcccgaatttcatttttttttattttattttcttgggttttcaagtaaccttttggttacttatgatgatgataagaaattaattaattacttttacataaaaaaacttaatttttaaattacataatttgagataaaatttggttacctctaaaacttatttgtaaccatcttaataattaattagctatttgttatgttgcattatcctattttattatttaaaatatatttgggtaactttaaaatttatttaaaactaataagttgtcaaataaaaaataactatagaacttatgcagttaaataaaaaaaataaaataaaaattaaccacttctatattattttattacctccaattagggatgcacattttcctcacggccagggccggcccaagcattttaggggccttgtgcaaaattttaaaattgggtcatttagaaaaaaaaaaaaaaaaatcatgtacattataactacaattttattagta

SEQ ID NO: 138790 - DNA, 719 bp, Cannabis sativa
  modified_base (57)..(67): a, c, t, g, unknown or other
tttccataaacctcgctgattagcaacgagctgcacagtatgtttgaaaatcacgtnnnnnnnnnnngttagttagggtgttacattgatggatcaagtgatttcgcactatggcgagagagtttaaagggtatacttgtgcacaaaaatactactacaaaataagcctttagaggcgctttttgtagcataataataagtaaccgacgccataaggttgaaaatttttagaaggaaattttacgccacttttggcattggttatttggaaataaccgatgccaaaagggtttataaccctagcccagcccttcgtcttccttatttgatcagccaacccaaaagcccccaaaccagagaaaccccaaaccctcttcgccaaccaccacgaaaaatcaccccgatttcaccattttttcaccgttttagctcatttttatttctaaattttttattttcataactaaaactatctaccttaaaagatcacattttttctcattttttggagtaaatcgaaggtagaggtagtggttgtggtggttatatctctgaccaacatttttagtggagaaaacattgtatctcaacgtctattaagtgataaatctaatctctactaattttagtaatgtacattgctttacttttattttataatttttttagggtttttctatattattaaatatgtattgtattttattgaatatgtattg

SEQ ID NO: 138791 - DNA, 943 bp, Cannabis sativa
  modified_base (902)..(904): a, c, t, g, unknown or other
ttcaagcacaaagatggcttaactgagactgatcctaagaaatttaaggcaagactagtggctaaagggtttacacagaaagaggggataaattttactgagattttctcacctgtggctaagtataaaactatcagaattatactaaccatacatcagcctaagggatatgaagaaaaagggaaggaagacttgtttgcaaactgattaagtccctctatggactcgaatagtaacaaagacaattaaataaaaggtttgatgagttcatgatcaagaaagggttcactagaagctactatgatacctgtctatactacaagggcactaaaattgaagaagtcctctatgtacttctgtatgtagatgacatgctcattgtgagcaaagaaagatacagaattgaccttctgaagggatggctaagggaagagtttgaaatgaaggacttaggcaaagctgctaagatcctagggattaacattacaagggacacggaaagtggaactctaaggctacatcagaaaaactacataaagaaagtcatagaaaatttttctatgacaagtgccaagcaaactaagcaacctatgaacaatcagtgctacttaagcaaagaccagtgtcctaaaactgtagcagaaaaggaagctatgagtaaagtgccctattctcatgctgtgggatcagttatgtacctaatggtcagtactagacctgatttagcctatgcaattagtgtcctcagcaaatacatggcaaacccaggtaagcaacactaggaagcaatgcaatggttgttcagatacttagtgggatctacagaagttggattaaacttcaaaagaagggacaagagcagaatgatcactgggtacagtgatgcagactatgcaggtgannnagatagtaggaaatctacctctgcctatttctttacact

SEQ ID NO: 138792 - DNA, 532 bp, Cannabis sativa
ttattattattattttaaaaccaataatgaaataataataaatttatttattcctcttttttttatcgttcaacaaacataacacttgctaatataagtagatttctattaattagttagcatgtgcaactccagtgtataattttaggactttaaatattttgaacatattaattgattttgggcttagagggataaaaaaattgaatttgaattagatattttttacataaatttattttttatataatataaaatgagagatattttttttaattaagtagctaaattaaatttcaagcaaaacaattcaaatttttgttttattattggtcatttgatcaaaatcaaataattttaaatttctaaaattgatatttattgttattttttttataaccatcaatggatattattcattgagaaatattccatattattacatatcatatcttttattattttcatgttgagcattgttttgtaatattttttatttcaaacactgttgaatatgaaatgttaagaaaaa

SEQ ID NO: 138793 - DNA, 848 bp, Cannabis sativa
atcaacctcaagtttttggggacttttgccgcaattatcccttactatatatatatataagtataggaacacaattttgtcgtgtgatatactttcaaggaatgtattttgtgatgtacgacagccgttagatgatggaattatttgatctgagggctgggattgatcttggggtaattacggttaaaaaatagtaacgtaccctgagacccatctaatgtattccgtacatcacggaatacattccgtaaaaattacatcacgggacaaaatcgtgtccccatatatatatatatatatatagcttacatattattttatctctccaactccacctttaattattttaatatcccacttaattataaaatataatataaaataatgtaaatatatagtatctctcaaaataattattagcgaaaattgtgataaaagtttttaaaaaatttcctttgatataaataaatttttaatcttgaaaaataacaataataataataatctccaagtaggggtgagaataaaatctaaaaaactaaaaaaccgtttaaaccgatttagcgaacatcgttggaactgaaaccgaaaaaactactaacggttaaaatcccattgaatagtcggttttttttttgtaataaaccgtcaaaaaattagaaatcgaccgttatacatatatatattaatttattaagttttttttgcatgtattataattactaataatatataaaaataatatattatttttttagtaatattaaaatttaaagaataagattattagtttttgaaaaattaatttctatgtttgtagttgtaaaatatagaataatgtatttata

SEQ ID NO: 138794 - DNA, 593 bp, Cannabis sativa
tttcttgtgatgtcttttggactcacaaatgccccgacagcattcatggatctaatgaatcgggtgttcaaggactacttggataggtgcgttgttgtgtttattgatgacattttgctgtattctgagtcagaagaggagcttgagttgcatctcagagcagttttacaacggttacgggatcataagctctatgctaaattcaagaagtgtgagttctcgtgatctcgtgtctcatttctgggacacatagtggataaagatggtgtcatggtggatccggcaaaaattgaagttgtttgggattggccaacaccaaaatcagctactgaggtgagaagttttctgggtttagttggatactatcgtcagttcgttgagggtttttcaaagattgttgtacccttaatggagctgactcgaaggaaccagaagtttgtttggactgatcggtgtgagaaaagttttctagagctaaagcaacgcttgattaccacttcagtactaactcttccttcagataaggaaaagtttgtggtttattgtgatgcctcaagacagggtctcaactatgtgcttatgcaggctggaaa

SEQ ID NO: 138795 - DNA, 576 bp, Cannabis sativa
  modified_base (157)..(158): a, c, t, g, unknown or other
  modified_base (547)..(547): a, c, t, g, unknown or other
ccggggcctggttgatccagaaaatccacaggcggtggatcccgtattgcagaacccaggaaacgtaacggttccgccagctgttaatcttaaaagccgtcaaacgtaggtcatggtgtgacgactcctgtagatgaaatcgcgcctagtgtgcaanngactgggaataccagttcagcacccagctagggcattcgtaacacagctgttccgcctactaccaacgttcaaacgaccactagagatgatactgagatccaaaacctccgcgctgctcttggactcatgcaaggtcataccaacaccctacgtcatgatcaagaagaactccgcgctgcggtaaatctcgtgttcgaagaataaggacgcacgtttctcgagtggagggacaaagagatggaagcgttaagggctcatcatactgagattgaaaatcgtagtcggcaagacactgtgctgatacgaaaagcctaccaaactgttagacaacaacctccgaatgttacccccctgggtgagacggatgaagatccagcgatgaatactncccagactataaatggtcagccgcaaaat

SEQ ID NO: 138796 - DNA, 510 bp, Cannabis sativa
tctaaatgttcttttaataaattcaaaacagagtctgtacattgataaaactggaagaaaattacagttttacaaacattaggtacttatgcctctaaatataaatatgtttatgccgcttacaaacataaaactttgagtacttatgtcgctatttaccttaataaaagcttaaaaattgtaaagggtaaaaataatctatgacaactagtactattatatttaaaaaacaaccaataggtctcaccacctttttcaatttagttagaatttttttgtgttcaatgtattccaaaacattaaaatattgataaacaatgagcgggtaacattctacattggtactgaaagggttggaatcggttacctacatatacatatatacatatctaatatacatttatatttatatttacatatacatatcttgatatattaaaagtgcctaacggcaattcttggtttaacggagaattttttttttgattctgttaacttttaatcattcac

SEQ ID NO: 138797 - DNA, 897 bp, Cannabis sativa
taaacaataacaatgatattattataaataaaatattttattaatataataaatttatataattttattcttttaattaaattactacaattagtcttcttcataaattttacttttttcatcatgtacttcttccatacatatattagtaactattataagtatcaaattaataatcataaataataaaatttcaagtcacatgttataatgactatacagctccttaacctataattcacatttaaagaatattatgaatacatatatatttatatatatttatagcaagtttagtaaatattatattgaatgatttaaatattaataaatatgttattaaaatgtatgagtttttataattaagttttttttgcacattttttgtaatatataaagttttgttgtacattaataaaaaaaccctataatattttacattgtgtatcaatctctaaaatactacacataataaaatattacaaatctctatattagaaagaataacttaaagttctaaactgatagacctatctagatttcatcaacttaatgatgtattgtgactgttcttcatgtattttattgttcttatcctttatgtaagagattttcctaccatgctaaaatgaaaattattacacgagttatttttaataaataatgtgataaaagctagaatttaaataacaaacaaagtcaaattctatttgcataataagacttgattgacaaaggtcattactttgttgtattcagtggcggacccagaatttaagttgagaggggcgatacttattttttttataagtgaggggtgcatttttttttttttttctacattgcataacatgttaaaaattaatgtaaatttatattttagtattaaatatagta

SEQ ID NO: 138798 - DNA, 2048 bp, Cannabis sativa
taaaactaatatttacgtggcatatatatataaaaaaaaaaaagttacgtgcacgtatactacgtattatattaggtactttctactttattaaatataataccataaataattgaaaaaaaaatattattagttattgtttaaaattatttacatatatccaattaatgaataataggattacaaattaaaagtaaatattgaattagtgattttaatttaataaatttgtattacgcttgaagaaatcttgatgatttaagaataattactcaaaggtaaaggtaagcatttttaattaaacaaaaagctccttgtaaaattgaaacccaaatagcaaaataaatttaaatctaatcacaaacaatcaagtaaatcctcagtgaaaataattagtagatatatatccaattggaaggggccaccatattttgaaccccctatttatagcatccctagaagagcatatctccacaaaaatatatataccctttaatacatataatgtagggagacaaatacacaaaacatgtaacaaaaattatgaatggaagcctaactatcacatatcaaattttatctcataaatatagtttcaaatacttaataaaatctaaaaggagccaagataaaaatactgtgagcatcatagaggttatcatcagtttcttcgtttatatagtttaaggctcgcatccgattttgctacaagtaggttaaaaaatataattatacatattagcaaaactatcccacaataagagttattattaatgatcaagcattacaattaagtatcactatcagatgtatatgtcttaagaggacctaatgaaatatatagttaatcataaactatcaatcttgtgggaagtgtgaaagttgtgattattaaaaaggcatatgaacctaaaataatgaaaccaagttcatgaagataaaaattttactgctattctaaggaaattgaagcgtatcaagatctcccttatagtttcttctaattaaaaagatcaatacagccaatccccttaagagactcataaagggtgggcaatatggataaatatttgaagtaaaaactcttaaatgtctcttgcttgaacaaagtttcatagaaaaagataacaaataaataaaaatgaaatgcatataacgataaatcgctaattgttagtttatttttagtattaattttagattaattttaatatatttttaatttagtttaaatcatgtttggagcatttttacgcttgttatcttttatttttgcagatttaaaataaaagaagattagaaaaatatcagaggaaaaagataggaaaaagataaaaatatctcacaaaaagatgatatttaaaatagagaaacttgtgcaagaaaataaagctaacacttcaaacctgaatacgactatgttctgattagattttagaaaaagtcgaaacataaaagttctagatcactcttttatctttccagaacatcttgaatcgtccaattctgagtaatatcaagagagttatggccaaaaaactatcagttgacgcagtagaaaaaatcacctcctcttctaatcctaagaaaaataggttttctaatcctaaggaggataggttttttctcttcagcaatttttatcttattttatcattttttggctatataaaaagtggacttcaatagttttggtcacgcaattttagagggaaaaaggagtacaaatttcagagacaaaagtcaatactggagacattctgcagagggttttcagcattatttattctctatcttcttttctttcttaaagttaatatgtgtgatttcgctttcatgaacatgtgtagctaaacactttattagggttacatggatattgtttgatattgctttatggtattaatatgatttattttcccccaatttctatgtgatctatttcattcgtgaaaaaccgtgtttttgcaaaatgtcagttatatataagaaaatacaaaactgtaagcatttgcagaagcagaaagtaattctgctacaacaagaca

SEQ ID NO: 138799 - DNA, 516 bp, Cannabis sativa
ttgctcaaactttgttgtatttgtgataatttaattatttggtgatagtccaaaccgcaaaaaccgcactgcactgcaccatttttttgcagtgcggttttttagtttcgcggtgcgggtgcagtttggaaaattagaaaaaccgcacgtacgggttagtttgaaaaaatgatcaaaaaccgcaccacccgcaccgcgaacacccctagtttttactataaataacttgttttgtacaacaatgtataaataacttgttttgtaatgtcaaaattagaatttaaacaatttattgcacttatgcttataaatatgcaagtgtgcaaggtcggtccggagattggatactggaccttagtaaaataaaaaattattcggctttttatttttaaaaaaatatgtagtattttaaaaaactactgaaaataggggtaagttgaaaaatgcctcttttattcatcaattaatcaaatttacctttaattttatatttatttgaaacatatctctttttat

SEQ ID NO: 138800 - DNA, 569 bp, Cannabis sativa
tatttgctttcgcattcccatttcaattccccgtcccattcccattcgtattcccattcccattcctattccctttcccattctgattccctagcccattcccatttccattcctcggcatattcccactcccattacaattccccgacccattcccatttcaattctcgttcccattcccattccctggcccattcccattcgtattcctattcccaatccccattcccattccctgacccatgcccattcccattccaatttccattcctattcccattcccattccccagcccattcttatagagattccccaaacccgaaaaacccaaataccaaaactgcaaaacccgaaacccgaaaccctaaaacccaaaacccaaaccccaacccctaaaccccaaaacccataaaccgtaaaagcttaaaaccccaaacatcaaaccctaaaccccaaaccctaatccgtaaaaatagcaaacctaaaaaccccaaacacgaaaacaccataccccaaaccccaaaccctaacccaaaaaccctaaaccctaaaacccaaacaccaaacc

SEQ ID NO: 138801 - DNA, 675 bp, Cannabis sativa
ataaccaaatatcttgacaagattccgatgttgaagcttagcaattagtttaatttcatttttgaactcattgactccttgtccagaattcattgatagactcttcacagcaatttccctacctccttccaaggtaccctaataaatcacaatgaaaatattcataattggtaaaaagaaaagagaatactctgaataatataaatgagaacttactttgtatacaggtccaaaaccaccctctccaagcttattagcctctgaaaaattattagtagcagtactaattgtatatatgttgaacaatggaagctccatgtcatcatcttcgctttcgtttcttgcacaataattattagtggctgtgaagattaaaacgtcgaaatgataagaaaactcgtcttgtacaagcttgtaatatagtgttacaagctttagctcattttgtctatctctttacaataatattcacaatgttcaatatctgagtaataaacaggtatttagtatcttgtgtttatgtaaattcaggattgtgtttccaataattcttatattccgaaaaacataaaacaatactaaacatgctcttagaaaacaggaaagaaacagttatatgcaaagtcattaatctacaatccaattaactaacataaccacccctaatgccctcct

SEQ ID NO: 138802 - DNA, 578 bp, Cannabis sativa
ttttttttttttttttttagcaaggccggccctgcatttagtttgccattggtgtgaaaatgtgaaagtctttatcaatagttgaaagctcaagtcgtgggcatattctgtcgttgagaccatcacgtgagggtgacgaaagtgagctatgaacaaaactcattgtaggcatcaaaggctgatcgaagagaataggaagtttggttatagttttgtagctagtgatggcgctgatcgactggtggcaacaaaggctcgggttctggaaggcgtggcgaatgcagtgttagttgtacttattttgtgttgttatctattctttattttgttcaaaataaataaataaagggtaattaataccattttagatatgtgtttttcaaaaattatcaatttaactctctattttgttaaattataaaatagaccatatattttttaaaattgtataaataagaaaactgattttttattaaaataaaccttaataataattatgataaaactcattacattttctatatatgttcatattataaattgttttaaaattagttatattaaaaaattaaattatt

SEQ ID NO: 138803 - DNA, 744 bp, Cannabis sativa
gttctcagggaatactaggccaaacgcttgaaaatggcgaggtatttagagaaacttcagaagaacttggaaagattagattactataaaatcgaacaaattctaaaagaacagaactccaacgccaatgccttagcaaaactggcctcgctgaatgatatggacgaactaaatctagttctggtagaaatgctgagcgagccaagtataagtgaaacaaaagacgtcgggatgatagatagctctccaacatggatgacctctattattaattatttactcgacaagaaacttccaaatgacaaaatgaggcacgaaaacttttgtatacagtgccttgctacacaatgatcgaaggcaaactatatagaagagggtattcaatgcccctactttggtgtgttcttcccgcagaagtaaatgaaatcattagagaaattcatgaaggcttctgcggggatcatgcgggttggcaaagtctatctaaaaagatcattagataaggatattactggccaatgatcaataaggacacacatgagtttggcaagagatgtgataaatgttagagattttcacatatacctcgcctaccgccaaccaaacttagaatgatgaccttgccctacctatttgctatatggtgatcgacctaattggggcattacgcattgggcgaggaggagctaagtatgcggtagtagtagtcgacttcttcactaaatggatggaggccgagcccct

SEQ ID NO: 138804 - DNA, 1624 bp, Cannabis sativa
gggtgggcatgcgctcaatcactaaggctcgatttttttttttttttttagagtgatttaaatcactatgataatcgttgacgcaaaaaaaattccagtcaacaaactaattgtctagccaaagatatacaaagtcagaatatgagtcactacaaacaaaacgacttatataagaccaagttatctcaaaaaattagacaaaataccttgagaccaccttcaagaggcatccgatgtaaacaaacaccttgaccaaaactacttacaaaataaatagatgtataaatgtggattaacacactatacaaagataatgttttgaatttttaaattaaggataaaatgcaattattattataacaagaaaaaacttatctttgaagcttttttattgtaatagataagtcttccaaggtagaattatactagccaatataacctacaaacatatataagatttaagagattaatcaaactaaataaatcaaatcccaattaaaattaaatatttttcaaaaaaaaagtaataaaactcaattgccttataaataaatgataagaaaataatgatataaaatgatagaaagaaattctttcaaacttattcaatataataaaaaagtaagatttaaaacttatctgtgaaaatctacaataacactttttgaggttgaatccatgcgcaaacgagctaacaataaattgcaaactagccaaataatatggtacaaaattatcaaaaaaaaaatgacacaaactagccaaaaaaggcacaaactaataaacataaactataaactatccccatataaaaccaatctagataataaataaatatatattatttttaaaagataggataatttatagaaaaacctttaataatataaggaaaattttaaaaaaatgtgcataaaatatcctaatattttatacctaaactaatacaattcaaaattaaaaatatatgaccactttatctaaaatccaaaaatacccctctcataacaataccccaactctctctcctcctctatctctcttggttctctctcaaccgaacccttcaccgaatcaaaacccccctcaccaccgcctacaacgccgacccctcaccaccgcctacaacgtcggccccctcacaaatcaaaaccgaccacttctcactgcctaccgcctacaccgccgacccctttctccacgaccaccgcaacccacagacccaatgtcaaaggttagtatttttgaatatgtgatttctgggttagaaaatgcattttctaggcaggcccgatgcaggtctgatgcaaggtccgatgcaaaaaattgaatatgggttgaagacaaaggcccgatggtcagtccgatggggcccgatggtcagtccgatgactgaccatcaaactggccatcgggccccatcgggccctatatcgggcctttgtcttcaacccagatataattttttttcatcatgatgcatcgggcctgcatcaggtttgcctgtagaaaatgtattttctaacccataaatcacagattcaaatctaaccctaaatctaatccaaaatgcacatatcagaccctaaatctatcaattaacaatattttaaccctaaatcaa

SEQ ID NO: 138805 - DNA, 1091 bp, Cannabis sativa
  modified_base (47)..(53): a, c, t, g, unknown or other
ttgaaaaatattttcacttttccacttttaaaaacagaaaactgatnnnnnnngtgttaccaaacgccaccttaaataattaaagtataatatattaaatctaatacttaattacactaataatattaaaatatctaatttaatttggaataaattctctttaaattttttaattaatataaagtgccatattgcagtactaatttaatataaattttacacattttaatttaaaagatgttataaaataatatgaaattaataagaaagaagaaaatgaagagtgaaagaaaaactgaataagaatttctcagttatttaattctaataaggtgcatttctatttatataaaaataacactaaaaaataggaaactaaatcaataaataataaagacatatataatcaagcattaatcttgataattaatttagtgatttggacatctatatataatattttataatactcctctcctctttggatgtccataaaaactgtcttattaaaatccttgttgaaaaaatttagtcaaaagattaagagtgtagtgtaaactaactccccatcatttaggcattcgtggagatcttttaatcgatgaattctaatcttgtgaaccatcttctaaaatgttgatgttggtaataattttgtgaataagtctgcaagattgacacttgtttgaatttgttgaacaccaatatgcatcctcttgaaatgtataaagaagaatttggtgaaatgagttttaattctatctccttcaatgtaccttccttttagttgagcgatgcaagctatattatcttcatagagtactgtttgtgttgatacttcattacagagtgtaatccatatgtttctcaaatatattatgtcaatgatctcactcccacacattctatacttgcttcataaagtgcaagtatgttaacacgatttaaagttgtctcgttaaaagccttgccataaaaatacagtgggacaaaacttgaactaaggaaaaaagagtacaacatgaatgtgtctctccctcatgcacatatgatccataattattttggtgataatatatctcttaagatta

SEQ ID NO: 138806 - DNA, 776 bp, Cannabis sativa
ctccactttttcatcgtacacggcgagagcaataacaaatgttggcatcttcttcttcaggctcctcttcagttgcagagctaatagtagcttgacttttggggggctgtctcactttagcgggcactattgaaggattctcccccatgatcagtagattccctgttgctggaattggaatggcccccttctctgctagaaactccattcccaataccacattaaagtcatccatgcgaacagctacaaggtcaagttgtccctcacatccgtcgatcttgacattcacttttctggccactccaattgtggttgtggccttcgaattgactgctttcatgcggcccgcatctatctccagttgtaggcccaccctcttggcttcaatttcagaaatgaagttatgtgttgcgcaggtgtcaatcaaaacgctcttggcctacttaccatttaaagtcgcctccacaaccatcaatccgttcccaagggctttctttcctccgacgccatgtttcttaagagcagccatcaatcgacggcacccatgtgcacgcagtcttcgtcttcatcatcttccccacatccttgctcctcttgagcaatggatgcctttatagcactgaacttgggctggtgggggcaagcagccgccctatgtgggccttggtaaagccaacacttaagaggcttcttccccgttacagcatcacttttagaggaggagctagattcaggagtcctcttgtcccctcccccacttttactcagccattgct

SEQ ID NO: 138807 - DNA, 625 bp, Cannabis sativa
gccgcctacgtgaatgaaggattgatggctggtgccttgtgtggtgtcgtcgaggtaaaggatggactaggttcgtggcttggtggtggtggacaggggcagacccacattgtagcgaggggggcagtcgccccccctgaagaaaaaaaaccgagaaaaaaatgtatatgtattttaattagttacaacatatatttgtattagaagatgatatttatagacataatagtaagcttggtgtaatggttaaagtaaattgcaaataggttagagtgtaaaggttcaaatcccactaactacactttatatatttctttttaaatttatctacgcccccctcactttaaattctgggtccgccaatggtggtggagagtgaaacttgagagttgagggtgatgagtggatgcgtgtggatttagggactcgggcgcagagaagagagaatgaaaaggctcacctggtgtgtgtgtgtgtgtcgatttagggctttagcctttccccaaggaggtaaggtaagtagcaaaagtaaaaaagggtaacaaaatgaaaatgttaaagtaccaaaataaacacattgtaaatttatgacaatttctaaaaatatatttttttttgtttgttt

SEQ ID NO: 138808 - DNA, 637 bp, Cannabis sativa
tttagtaattttgacccaagaagggtaaaacagtgaaattaatttatttacgtgcttatggactatattattatatagtatgcttgtgttatcctttttcaggtgtgttctgccaagttggcgtggtatagtcacaaccgggtatttcggccgaaccgagttcagggccgaaatacaattttgggttaattattggtattttatttatgcgggaataatctgaaaattaattgaatttatttgtgtgtgcaagtgattatttaaccattgaaatgcttatgtgggtgttttatggcctaaaggcaattgtataattttgccattttggagtaaggttcataaaagggattttaagcaaaattaagatttaattttctgcatttttcccagccctttggctgaaccccctttcttctcaaaactccttttaactcttaattttgggttgtgcttgcttggattaaggcttggggtttgtggcttttgtgattgagattgaaaagagttgtttttgcattttaaaaaggaaaaattctgggcttttcccctgccctagctgaaccccctctccctcttttcttcatattttttattttgctaagtgttggaaaattcatcttgaaagcttggattcttg

SEQ ID NO: 138809 - DNA, 624 bp, Cannabis sativa
atatatatatatggttgaattgaaactttcacattaatcctcctcctgatgagtcttgacaatggacacggcaacaattgctacggtacgtattgtactcttttcatgaagtagacattcacgttctactatatataattacgtactaattattattattaacttcaatttacaatatataatataattaatatatcatataattcatccccagatccacctataatgcgtacgtagttgccattcaaacaagcaattactaatattgtttcctgataaataatattcaagtacttgtttccttttaaaaagaaaaaaaaatactttctataactattttcgcattcaaattcttaaatgcaattcaaatcacgctgtaaaagtgcaaacctaaacaaaacaatatgggaggtacaaataatttcgttcagttatttaaaattgcggtataagtacttaaaaattaaatttaatacagataaatctacaatctcaaaaattagcagtaataatttctaaaaatgggaaaaaccctaattttatcagcccacactctctctttgtctactctcgtgcgacaccagcatagttggggactagaatctctggcgatagtggtccaag

SEQ ID NO: 138810 - DNA, 627 bp, Cannabis sativa
ttttatgaacttgtatctgtccccaagaagggggataagtttaaagacagctttttcacactccgggcccatcctactaatgaggatgcggttccttataatttttcaaaaaaatgttaaggagtaccaccaccgtttcttcttctcttccggcttcttggtcgtggatcacccatagcttctcacgaagtaggtcaggatcaccccactgcatcgcactgctcctacccagcttttcctccagcatgctaaggttttctccacttttgacagaaatggtcttaacgtgggggacctggttacaaaggagaactactggaaggctaaactcatttcagggagccaatccgtggacgacttaaacctctcgaaggtcctctgcccaaaaattcgtaccccgaacgctaaaaaggcactccgggcggacatcattccctcggtggaggactggtaccagaagtacctctttaggagggaacaggagttaccctacatcaaggctcagactgctgctgggaggaccctctggatacaagtggggaaagaacgagcgccttctcagcctaagatgctcctcccagtccccaacactggggctcctgatgccagcacatccgaatccggtaa

SEQ ID NO: 138811 - DNA, 641 bp, Cannabis sativa
  modified_base (584)..(595): a, c, t, g, unknown or other
ataaaatgtgatttctgatctttattaattagtaaatctaatgatattgaaatgtgttttatttagggcacaaaacccaacacaaatctatatatacacatatacatactcatacagacatacctatatacatatatacgtacttacacacacaaacacatatacatatacatactcacacacacatatacatttacatatacatactcatacatataaatacttatatacatactcacacatacacatatacaattatacataggggtgttcatctgatctaatccgtaattttttagtcaaacaacatccaatccgcactaagtgcggatttcatattttggatctaatccgatccgcataatagtttaaattcaattcaattcaatccgcaatagtgcagattagaccggttattttggttcggttttaatatttcatagaaaaaaattttaaaaaagactattgtttcttaatctccaataataatttatttccatctccatttatatataaaacaaaccaatatatatatgtcaatttatatgtactcatttttagatttacaataaaatatatatatnnnnnnnnnnnnaaataaataagttagtatatatatatatttaaatttatgtatatgt

SEQ ID NO: 138812 - DNA, 599 bp, Cannabis sativa
  modified_base (412)..(417): a, c, t, g, unknown or other
  modified_base (572)..(573): a, c, t, g, unknown or other
gcatagagaatcctcttctatacagaattccctctactatgatatacagtacgaccttcctcctcattttttgagcttcatttcaattatttgggagtttcccagtgttgaggtaggctactatcggtgtcatccagtttggggaagtatcaatcattttgatctcttttgtgccagtaattctaggctctttgaggaactggataggaaccaagtttgtcttatcacttacattactacttgccaatcgagctaacgcgtctgcacttgtgttttcttcccttagaatttttctgagaccatagcttttgaattgtgcgagcaggtcatgtattttgctcagatatgctatcatcttttctcccagagcttcgtattttccagatacgtgatttaccaccagctgtgaatnnnnnnagatttcaatgtgttcggctctcatctcccgagctaatttgaggctagcgattaaagcttcatactcagcttcgttatttgattccctgactccaaatttgactgccgagtgcaggtgttgcccccaggtgtgatgtaaagaccgcttagtttannttggaaattagcagttaatcacgttt

SEQ ID NO: 138813 - DNA, 707 bp, Cannabis sativa
aaatcaaattttgttgtgttcttctttatttttctgtagtgtttcagtttctttcttctaaaccaacaaagatcattttagatctttgttgctactgtttctctctctcgcggtttgtttgtgtgttttgcatgtgtggaggagtaatatactcggccataatagctactgttgtagctcgaagaagaaggagattaagagaaggagaaggctcggctgggttgcagcaagaagaaaagaaggaaaagaagaaaagcctgctgcgttttcaaaggttgaaggaaggagaagaagaagcttggctaggttgttttgctgttcaaagaaaagagaagaaggagagaagatgaaggaggtcggctgtgaaaatggcagctaggttttcttttaaggagaaaagaatggttttatattgcaattaaatgcaatagggttttgaaaaaggagatctgatattcaaaagggcatatccggatttgagaaaggaatattctctttggatccgcacaaagagagaaggacaaatctgcccctaggttttgaatgttggggtgttggtgtagggggcaatctgggtatttcggatgccattatttcctacagattccatgtgaatcatgcatgccaaaatatagtgttcactttgtgacaacttttctccttaagtacttaagctttaaaaattcaatcataaaagattaattttc

SEQ ID NO: 138814 - DNA, 1130 bp, Cannabis sativa
aaaatgacacctttcttttcaatgcgtatacctttatttcttcttttgtagactggaaagccatttgcgtctattgtcgttcgatcattaaatttttttgggaaatgttttgtgtacctaccttgcatcatacatggagagtttgaattgagttttccacaaggtccatgaatcataaatttgataacggcattataaccatcaggatcaatatttgagtctgggatttctgcacttattattttgtctatatgttctgctgaaggattttttaatgttgaatgcaagaaaagtagtatgtgtgcatgaggcaattctcttttttagaactcaattgtgtatatacctacaataacattaagaaaatgttaaaatttacatttaaaattgttggaaaaactgtgaaatattttcatagaatatcattttaaaataatttaatttttttgtgaatttaaaatataagaacttacatgcgattatttttccaaatggttgttcatttttcagatcgtgcattagttggttcaactttatttcaaaaagtctgcatatggtattaaccctattctcatcgtctttttgaccaattaaattaatcatgtcatttatttttggccactttgggttgcaagtgaaagtaagaaataaatcaggatatccagcccatttacaaagggccatagcatcttgataattttgtactctatatcggggtcccccagtgtgtgacgaaggtaaaataattgttttttccacttttgagcaatttgaatcccctcgatgagcagcatccattaaaccagagtaaaggtatgtcctgagtttttcttggtgatttcgtatccatctaaatctttcttcctcaattgccatataacaatctactatatattgttgcagtagtcgaccagctcgaagaagagtgtgaccctcatttaatctttattgtagcctgaaggaataatattgcctcattgtcagcatttttttcttagaatcactctcatttgcatttctaaaaggaatgcaaagtctatatccatcttcaccataagggtgtattaatgggtatgtcatagacatgaaacttggatggaaatctgtgattctctggagtcctttggttc

SEQ ID NO: 138815 - DNA, 1805 bp, Cannabis sativa
gagtcctcttcggtagagaatattgtccatcatcacatatcggtgtgcttggtactgtatctttttggacaacgccctttcttgaggcaactcgcctttggttatggatttgatgatggggtttatccagtttgtctctggctcaactacaaccacaacatctttaactttgatgcttggttccacgaggcgttcaatgggcaccacccccagtttcaaaacctcgctgtctgatgctaacttagccaaacagtctgcatgggcattcttttctctcgggattctttccactttataatctgtgaactcatggagtagctcccgaacaattgctacatacacaactattttttctccacgcgtttgatactctcccgagacttggtttaccacaagttgcgaatcgctaaagacttctactcttgtggctcccacgcttcttgctaattttagcccagcaatcagggcttcatattcagctttattgttggaagccgggaattcaaaacgcagagccgcctggagtcaaagcccgttcggagatatcatagctatcccagctccggatccgttttcgtttgacgctccgtccatgaacactttccatgctggggtttgtggtattggtacgtttgcgctagcttctgcttcgttgcattcggttatgaagtcggctagggcttgtccttttatagaagtgcgtggtatgtagtgtatgtccaactggcttaactcaatggcccacatgagaagtcttccggacgcttccggcttctgtagaacttgccgaagcggatggtttgttaataccttgatggggtgagcctgaaagtagggtctcagctttcttgatggcatcaggaggcagaaaactaacttttcaatcaatggtaccgtatctcagcccctatcatacgcttgctaacatagtacacaagatgttggactttttcttcttcccggactaaggctacgctgacagcattctcggagactgccaggtacagtaacaagtcctctctgtaaaccagctttgataaaattggaggtttgaccatatgttctttttgttttttgaatgtctcctcgcattctttggtccactcaaatttttgacacttctttaaaatgttgaagaagggaatgcacttgtctgttgatctggaaatgaatcggcttagggcgaaaacttttccggtcaagctttgaacatctttatgcttcttgggggaaggcatgttcaataaagcttgaattttttttttcaggatttgcctctattcccctttggctgacgataaatcccaaaaatttccctaattttgccccgaaagtgcacttcttcaggttaagttttattccgtaccttcagaccacttcgaagcattctgtgagatcgtccgcatggctcacgcatgttttagacttgactagcatgtcgtccacgtaaacttccatgtttcatcccaggaggcctttgaacatccggttaaccattctttgatacgttgcaccagcattttttaggctgaagggcacgaccaagtagcagtttacccccttatcggtcttgaagctagtgcattcttgatctgcaatgtgcatcttaatctggttatagccgcaaggcatccatgaaggacaatagcttgaacctggaggtggcgtctaccatctggtcaatccgaggtaaggggaagcagtcttttgggcatgccttgttgagatcagtgaagtctatgcacacctgtcatgtcccatttggcttcggcactagcaccggattggctagccactccggggaa

SEQ ID NO: 138816 - DNA, 676 bp, Cannabis sativa
tttctaagtcaatatcactagttacttaagtccataaatagacctattgagtttgtaaactttctcttcctgccctggaagcttataacctccttgttgctccatatatatcgtttcttcaagaattctattaaggaaaactgtcttgacatccatttgccaaatttcataatcgaaagcggcaactataaagagaagtattctggtggatttcagcatggcgactggactaaaagtgtcctcataatccataccttctctgtaaaaccttttacgacaagtttagttttaaaagtttcaacttcaccaccagcacctcttttcttcttctagacccactcacatccaattgaatgataatcatgaggtgcatcaacatattcccaaactttgttcttttttcatggaatccatttctaaatccatgctggctgaccattttttttcgttccgaacttgccattgcctatttataggttaatggatcgtatcaatactattaccagcgaccatattgatttcaccatctaagccataacgagctggttttgtggaaaccctctcactacaatgaggagccatgaccttctgaacaagaacatttgtggtagatttctcggttgtatctttctcagttggttcaactgagggggtgggattgtcttcttcacgagtg

SEQ ID NO: 138817 - DNA, 623 bp, Cannabis sativa
ataaaagggaaatcagttcctaaagcactgaaacataaattaaaaacaaaactaattctacaataaaaaaacctcataacacataataccttataaaactgattatatttttgtaaaaaaaatggaaatcaatttcaaaaaatatcgagacataaataagaaaagaacaagttccataacaaaataaataaacacaaataataacacacaataattcaaatattatataaagaaaccgtttatatttatcaactagttaaaaatttaagacaaaaaaactggtttcgtaaagcaactaagataaaaactcacacacaaaaaccagttaaataaaatagcttaaacaaaaacatacattcaacatgctccaacccaccaaataattacacacataccatatatacctcaaaaatactcattcattatgtttatataactggttttattctagttataaccggtttgagttatttcgtgttatttgtttttattaattataacattgctataaaactagttcattatattactgttatgaaaccgattctattttaattataactggtttaagttattttgtgttatttgtttttattcactatgttacagaactggttatattt

SEQ ID NO: 138818 - DNA, 888 bp, Cannabis sativa
  modified_base (40)..(43): a, c, t, g, unknown or other
ttgtacatgtcggggcggtgaggcctggagcgtacgatcnnnnggacatcagggcttttgttgtttattcgctgggcgacaaatattttgtaaacgaatagaaaacttttgtagctatattttgtaaacaggatcccggaatcttataagtataatatgttattttttaactagaaagcaaaattttaattgttcacgtttttctaataacctcgttgattagcgacgagctgcactgtacgttaaaaatcacgctaacacgcctatgcttgttagggtgttacactaagcatactagtctgatagacacacgagaaaatgtctacaaagcaacctgcaattgttggaatatattttaccaggacttagatttactaacaagtatgtttttaacaccctaaatatgaatttctaaaacgatgaaaataaacacatataaagtatgagaaaccttccattggttgtagcggaattaaattactccttcccctcaaatctctaacccttgttcctttctgtcgcaaagcataatcaagatctaagcccgaaactccttacgttgtttggattctttacaatcttacacactatgattgaggactaacttgatatgggtgggcatgcactcaatcactaaggcttgaattttaatggttctttagttatctaacaagaagaaaactaggtcaagagtcattttttggattatgagaccattcttttctttttatactgattcactagccagccatatgtcggcccaacactaattagatttttgctatttttgtcaatcatttttttcacaaatgccacattttgcgatttcaatcccataaatgtcaaaactatttatttaataaataaattaattatcaaataaaattt

SEQ ID NO: 138819 - DNA, 903 bp, Cannabis sativa
  modified_base (143)..(164): a, c, t, g, unknown or other
cataaaaagacctaaaaacaaaaacataccatataaattggtcaaatttaaatgtgccatatttatcataaaaacttttaaaatctcatagtacgtgtaattttctctattaatattgatcgaaataataataataataatannnnnnnnnnnnnnnnnnnnnntaataataataataataaacacatcaaaaatattgatgatgataaaacagggtcgaacatcataaccaagcctcttttagctcggatcatcataactacattaacaaacaaagaaagaaacaaacactatatgacatgtaatatgcaaacatgattaaaatatagacttggttaaaattctaggcaaaacaagaggatgaagattgtgctattgcgaaaaagaaactataaatatatatagagaaattggcggctaaatcacttgaactttatggtttgtaacacttaacacaaaaatcgaaattttggcggctaaactacctaaacccttgttctgttttgctctgcacacctccgtccaaaaatcacagttaagtgccacggtggactatccacgtgtacacgcttgtatatgtggcaagtttttagtggttcacgtaatattaattttaaaaaataattataaatattaaaaaaaaataaaaaataaaaaaaaaattcttttttactttttttaatttaaaaaaattaaaaaaattaatttatttttatttttactttttcttcttctttcttctttcttcttatttttctgcagtaagaaaaaaaagtaaaaaaaaaaaaaaaaatttaaagatactccttagattccgtcacccgtgcaccatgaacaactgatcaaccatcgtcttcctcacttgtcccacctttcccccatttttactctctctctctctct

SEQ ID NO: 138820 - DNA, 541 bp, Cannabis sativa
ttaaatttaaagtgtaaattagaagaagataaatttaatataacaaatatgaaaatgaagaacaaagagaatcaatatattagaaaaataaaaattgcatgaacttatacttgagtctcgccaaagaaaatagcctagaaaatacattgtctttaaaccaaaattaataaagtgaaagagagaagaagaaaagaaaaaaataaaattttggtataataacactaggtaaaaatttgatgcctttgcaataattttgggtcctatttatagagaaatattgctcataaaactagcattttcgtgtaccactttagttgatttagtggcataaaaagctgatataaatgaggaaatagtagagatagtgggaacatgcagacatgtggtgcgcgtctattgctggctttatgcatgcgtcaatgtgtgatggaagggaggaacccgatgggaatggaaccaattcaatcacgggccaactttttgcatgaaataaaggatccattgttgggttttatgccctaactaaaactcatttcaatat

SEQ ID NO: 138821 - DNA, 512 bp, Cannabis sativa
atcagtaaaaaaaaattaaaaaaacgcataaaaatataaggttaattaggatttttttttctcaaaattttgacatgtaccaaatcataccctctgaatatttttagacattaaaaatttctcctgaacaattgagattgttagatttaaggacttttgtctaattaaattcaattctactatttcagtgattatttatgagctaaactatgctctccaaaccatgatatctaccaaatcacgtctgtcgaactttgatatgtactaaattatgcccccgatactttcatccatgttagaatttttttttttaataaaattggacaaaaaaccttaaatttaacaatctcaatagttcagggagcatttttaacgaccttaaaagttcagggggtatgatttcgtttatgtcaaagttcggggaaaaaaattcctaattatagtcaaaatataaatgcaatattataactacatctaataatatatatataaatatataaattaatatatat

SEQ ID NO: 138822 - DNA, 517 bp, Cannabis sativa
actccaggaaaatccatattgaataattgatagcaacgagaagcaacatgaccagttcttgagcataattgacagaaaggtttggaacctgaaggaacttgagagttggaggcagcagacgaatttgagaaaccacgacctactgcagaattgtggaaagattggccagattgagtatttctcgtggagatagcatacggatttcagacacctcgtccctgattggtgtttgtgttgggaggagtgagagatagagaatctgcattgttagagagattggggaaatattgtggtttgaaacaagaaccacgattagtagctaaatttcacagaatcaagatctctattgtgattctccatacgatgttattgagacaaaagcaaagtctcgattttagccacaaagtagggagattcttgagttgacactaataacaaaggtgtcataagcaggaggcaaacctttgaatattgcatcaacatgctcttttaaagtaacaagatggccaacagatag

SEQ ID NO: 138823 - DNA, 1041 bp, Cannabis sativa
tggtcactaaatcgaagatgtttttgttctgcggaaatgagagactcaaaactcttcatttctgagtggttttcccatgatggaaatgagaaatgcgaagttgtgaagttgaattctctgacttcattgatcttagttgttgtgaaaaactagatgaacggtcgagacgaaattagaatcagataagcagaacccaacgcatcaagccatttgtcaacctgggcactgggtgcttattttggagctttcgagatgtcgttttgatacttccaaggttctaaaacttgaggacaaggtctcttaccttatttttgaccattctggagagaattctcaaatcagaattggcatttgagtgatcaaaaccagcgcaccaggttgattgtcaacctgggcgctgggctcagctttgagggcctcgggtttgtggttttctccttgagtttgcttgaatcttcattatttatgatgacgaaaaaaatgcctgaaatacttttttgagaaactgattggaaatagcccaggttgacaatatcaacctgggcactacgcctagtgccaagtgtaaacctaggcgttgggtcccagttttggccccttagaagttttgtttggtcttcaaaaatagttgaatcttaatatttgctgaaaatgaagaatattcccagaagagctctcagaaaacatcatcgaaattggcctaggttgacaaaatgttaacctgggcgctaggccagccccaagagtcaaccgaggcgctaggccttgcttctggcacccaggaagtgttgtttcttccccaaaagtacatgtcttcctgtttttaatgaagaagaagatgatgcaaaagtcagatgtcgatttgacacttggaagtcgcccagattgataaattgtcaaaacctgggtgctaggtgcaggttcatttaatttcagctctcagggccttggtttgattgctcaatgtcttcatggtatagaatactaaaagatagtgagttgaaaatgagttatcaaagtctgaacttccattctagagtt

SEQ ID NO: 138824 - DNA, 918 bp, Cannabis sativa
gataaaaatgtatgtcctggatcaagaacatacaagcttcgtaaccaacatgtgactctattgttataaagtcatgccgttcggactgaagaacgttggggcaacgtatatgcgattggtaataaacgaacgaaaaatgttcgcaaaccaaatagggtggaacatggaggtttacgtcagtgatatattggtaaaatcaataaagagtagggatcataccttagacctggcggaatgctttaagatattaaagaagtataacatgaagctaaacccgaaaaaatgttcctttggagtttcctcagaaatttttttgggagtcatagttaatatgaggggtattgaagcaaatctcgaaaaaattaaggcattaatagacatgccatcaccgacaaagcctaaggaagtataagccatgacaggaagaatggctgcacttaactgagtcatttcgaagtcaactgataagtgtgtaccattcttcaatatattgtgaggtaacaaaaagtttgagtggataaaagagtgcgaaaagggctttcagaacataaaaaggcatctagcgacgcctctactaattttggcaaaacccatcactagagaaacaatatttctctatttagccatctcggaagatgcgattagtgcaagtatagtgcgagaagagggcaagcaccaacaacctatttactatgtaagtaaaatgttactaggggtagaatccagatatccccttctagaaaaactcgcgttgtgcctagtccatgcgtcttgtaaactacgaccatacttctaggtgcaccctataaaagtgttagctgatcagcctttgagacaagttttatcaaaatcagatgcttttggaagattgataaaatggtcaattgaacttgcgcagttcgacataacataccatcc

SEQ ID NO: 138825 - DNA, 644 bp, Cannabis sativa
acataaatgtaaaagcaataagaatacaataaatatatagttgatatatatatatatgatatatagtagaaatatagtgtatatataaaataaagaggagagcaaaaaacaataacaaaatagaggatgaagaagaactcaagttagctatgggggatcaccaaacgcttgaaaaattgttgatgtctacaagtgaactaaagacctctattgatagtgtttgaggatcacatttgaaaatcaaatcctttcatcacatggctgttaccagcactttaattggtgtttaatgggattaaaacgttaggcaagagaactagaaacatgctcaattaatttatttacgttcgacgttttcaaaaatttggttccaagtgtttgaaaaataaccataaaacaactgtttcctgaaaactcaatatttagtttttgtaactccttttcgagtcaaatctttctccaatgtcccaatacccatttaaataatatgattgagtattgtaactgcttcaaacagctagaaacctatcccattaattttataatttccatatgtaataactcacttacttacatattatcaattgtgatccttaggttacaatctattttcagatttgtaactctcatatgttacaatttta

SEQ ID NO: 138826 - DNA, 842 bp, Cannabis sativa
atccattaagctttttctcctccctcataatttcaacccaagcacttggttgttgggcagctgacaattcagctagtatctttttagatttatcgatttcctcataaagtttatttttttttcctcttattccatgcttgtaattcttcccacgacaattaaacaaaaaaaatacagatttgaaaaaaaaaactaataccgagagaggaagggcggggttcattgcctaacgtcttcaacaattgacgatcggagacggggccttgtggcccactgccctttttcgtcaaatagatagatagacgagaaaggagagtgagcgtgagagagaccgagagagaatcggggtagggatttttgggtcttggggttttgtgggtatatggattggtagttaatctgggtattgggggtttggggtttgttgatggctaacagagaaggagagggagagctgtgagatagagagaaagagagagattatggtttgaagaagaagaagaaaaagaaaaaaaaatttaattttttttttccgattctttaaatttttaatttgatttttaaatttttaaatatttataattattgggaaatttgtattctcttatgctaaatggaagaattaaaggatcttttaaaggcgagaagggtcttcgccaaggagttcctatgtccccgctcctttttgtgctcattatggagtatttgactagattgcttatccaaaagtcaaaggagaaagagtttggttttcaccctctttgtaaatccattggcctagtcaatctttgttttgcggatgatctaattatcttttgcaggggtaatgagaaatctgtcaa

SEQ ID NO: 138827 - DNA, 546 bp, Cannabis sativa
  modified_base (473)..(476): a, c, t, g, unknown or other
ttactttattgatatagaataatctggattacattgaaacagagttttatatagggcataaaacccaacatgagaatccattgaatttttcctaggacgatatgtagtttcttcagggcaatttccatcgttttgattgttatcatccatggatagatttctgtttataaggatggatttttctgagttttatcactaaggctctcaacaaaagcgccaaactgttaacgtagaattttgttaaccaaaattaatgaaccttttcgtaataaatactttacaaatataataataaacaacttagaaattagtaactccaaatatttttacgaggttttgtagttaaaattttcatactccacgagtctttcttattaatgatatttttcaagtacagaatacaatatcagaataatctaattttctctcaaaattcttcgtccctttttttatggaatctacccctatttatnnnnatataggttggcagttatttttttgggattagtttaaaatgtaactgttcatgaaacgtggacaatttcc

SEQ ID NO: 138828 - DNA, 707 bp, Cannabis sativa
  modified_base (670)..(682): a, c, t, g, unknown or other
ttaattatgtgacatttgctatgcttatgagatcctattcattttttgtaatttatgtgctctatataaatagatctttttcacttttcattatcatcatacctttcttttttttctttaccaatatcttatttctaattttaaattcgttttttcctttaagtttgattatcacaaattttaatttttgttttttttgttatgacagtactcaagaatcaacacttatcaatgttgtgattaatggaatgttgaggtaagtatttttatgttgatgtagggttcatactaacattgaaatatagaccaagtatttttagatggtatattgataaaatcattttatattttttttattttatacacttgactcattccattgtttttatatacttgattaaattgttattgacaattttatatattgatggaggttagaataaaaaatctaaaaatattagatcaccaaaagttaaataattaaataggtttaatctacaatttttgaaaatataacgataattttcatattagataattgttgaaaatataacgataatttttgaatataatctacaagcaatattagatcaccaaaactaggatcacaataattttcgaaaataattaaataataaaaaaaaatcggtttttattaaaataaaataannnnnnnnnnnnnaaattaaacctacaattttttgaaa

SEQ ID NO: 138829 - DNA, 672 bp, Cannabis sativa
  modified_base (537)..(539): a, c, t, g, unknown or other
agactcaaatcatcacccgaacccagagtcggatccaaactcgaccaaaacccgtagcccgtgacttgaaactggaatcgaaactagaagcggattaggacggaagaataaaccatgacatagacatgaacatagagccaaaactgtaaccggaacaagacccagactcggtcaaagagccactctgggattgggtccaaaatctaaatccaaaccagaacattaaacatgactcggggcccagaacaaagacataaattcaaacaagaacattaaacatgactcggggcccaaaactgggatcgaaacccagactggaccccagtctcggtcttggacctagacccaaacctagaccctgacttgggacatgaattgaaacaagactaggacccgtgattgggatgcagatcttatcccgtaatcatagaaccggagcatggacaagacccatagtcgatgtcttgatcgggaactcggacaagcacccaaagctggacaaggacctagacccaggcccaaacctaggacccaaannngaaacttgaacaagaaggtgatcaggaccatggaatagaaccgggaccgtgacctggaccttgacccggacccagaactaaaccgaacctagccccagaactcgggccaagacctagtcccggacccagacta

SEQ ID NO: 138830 - DNA, 657 bp, Cannabis sativa
tcaaagtccaagccgatgagtttgaggagaagcttgctaagaaagaaatcgagatcgtagaacggtgcgataaagttggttttcacgctgtatatcgggcctggcttttgaaccctaacacatggatactaggttcttggaggagaaggaagaggaaactctagctctttgcgagaagaccaagatggaggaagaagacggtgaggtcaaggaagaagaagaagatctttccaagtctcccagcatgtagacttggtttgtttatctgccttttttcttttaggaaatggccctttggccgagacaatggttttgcccctagtggcacttttttttgtaaagacaaatctgcaaggttggacggccaactttgctttttaatgcctcacacttttaagtgtaaactttattatgtgaatgtttgcttgcattttattcacaatataaaatatcacatgcataaagtttattaggggtttccattgattgtcctttcctttgacgttaagtagttaatttcttactttacgtgggagcagcttatcttcccattcctcaatctgcgagccatcatcaattccatctcgcgatcatcggaaatgatcttattttaagcacattcaaatatatttttaatgaacttgtcatcttatatat

SEQ ID NO: 138831 - DNA, 703 bp, Cannabis sativa
catgccactagtcctgctccctgcatcatatattggcctttccaaagaaaggctctacaaatagattcaagctcacgaattacctgctttggtagtctgaggaattggcaagaataaggatgtattgtggtaagaacgaaattgatgagtacagcccttcccgcaaatgagatattcctggtgctccaagatcaaattcttgcagtcatcttttttgtcaacactgtacattcttgctttgaaattctcttgctacatacatgtatgccaagatatctgaatggtgtctgttgtttcgagaatcccgaagcctccaaaactctagtgatatcagattcaggcatattgctgcaataaattacagactttgccttgttgggttgcaatctggatgaggctgaaaaagagtttcaagccttgtattaataggatgatgcttttgtaatcacctcgacagaaaagtagaacatcatcagcaagctcaagtgattgagcttaaaggcatcacatctatcatggaaagcaaaatcactcttatctcctacttttttcaggattcgggacaagtattccatgccaataacaaataattgaggcgagaggggatcaccttgtcttaatcctctctttgattcaaagaatccatgaagagatccattgaagaaaagagagaatttcggagttttgatgcagttcattacaa

SEQ ID NO: 138832 - DNA, 1010 bp, Cannabis sativa
  modified_base (411)..(414): a, c, t, g, unknown or other
gctggtggtaaggctagccaatatgctacctacctaaccttctcgagtatttgaaatggctcaatgaacctagggcttaacttgcccctctttccaaagccactaatacccttcaccggagaaacccgtaggaaaacatgttctcctgcctgaaatgtaatgtctctgcgcttcggatcaacataacttgtttgcctgctttacgaagcaagcatctgagccttgatcgtgtttatagcttaattggtcatttgaactaattctagacccaagtacttcctttctttgatttcatcccagtggattggggagcgacatttcctaccatacagtatgtcataaggatccatccctattgtactttggtagctgttgttgctggagaattcaatcaaaggcaagtacttactnnnngaaccctcaaagtccatgacacaagctcgtaataagacttctaatatttgaattgttctttttgattgcccatcagtttgaaggtgaaaagttgtactggactttagctttgtgcccatagctctttgaagacttacccagaattttgatgtaaactttggatctctgtctgagacaatggatttaggagctccatggagacgaactatgtaattcacatacagttcagcatactgatctactctataggtaatctttactggtagaaaatgagctgacttcatgaaacggtccactatgacccatacagaatcatacattcccgtggttctaggtaaaccaaccacgaagtccattgtaatatcctcccacttccattcaggaaggactaactggaaacttaattatttgaattttcatagaaaatatatttaagttgaaaattagtttttcaaactaattttggatcaccatttcagaaaaaaaaaactaattttggatcaatttaaattggaatattttaaatttaataattaagtagaatcttcttgaaaattagttcttcagatattctttaaaatatttttaagttaaaa

SEQ ID NO: 138833 - DNA, 979 bp, Cannabis sativa
  modified_base (133)..(134): a, c, t, g, unknown or other
gtttgggtcccggtctaggttcgggttcaaaacctagtctcagttcgcgtttaggtctctgtctcggtcttaatctggtttcatgtttgggtttaggtcctcctccgaatcctagtcctagttcggttctagnnccatttgcgattcagagttcgagtttgggtttgagttcgggtcgtagttcaagtcctggtctgagtttgggttcgtgtttggatttgagtctaggtccagatcagggtccgggtgtgggttcgggtcctgggtcttggtctaggttgggtccgagtcccatgttccaatcccgatctgagtctggattcagttatgggtctaagtccttcgttcggatcctggtctgggttcgagtttgggtttgggtccgggtctagctttgggtgtgattctagctgtgggttttagttcgggtcgaagtttgtgtcctggtttgtgtcaaggtctggaccatgatatgggtctaggttcgggtccaggtccaagttcggttcccgagagcgggtccaagtttggatccgggtcaggatctcggtcctgatctaggtcaagcatttcgatcccagtctggttcttggtctgagtccaggttagtatcaagatcaatatctaggtcaaagtttgtctgatttcaggttcggtattgggtcccaagtccaggtttgggttgggattcgggtccggctcccaattcgggactaggtcatattcggagttagggtcctggtcaggttacggttcttgatctaggtccaatttcagttatgatttcaagtccaagtcctagttccagtgttttgggtcacagggcacgggttcgggtccacttttaggtttgggactaggttcaggttcgggtgtgcattcgggtccttgtaagggttcaggtccagggctgggtcccaaatccagccaccgactacgggtttggtccaagccttgggtccagatcgggatcccaatc

SEQ ID NO: 138834 - DNA, 1122 bp, Cannabis sativa
ataaaatatagcttctaccatttaagtattctctccgaaattcttctaacaaagtggtatcgaagccaagtttatgaagaaaaatggcaagtgcaggaatgatccccttccaagtttcaatgctcaccaagagcaactatgacaattggagtattaagatgaaggcattactaggagctcaagatgtgtaggatattgttgagaaagaccatatggagcaagatgatggtgctcttttccaagcttaataagataccttaagggattcaagaaagctctctacctcatctatcaagcggtggatgaagttgtgttcgagaagatcttaaatgtaatgacgaccaaagaagtgtgggagaagcttcaagcttgcaacaaagaagcggagcaagtggaaaagatttatctttgagttgttaaaagtgattttgaaactttatcactttgtaattatttcactagagcattatcaattgtcaatcagtagcgaagaaattagtgaagtaaaggttatcgaaaaaattcttcgtactgtgactccaacctttgagttcattgcaacaatcattgaagagaatacagatatagaatccatgaatattgagagactcatgggttctttacaagcctatgatcagaaacaaaaaaggaaaaagaagcgaaaggagaaaatggagcaattactaaaactcaccctggaagaagaaaactctgacaacattaaaatcaaaaaggatgaggacgtgaccaaggaagaaaacgtggacgtggtcaaggacaatgaggagaaggaaggggtggctataataaaaataattttaataatagagaatgaagtcaaaattcacaagcatcaagaaggcgcagaagaggcaactcattgtcaaggagagacaaatctctaatcaagtgctacaattgcaacaagtacaatcattctgcctctgaatgcatatcaaggagggtcaaagaaagagccaattttgccgaatacaaaggtcgagaagaaggaactttgtttcttgcttgtaaagacaaagatgaaggtcaaaaaaataaatggtatattgacatcgatgctagcaatcatatgtgcagaggaagaagaatatttgtggagct

SEQ ID NO: 138835 - DNA, 1222 bp, Cannabis sativa
  modified_base (214)..(219): a, c, t, g, unknown or other
taagggcgaactaggatcaattcgcctagagccatggagatatgatagggattgaccctaacattatctgccatcatttaaatgtcgatccaaactacccagtgaagaagcagaaaatgagacccttggattccgagagacaaggggcactaaaacaggaagtggacatgttattagtcaatgactttatacgtgaggtgttttatccctcgtnnnnnnccaatcctgttctcgtcccaaagcctaacagaacttggagagcttgtattgatttttctgatctgaataaagcgtgcccaaaagactgtttcccactacccaggatcggccagttagtggatgcaactgttgggcacgagcttatgtcatttatggatgcatattctagatataaccagataaaaatgcatctccaagattaggaacatacgaacttcgtaaccaacatgagactctattgctacaaagtcatttagtggatgcaactgttaggcacgagcttatgtcatttatggatgcatattctagatataaccagataaaaatgcatgccccagattaggaacatacgagcttcgtaaccaacataggactctattgctacaaagtcatgtcgtttgggttaaagaacgctggggcaacatatcagcgattggtgaacgagatgttcacaaactagatctgccgaaacatagaggtttacgtcgatgatatgttagtaaagccagtaaaaagtgggaatcataccacagacctcgcgaaatgcttcaaaatattaaagaagtataacatgaagctaaacccaaaaaaaatgtttctttggagtttcctaaggaaattttttgggattcatagtcaacgcgaggggtatcgaagcaaaccccaaaaaaatcaaagcattgatagacatgctatcaccaacaaagcctaaggaagtaaaatccttgactggaaggatggctgtactcaacagattcatttcgaagtcaactgataagtgtttgccattctttaatgtattgcgaggcaataagaaatttgagtggacaggagagtgcgaagaggcctttcagaacataaaaaggcacccaacgacgcctccaattttggcgaaaccaataactggagaaacgttactcctctatctagctatttcagaatatgcaattagtgcgactatagtgcgagaagagggtaagcaccaacaacctatttactatgt

SEQ ID NO: 138836 - DNA, 600 bp, Cannabis sativa
cttaggaaagaaagtcattgagtttttggccgtcttgatttgaatgaggggattttatttctttataattctttgaggactaccaaaatgaattctacagcaaagaatacaatgaagacgacttattctattttgttgctccccctcctttgtttttttgatctccttggattttggaagaatatgtcccatgttcttgatttaggttctgacccgaaagctcctctaagggttgtggagattgctagttttccatctcagcagaaaaagtgagtttttgtttttaagtttttcatatgttgtataatatttgtttaactgttttattttcctctttgaaaatagtgattgcggagcatttgtggctgcttttgcagagttcttcattcatgggaaagatgtccctgatgactttaatattgaagtttaccgcactcgtcttgctgccctcttgttttcgtatggtcaaaggaaaaatgatgaaagcattgatagtggggatgagaagcagagcaagtcttccaagacttctaaattgaaaaagtagggtcattttatgagaaactttgttgtgcttggttgattttcatttcagacaat

SEQ ID NO: 138837 - DNA, 721 bp, Cannabis sativa
taaattgtgcaaaagtgatttttcatgtaaaaatttcataataaaagttatcacttacattttttttttccactaataacgataaaatgctagccttaaaatttcaaaggccatgtagttattaataacagttttttttttctattaatattgataactaaaataacttagatacttaaaactaatagaagttagaaaaaaagagaaatgagataatttagaatgaaataaattttgaatatcacaccttacctttatttagtctctattttatatataacatcaagggtatgtaatatttatacatgtatataaaaaaaaatggagtgaaaaatgataacccaaaaaaaacaaataaatatattgttgagatatttacatagaagtgaaaggtatgaatacttgacattataaaatgatgataaaaataataataataataataaattgaataaatataaataaaaaatagagaaaataaataattagaaagaaacttcatataaaatgctatttttttagcatatatgatcatccatggcaatttgttccaatctttttaatcctcttcctaaaattctttttccttgccatcctcatatatgtgtcaaagtgtttgtattttttatgtcttcaactcatctatatatattatatgtaaatatgaggaggtattgttggattttatgtcctaaataaaactctttacaatctgattagt

SEQ ID NO: 138838 - DNA, 680 bp, Cannabis sativa
  modified_base (503)..(505): a, c, t, g, unknown or other
agtagaaaataatcatgattaaatgcttcaaattatttattttcacgatttatcagtgcacttttatactgacgtgataatcaatgatgtggtttacttacacctgtataagtggaatttcttttccaggtaaagtaaagtagtatcgcatgtatcagctatacatcagacttgaccgatattgacagaagaaagaatattaaaaacttacctttatgtcttttctaagtcaatatcatttagttgatcttagatcaattaatcttaatcctaagatggttaagttctagcctaattgtagtatatgggttctttgtcttgttcgttacagctaatcaataggatcggcccaatacttacatattgggaattcggtagttcaattaagtgagagcagtaatcataaatatagaatctataacttctattataagtgaagcgatggtttttctagagcttggcttaatgcgataaatgatagagtactcatttcagtaattatnnnagtttattgaaatatcatttacaattagctaagtgttttaaggagaaaatacattggatggtaaaatggtaaatctatccctactcaatgtaaaccatcaggggataattgattatttatattgtaacaatggataattcataatgtatccatatttggtatatagatcattcta

SEQ ID NO: 138839 - DNA, 790 bp, Cannabis sativa
  modified_base (28)..(36): a, c, t, g, unknown or other
tttgaaaaaatgcatgtcctctgatttnnnnnnnnntgcggtttcgaggtacatcaacataaaatgaccatcttttccacttctactttgaattctatccataggatcaaacatctttctgatccgacgaaactgatatcgagagtataaagtaagaaaaaggaaccacctttgcactatttcctccattttagaaatcctgagaaactcttaagcttctttgtaaagaaacagcatcgagttttctcgagaatttgcatgccatccctgaccttgacattttttctgcgagtttcctcggacttcatatttttgaagagatccttattgtattcaaaagttcataggctgaagggttgtatatcatcccaagccctaacttcaaacagtaagtaacttctcttcttaatatcttaaatgcttgttatgttgcacttctgggtttaattgctgcatcatttgtttgtatcattgccatctcatttgattttagtaatttttaaggttgaactgtgtttgggtcaacaatagggttcaggcaatatgtaggttttttcagaaccctcaactcaccatctttaggtttgataaaattctttccagggattgggattgctttcttcttgcggtaatatcccaatctggttcaaaaaatttatcgtccgggagacttagaacttgagtttcctacagaattagcaatcccttctaaacccaatccttcaaaacccacatccaaattagagttaaatgatgctaggtttagggaacatttagtgagagcctatca

SEQ ID NO: 138840 - DNA, 566 bp, Cannabis sativa
  modified_base (128)..(132): a, c, t, g, unknown or other
  modified_base (197)..(209): a, c, t, g, unknown or other
ttttaaatattttttttaaatagaaatatcttaacctattttccagatttatgttacatgtttgttatgtttgattatttatttatttatttattccaaagtatttttacaaacttattatttatttnnnnnaaattgctatgattaacttgttgagagatctaatgatctaattttaatcatacttcaattgtcannnnnnnnnnnnnataatttgtaataggtaaattttttaatttctttcatctgtgataaacctagatgcatatatgaagcccatttaagtttagttaattaaatgaactaggttgctaaaataaaatatcacataagatagttttatttaggcccaattagcagtgtgctcattcaatgaataataattatttatttaatggttaaattcttctcctttgagccttgtgtgagagttagggggtcatagtagtgggtacgacatactggacccatccctccctcacacgaaccaccccaatggagaaggcccattttccttatttaaataattctattaggctaattatattagtgttgggttttatgcc

SEQ ID NO: 138841 - DNA, 1603 bp, Cannabis sativa
  modified_base (40)..(44): a, c, t, g, unknown or other
  modified_base (916)..(922): a, c, t, g, unknown or other
atctgagcaatggcattgagaatcctcttctgtacataannnnntctactatgatataccgtgcagccttccttctcatttttttgatcttcattccgattatctgggagtttcccagtgttgaggtaggcggctattggtgtcatccagtttggggaagtatcaatcatttcaatttcttccgtgccaatgatgctaggctcttctaggaaatggataggaaccaagtttgccttgtcacttacattactgcttgccaatcgagctaacgcatctgcaattctattttcttcccgtggaatttgtctgagactgtagcttttgaactgtgcgagcagatcatgtattttgctcagatatgttatcatcttttctccctgagcctcgtattctccggatacatgacttaccaccaggtgtgaatcaatacagatttcaatgtgttcggctttcatctcccgggctagttttaggccagtaattagagcttcatactcgacttcgttattagatgctttgaacccaaacttcactacagcgtttaggtgttgcccataggtgtgacaagggggcaacacctgggggcaaagtctgctaaggcttatctgtagctgacccgtctacatgtagtttccaggtcggcttatcttcactattacttggctgaggtgtttgtaccggctcagggttgctttctggtatgctttcttccttgtctgtgcattctaccacaaagtctgctaaggcttgacctttgattgctgttcggggttggaaagtaatttcgtattggcccaactccactgcccacttgagtagccgtccagaagcatctggcttttccaatattttgcgtaatggttggtcagtgtaaacccgaacaggatgagcttgaaaataaggccttaactttctnnnnnnnagaataaggcagtaagcgagtttctcttctctgattagcacggaactcacagcatgctccgtgacagctaagtatattccaagttcttctccatccaggggttttgagagtacgggaggtttcgcaagctgtgcttttagctcttggaaagctttttcacattcctccgtccactcgaatttcttgtttcctcgcaggatcttaaagaatgggacacacttgtttgttgattttgaaacaaatctgctgagtgcggcgatccgaccagtcaagctttgcacttccttggttttagttggcgacttcatatctaggagggcttgaatcttttctagattggcttcaattcttcgggcattgacaatgaagcctagaaactttctcgagctgactccaaaggaacaccttaagggacttagtttcatattgtactttctaaggaccttgaagcattcatccaggtcatctatgtgccccccagccttcctggatttgacgagcatgtcatccatgtatacttcaatatttcgtccgatctggtctttaaacgttttgtttagcgatctttggtatgtttctccagcattttttagaccaaacgacattactttgtaacaatatagaccaataagcatccatgaagcttagtatttcatcccctactgttgcatccacgagctg

SEQ ID NO: 138842 - DNA, 526 bp, Cannabis sativa
ccattccaagcccgttgaatcgcagtaccatcgagttttgtgagtcggtacgtagcgtcaccaatcttttctgcgatgagatatggtccctccaaattatcgccgaagaccctatgtgctgggttcttggtatttttcattactcttcgaaggaccaagtctcctactcgcaggactcttgccttcaccttagaattgaaatatcttgcgattcgttgctggtaagtcgcgtttttcaggtgagcctgatcgcgcatttcttccagtaggtcgaggtagagcgactgtttttcttcgttttgtgaaatgttgaaaacgtctcttcgtaaggaacctgccccaatctcgactgataccatggcctcgcatccataggaaagcgagaaaggagtctcgccagtcgtggattgaggagtcgtgttgtatgatcatagaacttgcggaagctcgtctggccatacccccttacgctctttgagttttcctttgatggtgtgctttattattttattgactgcttcagttt

SEQ ID NO: 138843 - DNA, 1483 bp, Cannabis sativa
tcttggtcagggacatgcatttttatctggttatatcttgaatatgcatccatgaacgacataagctcgtgtccagtagttgcatccactaaatggttgatccttgggactgggaagcaatcctatagacacgccttacttaagttcgagaagtcaatacaagttctctaagttccatttggttttgggacaagaacagggttggatatccataaggggtaaaatgcctcgcgtacaaagtcgtttactaacaacttatccacttcctgcttgagttccctttgtctctcagaatccaagggttgcctcttctgtctcttcgctaggtaatttgggtcgacattcaagtggtggtagataatcatagggtcaatccctatcatatctgtgtggctccaggcgaactgatcctggtttgccctaaaaaacttattagttgctattttaattgttcatccaggttcttcccaatgaatacacattttgtgggattcactagatctaaaataacaacctataactcctcagttggtttcaataaattccgttcatcttgaatttgaggatcaagatcttcatcctgcttctcgtcttctttagtcacgactgccattagctagtgatcgacctttctattctgcagctctatgcagtagcatttgcgagcccgcatctggtcacctcgcactactctcacacctatcggtgtctgaaacttcagggataagtgcttaattgaactaattgtccctagttcaattaaggatggtcgacccagcaatatgttatacgctgatggcaggtcgacaactagaaagtcttgcataatagtggtgtcctttgggtacgggttgtggcatgccccctattggggtttgtatacgccccttccctgttggtttgagaagggcgttgacgatgtcttggtggtaacccacctatcctaggttaagtcccaggatttccctcgttcccacgagggatttcctgttccctagtcctaggttgccttctgttctcatttttacgagaaggctctggttggtcatttggttgttcatttttaaggggagcctcagtttccccaagttgttcttcctaggcgttctgagggtcctcctgagccgtctcttgcctcctggtttgggagccgcgaggtctacctcgtggtctcctcactccaggattaggttagttttgcgcgttgttttcctgtgccgccctagctgaggttgcctcgcgttcgaactcagcgtttcgtcaatttgcctcttccagacgttgcctgagttgatgatattccaacttgacaatcggtatgtacctcgtgggatcataggcgccatcatccatgggttgatcaccaccaacacttgtgttgggtacttcgttccctatttctgggttttggccaccttcacgttgggcccttcttaaccgtgccgtgtcgatcgtgttgttcgtgagttgggaggcctccgtg

SEQ ID NO: 138844 - DNA, 514 bp, Cannabis sativa
ttgatcttagagatagagctcaaaagcttgctcgactactgggggatgaccgaaatatcattcagttgacctgcgaggacaactttatgaagtacaggctctatccgaaggatttcattcctaagccagtgaaggagaggaagaggaaatctagtgctggacgggctgagggagctcataaggagaatgaactcattcaactcaagcgtgaagctaagttgaagggaggtgcaagggccaaacagtatgctcatgagtccttgaatcctgaagatgagggtgaggaagagcgggtgaatccgcttaaaaggaggaagaaacttccggcccagcctaggcccattgaacatgccattcggattagggagcctagttcacctgctcggccaccttcccccgtgcgaggaaaagggaaggccgccctggcggaggtgagagactcatcaggtgatggtggactctcgtgtcttgctcagacaatcgctttgcaggatattccgtcttgtttttaaac

SEQ ID NO: 138845 - DNA, 726 bp, Cannabis sativa
aaaaaaaaaaaaaaaactaaaaggcattacaattaagtatcgggtattagaataatttctattttaagaatataatcaataaattaatttaagataaatgaatattttatatttattgaatctagacgcaattaatttattgatattctatatatagttagattacgatttattaaatatttgaattcacgatttaaatttctaaattaattgttaaaatattctgacaattaattgtggcagatactttgataaaatgtctcacctatataaatatagggtctcggtccctgagtttactactcattctgtgataatagtaaatccatctaaagagagtagagagagcttggacatcaattagtttccttcgcagatcaacgtttgtgtgggaatgaagctcgaagaatcaatggttggaggtatttcgatcctttagttatagtgcatatatgttttattaattccgcactttatacaataatatatatgcttcatttcatacatataaatttctaacaatatttcactacttaacaatcccgaaacaaatgaatctaatttttataatggaaattacaattaagactctccacgatataacttactggtaattttaaagatgtaattaaatattgatctacgtgaatcaatataaccagtgaagtatgttagaatctaattaattaactatatttccaaatggtcaattcatcttaacaaaat

SEQ ID NO: 138846 - DNA, 1008 bp, Cannabis sativa
  modified_base (955)..(983): a, c, t, g, unknown or other
atgttgattacattaatggtaataaataaaaaatttggacatccacataattaatactatttataacattattaataaagtttatattttttaaacttatcaattatatatatatatataagttaagtttaaaaactcattacaaaaaagaacgaaatgaaacccttttcttcggtgcgatgaaaccctcttctcctcaatctatattcttcgatttcaactcgaaacctagtaattcaagcacagtagtagtaggatagtaaatcattaaagagggaaagcttaaggtaatgattgatttcgttttaagtttaatacaattagttttatatagtgactttgtgatttatagcagttatggagattccgacttcatgaaattgttcttgagtagctatgagactagttttgatgtttacttgttgaatttgaggtgattttgagttacaaattgagtttagatcttttcaaagcctaagtttgagctttaatggcgttttccgtttaagagctcgaatttaatttttatttgtatatatggtatagatgtgtcctgtgaagtttggaatgatttggatatattttgatagtattttggagagtgcaaaatttagaattcttgtgccaggaaatggttaaccgtttttactaaaacggtttgtcgtttctagaaattccaaggagatcgaaaatagtatttttgtcataacttttcacttgggtgcccgttttggacgttctatataccgtttcgaagcttataaaaaactctacaatattgtgtatgttttagatccaaaatataagttttattttagtttatttatattgcgggatttgatagaaaatcctagattgtcttatgcaaatattaagcagtgttttgagatagacacttattggtttaccgttgttattaattttgttgcttgctcgtgttggaaattattttacnnnnnnnnnnnnnnnnnnnnnnnnnnnnnttattaacatcctaaataagaactt

SEQ ID NO: 138847 - DNA, 701 bp, Cannabis sativa
gataatgtccatgagtactctaactcatggagacatatgagtcacctcgtggtcctcatatgcctgtcctactagtcccactgactaggattagctcacttagcaccaaggtacaagaggatagtgaagagctgacaccagagtacccccttaaagaacattctgagcttttagccttctgccaggaacatacatgattttggcttagtagacatacggccaagccgtaaacccaaataaagggcgaataccaagtcccatcccaatctggacaatattgaagatatttatgaaaatgccactaccatacaaactaagcatcagcatgcacaccagcatgtcccaccagttgactaacttgtgggcatcacttagcttgtaacgtgccatcttggcatgcacgttacactgagcactgaataggaccgatctgttgctgaggaggaagacaatgagggggacatcaaagaccaaatggtggaggatcaaggcaaagtccatcctaacagtcgatctgaagtcgagaggaggaagttgctcgaagattgctctttgggggtttcaacgaggaagggtgtaacaccctaactaggataggcgtattacgatatttttaaacatactgtgcagctcgtttctaatcaacgaggtttatggaaatcgtgattaattaaaatttttgctttttaattaaactcatt

SEQ ID NO: 138848 - DNA, 1036 bp, Cannabis sativa
gagcttactaaaaagaatcagcgttttgtatggatagacaagtgtgaggctagcttccaagagctgaagcagagattaattacagctcaagcgttagccctaccctctgataaggagaaatttgtggtgtattgtgatgcatctagactgggtctggggtgcgtattgatgcaagctaatcgggttattgcctatacctctcgttagttaaaagataatgagcagtgatacctgactcatgacttagaacttgccgcggtagtgttttgctttgaagatttggtgacattatctctataaagagagatgtgaaatttacaccgaccataaaagtctcaaatatttctttaccaagaaagatttgaatatgagacagaggcgttggttggagtttgttaaggattacaactatgagatactttaccacccttggaaggtccatgtagtggccgatgcccgtagtaggaagggtctcgggcagatagctagtacggttaagatttcatgacctcagttaccagaagacatggtcagatctagcatcgagtttgttgcaggcaagcttcataacttgacgctgcaatctgctctgttagaacaaattaaagtcgctcaattaactgatctagagctagtaaagatcagagaagaggtatcagctggtcaagccagagactttacagtgtcagacagtgggatgctattgttcaaaaccagggtttgtggtcctgatagtgtaaaactcagaaatgaaattcttgaagaggctcataccactccatattccctacatcccgacaccaccaagatgtatcaagatcttaaaccttacttctgatggagcagaatgtggtagaattcgtatggagatgcgtaacctgtcagcaaatcaaggttgaacatcagagaccggcaggatttttatagcctttaaactacctgaatggaagtgggaagatatcgcaatggactttgtggttgggttacctagaactatgggtttgtttgattctatttgggttgtggtagatcgatt

SEQ ID NO: 138849 - DNA, 727 bp, Cannabis sativa
aaactttgatctttttgccaacgtagtttacgaaatgcgttagtaaaagttacttttaccaaggcagtagcgtactgtgttggtaaaaataatatttcttgtagtagggacagttggcttctctcctcattcagagccatgccctccatatctaattgaactgacggttggtattgcggtactaaatcgtgtacgtagcgaaataaaaatttatgattcactgtaccaaattctgagaatcaccatatgtatatatattatatatatattaaaagaaaggaaatttgcggcaaaaatacttaaaatatataatttgttgctaataaatacccaaattcaaaaattggtagcataaatacttaaatcttcaaaacaaactattttattggtacccaattcacagctccgttagttttttatttggatgccatgtgtcaatattatattagtcaaaataacaatagtaaaacagaattaattttaaatgattattatttttataagagatttattttttctttttttatggaacaaataaaaattgattaaaactataaattatattaaaaaatatataattaataaacgaatgaactgttcatcttcttcaacctgaaaaatctcaaacctagaaacttattcagctccttcaatccaaaaaattcctaatccatgaaatttaatcttcctcaaccaaacactgccaagacccctcctcgtcattcta

SEQ ID NO: 138850 - DNA, 586 bp, Cannabis sativa
acggagtagatgatgctcacaagacgtacgacatataaattttgtttttagggaagtgttaaggaagattttaatttaataaataatatgaaaaatttattagacaaatgttaaataacattattttttttttagcatattcatagctttgagaatgagcttatattagttactatgtaggaaacgtatagtgagcttatacacaaatatggagttgatgatgctcacgaagacacgacatgatataaactttgtttttagggaaatgctaagggaactttaatgtgaagtagtataagatgtgacattctcttaattaatactatgaaattaatagaaataattattaaagatagaattcaatgggtttaatttgggatggtaagagaaattttgatcttattcatcttaaaaagatatcaaaataaaaaaataaaaaaaattaaaaaaggaattactccatacactattttttttaatttttattttttcaaatttacagtttaaatttttaaagtaattgcagcaccagttgcaataagagtttctactttctatacgattttttgttgcaatttaaattgca

SEQ ID NO: 138851 - DNA, 1201 bp, Cannabis sativa
ttatatgttacctcttagtcaaaacaaaaaaaaaaaaaaaaacttcaagagcaatatttttatcattatatctaatatgttgcctcttgttcagaaaaaaaaaaacaaaacaagaaaaaaaaaaagagcaacatttttatccatttgtctaaaatgttgcctcttgttcaagaaaaagtttgtattatttaattctcatttgttatggctcctagaataaatgtaaaagattttctgttttcgttcaaaaatctgagaagctggtttgtggtactcttatggtagtttgcccaaataattcataacctttcttcgtctcaaaatttattcaaatgtttgtcttaaatagatctatccattccgagtgcccactttaaaatttccaactccatgagtgaaatctttagccgtgaataaatattttcaaacacctgtggggttaatagagttgagacttctacttggtacatttttcgaaagtatttatctgttatagtttgcgataagaaggttcaggtttggtgcacacactcacaactctagatttatttaaagtaattttgtaaagtttttattggcttttttataacattttgtttgaatacttgtgcaatttttaaaaattttgaccagaaaaatatcatgttaatattctttttgttcgcttgaatcgctagagactagcaaaaagctagttgggggttgtgattaaggctcaaattggtacattttaagtctttaattatgcatatataattaatataaaatgaatattttataattttaatgataaatttatttttattagaaatatttaatttactttcattttatgttatttttcaaatttaggaaaatggtatatatgaatttagagcccaatgacccaagcccattaaaagcaaatgaagcataatcctttgagctcgcgtgatatatgtttacaatcaaagttggatacatatgtagtagatcctttatttagggaaaattacattatatacccattctaactaaaccattttaatttttaccttcttttttctaatcatgaatttatacccacaattataagtcatgttcccgttctacccttcgtttaggttaaatgaaaaaaatattcaatcacttcttctccagaaacacgatcaccactcctccgctcctcttgtgtacggtcaaaactatagtgcatattaat

SEQ ID NO: 138852 - DNA, 587 bp, Cannabis sativa
ctcatcacaattttactagtgtcagccatgaaattactattataccctctctaccttaatgtatgtagttaactaaaatttaattaaataagattcaataaacaacttaatttatcctttactattttttttttttcaaatttaaaagttattacatagtaaattatattctcacaaatttcttttataatacctttggatttctgtaaataaaatcaattttaagtataatagtaacccataaaattagttggtatattaggtttattcaaatataaattttagttacttttttttgttaataatttatataaaaaaaaatgaaatgttacttctatcttgttcattttttttaatatcagaatatatgtatattttccacaactcaaaatatgatttaaaattgctaaaaagaaaaagtaacctcatggtatcttaaataattaaatagcataatatagtctaaaccttaaaaaataaattcataattttaaagtaactaatcaaaataggtaaccaaatgtgtattagaaaaaaaatatcttgaaataatttttttaattaaaagtaactaagtgatatattat

SEQ ID NO: 138853 - DNA, 1591 bp, Cannabis sativa
tcagaaaagataacccccaattcaagcaaatacattgtctgaccctccaaagctgagaccaaagaaagtgaatcagaaaaaaccctctccacgggaagtctaacatcttgatcccaacgcaaatctactagtaacgcaacggcttctgcctggaaaactgaaaaacaatctcaaaactgagaattgtcacttccgccccactaatagaacacctacaaaataaagagaaaaaaattaatacataataaataattaataaatataaaatttctcttacaaataaaataaaatatgaaattttattttaatagtcacataaaattctctgatgtaaatactagaacttatttattctcatctttattgctgacggtgaatacactacatttgatgtgttattattagaccaaactgaccttacaaaataaaactagtcatataataactttacaaaactaaaaactatccatgccagccttacaaaactaaaactagtcatacaggccttacaaaaattaacactagccatactggccttaaaaaaccaaaaactagtcatactagcattacaaaaccaaaactagccatactagtcttacaaaactaaaacaactagccacattggccgtacaaaagaaaatctagccacattccttacaaaatcaaaaaacaagtcacttacaaaactagacatattaccttacaaaactaaaatgcacattaggcataaaaactaaaaagccatattagtcataattaaataatttaaaaaactatgtaaaataaatttatataatatagaattactatgtacaagaacatatacaatcaataataaatgaaataaatactgatacaaaaatataataaatacaataaatgaaaaaaatggatctattcttctcttttttttttttttaaagaaaaataaaattctcattttagaaaccaaatggcctcaggccaaacaaatatttaagacagatgccaaacgccaaactgatacaaaactatatacacacagttgaaatgcaaaattgttctaaatttaaaaattaagttagtgttagtaaatgttaaatgtttttttttttttgaaaaaaaattaagaaaataatcaaatataataaattagctaataaaaattataaatatacatttattacatattattttttaaaatatatataataattaaattaagttatataatttttttagtattatatgttattatattataacaaaaacgaataaatatattagatcattaaatatataaaataatatttgatatatcgtatcactgaaattaatatatcgtagtaataaaatcatataccacaaaaaaattataacaatactaaattaatactcaatatatatatatatatcatactaacaaaattatatatatatcactattaaattatgtacataccaaaaaatttatatataataaaataaaaattaaatgtcatctatagatatggtatactatagacaacaaaaatcatataccatacaacaaaatatatatacctacaataaaaaaaataaaaaaaaaataatataattgttgaccgaggtt

SEQ ID NO: 138854 - DNA, 827 bp, Cannabis sativa
aaattaggattttaggcttcctatataaaggccttaactctaacctaaatcactaagcctctaaatcactctaagttatgaatcctaatctctctttctctctctctttgctacacgcccaatagggcctcctctcttcatctctctcacacacctctaaggcaatatcaccctctcattagagatctgcctattgattcatgttttgtatccttatagagagttatataagatcccacctatagagatctgaacagtattatctctaggtatcaatacaagcaaaaggggagtaggtcattacccgctattacaagggggcaaacctctataataaaattgtgtgtattatactttttcattctgtttgtgtaacacttgacaagtatcaaatctatacgatcccgctgtcagttgaacattttttgaggtcaacaattatattaaaaaaaattaaaaattgagttcagagtcttatttttactattttggaaaatacaaggttcatttatcatttaacaggatagaaagtccaatcgataacttttgtaaagtacatggtctaaaatggtatttatccttttaaaaaacaaagagatttatataccacatactaaaatttttaattttttttcttttagactgtggggtggaatttttttaaaaaatattattattttctatactgtgtacggtgttacatttcatatgttgtttcactgttgtttttaattattctatttagtgttttatggttttctataaaaaaaaaaataaaaaaaaaacaatatttttgttaaaatttctgtgtaatagtaaaattataa

SEQ ID NO: 138855 - DNA, 567 bp, Cannabis sativa
attgtagcatcctttcaaaaaaaattaaaaaattatagcattacaataaaccttaagaatacatatatctaattcatccaccacttaaaagatacaacaatagaagctgttgttgcaggttcattcaaccctttagttacagagaacttgttattaccaactactaacaataaaccttaagaatacatatatctaattcattcaccacttaaaagatacaacagtagaagttgttgttacaggttcattcaaccctttagttacagagaacttgttattaccaactactaacaatgatttaatagcgagtcatagaagaataaagaaaaaccaacaactgaataaaaccatatcacacatataagactaagacactctaaaccatgtcaggaacaaaactaaaatactcaaaatcatatcacaaagacaagactaatcataatagtaaaaatctaatcgtagtagcaaaacacaatcccgaccacgttacacctaagcccaaagaaggccaacaggtctggccaaaaaaaaaaaaaagataacattcaatagctataaatttaggaa

SEQ ID NO: 138856 - DNA, 850 bp, Cannabis sativa
gaattttcattttacggttattaagatataagtttgcaaaattataatttttttctcaaaaaaattattttatggaaaaactaaataaatattaaaaaatttgaaacaaaaaaaaaaaaatagtataaggtaattggttacctctctagttaccttaaagttacatgataacttatttttaaaaattttcttaaattttttccataaaataacttttctgaaaaaaaaaataattttgcactataaaaacttataaaatttgtaataagatctaattatatagtagtattatgttcccccacaaaattattattagaattcaatgatattatgttatgggatttcctatatcttatgagtcaaattaaggtatttctttatttcttttgtttaataataaacctagctccaaatctaaagtctaatccctttcaaaaagaaaatctaaagtgtaatcaaattgattcgaatatttagatagtatttgtaacttgagggattacacttgaaattgatcatctcatttcattcaagtggtccaaattatatttatgattctttgtcgaccctaccatctagtatctaattcgtaattacctatagtactggaccaattcttatatattgtgtggtaatagagtttatttttcttattttgtaggttattttgtgaagggcctacacttcacttaaagagcatttactaataactttatttttaaatataatctgtttgacattaactttcagcaattttaaattagggtgctagtttgttgtaactacctttggctagttttacttagaaattttgttggcgttttagttttttgtaatgttgaactagtga

SEQ ID NO: 138857 - DNA, 828 bp, Cannabis sativa
cataaaacccaacagtatactcttccttaatctaattaaccttatatatcaaattctagtaaaattattataacactaattcttaacaatttaatgtaggcacatctgggagagcataaaatatttgagaaaaaaattcaagtttcatgacccagagcttctcgtagtgaatggtatcaacgatgaagagaagagtcggtcttttgacaatacggcaagatgattggctaccaggttatcattgatgaataataaccaccaatgttctttattccctggaatattgggtaaacactatataattttttagtgctaattgtttatttatatattataacttagaattattttttatactatcttaccaataacccaatataattttctagtgcgcattggatactagaggtcgttgtgccaaggaaagctatccatttagaccctatatgtgaccaccaagtttccgaacaaattattgaaatgttgaaaaggtaataatttaatgactatttatgtaacaaattagttaagtaactaatgaattgaaatgttaatataatttttcaaacagagcatacaaatatatagggacatcaaatgcgtatcttgggccgtggccaaaaatttcactagcaacttgtccaagacaacctaaaaatcaagaatgtggtttttatgttttgaaaaacatgactgacatcgtcgcacgtggaaacgccaaccgttatatacaagatcaaaaagcaataagtacttttaattattgattatagtatttattataataacaaataatatatataaattaatataaatttttactttttt

SEQ ID NO: 138858 - DNA, 879 bp, Cannabis sativa
taaaagaacttagctactaaaagaaattctgaaataaaataaatttaactaaagacataaaaaataaagttgaaaagatagaacactattagaatcctccactggtgcatttctactctctttgctctcctcttctacactcataatttctctcaatttttgaatggttcaaaaacctagccatgaaccccctttttataggtgaaaatttaagttgtctaaaaataccaaggctgcgaccttgcttgcaatactgctgccttacaagcagttcccaaaatttcaacctttgctgatttctttgatccaatttccctttttttttttttcaacgaacacgagcaaggccgcaaccttgcttaccaagctgcggcctaataggttagtttccattttttttttcttcaattttctatcttaaacttagaaagtgaccattgttgactcttaatgatgaaattaacagcagaaaatgccatttttttttgacccatttaaagaaatagaaatcactccaagctaaaagaagtttcatttctttattatttttttttatttttgctcaaaaaggcttgcagaacaccaaattatcaatattgaggatctccaaatatttttcctaaaaaaaaaactaagcataattctgcacaataaaataataaaaatactaaaacacaccctaaattagactaaaaaaagacataaaaaaaaacttaacaaagatcattgtttataaatatgtattagttttgttaaaattatttttatttcaaagttatgcatatttttttttatttttttttatagaccaagctcccaataaataaatctgaaatttatcaagtaaatttcctaacttattaattcctcctaactcca

SEQ ID NO: 138859 - DNA, 571 bp, Cannabis sativa
tttgtaatatgttgtttactaatttttttttggaaatggaatagttgtgatttatgttgtttactttattaggaaacgtaatcgaaatgtctaaattggctaaattgcccttttaagttaaattatattatatgacaattattttgtaaaatatattttaaaggacaaaattgttattatatatttaatattaaaaaaaataaaaataattaaaatccattacccttaatccttataaaattggtggtagaaattctcctttcttttctctcttatttaatcaagttatccctttcctaattttaataacgtaagtaaataaatgtaagagaataattacttactattaattcccattacttattaattaacatccatccaacccaactcatttttattttcataaataaaacaatattttatcactgttttttttttaatttttgtttatttatttaatgtattaacaaaacatagttgttggtattaatgattttagagtaatttgcggcaaaaccccctcaactatcaatttacttgcaaaaaaccatccaacctcatattttggtgg

SEQ ID NO: 138860 - DNA, 734 bp, Cannabis sativa
  modified_base (485)..(492): a, c, t, g, unknown or other
agaaatatttggttatgcagttcaaagttcattaaatttaactttgaattgtatccaaacttacctccctagaacttcagagtcacatattgatgaaaatgtaagatctatgattagctactagcatcttcctgagcccttatagggaaatgcctttgagatagcaaacgacatttcatgttgtcccatctaagtccaatcccaagaaaatctcataaagatggaatggtagtatacttagtgtacaaaattactagattcagagatgccctgatcatgagcttaaaaaaagctggaaatgttaactaaagtttgcaagtttgatagctattctaaagggattaggggtggaccatcctatggccattaagagaagaaagtgtttgttttaacaaatactatttttcaaagaacatgaccaaatctaaaaacaaagtagcaaagtagaggtgatatttttttaattccaaagtgttctatcatcnnnnnnnntataagatggtcccactacctctattgtattgacacaatcgatgaggttaataccactaatgttcatagacagaaagtcacggtaccttgttgtagtgagagagtttcaaggaacactctgttatagaccattcatccaatgatatgttattgagctagttcgaaatgaataagctaagaggaattaggataatttcgtattttaataagaatccaatgatgctccaattagcgagagtcaa

SEQ ID NO: 138861 - DNA, 931 bp, Cannabis sativa
taattatttaaatagctataaatctgtgttgctctactctgtgttgctcttggaatcatgcaaggtcataccaacaccttgcaccatgatcaggaagaactccgagccgcggtaaatctcgcgtttgaagagtagaggcgcatgttttccgaatggagggacaaggagatggaaacgttgagggctcaacaaggagtcattgacgaccgtagtcgacaggccactgtgttgataggaaaagcttatcagactgccggacaacagcctataaccgtcatccccttgggcaaaattgatgaagatccagcgatgaatacctctcagactataaacggtcagccgccaattccccgataacaggttccacctgtgggccaagtggtaggtgggcagaccttgtctagtaattcatcaggagaagttatacccaccaattccaaccaagttaatggtgctggtcagtaaattgcccaaaccaatcagtcactgaggcagccaggcatttccgtatttgatagactgggaacgactcatgatctcagaattgatctgaataggaggagaggagtggacgatgagcatgatgcgccaattgtgcgacccggaacctacgctcaaaatctcgctcaaagagatgctgatgtgactcaggtcagccaagagcccgaacaggttagtccagccgtgcaggcatagttggacgaactaaaaaatatgttccaaggcgtggccggtcagaggaacaatgatctcaagttggatcaagcacgtggaatccctttcttccccttgattaatatcctcgaattgccccacaaatttaagatgccaacttggaagatgtatactgggaaggaagattccttattccaccttaagtattttgagatgcaaatggacttgcagggagtatgaggagacgtatgttgta

SEQ ID NO: 138862 - DNA, 747 bp, Cannabis sativa
  modified_base (231)..(233): a, c, t, g, unknown or other
aaaatataatataattgtttatgggttgcttatattttttttctccctcttcgattctttttttatttttgagaaatataaaacttaagattgaatatgttgaaggataacaggtgttgcacctctaaatttttaaccacttgaggctagctcaagtggtcataggtaggtgtgtgtgtatgttggaggtcctgggttcgagtctcaagtaaaacatagttgtaatatatnnncgcttaaataaaaaaaaaatatatgttgaaggctacgaaaaacttgaagatgagaattatattgaagatttgatgatcttgaaatttgtagtcacacggacgatgataataatggtgaaagtgattaaaagtttcatttttgaattccttcatgtgtttattttattttttatttctatttatattttttttacttttttttttcttttgaatgtatgttagcttggtttcaccattcttcttatatcttttatataaagtttacttttgtgtcaaataggtttagaatttttagtagttgtttcttacaaaaagtgatgaagtgaggtatgtaaaaaattttacattctataatcttaaatgtttcttttattttaattttttttaatcatttatgtttttaattttattattcattactattttatattctctaatttttttcattatgtttcacttttagttgtgagttttatatatttatttcaatttttttttattagtagtaatttaa

SEQ ID NO: 138863 - DNA, 879 bp, Cannabis sativa
atcatgaaaaaggcgtgcgcctaacaagaaagcaataaaactagtcctaccctgattccctaattcagccctaccaaagtcttggactacaatgatggcttcatcatccccaagaaagctgtccgagggaaggaaccagctagaagaaaaatgggccgaatggtccaagggaataggcgccggaggtccagagcccatctgggaccaacccaagaaatgacccaagtgggaaaaataatattccttggcgtgattcccccactgggtggaaggcattataaacctataaaggcgctcatcgaaccctataggcctacgttgggtatactctcggacaggaggaacatacttaattattaaaggagacttaccagaacctgaagtgctggcgtcgggagcaccagagttgggaactgggaccacaagcttaggtctgagaggcctccgctccggaggagcttccagacgaagggtcctcccagcagctgcctggccttaatgtaagccagctcttgtttcctcttaaagacgtacttcttgtaccggtcctccgctgaggcgataatgtctacctggagtgccctttccgctgccggagtcctcacgttcgggaagatgaccctggaaagattgaagtcatccaccgactgattctcggaaatcagcttggccttctgacagttttccgtcgtaaccaagtccccaacgttgagggccttcctgtcatacgtggagaaagtcttggaccgcatgtaaggagggatggagggatggagggatacttgggtaggcgcggttcgcatgtaaggagggatcctaacccactccgtgagaagctctaggcggtccatggcctggaaaccggaggaaaagaagaag

SEQ ID NO: 138864 - DNA, 699 bp, Cannabis sativa
  modified_base (243)..(247): a, c, t, g, unknown or other
taacaaatttgaaaaaaaatgatatggttagcaaattttgaaatttaaacaagattatttaaaaaagatagtatcttaataccaaaataagatcattcaaatttaataaaaaaaaaatgtaatatctgatgttatatttaaaataaataaaataatctaaaatttcgaaattaaccataaggctatttttgtgagaaattaaattttcaaaattcaaagcctactaatatctaaaactaattnnnnntaattaaaaattaataaaaaataattttattctgacaattagatttttaattgaaaatttagattctacacaaaattctaccaaaatttaaattttgtttcaatgaaaaacgatttttgaatcaaaagatatgaagaaaacaaatttggtgcgtaggggtatgcaatgcatacccctgcgcgcgcggatgggtgggacttgacagaggcagaggctgcatacaacctcaattggccgaggatacttggcgtgtgcacccttttgagacagggctgtgtccgagaattctcggtcagctccttgtctgaacgagggtgctgtccgagcgtgtcccagtgtccgagcgtgtgctagtgtccgcgcgggcacacgtgtgcatctaatttcagatattttcttccaaattcaaaaaatcacaactaattcataaaaaatccaaattaggttctgta

SEQ ID NO: 138865 - DNA, 828 bp, Cannabis sativa
  modified_base (221)..(223): a, c, t, g, unknown or other
  modified_base (756)..(768): a, c, t, g, unknown or other
aaattaattcaatgtggttgaatagctcctgcaaactgtccatggttcgatccatgtcctcttttatcactgtcagtggaggcattcgacaagcatctttggctttcttcttgtataacagaagcgtaggctttattgatgttaggaataggatattgcatcaggatttgagatttagcttttgggttttgtgccgtaaataaaactcatttaaatataannngatttactaattaataaaagatctgaaatcaatttatgttacatggttcacatgatttatttcatgattatatgtttaatgtataaattttattaagtctagaacatatgattattcatagttctagtgttgtcaacatagtggaatataatcattattatatgttaaaaagtttaattcccattattcgtcaatacattggatttagagtgacgtgataataattgataaggtatacttacaccttggataagtattatgtccttcctaggaaatgggcaaagtataccagtatcggatgtatggagtatacattagattagatcaatattgaacttggataagatatcataaacttaccgttatatcattctaagtcaatataattggttgatcttaagtctatagatcttaatgttgagatggttaggttcgatcttaattgtattatttatgttcttagagttgttccttgaagctcgtacagttgaacacatacatcttgggaacatgatagttcaattgagtgggannnnnnnnnnnnnatatggaatctatagcatctataaatatttataagcgaaatgatgatttccttcgagctt

SEQ ID NO: 138866 - DNA, 527 bp, Cannabis sativa
ttggaaactcctagatttcttgctgaattctagaaaaaaggatgaggattacttatttgcttctggttttggtggtggtcaggcaaagagaatgaaagagaaatgagtttctcttgtttttttgtttttttttcttctaaatgggtgaattacttgctgaaataaataaagtggccagctgccactctcccatgcagccacctaatctccttcccaaattaccaaaatacctttctagcttataacttaagcaatttaaagtataagggtaaaatggtcaaaaaccataacctcgctcaaacccagtattcaatttatctctaatatttatcccaataagactagacttacccatgtgactcaaatggatatccattacattttctatcatcgccaagcaaaagttataaaaattgcatatttcatatataatacaaacaatacatctaagttttattcagatgtcattgacagcggtcgatgggatgagtattgttggggtagggagtcatttgagttgactattg

SEQ ID NO: 138867 - DNA, 561 bp, Cannabis sativa
gatagtgcctgttcctcatgcatttttgcctataaaagccactacctttccttcatttcggttacttcccatttcttgccaacttcgctcgagttttcaagagagaaaaaatcctagaaccaagagtacaccctcgaacactttacaaatttcccagttaatcttcattcactactatcagtcgaccttcccttgtttgatcgacaacataacccccagttccaacacttcattgtaagtttctcgcatcccttgctttactatttttgtacatggcatgctttacttatctgtttgttgtttttctgggttttgtatttgaagtttttgggaatgcatccttctgggtttttcacgtaacaggtctagattcaccatttctggtgttagggttagtcttgtcacgtgtttgctgttatttttacaaaggaccatacgctttttgtgtactgtccttccaaggcatagagaagactttgcttttcttgattttctgccctttctttttcttttatgcgcgttattgtcttctgtgagttctttgcacccgacttttgtcca

SEQ ID NO: 138868 - DNA, 535 bp, Cannabis sativa
tctgattagatctaatagcctactgtattcctaagtgttgatactgacttggaagattgtggtgtgaactctttaacaagttcttggattggatgttcgataaattaatatgaaaagatagcgaagaaatcctgataagaggtattgtttctcttttcatgtagtttagatttaatctatatatattatgttgagatccttgggattttggttcatattggatcaaattaattttaatttaatttgcttccacttttctaactctgatatggaccataaaaattaacaagtggtatcaaagctatcttcataatcatataaattaaatactgtgttgggtaattactcattcatatatatatttatgttgatatattatgaatggatggatattttgtgcatgaatgtgaatcgttaattatatggtaaaattatgttaggaattatatttttttattagaaaaatttgtacaccatatttacggtataagaattttccttgtaatttacgttaaatttatttgtaattttttgt

SEQ ID NO: 138869 - DNA, 1135 bp, Cannabis sativa
aaacatagtatgtcgatatggcttgcctcacaagatagtctcagacaatggaaagcagtttgactgcaaagagtttaccgacttctacaaccaacacgcagttatcaaaagcttttccgcagtggcaaggccacaaacaaatggacaagcagaagccgtcaataaaatcctaaaagtcaccctgaagaaaaagctactggcctacaaaaacaattggcctgaagaattgccaagagtgttatgggcctaccggaaaaccccaagaaccacaaccggccactcgccattttcaatggcgtacgattgtgaggcaatggtcccggtggaaacactattcccatcccacaggagaatgacttacgatccaacaacaaataaggctttattacaagaagcgttggatcagattgacgaactccgggatgagtctcaaatacaaatggcagcttatcaaaagaaggtggctaaacacttcaactcgaaggttaaaaatagaaaatttactattcgtgatctagtcctaagacaggtctttccagccactcaggaacccggagtgggggtagttggacctaattgggaaggaccatacgaaatcgaggacgaaatcagctccgggacttacaagctcaaaagaatggatggaaccatggtgcctagggtctggaatgctgatcacctccgaaagtattaccaatagtcgaaaaatataagtttatgctatgtaaagtaaatttgtacctgacaagtatgtgcaacctctaaattaatgtttgtaaaactgagtgccctaaaaataattttcatgtcactcagggggtagtaaggcataccacgcggacaaatgtaaaacatgccaaaagtttaacaaagttaaaaagcaaagtaaagtatgtatttaagcataaatataaaaatgttcaaacccagccaaaaagctctaaaaaaatagtaagggcttggggacgggccttaattgtctccccttaagaaaaaacataaattgtcttagggaggggaaaaaggactacaaatgtaaattaaaaaaaaaaaaaaagagtgataatagcagtagttgttaacagattggcttaatcaatgcggggtggaagacgaggccccctgcgctcctcca

SEQ ID NO: 138870 - DNA, 659 bp, Cannabis sativa
  modified_base (281)..(283): a, c, t, g, unknown or other
tattgctttcaccggtgcctcgctattcacatttagcaacatatggtttctcgctaatatactatggattagtttgtacattgattcctcgcctatgaccttacagtcagcgagttataaatgtactctgactcttatgaaattaatgagttattccgtaaaagaaatgacatcgattcacattcccttcgtcctgacatatgtccttcatggaggtggcagccgaattttgggtataacaattgccccttaaaaggttcttttttagtaaaaagagcttnnnaataattacagagggcatttttgccaaaatcttttcttggaaaaaaatacatcctttgattttggcggttgtacggtttcgaggatcattatgaatcgtctcttcatattctgcccatcttccgaccgtcagttttcccaatctttagctttcttgtcactaaactttgtgtacaaaagggcggctcaagcttgtcatgtttcacaaacctctagctttttggtgagacccattttcagagatcatctctttcctgctagaatgtcccttttgagtttagaagttcatctttccaaactcaccttacctagacgcaccaacccatttctatttgttccaaaagacttcaagcctcaactggagccggaaacgatgg

SEQ ID NO: 138871 - DNA, 586 bp, Cannabis sativa
  modified_base (180)..(183): a, c, t, g, unknown or other
  modified_base (214)..(217): a, c, t, g, unknown or other
cgctaaaaaaattaactgtttaaaatcgtcgggaaaaattagtattccaacggtttataacagtaattacaggaataggcgacagttttaattggaatatataaatttattgggcccttatacccaacagtttagggcccaataaaaaatcgttacctacttctcgccacatttcccacnnnnccaactactttttttctatttcccacatgcnnnnctattttttctcacctatttcttctctatttcccacaccctaaaaccaaaatcttaactctccaaaaccccatccacacctctgcaccatcgcccttctctctcgtcgtcttcctccctctctcgatctccctttcttcttgtctctctcatccatcgatttccacccacccctcctcccgtcggttttcctctcctctccgtcgcatacgtcagatcaccaccacctcctgtcggtgtccctctcatctccgtctcatacgccagaccaccaccacctcccgtccctctctctctttctctctctttgagcttggtataaatacatttatttatttattatatttacttattttgttattgtataaat

SEQ ID NO: 138872 - DNA, 588 bp, Cannabis sativa
  modified_base (541)..(542): a, c, t, g, unknown or other
acaaaaagtaaccattaaatagtcactcataagtataaatatataaatatatgactaacgattttgtctttatttaattttttttttaaggaaaaactctaactaagtctaaatttttttgttatcaataataataaattagcttattaatttaaattactactaataataatatcttaactaattaattaaatcaaattgctaattattttaaaaggtaagtttgaaatttctaaaaaaaaaaaacatgtaagtgtgagaaaaattattttgaaattaattaattttgataatggtaataaaaataataaattaactaattaattaaactaaaaccatatatattaattaattaaatcaaaattatgcatattatatacataataataactttaaaatttattatatataaatagatttttaaagatagtagtagtcgatttatataatatattaatgattaattaagaacaataattataaatatttgacactactactgtagaacctctatttaataatactctattcaagaataacnnctaatttgttataaaaaaaatgaagtcccaatttaggccagttata

SEQ ID NO: 138873 - DNA, 718 bp, Cannabis sativa
  modified_base (419)..(420): a, c, t, g, unknown or other
actatatgaagaggaaaaactgaagtttgattcctcaagtgttttaatgatagttaattatgtaacatctaggtgttttcatgacagattctgtcgagtcatgtctagcatgttagactgttgtaactagttttttacgattcacactataaaaaattttatttttagtcataacaaaatttataactaaaaataaaaaacttatggctaattattaattatcattatcgtgttgtgataaaaatatccgtagctaaaaatattagtcataaaaattacaatttattatgactaaatgtgtttttagtcacaatatttgtttgtggctaaaactaaattagtgacaacttgtaactaaatactatgttttaatcacaagtaactttttgttgtgacttaaagtcacatttagtcacaannaatttatgttgtgattaaaaaaattgtcactaaaaataacagttttttttgtcgtgtcagtgttgtccatgtcagactttttaggtctttctgttatagttgttttagttttttgttaatacttacaaatagttgctactattttcggcaataactaactttttgatcggagattctttacgtcgagcttcattgttttgtcttctatccttctttgttttggaggttaaagctgagaacttcgtgaatggagaatcctgttgtatgtttacctaatcgttaatgcctaattgctatc

SEQ ID NO: 138874 - DNA, 1541 bp, Cannabis sativa
aaagtcgagaaggctcccgagtcttcccttgtttgtatgttgataacaagtactttgtcgaggaccgacttctggaaggagttacgagctcgaaggcaagaatcgctagtcgaattcttcgcaatggccgaaccccataagagaattgagaattctctggcatagttggagaagggcaaggacaagcgtaaatcaccaataccgcgatcaagatctcgcagtcccccagggaagaattccaggggccgaagcccgagaagacgcagcccacggagacagcgaagtccaaagttggccaaatctcctcccaagaaggagtcctcgccgaaaagtaagggtggaccgcgttttgttaactataccgaactcccagtgccccgagaccacatctatgcaatcgaaggaaggaatggagtcttcaagaaatcgcccaccatcaggggaaactgcgacagaagagaccccaaaaagttctgtaagtaccataaagatattggtcataccactttagaatgttgggtcttgcaagacgaaatcgaggagttgattcgataagtataagaagaatgaggaaggtcatccccgagcagatgacaaggaggaaaaccaaaatgcaagtggttcgagaacgcctcgcaatattttaactatcatcggagggccccatatcgcaggagactcccgcaagtcgcaagagcgatatgccagagaagccaaggagaagccactcactaatgtaaacaatcttagtgagcgaccagagaaactgtttaagaaggaatgcgacgacatcacttttatggagagtgacgcgagatgggtccatcacccacattccgatgcactagttatcatcgccaatattggcggagataatgtccaccgcatacttgtggacaatggaagtttagtgaatctgttgaacttccaagccttcaaacaaatggggttgcaggagaaggtcctgcgacctgtgacgacgagcatatacggttttactggcgacgtcattgcattaaaaggaatgatcaaactcccaatcaccttgggaaccgccccagtaacagccaaatcaatggctgacttcgtagtaatcgaccaatattcaacatataatgccgtaattggtcgaccaatcctgaaagagatgaagatcataacctcaatctatcatttgacaatgaaattccctactcccgctggagtaggttctgtgcgaggagtccaggcagattcgcgagaacactacaacacagtagtcaagctcgcggagaaaaggtgagtaaacgttatatacctattggaggcaccaccccctcgctaggaggtcctcagaatcgaggaggtaccgcacatggatgaaccggatttggatccaagaatcctcgatcataccgccgcagtccaagccgcggaagacaccattgaggtacctaatgatcctgtagataatagcaaagttttaaaaattggttctaagttgaattttcagcagcgagaacaactaacgacctttttgaaacaaaatcttgatgtttttg

SEQ ID NO: 138875 - DNA, 952 bp, Cannabis sativa
gtcccaggctttaagacagatgcctctattaccttgttcacagccccaccagaagtccctcaccataccatcaatcctagatgcaagcttttcagaaagttttgtcgtctgcatcgtgtagacaggcaaagcaagccccactgatttgatcaacgtagcacgattgataacaattttaatttccacccatggagttttgacacctagttatcaaggatgaagttaaaatctgcatccttttggcgggatctaaaaagcgggagacccaaatagtttatgttacccatttcacagttcaatcccagagcttgtctgatgcctcgtttcataccttcacttgtgttactgctaaagaaaatggaagttttgagcttattaattctctgaccagaccaatcacaaaatttttccaggcaatgccacataccccttgcttcttcaaggtttgccctgccaacaaggatctgatcatcggtaaagaaaagatgggagagtttggggccctctctgcttagctttataccacttatggtactgttatcaagggcatgctcaaggatgcgcgagaggatttcagcaacccaaataaagatgtacggagatagggggtctccttgtctaatgccacactctggggtcaaactgttaaatttccttccgttgagaaaaaggttgaaggaagttgttgtgatacactggcgtacccagtggcagaacttgtcagggccttgaaactacacagaacgtggtcaataaattgccaacttagtttgtcgtacgccttaaccaggtcaatcttaattgcaaaaaacccctctttccattttttcctcttgaaagaatgtatgatctcttggattaaaacgttattatcttggatgttccagcccgggacaaaagctgcttgagtaggataaatcaatctgggcaggaacactttgattctatttgc

SEQ ID NO: 138876 - DNA, 870 bp, Cannabis sativa
ttagggtttttcaagacttagtcacagattttcttgttttgaggcatattattgaccatcatgctcatgcttctggtttttttcagcttgttgacaatgtggtagtgctataaaagcttaaatttatatcatcttttaacgcctccattctatctatcccttctttttttattttttcttttttaatcagtttgcatttttcttgttcgtttttgtttatgagtttatctaattacttgtgtaatatattttctcaattcagtagatgagatttttgtaagtgtaaggatcgacattgttagcaattaataaaagttatgttaagttatttgattcatatatcaccactcttattattataaatcaacgtgtgtagtacttttctagaggactaaatttattgattttaattaatcaaacaaattctttatcatagtggtagcttatttctggatcaattcctttgagtattagtggttcatttgtgccttattttctacaggtaaactaaataaatagtcgtcataatatccaaatggcttttgggccatttcttccttcaaatctctatgattattctttgagatataactattttactttgattgttttctatcaaaatcagaggagatggatggtcttcagttattttattttatttaagaaaggcaatttgtaatcgtacttattgttaccagtttatatgtacggtacttattgtttgtaatcatttgacaattcaaaagtaaagagacgtgagaaaggtttctggatttaaaatgtatatgtgtatcatatattatattataatctcacctaataattaataacattttttttcttcaattattattttttttgaattttttt

SEQ ID NO: 138877 - DNA, 781 bp, Cannabis sativa
aaaataataagtgcagaaattccaaacatcaatgttgaccctgatggctataatgcagtaaaaaagtttatgattcatggaccatgtgaaaagctcaatacaaagtctctatgtatgatgaacgacaagtgcacgaaaatttttccaaaaaaaatcaatgataaaactacaatcgacacagatggatttccaatctacaaaaggagagatacaggtacttaaatattaaaattataaattttataacaatatatttattaaaaaaacaagttctattctacaggttttcatgttgagaaaaagaatatcttattagataatcgttacgttgtcccttactataggaacttaatgttgagctttgcaattactcaagatccataaaatatcttttcaagtatgtccgtaaagggtctgatagaacaactgcaatagtggaatcaatcgacaacaccaaagggatagacgagattaaaacatatcttgattgcagatacatctcagcaactgaagcttgttggagaatcttccaattcgacacattatcgaaagccatcagttgaaagattaccattccatttacttggagagcatacaatgatattaggagaatataagtgccctgaaaatgttcttggcaaacctggagtagacaaaataaagtttactgaatggttagagacaaacaagaataacgaggatgcggggagctaacttattttgattttcctatatgttgggtttggaattcgaaagataaaatatggacaagaagaaaaca

SEQ ID NO: 138878 - DNA, 603 bp, Cannabis sativa
cctcccattgtcaattggttttgagatggaattccattcaccttatgttgttttactgttgttttaatattgttttgccatgattatttattagacgtcaattttactttttttttttcaatctcaccggaattaatagttgttttccgattgttctggtgaccctgtggtggttctgtctgtgggtgtggaagatgaagacctcattttttttttttttgtgtttacagtataaaataaaaaaataactaagacagtataaaagtaatttctgtcgtgcggcaatattttgtaaatattaggccaaaaatcagtatttttgtaaatttctctaatactaagcattatatttccgggctcagacaacacacaagaaaactttttttttttggcatctaggtttgggtgagttttaggtacagacctaactcactttagtcaatggttaaacttaaaaatgtcatatcgatatattttaatattgagtttcacataattaatattatcttttataaaatatcattaattattcttaaaagtgtcattttatagtggtgctagacacctcttaggcgtttggttggaaggaatgaaaatatagga

SEQ ID NO: 138879 - DNA, 1665 bp, Cannabis sativa
cagcaagtgggccacttctaaaattaacgtgctagaaggcatggtttctaatatgggcaattggaaatctaagtggttttatatattcaaagtaccaggggttaggatagatttcaaccattgacctagtacgtcgcatatctcaacacttagcttatatttgtgttatcttatgaagtcgttaatatttgcttcttagtagtcgcagatagaccggctcgacctgttctggatcccgcccgcaaaaggttgctgaagttctcagtagcctaaccgttcaagatcctaattggcgattattgtgcacgactgtaaagctgcgagaacataagctaatccatgaggatgccagccttcattgggagccagtgtacaaggagccttctaagaagcaaaaggagagaatagacaagcgtctatccaaataaacttctcaaccaacatcaggtaaatcatcgcatatatctataatataacataacacatttatacttatcttaatgtttttgtcttcgcagaaatgactttcctgaagcaagctccaattcgcaaccgcaaacccaaaattgggactgcgacgacctctcccatcatcccgccgaagaggaagagtgacattgtcgcgactcttcaaaaaaggaggttaggccttctcaggataaggggaagaaagtcatgatctaccccgccatcagagcaagcgacatcgtgacccttccagacaagtttgtgaacgatgaattcgtgtcgagggttgagggattcctactgaggagatgatgtcactgggtgcagaactggccacgcagttaatgactgtgttctcgagggcgttcgtcgctggctcaaaagaagtccatctactgaagaagcaggtcgctcttctccaggagaatgtgaaaaagttgaagcaggaggcgaactctaaggataaagacatcaaagacctccaaaaaaccaaagagcaggcagagaccaaggccaacatttctcagtcaaaagttgagaattgactcgcgatttggagacccagaaggaaaatgggaagaaacagtacgaacaagttgttttttactacatttacacgactttatccaaggtgccagacttcgacttctccattcttggagcagaagcagctgagatggccgaggcttttcgtgctatgttgcctactcagactcaagggtgcgcaggaaaccttttccttgaggacgcagagactgcagatgcggaggaagtcgctgatggggccgcctgcaaggtcgcagatggttctattactccaactgcttaatttatctaagtttttatttctttagttatcgaacttttttagcggtacacgtgtactcgcgatttgtacttgaacaatatatatcccttcaaggatatttatccatttgtctgctttaagctgtacatgggcaatcacacgctttatagacttgcttaatcttaatttatttttacaatattattacagcttggtgtaataactttagaaatgttaagacttgcaaaacaatttaaactgtcgaacttttattataataagaaatcaatagtacaaagtatttctatggtaggctataccccctatacttagaacatttatcaaaataaattggctaagtataattacattgcggtactattgataat

SEQ ID NO: 138880 - DNA, 760 bp, Cannabis sativa
ttttgaagctcaagaagttgttaaaatgggagctagatggaggataggatcaggcatttccattccagttcttaatcagtcgtggcttccatcaaaggacaatccgtatgtgtcttcttctcatgaggctcttcgtcattgtactgtgtttaatcttttacaagttggtaacatgtgttgggatgaagaggtattggaggatttgtttgagtcgagagatgttgatctcattggcaacatacctttgcctttaactccgaatatggactcatggtattgggcgtttgaagattatggaagctactctgttaagagtgcccatcgtgcgttgcaagtgcttaatgggagatggaattcacaagacaactctagtttttggaagaagttttggtatttaaaacttccttcaaaagaattttctttggagggccctctctaattgccttcccactcttgtttcacttcaaactaagcgagttaatgtgactaatacttgtcctctttgcaatggagatgttgagactacatttcatattatggttacttgtccttttactatggcttgtttggagcgggggttgggcattactgtcatgattggagaggttgaatttggttcctggtttgagagcttctataatgctcacccagaagatggtattgataaattggctatgattttatggggtgtttggggagctagaaatgacttgctctggaataaaaagattgcttctgttgaaagagttgtatctgctgc

SEQ ID NO: 138881 - DNA, 907 bp, Cannabis sativa
  modified_base (59)..(61): a, c, t, g, unknown or other
atgtaagtgtctataaaagttaatgcaacattagttttacataaaatacaatttaatannntactatacaatacaatacggtataatacggcgtatcaaacgaacccttaattaatttatacaattaaatactattgttttcaatttctacctaaaataccctcctttccatttctctctctgtcttttcctcttcctcgctctctcttcctctttctctttctcgcaccaccgagacacccagactcaagcaccgagaccacattgaacctcctctcctccaccaccaaagctcctcatctacccaaaactcaacccaacaacctccaaatctcacctacccaaatctttctctcttcctcctcctcggcttctctcaaccaccatcgccattcgtcaccaccccacgaatcgagactgagacagaccactagaagctcttcctcgctctctcttcctcttttgaattgtatggtttttctggccaaaatgtgattatcgatgggttatcaatagtttatcgatggttttgtctgtgcactgctatttttgtgtgcaaaccgaaatcatcgataaatgtcatcgataagctatcgataacctatcgataaatgtcaaattgacaaaactgtgttacacaaacataaatcatcgataaactatcaattttgcttctttcctccggctccaggttttttcctaggcggatgactttagtggagtcgaggccgcacacactcacttcctcagtgtcctccatatgttctacagctgtttcggatcccacgcggggatccaactcgtcttgttctatcaatcttggctcttcatccctatgcaccaccaatactgacaggtgcatcgcgacattgtagcattgtctcgcctctccttggtttcccctcac

SEQ ID NO: 138882 - DNA, 904 bp, Cannabis sativa
aggtatgatccttacttcttatcgattttaccaacatatcattgacgtaaacctccatgtttcgccctatctggtttgcgaacattttgtttactaatcgctgattcgttgccctaacgttcttcagtccgaacggcatgactttataacaatagagtcccatgttggctatgaagcttgtatgttcttgatctaggacatacatttttatctggttatatccagaatatgcgtccataaatgacataagctcatgctcagcagttgcatccactaactggtcgatcttgggaagtggaaaacacccttttgggcacgcctaattcagattggaggagtcaatacaagttctccaagttctgttgagcttcgggatgcgaacaagattggctatccatgagggataaaacacctcgcgtataaagtcattggcgaacaacttgtcaacctcctgttttagtgcctcttgcctctcggaatccaagggcctccttttttgtctctttgatgggtagtttggatcaacatttaagtaatggcagataatattagggtcgatcactatcatatctccatggctccaggaaaacttatcctggttcaccttcagaaagcttgttagctgctatttgagctgctcgcctaggttcttcccaatgtacagacatttcgcaagatttcctgggttgagaatgacctcttccaattgctcgattggtttcaacaggtttctctcatcttgaactcgggggtcaagatcttcatctttctgctcaatttcttttgccaagatcgccatcaactgatgatcggctttttaatgttgtagctctatgcgatagtaatcgcgagccagcatctggtcaccacgcaccactcccacgacatctggtgtttggaattt

SEQ ID NO: 138883 - DNA, 735 bp, Cannabis sativa
  modified_base (29)..(31): a, c, t, g, unknown or other
cgtgcctcgcacgtaactttttgctagtnnntatatatatatatatttgttattcaagtatatatatgtaacatatatataacggagagtaatatggtattcatctgggtggtgatacgttgaacagattttatggccttggacaaaaaattccactcataatgaaccatatagggagatttgatactcaaagtaagtagaagttagaacatctaaggagggtgtgcgagaacacccgaccaactttcaacatgtgggcagctcgcatgagtcgaccagagaatgcaagtcagacatattattaatttttttgacgtagtgattaaagtcactcatgaatttacgatgtagacatctgcaaacagtgcatgaacctccttgaacctggatagctcattgtctaatcgagtggcatgttttatcaaaccataaactgctaaagtcagcgagtaatatgggacacaactgcccctaaaaatttagataataaagttataacgtcctcaaacaacacacccaaagagctagagctttatcttgtatcactgaatactacacaccaactcattaacatatcaagattggtccccaaaacatctagagaataaaataagattaaaaaatgaattaatcccctagtgatgatattaaaaactaataaaagaaattctcaatagttagaagataacaactctcaaacaaattatatttaaaattgttatgaaatattattta

SEQ ID NO: 138884 - DNA, 874 bp, Cannabis sativa
gccgcccttgagcgtaagcgaaagggcaagatggtggaggcggaaccttctaagtggacccataggggggacgctccggcgccaagcaacgactccgggattccttccgaggcggaggaatacactgtgccacacggcagagtgttgaccccggttcctacagatgaggagaggcaaaatctccgcgtggccaagcacaactacgccctcgacgagtacagcggggggcatgcttaggtggaggccttgaagagaattttgtgggaggagcagcggaacactcttaactaggatgccttccggaatccgtgggacctaaacatggatccactgacggactggttcaaccgctttgtcgggcccaccttggctccctttgcctcggagatgactagccagttcgtctcccacctgacgcaattcctgcctaaaagatatgctgcttgcgcctctctgaactctatctaccatgtccaagacattagctctgccatggccgcggtgagtactttgtaatttattccatcccttgatatttcgtcaaaggcatctgatctcatccttgtttcttttttcagattactactgagatcgaccgcctttccaagactttaattgaccatggcttcgtcatgtctgaatttgggggcatagacgaggccatgaggatccttcgagacttgtccaccaaatggtgggcattctaggaggacgctcaacggaggggggctctagcggaggcaaaccttcgagagcaggccaagcagagggaggccgaagtggaggcgaggcaccaggaggcgctcaagatggagggtgaggccgtggctatggccagacgcaagcttcaggaggccagggaagccatggacga

SEQ ID NO: 138885 - DNA, 912 bp, Cannabis sativa
ggcagttcctcaagccaattatttgcaagccaacaactttttgattagggtgacctttaatattttattgacagcttctgcttgtccctttttttgtggccttgcgatcgtagagaaacttttcatgactccgtgttggtcgcaaaaatctgtgaattcatcacagtcgaattgtttttcattatctgagactattttgtgaggtaactcgtatcgacatacaatattttttatgacaaagtgcaaggctttcttggcagttataatcttcatggattcagcctccgtccactttgtgtaataatccaccgccactatggcatatttaccccaccctttccagtgggtagggatctaatgagatatatttcccatactgcaaaaggccagagactagtcatcaaagtaatctcattgggtggggctcttgggatgtttgcaaatctctggcatggatcacacctcaggacatagtctatgcaatctttcttcattgtgggccaaaaatacccttgtcttaacattttctttgagaagcttgggcctctagtgtggtctctccacagaatttctctcatggacctcttgcataatctgtctagcttcaggatccgacacacacctcaagtatggcatgttgagcccccttcgataaagaacactgtcaatcattaaataccgatgagcttggtaatgtaattttctggacatggtcctttcttgaggcagttctcctattggtatgtacttaatgatagggtccatccaatttgatctttgttcgttgatggccactatttctttgttcctgatgctaggttccacaaggtgttcgacaggtaccacccccagcctctctatctcactatctgaggctaacttggctaagcagtctgcatgagcattcttttc

SEQ ID NO: 138886 - DNA, 568 bp, Cannabis sativa
aacacagggtccaattggtaacttttgtaaaacataaggtccaaaatggtatttacccttaaaaaaattatcaaaatttaagttaaagcttttttattattttagaaaatacagaatctattttattatttaacaaaataaagagtccaatctataatttttgtaaaatacagaattcaaaataatatttactcaaatataaataaaatccacgattttttttttctttcacttttgtctccgagtattaaagttttcttttaaaaacatgtcatttttatgagtttgacagccaattcggagacagacctcggatacataattataatgtgtgattactgttgaaatctgaaacgaatttagaatacttttttcttttgacctcccttcctaaaacaaaataaaaagtcatcatttatttaatttgtcaaagaaaaaaaatgaggttatattttttgcaacatccaaaccgactcatatataaaataaaagcgttaaattatttaataatttattaaaatataaaaaataaattatttaaattaaataagttttttagttgttaaat

SEQ ID NO: 138887 - DNA, 772 bp, Cannabis sativa
tatattaaaatagaactagttctataataatgttacgatgaataaaaacaaatacacgaaataacacaaatagttataactaaaatagaaccagttatataacatagtgaatggaagtttttagggtagatatggtatgagtgtaactatttggtatgttgaagcatgttgaatggatgtttttgtttgagttattttatttaactgatttttgtgtgtgagtttttatcttagttgctttacggaacaagttttttttgtctcaaatttttaactagttgataaatataaccagtttcgttatattatattttgagttattgtgtgttattatttgtgttaatttattttactatttatacctcaatattttttagaattgatccctactttttttttaaattaaattataaatgattttatgaggtattatgtgttatgaggtattttgttgtgaaactagttttatttttaatttatgtaaaagtggtttaggaactgattttctctttattgtgtgtacttgtttatatttattatgttatataactggttcattttagttataaccggtttgatttatttcatgttatttgtttttattcattataacactgttatagaattgattcttttttaattataaatggtttaagttattttgtgttatttatttttgttgagtttgcttttagccaacgacaatgagtcttttttataagcgataaacgatatatcgtaataagaatttgtaataaagcaataataagac

SEQ ID NO: 138888 - DNA, 640 bp, Cannabis sativa
  modified_base (204)..(205): a, c, t, g, unknown or other
caatcagcccaggaatttccatttttgtacctacaaaatcgtgggcagtaagtacaagctccagttttctcttcaagaaatctgatctaagaaaatgggaaactcactcaagatcaaaatataccaactggttagataagaataaattatgtaatcaaacttaccatttttacctcaatttccataaatagaaaagctagacanntttccttccaagtttagatacacaaaatatggacacaaattaaaatactccagccgaaaatatacactaaataataaaatatttttgtcaattaaatatgcaaaaaatgaaattaacaaattagattacttgacttatctttcattttttttttcttcttggttgatattgagtacgcccaatattttttttataggtagagttttatgattgtttaatattattttactaaaagctagttatataacatctaatacttaattacataaatagtagtatgatacttagaatagtactaagcactaatagtgtcttttagtcattctctcactacaaatttttttacattgagtcacaataaaatttataactaaaagtaaaaaacttgtgactaattataaatcatcactcctatgttgtgactaaaaagtctgt

SEQ ID NO: 138889 - DNA, 769 bp, Cannabis sativa
gatagaagctaaaaaaactacccacaagatcagagcttcttaatcaccatcagaaactaaggtttcaattttaaaattgtcttaacaataatatattaattctatgtatacaaaaaataaaaaaaaataataaataaaaaaaaaaaagctgtcaacacattatttttttaaaaaaaaaaatgctataaaatgtatatgattttaaaattaatggtattaatttagtaatattaatgagaaatataatgagaaatataaatttaatcaattaattatctttccattaaagttgatggtgaaaattaacactgttaaatcaatcaattaataattttttttaaaaaaaaatagttttaaatatctaaatttaatttatttactaaaatacaacttagattattatttaaaagtataaaaaattaaataagtagatgtcaattcaattaattaatcgtaatttacaacaaatatattatttatattgtttaaaatatttaaatttatttactcattttattatttaataaattaattagacatatatgtataaataaattttaagctagattaaattttataaaaatataattgaattgcattagatttaatttttatttctattatttaaattaataattaggtaataacaactctaatataaatatgcatcacacgttaacaactctaatatatatagctaactttaaagtttgtttgttaatggtgtagacatggcgaactcggaatcaggatctgattcaggcgcaga

SEQ ID NO: 138890 - DNA, 542 bp, Cannabis sativa
taattctattatgtttaagatactatttggtaactttataagtttttgtattaacatatcaaaatttcttttctaaataaatttgttaatattatactatatcataacttttaaatacaaaataatagaagactttatggtaagttatgatgttacttaatatgttaaagtttattaaatttaagattttattactttttgctacaaaatctaaaaaaagaacaaaaaagttacttttaatactaatcgtccttattcagaattagtaaaaagtaagagagatatctaaatgttagaggaaaagtaaaaaaaaaaaaaaaaaactaaaagaaataataaattaagagaaaaaggtaaaaaaaaaaataataataaatgaagaagataataatatcaaaaaaagaaaaggtaaacaaaaaggaaaaaaaaagtaaaaagataaatattggaggggacttataatttattttttagattttttgttgtgcattgtgtattgttttgattatatttttttgtgtgtgtgtgtttttttttttctt

SEQ ID NO: 138891 - DNA, 1400 bp, Cannabis sativa
  modified_base (274)..(277): a, c, t, g, unknown or other
  modified_base (346)..(349): a, c, t, g, unknown or other
  modified_base (410)..(416): a, c, t, g, unknown or other
tttcttttcctgccctagaagaacatagccttatggttgctccatatagatggtttcttcaagaattccgttaaggaaagctgtcttgacattcatttgctaaattttgtaatcgaaagcagaagctatggagagaagaattctgatggatttgagcaaggcaaccggactataagtttcctcatagtccacaccttctctttgggtataaccctcagcgaccagcctagctttaaaagttttgacttcgccaccaacacctcttttcttcttnnnnacccacttacatccaattggacaataatcatcaggtgtgtgtacatattcccagactttgttctttttnnnngaatccatttctgaatccatgtcgcctgaccattgcttctgttcgggacttgccattgccnnnnnnnaggttaatggatcgtcattaatatcgtcaccaacaaccatattgatttcaccatccaagccataacgagctagttttgtagaaaccctcccaatacgacgaggagccgtcaccttctgaacgagaacatttgtggtagatttctcagttgtaacaacttgcgttggttcaactaagggagtgagattttcttatacttgagtaaaagaagatggaacattaggagttatatttgaaagcatttcttctaacactactttactttgtggcttgaagtctttaatatagtcatcttcaaggaaagtagtgtttgtagaaacaaacactttattatccttttgactataaaatagtccacccctagtctctttagattttttgacaaacatgcaaacctcagttcgcgcttctagtttgccatctaggtatacgaccatttcatagttctacgggtgtcttaaggactgatttagaatgaacaatatttaaaatgtcattagccatttgaatagcatatccctagaaggacggtgacaaggttgaatagctcagcatagacctaaccatttctaaaagtgtgcgatttctcctttctacaactccattttgctgtgaagtgccagttgcagtatactgtgatttaatttcaagttcaattaaatgatctttgaactgcatatccatatactcaccacccctatcagttcgcaagatctttaatgttttacctaattggttttgagcctaagcatgaaattcctgaaacttctcaaacgtttcagatttcttttgcattaggtaaagaaactatagctagagaaatcgtcaatgaaataagtgacaaagtactcataacctccttttgcttttacatttagaggttcactgacatctgaatgcactaaccctagaggttgtttggcactctctccctttgtagagaaagaacgcttagtcatttttccttctaggcaagattcaaaaa

SEQ ID NO: 138892 - DNA, 622 bp, Cannabis sativa
ttactcaagtgggtggtagaattgggtcagtatgaaattacctttcaaccctgaacaacgatcaaatggcatgccttggtagattttgtagtagaatgcacgggcaaggaagaaagcgtatccctcgaggcagtacaaatacctcatcttagtaacaatgaagacaagccgacttggaaactacatgtggacgggtcagctacagatcaattatctggtgcaagaatcgcccttgttacacctaagggcagcacctgcacgctgcagtcaaatttagatttaaagcatccaataatgaagccgagtatgaagctttgatcgcggtctaaaactagcccgtgagatgaaggccgaacatatcgatatctatagtgattcatagctggtagtaaatcatgtatctggagaatacgaggctcagggtgaaaaatgatagcatatctgagcaaaatacacgacctgctcacacagctcaaaagctgtgctctcaggaaaattccaagggaagaaaacatgactgctgatcattagctcaacttccaagtagtaatgtaagtgatagagcaaatctggttcctattcagtttctcgaagaacctaacatcactggcacggaagagat

SEQ ID NO: 138893 - DNA, 587 bp, Cannabis sativa
gtattgggcatacgaggccatcctagagctgggcaacaagtatgctatgaagaagtcacattgcttttcgagaatggtgaactaagagagtaagccgaaaacgacactcgagaaagatgaagtgatacgattatttgctagaaatgtaagtttcttacgcttttatgattaattcatgttaattttcatctattaatatatatttttttatttttcagttgagaatttactctatgttatgtccttgagcgaatgagattaagcttgtgagttgcatcactggcggtcaggcgcctttatttgttgacttggaggaacttgtgttgggtgacgatgggcaatcaacacaagatgctttggaagctaggccaaagagcttgcctcgacattggaagaacgagcggatgcaactcgaatatttagagactctacaccacctacaccgtctccaccgcatgcaccatcttcactaccacatgagtctagtgttgccccatatgcaacatcacaggatcctcctcttcgcccgtcagcatctattcccagcacttcagaggcttttgaaccagtatacccctcccttttgg

SEQ ID NO: 138894 - DNA, 569 bp, Cannabis sativa
gaatagttaaaactttttcttagaaaagtaaaaatatctagaagctgagaagcttatatagattgccattaaaaaaatactccagcatcttactaaagtaagttgctcgcacaagagtaattaaataaccaggtataccacaagccataggtttagattaactcaaaccgttaatactaggattaggaagttttgttaagtccattgaatagacttattttcaaattttcccttcttctccttgtaatagaaaactttttggttactctatatgaatggttttaaccacagttctcttggctttgctttttagttccttattctgactatccattacctgtttaaaactaacaatggattttcccaccggtgtcttcaaagtaataacagggtgagttcctagaaaccctcccactacacaaggtactgtgactttctgtcttagaacataagtgatattatcctcattagttgtgttaatacaacagaggcagtgagaccatcttatatagaatatgatgatagaacacttttagaatcaagaacaaatatatcctttatttgctact

SEQ ID NO: 138895 - DNA, 655 bp, Cannabis sativa
  modified_base (211)..(217): a, c, t, g, unknown or other
gggctagttttagtccagcgatgatagcttcatattcggcctcgttgttggatgctttaaatccaaacttgactgtagcgtgcaagtgttgccccccatgtcgttaccaagtcgattcctgtgccgaacaattgatctatagcttcatattcggcctcgcatgtgcattctaccataaagtctgctaaggcctggcctttgattgctgttnnnnnnnggaaagtaatttcatacttacccagttctactgcacacttgagtaaccgtccagaggcatccgacttttgcaatttctggtgtaacggttggtcagtgtacacccaaataggatgagattgaaaatagggccttaactttcttattgattgaatcaagcagtaggtgagtttctccatcaatgggtatcggccttcggcctcaatgagtattttactaacgtaatagactagatgttgtatgttgttttcctctctgatcagtataacactcacggcatggtccgttatagctaagtatatcttaagttcttctccgtatacaagtttcgagagtactggaggttttgcgagttgcgtttttagctcttgaaaagctttttcacattcctccgtccactcaaattgcttatttcatcgcaggatgctgaagaatggaa

SEQ ID NO: 138896 - DNA, 598 bp, Cannabis sativa
ttctccttaagtacttaagctttgaaaattcaattttcacacaactcaaattctcaataattttgataccaaatatatcaaaattaaacctaatttagataccaaacatatctaaattatactttattttaagacaccaagtatgtcttaaattctcatattctaattttagacactaagtatgtctaaactttctcatattggagtatgtacccctaaacttttacatttcattatcaagacaatatcttaattttaaaatatagaatatcactttgtctctataatttctcttaaattttaatttcttttttaaaaattatattcaccaaactttgacatcaaatatgccaaatttttcacatatacacatatccaaacttgatttagaatttgaattcaaaatcaaataaattaatcaacaatgtctcaacatattttgattaaatttgtggctcacccccacatttctagcataaagtgtatataaaatatctcttttgtgtatatttctcttgaaatgactctttaaagtcactttaaaaataccatttgatatttttagttttctcaacaaaactaaaatatcaaactcaca

SEQ ID NO: 138897 - DNA, 553 bp, Cannabis sativa
  modified_base (29)..(37): a, c, t, g, unknown or other
  modified_base (373)..(378): a, c, t, g, unknown or other
ctctctctctctccctccctctctctctnnnnnnnnntctctctctctctctcgttctctgttttggcgtacgaaatcaactcaataactaattttttaaggtgtttaaacccaagcaaaaagattgctttgaaccgaaagtggaacgattctgattccacaaaaatcggtcctcctgttataggtatcacacgtatatacactcggtttaaacgtttcgtaaattaatatataatatataatatataagaaatgtgtcaaatatatcatttaacactataataatatttaccaatattattatactaaaaataataatcacaaatattattatattattataagttaacacattttattattattattattnnnnnnattattattattattattcccacactaataataataggtaccaaaatcaaacaaatcaccgaaatttaatattcagatatatatatttattaggcattatgcacatgccaagaaaatcaaccattatatcatcacgaaaattctttacatttttaaacccataaatatgtaaaat

SEQ ID NO: 138898 - DNA, 613 bp, Cannabis sativa
aggatgttaatgaaacatacttggcagtaaatctagatcctggtaaaatatttccaccaggaaccacatcagaaaccacaactgattttgaatctgattttatctatgccataatcttaaaagcaaacaaaatagatagagaaaaggaacaaaaagaacaccaaagaatgaacacccaaacacgaagaaggcaaaaaacatactgaattacaaccttaaacacacgcgaatgggcttagaagaacaaagtaaagaaccggtaaaagaacgccgtcgaagacgccgtcacacgttcctccacgcgtcgatgcgtgggaaaatgcgtaaaagcttcaggcagcgcgtgaaccccacgagcgaggaattcggcggccggacttcggggttttatagatcggcggctgggcaacactcctgagtgggcggtgagaataaattcgcactccaaaaaagatttttaaaaaagaaccctaaactaacccctaatctctttttttttatgaaacctaattttgaatttggaatttcgaatcacaaagctctgataccatgtagaaaatagtgaatcgaattgtgtatgtatttcatagaatagtacatatttatatacaaa

SEQ ID NO: 138899 - DNA, 631 bp, Cannabis sativa
ttgttagttgaaggatccattaggtcatgatgaaatatgttccaaaatggttcacttttgctgcatatattttgtatcaagtggggtatccttgtagttgtaggttgttcacctggtaagacaaacccatgtgaagattcaaataccaaacaaacctaattgctttgccacagaatcattatctatatatacatgcaccttaccacaatactcaatcacatatggtattgtctttctaagttaagtagtagctggatttgtctacaatggtttttctttgttgcaaaaagcttattacacaggtgggctctgttgttgttgttgttttttttctttttctaatggtaagaacttagacagatcacatgtataagcatatcaaactctaatacatgacttggaagacaaagccatgtgaacttcaaatgcttatgtttatgtctcttgcaaatttgtcaaagctgcccaaatgtattcagaaccacttatttagatatgtgttgattctaacagtccattcatctatataaattaagctacataaccacagagctgaatcatcaaattatcacattctctctactacaaaatatttttgtaagtacttcttcttctaaagataaaaacacac

SEQ ID NO: 138900 - DNA, 793 bp, Cannabis sativa
ccttccacgaacctacgataatatccggctaaacccaagaagcttctaatttctatcactgtcttcggtcttggctaatccatgaaggattcttttttcccaaaatccacataaaatgcatttcagaattcaataataacaacataaataattatttaaatatctataaataattatccataattaaacataattaactgttaatttccaaattaaactaagcggtctttacaatccctttccttagagctcttacattattatctctgaatatgaattcttagataagttttttgaccctttgtccagtgagaatgaatcactatttatagggctataagctttgagggaagagtttcccttctggttacaattgatataataggaaagattgcataataaatgcaaaatacactaatctagggatttcaaacagcttgccatatctctatgatctgatcccaaaattatagggatcctttctatgactcacgatgcgaaagctgaaactactaagtgatggcgtgctgttcagactgctcactgctcggttaagcaggcttcgtccgagcgaatatatgtggtactctgttcaacatatctcttgcgagctggtacataaagttgattccacgtgacaccattgtgtgacgccacgtcaaagtacaaaaattgggataacaatacatattcagtctaagaaaagttcaatacagtttttggcattgtaccaacaatttaattaactactagtgttacttcctgactatcacagaagtagttgccaaaaagt

SEQ ID NO: 138901 - DNA, 536 bp, Cannabis sativa
  modified_base (396)..(396): a, c, t, g, unknown or other
gggacatcaggacttttgttgtttagtcgctgggcgacaaatattttgtaaatgaatagcaaacttttgtaactgtattttgtaaacgggatcctggaatcttacaagtatatatgttatgttttaactaaaaagcaaaattttaattattcacgtttttccaataacctcgttaattagcaacgagatgcacagtacgttacaaatcacggtaacatgcctatgctcgttagggtgttacaaattgcgaggcagaatcaacagctgctcgaaaatcataaagtttggtggattactaactacttaagcaagaatattacgagcaatggacaaacccaaaagtgttgtatattcgatcaaaacatagttgtttacattgtgaataataacacaagnaaatacaattgtattaagtttgaataaaagcagtacaaggcttctagaataagaaaaacctaagactggttacaaacttgtctttacaaaaatgccacaaggggcaaaccattaagtcattctcctaagcttatgatgag

SEQ ID NO: 138902 - DNA, 598 bp, Cannabis sativa
tatatatatattaacatgatatattaatgaggaagaaaataaaaactgccattctcataaaactaccgaagagattatcaaactatcatcatctctcaaaaaatctatgatgctaatacatatatttattatatatacatatattatatatgtaggacatcattctagaagaggattgttaattcaaactcctaccttttaggttctaaaggatttgattgaacaattattataatatatatttatatagaattatttttaattctttgaaaatattattggattgggtaatatgataaatatcatttgggttattccattaactcatatttttgtttttgtttttttccctcttgcaggtatacttcttgtcccatgttcttgaagtgaatggatcaagctctaacattagctcatttctcacttataagctctcatcaattattatttttatatagaatgataatgatcaaggtaaaccaacgaactcatacattctatgctgtatataatttttttcccactctttctactgcttctaaatacataataatgctatttctttttttttgtttttttgcagtgttcatgaaatgga

SEQ ID NO: 138903 - DNA, 1282 bp, Cannabis sativa
  modified_base (1082)..(1083): a, c, t, g, unknown or other
tggacggaggaatgtgaaaaagcttttcaagtgctaaaaacgcaactcgcaaaacctcctgtactctcgaaacctgtagatggagaagaactaaagatatacttagctgtaacggagcatgtcgtgagtgttatactgatcagagaggaaaacaacatacaacatttggtctattacattagtaaaagactcattgaggccgaaggccgatacccattgatagagaaactcacatactgcttgattctagccataagaaagttaaggccctattttcaatatcatcctctggccggacacctctggccggttactcaagtgggttgggtaagtatgaaattactttccatccctgaacagcaatcaaaggccaggccttagcagacattgtggtagaatgcacaggcaaggaagaaagcatatccgaaggcaacctcgagctagtacaaataccacaaccaagtaatagtgaagacaagccgacttggaaactacatgtggacaggtcggctatagatcaactgtccggcacatgaatcgcccttgtcacacctcgggggcaatacctgcacgctacaatcatgtttggatttaaagcatccaataacgaggctgaatatgaagctttcatcgctggactaaaactagcccgggagatgaaggcctaacatattgaaatctgcagtgattcacaggtggtagtaaatcacgtatttggagaatacgaggctcagagagaaaagatgatagcatatttgagaaaaatacacgatttgcttgcacagttcaaaagctatgctctcagacaaattccaagggaagaaaacatgattgctgacgcattagctcggattgcgagtagtaatgtaagtgatagagcgaatttggttcctatctagttcctcgaagaacctagcatcactggcacggaagagattgaaatgattgatacttctccaaactggatgacgccaatagaaccctacctcaacactggggaactcctagataatcgaaaagaatctcgaaagatgagaaggaaggctgcacgatacatcatagtagagggaattatgtactgnngaggattctccatgccattgtttagatgtgttacccaagaagaaactgcacgaattttgtatgaagtgcacgatggattttgcggaaaccataccgccggacagagtttatctaagaaaattctaaggtaaggttatttctggccgaaaatgatcgaagattcaaaggcctatgctaaaaaatgtgataaataacaaag

SEQ ID NO: 138904 - DNA, 1094 bp, Cannabis sativa
ctgtaagggatagacgacccaaagtggcctcgctaaccaatgtaaagcaatatcccgacaagacacttaaggcatacttaagtcgttttagaacgactgctgcaagagttagaaacttggatgatagtacacaagttaccgccctttaggcggggatctctactaatccatcaaccgttagaggcaaactctgggacgacttacagggtcgtccagtgagaaacatcactgagttcaatgaaagggctcaggtgttcgttcggaaagagaaagcccgaaaagaaatcaatttgttgaaaacaggttccagaggcaaacccagcaatgtttcgacaggtagtctcttaacgagagttgataactcgggggcttctagttcgaagagaaaagacagttctaaggaaccatcaaaggataggaagaaacacaaaaagcataacaagtacatgcagtgtttacaatttataccaagcttaatgaaactcgggaaagtatttacctcgcacatgagcaaaaggttgccttcggcaagctctagcccatgaggcatacgaggaacaagagagatactaacttgtattataaataccataaggacattgggctcacgaacgacgaatgccgccagttgaaagatgagatagaaagtctcatcgctcgaggccactttacacagtacattaagagatagggcaatggacacaaccagcccagtctgcccaataacccaaaaaaccaggggttacaacctcgtccgactgaaggagaagacaacctggttatttcgagagggccacatatcgcaggggagagcaataacgctgaaaagagatatgtgaaagagataaagaacgggtagtcggcatttgccccaaaaccttccaagaaggtaaaaatcgaagaacctccaatcataattttagaggaggatgagaagaacgtgagatatcctcacgtcgatccattagtggtcactatttaactcgccaataaaggataaagacggtgttaatagatagtaggagcttggtaaacatcctttataaggaaatgctgaggaagatggggctcaaaaaagccaaattgaagccttg

SEQ ID NO: 138905 - DNA, 966 bp, Cannabis sativa
agggcataaaacccacatcctcgcctttgattgatgccacaagttgttagaacgccaccaacataatctcctatggctcttattcttgactcgatgagctcagctcaaatgtgacattagggtcttttgtttactaggcttggaacacataattacaaaatcaaggtcaccttgtgaaaagttatagtgactctgggtaaaaataagtgcttagccaaaggaatagaagataatgataaaggttcaggccaggctgcatctcgtaagtaacgatatttaccctcagttatctcttatagaaaacgcctatagtgactagcaacttcgtcctgattgaggtccttaatttttgcatcatttatctcaagtttggattgaggtttaagaatttcgggtttgaatgagagggctaattccttaggacactctgtttctaagaatttcggagaataaatttcaaaaccagattgggacattttttacaaaaagagcaatcccaattcctagaagaaatttattaaaaccagaaacttataaatatgataaacgtaagtttcactttgattaaaccctaaaaattaccaagaaaattaaatcgaaattactacaaccaaacagagcaaacaaagatgcaattaattacaaaataaggatcgtaactcaggaaaaagaaaggaccagagaaaaagggatgaatcacttactcttcgaagatgggttttcgcacgataaaaagctctgcaactgaagtttagatgattggcgtgacaaatcttgtgaaatcttgaggttgaagagtatgtaaaaacaaattgcgcagaaaatacgtcaatgacaaagagggcatgcaaagttttgagaaatcgaaaatggtttcaagaaaagcttgagtttttgaaaagcagaaatggtggaataacggtttcttttcaattttatacgttgagattgatccccgttagatta

SEQ ID NO: 138906 - DNA, 1379 bp, Cannabis sativa
  modified_base (430)..(434): a, c, t, g, unknown or other
agcccaatagcaaacatataggctcacataggcaaactgatttggatgagccttatcatgttaccaagtttatcacagatgaaagaaattacaaaattcacatgttacaaattatttatttgatctattgacaattggactatgattaaaattaaataattagatctgtcaacaagttaatcatagcaatttagatcaattaaataataggtttagttaaaagttttgaattaaataatttaaataaataaaaaatatatgtaacaaattgtgaagttgagatatttattaataatataataaaattatcatttaaataaccaactaattttgaaaatttaaggttgttaaaacaacctaaaatatcttttcaaaatttaaaattcaaactaattttaaaatatttaagttttatttgaattattttatnnnnntaaattaaatatctaataagatatgatatgaaaataacaaactagatatttttcatatcattttctgatcttataatttaataaaattaaaataatcaaataaaccagttttaaaatagatatggttaggtaattattatttcaagaataaaataataaatcaatgataatttttaaaattatatgtcaaaatatctcatactaagcctttttcaaatttttacaaaaatatctaggttattggaatatttaaaatattatttataaatatttgaattgataagtaaaataataaaatgttgtcataaatattatttttctaacttataatccataaataacaaaatataccatcaaataaccaatttgtgaatttaaaaatattatggttaggatatctataaaaatctctaggttaatttgaaatttacaattatttaatttatcatataagataatttgaataaaatatttcaaagtaaaaggataataatatcatttaatttaaaatatatctaatattaaaatatctaatcttattattaaataatcaataaattttaagaaattaactaatttttaaaagggaaatttgataatttatgctaaaaaattagatagggtgtttaattatacccaattatcacacataaaaaaactatacctatcttttaattatcttccaaaaatacccctgtcttttcaaacttctcacattccctctaactccattctctctcttctacattctctctcttctttccctctccccacccacgctgcaaacaacaaccaccagacgaccaaacaaccaaaacccacgaaccccaatcgcagacgaccaccaaacaaccaccagacgaccacgaacccacaaacccacgaacccacgacgacgacgacgaacccacgaacccacacccacgaaccgaacccttgaaccca

SEQ ID NO: 138907 - DNA, 767 bp, Cannabis sativa
  modified_base (203)..(205): a, c, t, g, unknown or other
atacgctttctcccatgcggcattaaatgcgaggtgactgttcagataggatttgatacctcccggagatgcctcattgtagtctttctcttcgggagtatatgaaactttcatgccttctctgagaggcatgttaaatgctgatccttttgattaagaagacttagtcgaattatctcaaagtcttgcttcttcagtccacnnntcacagtccggttggtccacgtattttagacaaaatcaggggcaacatttacccccagagccttgtttagtaaaaagtaaacaaggcttgcttagatgcctgcggtttccttattagcttcctggcacgtgccttgggcgcgtggggatgcatttgtgaccatcattattgcagttattcgctttttgcaaataacgattcgtttccttcccatttaatgatacggcgcattaaatgggtgtcagtggagtactcaaacgttttctactgccttgatgaatgcttatcccaaccgttggatctgtagaatgcgaatcgattgcaattctgaccgtacgatgatgatcgatcacaactgtctcacacccgttctggcctataaaagccagccttctcatttcatttggttactttcaccatttcaccaaattttcttagagctttcacagagaggaaagaatttcaggcaccatagattacttgcttctcttccttcgccgtttccagtcatccctttaccggcgatcaacaccaacccccagcctgttgggttttatgccct

SEQ ID NO: 138908 - DNA, 602 bp, Cannabis sativa
tatgtttttctttctttctaaatgaaaggaatcgagtttgagcttgagagaatgagaagtagttttggtttttgatgttgagtagtattggatttagagttatatatagtgtataccattacctttttagctagtggatatgacatatttggaggattatattataacaaaacaatccaagtggatatcccttctatttccctaggctttatcttagttgcatttttataatgttatgttgaatagaagtgaatcaatgtaagattgagtgggggttgtggagggatttgattgatattaataaaagagtctcttagattctttgaaaagctagattttcataaatggctcttctagttttttcaaaaattgaaacacaatattgtactggctgctgttttagagtgtttttcttagttttttcaagtatatgtggttggtgataatatgccgttcgataaatggggtgttcactatttcattaacaaagaatacttatttttttttaaaaaaaaaaaacttaaatggaaaatactaataggtatcttataatgccaaatattgtaagatgtgacatattgtttattactgcattttaatat

SEQ ID NO: 138909 - DNA, 747 bp, Cannabis sativa
tgataggacttgattgatggatgttacggttcacttttccattttttaataaatttaaatttcaaaaaagtaaccggtacccatttatttaaccctacatacccctacatcaacccctacatcaaccccagcctttggattaaagtaactgcccatccgacggttacagtacatcacagattgcaatccgtgtccgtacaataacgggacaaaatccggtccctaaaaatatatagtagaaaaatagagagtttgagaagaatagacagtgatgaatagagatgatagtaactctgtttatatttgtttagtattaagataagtataaaattgaaatataaaattattatgttactaattataaaatgtatctttattttctttaagggatatatgtaaattgattgatatatatatttttttttattttatctctcatcttctcacttttattaaattatatttatttagttaataatatttttaaaaatatatatgatatgagatttatgcactattaattcttaaatttttctttttttttttaaaaaaaaaaatacctttgtggaaataatttttttttatatatatattatatatatatataatatttctaatattgttttaattgttatatgaaaaagaattagaatataatagcatcagtacctttgtcttttttttcttttatatttatgtttcaattaagctgaatattaattattacaaaaaagtaataatatttgt

SEQ ID NO: 138910 - DNA, 1094 bp, Cannabis sativa
atttattaatgtttgttaattttgatcttttaatgaattccattacaataatattgtttattagtagactcatgattctaacaatagtgaatataataagtaaattttaaaccttctctaatttgatgatgaagatagagattgttgtcaagaggcagagatgataactaattaactaattccactttgtatttaactgaataaataaatattaataactatattatttcgatttttattttttaaataattgggcaatgcatgtgtgaaaagtaggatttgaccaatgttaaatttgaaagttctataaaaatttacaattccaagtttatcgatttgagcaccaaaccaaatcagtaagtaattaagaaaaaattaagagtttacttatttggtttgagttgtggccatgatcttaattggctggtaaattaatcactcaatttattttgtgagaaaacacaataaaccagattactaatttttttagtagttattgttggtagcacttgtaacaagagcataatttttccttcttccttctgatgtggattctatatgaagataatcttaggtttatagattgtagagcataaatcactgtctgatataaatttataggatgattgatcaatccagtttaatgggaatgatttgaccttgttgttgtgtagttgtaattaacatttttatgaggataatataatttattataaagagactcattcatgtttaatattgattccaatataatcctttgattttttaaaatcagttttaatcaatgacttaaaatcactttctaaaacttaggatttttgtatttataaaataacagtagatgagatgagatgaaggtgacatgtccatgatgagtgaggtcttcccaagtttattatggcaaagtgtgattacaccaacacaacactgcttgtgtcatgccatggaatatacctccttccttccttccttccttccttcctgcatattaagaagacataaattaaatagaccacaataaaagaggggattcttctaattattaacaaattcaccaatgaattattaacacttgttcacaaatatatttacaa

SEQ ID NO: 138911 - DNA, 1168 bp, Cannabis sativa
atacccaactcatgacctagaggtttctgttgtggtttttgctctaaagatatggtgacattatctttatggtaaaaaatgcgagatttaactgatcataaaagtctaaagtactttttcacccaaaaagacttaaacatgaggcagagaaggtggctagaattggttaaagactacgactgtgagattttgtatcaccccggaaaagccaatgttatggctgatgcactaagtagaagaggtctggggcaggttttcaccacagttttgatagcccctcaactagcttctgagatggttagtacagggattgagtttgtagttggaaaattgcacaacttgacactccagtttgacttgctagaaagaatcagaaaggcacaattagaagatcccgagctagtcaagattcgagatgaggtgatggctggtcggcctaaagacttttcaatctcgaataataaaatgttattgtataaagcttgagtgtgtgttcctagtattgatgagcttaagaaagaaagccttgatgaagatcacagcacatcttattcactgcatccgaaaacaacgaaaatgtatcaggatttaaaaccctacttctggtggtatgggaagaaaagagatgtggtagactacgtgttcaaatgcttaacctaccagcaaatcaaagttgaacatcaaaggccggcagggttattcaacctttagcctttcctgactggaagtgggaggacattgcgatgaattttgtaaccggtttgcctagaacgacgggaatgtatgattcagtatgggtcatagtagaaggatttacaaaatcagctcactttctgccagtaaaagttacatattcagtggatcagtatgctgaactgtacgtaaaggagatagttcgtctccatggagctcctaaatccattgtttcagacagggatccaaagtttacatctaagttttgggtgagtcttcagaaagccatgggtacaaagctgaagtttagcacaacttttcactctcagacagatggccaatcagaaagaacaattcagatattaaaagatttgttgcgagcctatgtcatgggtacttgcctctaattgaattctcctacaacgatagctaccatagtacaatagggatggctccctatgagatgctatatggt

SEQ ID NO: 138912 - DNA, 940 bp, Cannabis sativa
taaggtgtatactcttacgatatgattgcttgtatacaattaaaaatttatacatattataataatatttaataatatatttatttttaaaaaaacaaatgatattaataattaaaaattttaatattttttttaatttgaattattattttttaaaaatttaatttgaattgtaattatttattttaaaaaaataattttacttacaaaatttattatcaattttcttatactattagttaactataataaaattgattacttaagtacttttaccactaatttatttacatacatagttcttccataattatcttttaaattattttgtttatatattctataaaattatgtagtgatatttttatttgaaaaattttattattattttttttttataaagaacgatattttctattaatataatcaagacaactatatccacaaggaatttctctttaaaagaaaaatttacaactcttttacatttttaaaaacaattctatctatgctaaacaacttcttgtaagtgttgttgttgagctcaataaacttttttgaatttcaaaaaaaaaaagattaaatctacttttgagtctttctttaatgtcactatctatacaactcggattcacatatatttttcagatttatacataaattttaatttagtgtaaatatcattaattgcacttgttaatatacttttatcaatattatataatttttatgatacttttttttgaataaaagtaattcattcaatagcaatatctgctattacaatagactgaagagtagaaggacattgctctcagtaaaaagacgctcagacaaaaaaaaaaaacaccgcgagcaacacaatgtgcggctttgttagcagatcgtttaacatgacaaatagaaacattatgtaaagaagaaagaatcaattgacact

SEQ ID NO: 138913 - DNA, 534 bp, Cannabis sativa
tatttacaagctcagtcttgaaaaatcagagtaaaaaaatattaaaacaaatgtaaaataatgaagcagaaataaaataaccacttagaaaaatataaaagaatcacacatctcaaaacctttttgtcagtgagttcgtcaaatctatttataggagaattaaagtaaaaaaaaaatacaaaaataaccatagaataagaagaagaaatatatttatagcctctatcttccacctacgaacagatctaccacagcaacacgggaatacccaaaaaataactgttaattccggcgagatagagcaagaacagtgaaatcgacgtcaaataaataaatcatgacaaaacaacagtaaaacaaataaaaaaacaaaagaaaaaaatgattaaaaaaactaaccatcttctacacaactttaacaccagatgcaatatatgctatatttgcagaccagttctaaaaaattagaataaaaagtaccacactcttacttttctaaaaaaacgtgactgaaaatttcaaaaactaaaaaaa

SEQ ID NO: 138914 - DNA, 553 bp, Cannabis sativa
tttgccatcattccttcaaggctcgaacaaatttcttgggtcaagagaaagacactcattgcataacttggtaaggcttgagctactgacttaatcaaaacttctttgcccgcttttgataaaaacttagtctcccaactgaagatcttcttcttcatcttttccttcaaaaagccaagaatggcatttttatttttccccatgatgcatggaagacctaagtagaaactatcatctgaagccgcatttaaacgcataagactacataatcgatcccgcatagccgaagtaatatttttgctaaagaaaatagaagatttagcaaaatttacctactatcccgaagctagctcatatctatgcaaaagtcgcagcacattctgagcttcattctcattggccttacaaaacacgtagctatcatctgcaaatagcatatgagacaccacacgagcaccccgagccactcgacaaccagtcaaccaatgttgccgctcatagtacttcaacaacaacgagagaccctccccacaaatcaagaacaaataaggcg

SEQ ID NO: 138915 - DNA, 936 bp, Cannabis sativa
ccgccaaaaattaaacttaagtatttatttgcaactaaaagttatacttaaatatttataccgcaaattactcgtcacttattgttattttaatatcccattttatatattttaattaaataaaggatattggcagctaaataatttaaatttttaatttttaatacttaaccacaaaaattgattttttgaggtaaaactacttaaactctcatttcgttttgctctgtaaccttccgtccaacaatcacagtaaagtgccacagtagactgtccacgtgtacacacttgtgacaaatttttagtggcccacgtaatattaatttttaaaaaataattataaatagggatattaatagctaaaccacccaaactttaaattttttaggaatattggcagctaaactacttgaactctaaattttttaacacttaaccacaaaaattaattttttaggggcaaaactacctaaactcccattccgttttgctctgtaccccttcgtctaaaaatcacaattaagtgccgcagtggattgctcacgtgtatacacttgtacacatggcaaagttttagtgacccacataatattaatttaaaaaaataaaaaaataataaaaaaaaatttacaaatattttcttttgtgggatattggcagctaaaccacccgaactttgaattttttaacacttaaccacaaaaatcgaaaataattttaaaaatatattttttttacttttttttttctttttcttcttcttctttctttctttctttcttctttcttcttaaactttctgaaaccctaatctctcggccctccctcgtaggccctctctttctctctcttgtctcaccacctaagacctcgctggaggcgaagcacccgggccctcgatggaaccatttgccatctctttctctctctctctct

SEQ ID NO: 138916 - DNA, 780 bp, Cannabis sativa
aggtacttatgttactaaaaataagcattggaattggatttatatataccgctttacaaactacaaacttaaaactttggatacttatgccgctatttatctttttgttattaaacaaaatataaagtcaataacttttacaaaatacagagtctaaaatagtatttatttgattatttatttggttagtgcggtatcataaatctcaacacgtaatttctctgttgagtaatacttatactgttaatttgattatttattgagtgaaaaagtaaaaaagggtgataatgtaaaaatgataaggaattaataataaatgttggaccgtgtggtgtggtgtggtgttattggaaaagatggaagtctatcttttcatattttcttttcaaattgatgtaataataataattaaaaatgaaaaataatacagtgacagtcacgtgaaacaaagtgaccacagtcacttcttcttctcagcagtaatagtaagagtaagtaatagtactatatgtataactatagtgttaacaaaagtgttcactcaaccttttattttaatctctttaatcaacttttgcctttaaaaaaatacatcttagaatatattttttttcttataaagtcattttaaatatttaagtggtattctaattttaaaaattaagtccctataaaaaaaaaaggaacttttttatttttacattttcaaacagtcttttttgtatttttacaaaattctacataaaaatctcaattacaattagcgctgcaacctaaatt

SEQ ID NO: 138917 - DNA, 780 bp, Cannabis sativa
cccaaaaattcgaaaacctaaccagttcgattccaaaccttaccaaaccttccagacctgcatattataccccaataaacatattccaagcaacaaaacaactaaacaatctcagaatcaatcttcaccattaaagagtcaagcttgagttctaaaactcaaagcttcctcaaacctactagcagccaccaaaactaattcaacataatacattataaataaactccagaaaacaatatcaaacttcaacaacaaccacagaaccctaaactaacaattcatgcaaaattctctaacttaaagttcaagaaactaaaaggatgatgctaggaacttaccttgaattgagataactaacaacttactgtaaaacacattgaattgttgaagaaaaaatcaaaccctagctgggttctaagagggttcgaaagagagagagagaggtttggagagagagtgtgttttttttcttttaatttcttttttttttcatcaaatgaaataaaataaagcttttatcaattaacctcaaccaaaaattagaataataaacttagataaagtccgctaaaggacaaaaagttaattaggcaaaatgaccattttgcccatccccacactaaaagtcataaaaatcacttaagggtatcttgggtcatttctaaagtcccaactattcacgacattcctaatgtctaactatattgccccgctatactaaaaatactgagatgtaattctaatagccaaacactacattccaatgttgtcagacacaaa

SEQ ID NO: 138918 - DNA, 1652 bp, Cannabis sativa
aatgatagagattacattgaaatgaagttttatttagggcacaaagcccaacactttttactttgtacacttcaaatatgtgttcatttgatgctttaacttgagaacacatatggtgtttatttattttggcattataacataaaaaaacataaattcaatattatgaaattatgtttattaaatattatgtacctttaattttaaagcagctttatagttgccctttatctttatctttgcagttggagttaattttgtgaatgttccttgtgccattttcctgtttttgattgaagtcctcaaagcttccattagtgttgttattgtagctctctagctgccaagtttgctgcatttaatgattcagcaacatttgatgtcatggtattgtatcttttatttttagaatgcaaccttgaccatttctcatgttcaatattttgtagatatggtcgaacccgtttttctaaggcggcgagctctttcatgtaatattcgaattttttagcagtgtatgcttttactacacgagaaaatagcttttcaaagaaccttgcatttttcttgaatgttgttttcaggttgttgagtaggtgatacacacaatatccatgttgtatttcaaggaagacttgttgagctgcctttattatactttcatgtctatcagatacaacacactgtttttgtctaacaccaagtgtggctcttaatttttcaaagaaccattcccatgagatgtcattttctgaatttgccacaaaaaaagctaatgggaatattttacttgttgcatcctgtgcactagctattaatagtgtccccccatatgaagctttgagaaaagttctgtctactactattataggtctgcatttttcccatgctttcattgaaacgtttagtgccatgaagcaaaatacgaggttgttgttttcttcagtttcaatatgcactacagatcttgggtttgttttttggagcatatagaaataactaggtagcaactgataagactcatttgcttttcctctaactatgtttagagcatgttccctactcctccatgccttcatgtaattcatttgtaactcatgtttgtcattcatctcaaatctaatatctgttagtgtagctgttatttttatgttcaaaaacttatatttaacacggtcctctattatctttgttgaagcttaccattgctctccaaatctgatgcttagtgagaaagtgtgtttttcactgtatttccttactatgaaattctattttgccccattccttgaagctcttagtgaccatttttaatctttatccaaacactcaatttaaaattcctttgtgcaagtttttttcaccttgtattgaaattgttattttattgcaaagtagctgaggacgttcttcacagtttccttatctttgtacattttttctttctcaatttctggatattgtttatctgtgatgacaaatgcttctttatcgttgctttctggttaatcatttgtctgtcttgttagttgagccatcatttctgcagcaattacttttgcatattgaacaaagtcaaatccatcattatcttctattttgttttctttttgtcgatgtgttggtgtttcccctgactgagttccatattc

SEQ ID NO: 138919 - DNA, 572 bp, Cannabis sativa
taacacatgcaataataatcaaatgaaaaactaaataataaattttgtcaaataaaaaaatgcataataaatagatgaaaagttttgcactaaaaaaatctaaacgatctcaattaccgttgatctcatccaaatttgatagtctatgacaactttaaataattataagacgtgtgataaggcattgatataatccaaatataatagtttattgttgcaaaatttattttctatgtaagtgcacaaaatggcaatttatttgctatgcaagttcacacagtaaaataaaattaaatatttctttatatatataatttttttttcttcccttgtgtttgttgttttttgttttggaaaaatagtggcataagtacccaaagtttcatatttatatgacttaagtacccaatctttttttttagtggcaaaagtgcacaatgttcacttctgttagtatttattagcacccaattcaattctgtcagtttttgtacacatgtacaactcatattatttcacccatttactaatatgacttttgtttttatctcatcattttacatcttagtaaa

SEQ ID NO: 138920 - DNA, 1253 bp, Cannabis sativa
  modified_base (1221)..(1226): a, c, t, g, unknown or other
aatttttagttttatatatatttaccaaattaatttagtttaagaatttattttaatattctagatttttatattattatttgttcgagttaaaatatttttctacaattaaaatatatatattttttttaaattttagtttgttcaaaagctcaaaaaaggaatttgtaaaaggagacacacttatatgactatatttgagcattttttttatcactttttctcactttttttttaatttatttttttgatttttttgttacttttttattatttcaattttagaatacaaaacatatctattttaacaaattaatttttttattattatttttcttatttttatattttgtaagtttagtttaaattatttaaatagttaaaattattagagataaaaattgaccttttttttacttaagaaatactttttgtagtttacattataaattaaaaacaaaaatatgaattttaaaatgatttatgttagttgtaaaaaaataattttaactcgaacaaataacaatataaaatctagaatattaaaataaattcttaaactaaattaatttttaattgttcattttaccaaatatttaattgggtaagattgagttaatcactcactcattcaatgggaagaagaatgagtgatatatttataagttacaagtctaacactaatcacatttttaagttatgtggaaatttttttaaaaaaataaaaataaaaataaaaaatctataatgaatatccatattatatagaaatataaaaatacaaataactaaagatgaataaaaatatccaaaataatagaaaaaatttagttttttttattcacttaaccaaatatcaaagatgttgtcacattataaaaatgtatacttaatggggtaaaatcgaattaatcaatcacacatacagtgaaaaaaaagaatgtatgatatatttataggttacaagtctaacactaattatatttgtaagctatgtgggacttttataacatcataaaaattatacttatataataaatgagaaaatatacactaatcatatttcctaaggaatatatggtgtaatataatattttaaaaaaatatattatttattatcttgttgaccgaggttttcggcaaccaataaaataataataatttagagagctggcagaaagtaagaagtagatttgttacgtggttggggcgttaatgagnnnnnntccacgagtctgtgtatttatgatagt

SEQ ID NO: 138921 - DNA, 1345 bp, Cannabis sativa
tccgaagtcgcgtgtagacttcatttgagctgcttctgccgttggatggggacacgtgtcaagcacgaccgttcgagactcgatgtgaggctcactgggcatcccttccgtttttggctaataaatgctctgacaattaatatttcgaaatcgaattttctctctccacggctgacggctgcacttgattacttttgatttcccatatttgcttttaaggagggaaactgaggcgtttgaggttcctttgagtcgattacctattttcgtgactttcctataaatatcaataagcattggcacataaacatattttcaccatccttgtttgctaagaaagttcagagcaaaaagagaggtttttggctttaagtttgctgaagtgctttcatcaaggctgcttgtcggattgacgttgctcgaacccagacatctgattcttgagtaagtttatgattccctttatgcttatttttgcatatttacatttcgaatataccttagactttgctgtagaaaatatccaagaaatcctaggtccagaaacttctgtgattcttctttgtcatggcttcatgcacctttactgtccataatgtatgttttttgaattgtgtaacgtctgtctttcatcttgcttattcttagcctcatgaactttttttccctaactcgagaaaattttaaacttcttaagttttgacatctctttgaatattcttgttcttgattctatcgagtactcctggtcggcatacttgcttatttagtgttcgatatttcgaccaaacactcatcttgtgtgttgtcttttgtagatgaactcgggtgagttttgggagaacaaacattgaatggaccaggacctacttcaacttttgcacgaggatcatcctcttcttcgttctagctgatcttcctctagtgaaagacattcttcaaaccctgtacctagccatagaatgatggctcgtacaaagaaaatgacgtgtctggttgacgcatctgatcctcaagtggctcggcacgccactttacccaacgccgaacaagatctagccgtccaggtggagggggatcatgaaggggatgctgaggtccaggagattgaggagcaggatgatgtacatcgtggcagtccctccgcggcgaaggaagaggtagaggttgaacccccaaattacaaggagtacaacgaggcttgggagccagtcgatgctgacggagacgtcctagttgaggacgtatacactgaccagccactaagccaaatactgcaaaagccagatgcttctggacggctactcaagtgggcagtagagttgggccagtatgaaatcacttt

SEQ ID NO: 138922 - DNA, 872 bp, Cannabis sativa
  modified_base (833)..(836): a, c, t, g, unknown or other
atacatatttttggaaacatgtaagaaaatatttatttttgtcatttagatttttgagtttttatatgtatataatggtgtacattgtaacatggcatattgttgttcgtagatagatattgcactaattttggaaagagaaatgttaaagagatattattggtgtttgatactttttgtctatgttatatagttattgatgtaattaagtattgagtctcatataatttaagaaaataagtattgttattaggtaggtgcctagcgcctctagacatgttgctttgcgattggctaacgatactccctaaaagttattacattaaactatataggacccaataattagttgtaccaatggcgatattaacacataagaaggtgctagacaccacttatattttttagtatttctctaagaaaataatttttaagaaatattactaataaatcgtaaagcgccacctatagaaagtgttgggtaccgtgcccaatagcaatgctcttttaaaaaaaaaatattaaacatggttagaaaactgctaaagaacacatgtggtgtctagtgcaatatcattattagtacaattcaatatcaaatctcacttattttaatttaataaaaattctaaaaactcactaaacatcatctcatcaagtactatgcaccttaatgcctcatatcaatgctttaacttaatccaaatgaactaagaataggatggatccacctaatcctctttttaatttttaattattttaattatcaagaaaaaaaaaataaaaaaaaaaaccctaagtgataaagaaaatggtaaatattattttggacnnnntgttttgcaaaagttatcgattggaccctgtgtttt

SEQ ID NO: 138923 - DNA, 586 bp, Cannabis sativa
atcctagtgtattttgttgttttctaaatttctaatggtgaatttgttcatactaaatcataaagacacatgtagatagagttacgtacgtggaaacgatgttcttatttataatgtttcataatagttgcattatagttgcataaatattttgctaacaattatttcgtctgattgaaaccttcgtctgatacaaccttcggccaaccactaagcaattacctagaaactttcgtttgattgaaactttcgtctgatgcaatttttgaccaaccacccaacaactaccttgcaactatgtctggttgaaacatttgtctgatataactttaggctaaccacctaacaaccaccctgcaactatcgtctgattgaaacctttatctaatgcaaccaccgtgcaaccacgcaacaaccaccctgcaaccatcgtctgaatgtgtaagtgatagtgtaagaggtatttatgttatcaaaatcacataaaaaaaatataaatattatctaccccttataaaaatatttttgtaaataaagtgttaatttatattttttatttaataattcaaaccaaaaaaaaaaaaaa

SEQ ID NO: 138924 - DNA, 906 bp, Cannabis sativa
caaaaccacataaaaaaccttgtgttcatatttttatttctatggcttttattatttctgcatgaaatcattactgtggggttcaaatttagttaacaaaaatctacgttaacagtttggtgttttcattgagagcctctgtgaaaaagcttagaaaaagcctcctgacataaaagtaatggatgacgccaaagataacaatcctcgggaaggaattagtcatcgccctggaaaagaaccattgagtcctcagggatctattgagtcatcgcatgaatagaatgcaagccctgggaaaacctggtattggggtccctagcttgatggactttgggtaaacaacaatcggtcacttcctaaccaagttgatgaggatggcgcctacgacccaaccaggtacataccaatcaaggaattgaaaaattgccatcttaggcatcgattggaggaagcaaattggcgtaatgccgagacagagcgtgaaagggcagcgcaggagaatggtacctaaaatcaacctaaccttgggagaagaaattcacgaggcaaatcttaagaggaagaaattcacgaggcaaatttaggttgattttaggttgcaacctaagaaaactgaggaaaatctggggacacagcctgggatatgtggaacatcaggcagaaatcgccaaccctctcttcaggtacctcaaaacttaagaggaagagcaaggtccgaccgcagtcgcgacaaaagtgatctatgagagcatctgaacttgaagaagcctgttcttcgtcaacaactctgtccaaagcaaaaagattcactccatttgcgaatggacgagttggagaataagttcaaaaggcatcaattcacgaaacccagaagacaaccatggcatgatattgttggagaatttg

SEQ ID NO: 138925 - DNA, 963 bp, Cannabis sativa
ctcagaatcatctcccacattaaactcatgttcctgcatatagaaaagatagtcattaggaatagcaggcctacaggctctttgtgatcttctcacaacaaccttatcgtccccccaaatcaagattttcatcttgtactggatcttaagattcaccatgagcttctattagaacttattcaatcataggatcattagtaagattagcagcggaagcgaaagcaacaagtacagggacatagacacgctcttccctaaacacaatttcccttgacccttgactagaaccaaattcatcctcaaaatagacagctcggtctaattccatcaccctggtggtgtgagagggacaatagaacctagaacctcttgaaccaatagtgtagcatacaaaactcccactgatagtcttcggatccagcttcttagatttagggttataaggccttacctcagtcttgcatccccaaacgtgaaagtaacgcaaaatcgatttcttgcctgaccacagctcgtatggcatctttggaaccgacttgctaggcacttgattcaagatataagcagcggtccttaatgccttaccccataaaaactctgggaattaaccatactacaacgtaccatatcaagaagtgtgtgattccttctttcagcaattccattctgctagggtgtacctatcattatatatcttacatcaatgccacgttcgtgcaagtaactggcaaacagcccgggttcttaccagtttcatcataatgcccataatactctccacctctatcagaattgatagcattaatcttctttcccttttggagctcaacatttgtcttgaaaatcttaaggcatctaaagattcagacttccaatgaatgagctcaatatgaccatatcggaaaagaaaaaaaaaacatcaatgaaggtaatgaagtatttatagccgcccatagcaggtgg

SEQ ID NO: 138926 - DNA, 1371 bp, Cannabis sativa
  modified_base (420)..(420): a, c, t, g, unknown or other
  modified_base (885)..(887): a, c, t, g, unknown or other
ccacactctctcttcttcagagctcttctcgatcatcttctgagacatgtctacacgaaataaaagaaacatgattagagaaaagcacgagaagtatgaaagcatattaattaagaaggttaaaaacaagacggattatcttgcgggagaagtgttaggctgagcatgacttgaaggctcatcatcacctgaaaagtctcttatttcctctaggacggcttttccctttcctactataggagtgaatggcagaccaggtggacatggctccctgattcaaattgcatgttcaacgggcatgtcctcggttggaagtttcttctttcttttgtgcggagtcacctgctcctcctcaacctcgtcgtcctcctcagaatgctcctgagcattattttgcccccgcacctcccttcaacttancctcacgcttaagttgaatgagttcattctcctcaggagctccctcagcccgaccagcattggatttccactttttctccttcataggttggggaatgaaatccttcgggtaaagccggtactccacaaagttgtgctctgacaaagtgatattccgggcagcacccggcaactaagctctatccttgagagcaactgtgaagggtgggcggtgatatatagggatctgttggaaccgagtgtaggtggtgcccatgccatccaccatgtaatactcgtcaacaaaattcccaattttgctaacggccttgtccccggtgcccttcaacaacttgaagtttggctgagagaagtagtagtatcccgacctgccttgcttgagagtagacttcaaatcaaaaaactagctgacctcatggggagagggcatatcccacttttgggaggcgtagagaatgaacaggnnngacagatacttgatgcccttgggagtgaattgggtcggacagagacagaagaagtctgccaccttcataaagtacgggtgtaaaggcagcagtgcccgtggtttagcatgagcacccgaccaggcacacatccccctcagagggttggtggctccattattataggagggaacataatagtccatctcgcctaggtagccaccttggttgagatcccgtaaacgcgcctcagtgaccttggacgcagggctcacccaccatgctcccaaagcaccctgtctcctctgagggaccgcagcagtaagttcctcagtgaagtaatccacgccctcaaccaggacgtcaccgtccccgtgaattggctccccagcctcattgtatcttccaaagtttgggactgtagcctcctcttcctcctcctcggaaggactactaggacagacatcgccctgctcctctatctcctggacctcagcgtcccctt

SEQ ID NO: 138927 - DNA, 1038 bp, Cannabis sativa
  modified_base (44)..(51): a, c, t, g, unknown or other
atttctgatctttattaattggtaaatctgattatattgaaatnnnnnnnntttagggcacaaaacctaacaactcggacctaggacctgggatcagacccagtgttggtttttatggtccatatcagagttataaaagcgaaagcagaatttttgtaaaatattttttatctaatatgaaccataagcccaagaatctcgacataatatatatagataaaacctaactgctaaaagaaaatcaattacctcttgaagcctatcatgatatccttgtttctttttgtctaacaattaaacatccaatccaagaatattattgaagaatccacaccttgatcttctatgtcagcctcaacactcaggaatagagagactattagatcctattggatgaacgaatttagatattatagcgtgtacgcaactcatgcgacattggagtaagatttggatttttatctcacacgcaccttgaattgtctgggcgtgtgagagatgagagagagagagagagagagagagaatagggttgaaaaaactatttctattttctctacttttctcaatttatttctcgattgattggatttttgaatgtctcttgatttatgatgctagatatcctatatatagtgttataaataaagcctttaattctttatttaaaataaacgataaatatctaatttaattttaattcaaattcaaatgtaaatatctaataactgaatatcaaatattagtagatcttttattttaataattatcctttcaattaaataattatccaataatgtatttaattaataattaagaataattaacttaatttaatttaaattattttaatcaataaaataattaaactaaattaatcatgggtctttatatgtcactctacacgtgtagaatgggcgtacacgcgtgggccatattttaagatccaaaactgatttccataaaaatttattatttattctatcaataaagatgctaccagcaaaatcttttatgtgtcatattgctaatatggaa

SEQ ID NO: 138928 - DNA, 2989 bp, Cannabis sativa
  modified_base (46)..(86): a, c, t, g, unknown or other
aaattttaattaatcacgttttcaataaacctcgttgattagcaannnnnnnnnnnnnnnnnnnnnnnnnnnnnnnnnnnnnnnnngttagttagggtgttacaaagtggttctaagctcacgtggttcaatgggacaacacttatcccaatgggaaaagtgcccagacatgccccaaagcactttcaaatactgcacgtttgtggtggtggactgcccaacagcttacaacgcaatcctcggccgaccggccctagtggatttcggcgtagttacttcaatcaggcaatagtgtctaaagttccctactcaagaagcagggatagggaccgtgagaggaaaccagggagaggccaggcagtgttacaatgttactgcccacctacccatactgatggtccgcgaagttattgagccaggaatggcggaagaagatgaattggatccccgtgtggtatccgaaaaaattgtagaacctatggaggatgtcgaggaagtatcggtgtgcgacctcgatttcgtcaaggtcctctggctaggaaaacgtctagagccggaggaaaaagaaaaaataattaaaacgctaagggcagccacgaatgttttcgcgtggtgccaaggggacatgatcgacattagtccccacgtcataacccatgtctttaatgtcaacccagacatgccaccggttcagcagaagcaacgccccctcgattatgtaaaggaagaagctttagagaaggaggtggacaaattgctgaccagcgacatgatccgggatgtgtattacccagaatggctggccaatccggtactggtaccgaaaccaaacggaacatggaagtatacgtggacgacatgttagtcaagtcgagggaaaacgtaagccatgaggattacctcgaagaatactttgaagtggttcggaggtacggaatgaaacttaacccgaagaagtgcacttttggggtcaaatcagaaaagtttctaggcttcattgttagccagcgaggtatagaggcaaacccagagaaaattcaagctctcctaagtatgccttcccttaagaagcacaaagatgtacagagcttaactggaaaggttgctgccctgagccggtttatctcccgatgcacagacaagtgcattcctttcttcaatgttctgaagaaataccaaaaattttaatggtctgacgagtgcgaggaggcattcaaaaaactaaaggagcacatggctaagcccctgatcctatcaaaaccttttctcgaagaagacttgttcctatacttggctgtctccgagaacacggttagcgcagccttattacgagaagaagagaaaactcagcttcccgtgtactatgttagcaaacgcatgataggggcggagacacgatacctagttatcgagaagctatttttttgcctcctaatagcctcgaagctaagaccctatttccaagctcacccaatcaaagtattaaccaaccatccgcgccgacaggtcttacaaaaactagaggcgtccgggagacttctcgaatgggccatggagttaagccaatttgatctacattacattccacgcacctccataaaaggacaagcgttagcggacttcattactgagtgccacgaggcagaagctaacgctaccatgcccacaacgcaagtcccggcgtggaaagtatttgtcgatggtgcctccaacgaaaatggatccggagcgcgggtggcaatgatatctccaaacggacttcgactccaagcagccctacgatttgaattcacagcttttaacaatgaggctgaatacaaagccctgatagcagggctgaaattagcaaaagtcgtgggggccaaaagagtagaagtctacagtgattcacagctggtagtgaaccaggtatcgggggaatatcagactcgcggagaaatgatggcttcatacgtagcaatagtctgggaattgctccatgagttcacggactacaaggtagaaagaatccccagagaaaagaacgctcagggagactgtttggctaaattagcttcagacaatgagattgagaaactgggggtagtacctgtggaatgcctggcggagccaagcattaaattcaagagtaccatagcaaccactgatcaagagcctagctggatggtccccatcatcgaatacataacgaaaggcaaccttccccaagaaaaggcactatgcagaaggatacaatatcaagcgcaccgttatgtgatgatggacaacattctctatggaataggacttagcatgtcgtacctaagctgtgtatcggaccctaaagctaagaaaattatgctagaggtccacgagggattctgcggagaccatgcaggaggcccgagtctctcaaagaaaatattgagacaagggtagttttggccaactatgaaaaaagatttcgtagactacgtccagaaatgtgattcgtgccaaaggttcgcgaacataccgagagctcctcccaatgaaattaccctgatcttattgggtccctaccgacaggaaagggaggggtaaagtatgcaacagtagtaggagactacttcacaaaattgacagaggctgagcccatgaacactataactaccaaaaaagcactagactttattattaaaaacatagtgtgtcgatatggcttgcctcccaagatagtctcagataatggaaagcagtttgactgcgaagaattcaccgacttctacaaccaacacggagtcatcaaaagcttctccgtagtggcaaggccacaaacaaacggacaagcagaagcggtaaataaaatcctaaaagtgaccctaaagaaaaagccactggcctgcaaaaaaaaattggcccgaagaatcacaaggagtgttatgggcttaccggacaaccccaagaaccacaaccggccacacgccattttcaatggcatacggttgtgaggaaatggtcccggtggaaa

SEQ ID NO: 138929 - DNA, 908 bp, Cannabis sativa
  modified_base (627)..(629): a, c, t, g, unknown or other
ctctctctctcttttcgaacactagagaaccatttagagttctggattttctcttcaaactcaagtgattttctgcaaggtttaagtggtttcaagctttaggtaagctccttctaactccttcttggttttcttgagtttttagttagagatttttgcatgaaatgatgttattgctattgtggttgatgtagttgttagttgttaaattctgtagttaaaatatgatttattatgttgagttaagcatgaataagtagttgtttgaaggtttaagcaagttttgaattttagaactcaaacgtggagctttaatggcatttcttgtttctgagtttgggcactggttttgttgcttggaaaatgatctttaggatgtttagaacaagtctggaaggtttcatgtgaattgggattaatttggttgagatatggaatttttggtgattcccgcagtgaactggaattccggttcagtgggacctgtaggaaccgaaattccggttggtccccaggaaaccccacagaatcagaattctggtttgggaaccggtctactggttggggcagttttgggaaccctagttttccccatttttgtattgtttagggtattgctatgctatnnntagatagggaaacttttagtttcgagtttaagtccccggaaagtgatttagcatgtcacctatctttgttatgattgatgtgatttaggagcctgtaactcgccgagcagttgttccactcaggttggccggcacacctgaatttgaaatcaaggtaagattagtataagaccatgcatatgttattacttgattagcgtacatgttgtttatgcctgttaaattacattgatagcagtaatagtatacatagagttgtactgattactgataaatgta

SEQ ID NO: 138930 - DNA, 641 bp, Cannabis sativa
aagaagcctcttaaagctattaacacagctaataagggtaagaattaggggtgttcaacaaaatttacaaactgcccaacccttataaactgtccaaacaaaactgaataaactgacaaaaaaatacaacctgaaataagacaatgaaaattcaaaccgcccaatgaatacattgggtggtttataatttattctaaaccgcccaattaacctgaataaatcgaattaaacggatttatatatgttttcaataaaagtgtatataatatattacataagttacgtttattagttaaacttttgtatttgatgtttggacattgtagtgttttacttaaaaattagactttatagttaataatttttattgtatttggatattgaagttgaagtttgaaatttttcattttaatattctcagttttattatttaattaaatgcggaataatgaaactggtactgaaatagtttttttgtagctacagaaagcgactctgtaactccagaagaaaccagattaacaaacagtgcagaaaaggaaaaacacacaaggtttttgtacgtggtttcaacaatcctttcagattgttactagtccacagggccacgcccagagataagattcattagataggtctca

SEQ ID NO: 138931 - DNA, 878 bp, Cannabis sativa
atgtgttgtgcggtgcgatttgaaccgcatattaataattcaaaaccgcaaaccgcaaaccgcactgcacggtttaggaaaaaattcaaactacgaccgcaacgtaaagaatttcaaactacatttttttgcagtaccgacggtttgagcagtttgatgaacaagagtgttgatgattattacaaggagatggagatggctatgattagagccaatatggaaaaggatcaagaggcaacaatggcaaggcttttgaatggattgaatcaagagactgctaatacagttgaactaaaccattatgtggaattagaagatttggttcatatggcaatcaaagttgaaaggcaactcaagaagggtagtttgagctcaaagccaaggccaagtccacacaatccaaatacaacaccttggaggtcaaacttcccaaagaaagaggatcaacctagttcatcctctacacctaaaccagccacaaaaactacaatccctcaaggaaaaatagtccttatttcatctcgttctagtgagaaagtgtttcaaatgtcaggggcaatgacacatagctagccaatgtccaaataagagagttatggtgatttgtgaaaatggcgaggtagatttggaagatgaagaagagtttgttgatatgccaccattggaagatgcttctatagaagatgaagagtatgggctagaataaggtgatatgcctgtactaataaccaggcaggcattaaattcgcaagcaaaagaagaggaagaaaggtacaacgtgagaacatttttcatactcgttgtcaggtaaaagataaggtatgtagtgtttgttggaaattattttaccaggatcttagatctctcacaagtatgtt

SEQ ID NO: 138932 - DNA, 934 bp, Cannabis sativa
taattgaaaaagcactgtagcatgccttagcattagggcgttacatatgatctcacaaatggctctttgttgtgaataccctcaagtttggcgagatatgaaattgaatagacaaaatgctcgactggacttgaattcgatgaatgcacatgatggatgccaaggtaccatgccaatggtggaggaggaggtgatggccaaaaggatctttatatgtgtaggcttccatgactaatgactcattaggttgaggaattgaaactttttgttactgaattttttcaaaatctgggtgattttgctatgaaaatgctacaacattatgagcaacaacaaatgttgacaaacttgaaattcttgcttcctcatccttttcttcactactttggattgaagtgagctcttgtaattgctcaaaattttctccaagtatttccaactcatcaccattcctcaaaatgacatttttactttcttcttcctcctttgcattttccatattaatgcccaaagtttcatggagtttatcacacaaatcattgaccaatagctcacattgattctctaatttccttaaggatgatgcttgtctttgaattaatgcatcatttttggccatgaattccatcatcaatgcctcaagtgaacttggttgagccatttgatgaggctcttcttctatgttgaactcttgaaaatctctcaatttctcatcatttggtccctgagtgtaagtggcaaaatttagctccaaattgttgtagttgtcctcccaaacatggtcattgtttggactattacaacacaactcattgtcatgtcttccaacatccaataggcttcatcgaattatagttggtagaaattagtggtaccatctcctctttctatccattctcgtgtacttggattcaacccatttaggaagatttct

SEQ ID NO: 138933 - DNA, 1356 bp, Cannabis sativa
tcgccacaggcgcttcttacaagagattacagaaggcaaacgccgtttcttgcgagatgctgcttggcctgaacctcctagtgtgtcctctattcctttagctgagcctctgttgttacccaaggtcacaagtgcttttgaaccaggtgatttggaatttgaaataatgtctcctaagccacgtaaatcaaagactccccaagaccccaacgtcactttcgaggtagagttaatagagacgaaggtgcgagccattgcaggttatgttggtgattcactgcggacttgtggtattgaatacaagcgagactgctgggttaggtcggtgcgagccggcgagttcagttgttacccaccagtgcaacttacttgcgaaacctctgagggaaccagtagcgagaccagtacaagtggctcgactggtataggcgcttggatccttgaacacatcaaggctggagctataatccccctgcgagactactttaaagacttcataaaccacctcgggcttgccccatttcaactaaatcccgtctcctatagaatcctcgcaagtttgagggttctgtacaaaatcctaaattgggagtaccccactccctggaaatagagtatctctactctttaagactgttccagcgaggaagaatgcggctggctgttccaaaagaagaagaagaaaaaagaagaaaaagaaaaaaaaattaatttttaaattaaaaaaagtaaaaaccagaaaaaaaaattctaattttttaatttttttatatattaataattattttttaaaactaatattacgcgaaccactaaaaacttgccacgtgtacaagtgtgtacacgtggacagtccaccgtggcacttaactgtgatttttggacgaaggtgtgcagagtaaaacggaatcagggtttaggtagtttagccgccaaaaattcagtttttgtggttaagtgttacaaaccgtaaaattcaggtgatttagccgtcaatatcccttaataggtgatgacaacgattttcaatatagtagtgattacatgtaaaatataataatgacattaattttaagtgtagaaataactacaagtaagatatggtgaggacaataattctgaaattatgataaattttatatttatcagtatttttttttttgatattacataaaaaaatatcaaaatttaaaatttaatataattttataaattagttattgctaaaaataaaggaatttttacactagttgtcaaatttgacatcttttttacatttttgtttatgtttggttttttaaacttttttataaaatttgtttttttaattttatttttcaaaaagttctttaatta

SEQ ID NO: 138934 - DNA, 1023 bp, Cannabis sativa
ttatatagctattaatttttagaggttttttcatttttgtacttcaaaataatttttatttatttatttatttactttttttgcatttttatagaaagttatattacaacttacatagcaacctgttggagtttgactcaaattagtttttttctttatttatttatctatatttgtaaagttgtaattttttttaggtaataattaattatgggaaaaggaaagtcttggtggcctagttttgaaaattcttcttaaggaagctttggaatgtcttggtccccatgttgtcttgatgtccaagttttgtaactttataaatatgtattttgtgtgagaggtgtgagtgtgaaaaagatagtgagttgtgaaaagagaagtgtgtgaagtttgttatgtggtgagagtgaggaagaagcaaagggtgtattgggatttgggtggagagattgagatagagagtatatgtaattttgaaatgataagtgtaatatatctctctttgtgagtttggtagttttaccaaactgagtaaattgctttgtttcgtttctttgttatttcgctcgctacgcttgaggtttatcattttttttctcaacaagtggtatcagagccaaggttcagatgatcaacgcaaaaaatgtcaaagatggtgtcttccacaaaatttgagatcgagctttttgatggaaagaataatttcaatttatggcagagtacggtgaaagatgtatttgtacaacaagggctcctaaaggcaccgcatggaaagaaacctgggaatatgactgatgaagaatgggaagagttgcaggaaaaagcggtaagcactatttgtttaagtttgactcctgaatttatagtatagtgtattgaatgaaacatgtccgtctgagttatagaaaatattaaaaaagctttatacgttaaaatccctaacaaatagattatatttgaagaagcagttatatgagttaaaaatggttgaaggagaagatgttagggatcatataaatagat

SEQ ID NO: 138935 - DNA, 1401 bp, Cannabis sativa
gatcctggtaaaatatatccaacttctggtagttccttcggcccgtgccccttggcttcttcaagtcattttttcaaagtatctttaagtttcttattaactgcttcgacttgaccatttgcttaaggatgtgccactgcagagaaactttttacgattccatggttcgtacagaaatcaatgaataattggctgtcaaactgcgtgccattgtccgagactattttgtacgggagtccaaaccgacatagtatatttttcaccacgaagtctagtactttgttagatgtaattattgctaatgactcagcttctgtccacttagtgaaataatccactgcaactactacatattgtactccccctttacctttaggcaattgtctgattaggtcaattccccaaatagcaaaaggccaaggactctacatccgagttagctcattgggcagtgcacacggtatctttgaaaatctttggcatttatcacatttcttaacataggcctttgaatcttcaatcatggtcggccaaaaatatccttgcctgagtatttctttaataggctttgcccggctgcgtggttgccacagaatccatcatgcacttcaaacaaaagacgtacagcttcttcttgtgtaacacatataagtagtggcatggagaatccctttctatacatgactccttctacgatgatataccgtgcagccttccttctcatcttctgagcttcatttctatcatttggaagttctccagtgttgaagtaggctgttattcgtgtcatccagttcggagctgtgtcaatcatttcaatttcttctacacaggtgatgttgggttcttcaaggaattaaagtgggacgaagttagccttactagctatgttgctactcgcaagtcaagctaaggcatcagcagttgtgttttcttctcttaaaatttcttgagagcgtagctctagaattttgcgagcagatcatgtattttgcttaaataggctatcatttctcccccgggcctcgtactctcctgacacatgatttactaccaactgtgaatcactacagatttcgatgtgttcggcacgtagctcccgagaaagtttcaaaccaacaatgagagcttcatactctgcttcattattggaagctttaaatccaaatttgactgccccatgcaggtgtttccccccaggtgtgacaaggacaatccctgcaccagacagttgatctgtagctaacccgtccacatgtaatttctaggtaggtctatcttcattgttgctctactgggattcttgcacttcaaacaaatgttttcttctttgcctgtgcactcaactacaaagtctgctaaggccttgttgggttttgtgccctaaataaaacccattac

SEQ ID NO: 138936 - DNA, 599 bp, Cannabis sativa
tggccaaaaatcaaagccccatttttttcttttcacattcttttatagctctgtgcttgtctcagatcagagtgctttaattattatagcagtggtttggttgcaaacaatgtcttcctcttgtgctgtgtccacaccactcagaacagagctctttaactctattggtagctctaacaggctcataattagcccatcaagaacatttcaacacaacagtaagccatctcttttcgtactttacttattttttattaattgttatttatttgattgagactttactttttcttgtaaggaagcaaatgtgaaatgagtagaaggggttttgcttttaaaggaattgtagcttctggggtttcagtcatgggatcttctttggcagctgaccctgctaaaggttaatttcttcaccatttcacaaaaagattaaaaaaaaaaaggttgcattttgaaaatggggttttgttaattcggtttgtttaattggtttaggtgttgagagactagaatttaaaccagaaggatacaatttttggacttggaagggtcgtaagattcattatgttgtacagggtgaaggctcaccggttgttctc

SEQ ID NO: 138937 - DNA, 836 bp, Cannabis sativa
  modified_base (562)..(563): a, c, t, g, unknown or other
attccagtttaccatgcgcattcaaaaaacttcaaacgtatttttagcactgtaaactattcgaaaattttgaaaaatttacagggatgatgttgtaagcataacgaacacccctatgaaaaaaaattgaaaaaaaatattccgacatatgttttcgagtgtagaggtcaacatatgtttattatgataatgttttaatagaatcaatataatttgtttattaaaagtttataaataagtttaaaaataaaatatttatgtttattttgttttaagaaacggaaactaaatgtaaaattatgtataaatattatgtttatattttccattgataatgtttataaattattaatttaatatatttaatatataattttataaacaaaatatgcatattttattttatttttttgttgtaaggaaaaatatgtatgttttgtttatttatataagacttaaagaaaaattaattacttatagtatataaaatcaaaattatatttatgtatctaatatagaatatataattaaatgtaaataaattattttgtattatatagtnnaataaaattatataatgtatacaaaattataaatttttctaaaagaaaaacagcatgtttttttttttcgccaaaacatgttgtctaatttgtagttttttaaaattttcattaagtgcactgggttaaaatctaagagaaaaaaaaatattaaaatgtcctaaatttctcttcttttatttttctctcaagtatttctctaatgtgtttctagctcaatctgatatgtactgggttaaaatctatctagcaccttttttttttttttttttt

SEQ ID NO: 138938 - DNA, 719 bp, Cannabis sativa
  modified_base (678)..(694): a, c, t, g, unknown or other
tattttctttgtgggccataatataagttcatagcaaaaattgaaactatatcctacttttcaaataaatttcaaatgttttaaacataatatgtaaaatacacatgctaaacttagtcatattgttttattattcttaaggatatttgatagtttttttttttgaatggaaatatggcatttttattagataaaatcagccattacaatgttcatcaactcggaaggtgagttggttacatcaaaaatacgtactgacgagtaacaagagcttcaatgaataattgtattttaaggtttttttttatatattttgctagtattttagggttttttttaatatatatatttgagttgttaccgtattttaaaagccatttggctattcaatgaataattatagtgattttagattctatgatttgaaaacataaaaaaagagttttcattttttagcctaaaactcaaaataatattcaaattttatttttgaaaaacactcaaccaatcaagaattcttatgtgtacccccacaattttaaatttcagaaacataaaacaatttctaaatcctaaaccagtcaaagttttcacttaggtagcgtttcattgggcggaataaaaatataaaaataggaatgcgaatgcgaataagaataggaatggaatggaataaannnnnnnnnnnnnnnnnaaaattgataaaaaaattattaaat

SEQ ID NO: 138939 - DNA, 878 bp, Cannabis sativa
tgtatttgattcttagggtttctaattttttccttaaaagtcttttaaccgaggatattaaacgacactaagatttttgtcgtgtggattaaagcattgctgtttttgtctaaattcatttaggctaagaaaaggtcaattctgaccttaaacactgataattaatatttttgttggtgtgggttaaaacaataaaatcctacagaaagtgattataattttttgtttaaactaaaagaaattatgtttggtccaaacaaaatctataaatgaaaataaacaatcttctaacgaactttccaagtccaagtctatgtcatttcctgtgcagtttcttatagtcgatcttaatatatatatatctaataagaccaatggcgaaagcaagagcaagggaaggtgacaatactgcgtaggtacccgtaacaaatgctatcaccattaatcccatagccaccatcgctaaaaccatagacacaatatagcatgacacagtaagtcttcactaactagtatatgttttgttgatgagaaaatatttacagttatgtataagtgatgatgagaaaaaaaattattattctcttagaataaatgtttgcaagttgtaagtatttcatcaaaaaaaaaaaaaaaatcaatgaaaaataaattaaaaaaatgaatgcttgcaacaatttaagtgtgggggtattgttgaggagaatgattggggaatataaataaaaattatttgagagaatgttgtagatttatggtatggtgtgatttgagcctaaattaacattctctatctacttttcactctggccttacattataagcttataaagtcctattgatttttagattgtgtgtaattacattagtggagaatg

SEQ ID NO: 138940 - DNA, 529 bp, Cannabis sativa
  modified_base (28)..(29): a, c, t, g, unknown or other
  modified_base (57)..(58): a, c, t, g, unknown or other
  modified_base (84)..(85): a, c, t, g, unknown or other
  modified_base (114)..(115): a, c, t, g, unknown or other
aaaattaaacttgggtatttatttacanntaggtatttatttacaactaggagttanntatttatttacaactaggagttaaanncaactaggagttaaacttaggtatttatnncgcaaattactctaaaaaaatataatttaaaacttaataatccaacatacacaattaacattagtttagtccaacataattctcatgatcccataataaaattgccaaaaaataaaacttattcaatacgcattgatatttttattagtgttaaggaagatgaaaattaatattttagatctaagattttttttttttaatctcatgtgtgcaggtgcagaataagaataaaattaattaatatattttttaaataaaatatattaaatatataaaagggtaaattgcggcttaaatacctaatctttcagattttatacacttaaatacctaatgcttatttttggaggcaaaaatacctaatgttacaatttttttacaccgttactaccacttctgttaactcataaatat

SEQ ID NO: 138941 - DNA, 597 bp, Cannabis sativa
ttgagtgaataatctgaaatttatttagatgtaattggtgatggaaatgactttattgcccttgttttgtgcataagcttttatttggcccaagagggcatttttgtcattttgcctatttgagtatttctaacaaaatgaattgtgagtaaatgaaattcatttttttctggttttactcagccctaaccgaccctccctcatcctctctatatttcatcttttcaaccattttaattcttgaaaaattaaccttgaatcttacttgaagttggtggaaatcttggagggattttgttaaagctttgtaggcttggaatttgggtaacactttgatcttctctttaataaattctgagttaggtgaaacttgatatatgttttatgctattgtgtttgttcttgaatgcatgtgggtgtaattatgttcatataagctaagctatgcttgattgtgttagtagaatggagtatgttgttttgtggtgagttctagagagaattttaggttttgattggtgtttataatctgttttaagctttgaagtttattgttgttgctaagcttgagtttggacatggtattcaagcttttgg

SEQ ID NO: 138942 - DNA, 831 bp, Cannabis sativa
tcaagtgtgccggtcagcctgagtggaaacgcagctcgacgctttacagggcccttggatcaaagcttcaccaacactgctaggaatcccaaaaatcagcaagcaaaaccaaccctaggctaggttcttgatgtttcgaaaatgagagagaaggagaattgatgaaaagatgaatttctataatattcttcaaaaagaataaaacccctttacttaatattaatgttatttccagctaataacattcccacaaaaagacaaatccacctaacaaaagacctaaataaccctaaagtaataaaaccaaagtaaccatatgcatcatgggcaaaatggtcaaaccaaaccccgaaaattctaacacctcttttatcaaacaatgatatcccgataataatttaaacttataaacgcgactctctaaaggcccaacgtcgcttttcacagcttccgaacacaatcacagaaattgcaaaattaggtaattaacataaaatagcataaaaaaaacatatatgaactcaattaaattcccataatttgtatttttattaataataacaaaatctcatacattaatcctagttatttaataatccaaagtattaatcatatgcggtctttacattattcatttattgattgaatactttttttatcgtgattattgtgtgagtgtttttttttcttgttgaatatttacagtttttagtgttatttattgtcctccaacaataaatattattttattatgtttatttaataattttctttgaaataataatatttatgatttcaggtatttcgtaatatattttattatttaaaaat

SEQ ID NO: 138943 - DNA, 2023 bp, Cannabis sativa
  modified_base (738)..(738): a, c, t, g, unknown or other
  modified_base (1643)..(1644): a, c, t, g, unknown or other
taaattctagaactacttattggaagtttgactatataggcccatggtccccacacttgttgagataatacttcttatagacttagttaagtgattttaattaattaattataattctaaaattatactatgtcttatttaggaattttcactaagcaagtggcttaattttgaagaaaaaaaggatttaggatttatttgttaattaagagattttgtaaagtctaattgataaataaattaaatggaaatttttttgataattaattataatttttaaataaatagttttgacatttataggattaaaattaaaaaatatgacataagtgaaagaaaagataaatagttaaaaaaaaatggcaatattataactagtggggcccattactatggccggccattaagtcattatttttctattatttatgttttttcttccatataatttaaatcctaaccctaggagaaatagtataaaaggaataggatgctctcattctaatccatgcatttaacctagtttacattatgtcagataactagaaactttgagagcctccttcctttactattttcgaattcccctctcttgttcttcataagttttgagcccatagtgaaagagtacatgcccacccatagcaagtcaaatactcaatcatagtatggaaggctgtgaagaatccaacacctgaaggagaatcgggctcagatcttgatagtactctacgacanaaaggaacaagtgttagagatctgagtgaaaggagacatattattctgctgacactaatgtaagatttcttaaattttatatgtgtttaattctattgttttaaagaattcatatttatgttgttaatcaatatactttttagtaaatctagatcctagtaaaataacttccaacaaatagtatcaaacctaggttaatgatttactttcaagaaatatggatttaaaacgatgtatgtgtgatttggatgtaattcatgttgaattatgtgtttatttgatgattgattgatgttcacaaaatttttatgtaaaataattggattcacgatctagaattattttatttagatagtatggaaaaattaagcaatttatttttttacagaactaaattttgatttaaaaccaattagttatgaatgatgcggggtcctgctcggcgtgatgcagcatgatgcgtgtcttagggtgggcgagacacgacattagacaaaaaatgtctgggtcatgtgcgcgcatcatgcctccttgtccgagatgctagtgccatcgagcacccatctcgacacccatatgcatccaattttcaaacaaccataactttctcaatttttatcggaatcgagttccgtaaaaattaaaattactttttttttacaaggaatccaaataaaatattttcagaacaaaaataaaattttttcgtggaaaaattttgtaatttacattcaatcatcaaataacacataaaccaacatgaaaacatccgaagaacacaattaacatattcattgtcttaaatccatatttcatgaaagtaatcattaccatggctctgaggccagttattaaaaatatttaccaggatcaagatttcctaacaagtatgttgaattaacatnntaaatatgaatatctctaatacgatgaaatgaaacacttaagagttttataaaaccttagattgattgcagcgggataatatgactccttccgctcagatctctaacccttgttcctttatgtcgcggagtattatcaagatttgagcctggatctctttctctccttcgggtttggttaccaccgtcttccgtactatgattgagtacttgacctgctatgtgtgggcatggcactctatcactatgggagaattggatgaaatacaattaaggaggtttcgaaatactatagaagatgtctctcatctactagttgtgtgatagagaaaactaggtttgatttggttgaaaagtgttggatgagatgagagcatcat

SEQ ID NO: 138944 - DNA, 567 bp, Cannabis sativa
gttgggtccaagcctcgggtcatgggtcaagatccagatcccaatctttggtcccgatcacgttccacttcggatcttgggtcttggtttgtgtccgtgaccggtcctggtctaagaccaagacttgtgtcgggtaaaggtcttagttggagagtccgggtatgggtcacagatcaaacacgaactacgagttaggttcaagctccgggtccagatctagttcacagtcttgggtccaagtgtagttccacttcgggtcccaggtcccagtccaaattctaggtcagggtccaggtccggggtcggatcctagttctcaatcccagttctaattgtcgtgtgttgggtctaggtcccatatcaaggttccagtcctaggtcccggtccgagtctaggacacggggccaaggtcaggtgccccatccaggtccgagtaccgtgtttagatttgggtctaggtttcgtggcccaagtctagataccccatccaggtccgagtcctaggtttcggtttgggtcctagtcccagtttcgagttcgattcagtgtctgggttcgagtttggg

SEQ ID NO: 138945 - DNA, 743 bp, Cannabis sativa
  modified_base (485)..(485): a, c, t, g, unknown or other
tgtatgttcgcatgattcgaaatctcactctcaatggtttggaaagtgacgttctcaagatggatgtgacattggaagagagacgagctggtttggtaagtttttatcttctacataaaacttgctgcttagcattactcaggagtatgtttcttatgttattatacaaaagttcatataatatataatcattatatctattctatataaagtgtgcctatataacaaaatttttagtttatgagaaatttatgggtggctttttatttatattaaaaataaaatagtttattattaaaaataaaataatttatgagaaattcatgggtcactttttacaaatatactaattaaaaatatcttgatttaaaacaaaatgtaaaaataaactaattactaaacacaccagactctccttctaatttattataggtgaccaaaagttacccattagaagaggtcatttgttttctaaattgtaagtnttattttgtgtattttttttattttgctaatatagaaatagaacattgctattattttcttctatgacaacaattcatctgttgcgattcttcttcctcttcctctatttcatcaatagtcaccaattcaggtttgaagaattctatagatatagttttacataaataaaataaatgtacttgagtatcataagtagattttatttattaaattaattattgacactatatcttaccatcttacatgaaaaataataa

SEQ ID NO: 138946 - DNA, 1329 bp, Cannabis sativa
agactcggacacagacccacccacatattgggtcccaaaattgaataaaaacctgaagtagggctcgagacacgaacccagacttgaactcagacccgaacatggaacaagactagggacccagaattgggattgagacctggaattgcacccaagtctcagtcccggaactagaacgagacctagaccggtacctggaacatgaaccgaaacctgattgggacgcgtggttgggatccagatcttgtcttgggatctagaaattggggcgtggacaagaccaatagtcggtgtcttgatctaggactcagagaaggacccaaagcaggactaggaccttgacccagaccctgacctaggacacgaaaccgaaacttgtactagaacgtggcaaagaccctaataggattggggtcgtggccaagacctagacctagatggggacctgaaactggactagaactcagccccgaaactcgggctcggacccagacccagacctatacctagacccggtcccgaaaccagaataggattgcgacttgaacttgaacccgaacccgaactcgagacttgatcccagacccaaaaaaatcccctaacgtaaatttgattcagaccatgacatggacacaaacctagacttggaccccaatactgacctagacccagatccaggccgggatcgaaacacgagacctgaccctgtcctagccgcagatccagaccaaaacctaggacccagacccgaacctaggacccagacccagaacccgaacctagacccatatcgggattcgaaaaacccatacccatactcagactaagactcggaccccaaccgcaacctggaccaagacccagacccaaaaccaaaccaaaacctggaattagaacttgaactgtgactaggacccatacctgagaccaaaaccgaaccgaaaccataacccaaactcatacaagaacctttgccaagaccttgactacaactgggacttgagacttgggacacaaacctagactagcacccgaaccgtgaccttgacctgacatggtcctaaacgcgcactgagacattagacccgcgacccagactaggatccagaccctgacaaggacccaaacctgaacccgaaccaagactaggactgagacctggagcggaaccaagactgagatctggactaaaaccaagactcaataaccgaacccgaacctaggcccagactagaacctacgaacccgactttgatgggggacctagaccagggacctaggccctagaacccagacccagatctaaatccgggactcgaaccataacca

SEQ ID NO: 138947 - DNA, 1347 bp, Cannabis sativa
agttgtcactaatttagttttagaaccaataagtacatttagtcacaacaaattgtaatttttatgactaatacttttagtcacaacgtaagaataataatttataattagttacaacttttttatttttaatcacaggttttattgtgactaaaagtaagattttttatagtatgttttttctcgggacaacgcattattttttttaagaaaaaaataacccttatatactacttgagttggtgtagcttcagattttattgctcattttttcccggggcaatgtgttatttatatatagtttaatttaggggaattacctcatatattttttttttaaaatggaaaattttattttttgcccctaataaaacccccaatatcaaaatttagaccctccactaatttgtacaaattaatttcattgattacatgaacttcccattttaccctttttttaaaaaaataaaaaaaaattgttaaaaactaaaaaaacttccccatctctcttccctctctcttcctctctctcttgcctctcgtgcaccccctctctctctctagaaaaattgaaaaaacttccctctctctctctctctcttccctgtcgaatgtttatttctcggtgggcagtgaaaatcggagcacaccccaatcactcaagaatcttacaccattataatggataagttgtgttttaagcatttagttagattttatgtagtttgctttgttatatgtatcgtatttgtcagaactagtattttttggtctgaaatggtagagatcttgctgatctggttttctgttgaaatctgggttttccagatgttatcgacagtttatcgatagaatatcgatgctatgtcgatatcctattaagaaaggtcaaggatgaccattatcgacatcttgtcgaaagtttgtcgatatcatgtcgattaaaaagaaaattaacatacataagttatttgagaatttgtcgacattcggtcaaaattgaaagtagtttgaccaataaaattgtctatgtagttaatgtatatcgataggatgttgtaggtgtatcgataggatgtcgacacaatgataatttgtcgacggtatgtcgatattttgtggacaatgtggtttaattgctttttgtgtgataatatcgacctcatgtcgacatgatgtcgacaattttctttgctaaatatatacttggaatatcgacagcatgttgatagtatgtcgatatgttggcaacaatgtgattgctaagtgtgatatcgattgaatgtcgacatcatgtcgatattgtgtcgacaaattctcaaataacttattgttgggttttatgcc

SEQ ID NO: 138948 - DNA, 736 bp, Cannabis sativa
  modified_base (35)..(37): a, c, t, g, unknown or other
  modified_base (65)..(67): a, c, t, g, unknown or other
  modified_base (94)..(96): a, c, t, g, unknown or other
  modified_base (197)..(200): a, c, t, g, unknown or other
cattttaataccatgctctattcttcctttaaaannncatgctctattcttcctttaaaagaatnnngctctattcttcctttaaaagaatcannngtcaattcaaacgactccctaccccaacaatactcatcctatcgactgctttcaataacatctaaatcaaacctaaaaacttccttatccggagtattgcnnnnaaggaaacattggatgaaatacaaaacatatagtttgaaacttagggactcatcctgtcccaacctactactcaagaaagcatcctctatagcctaatgatcaatggtttttatgccatggaaacaaacctcaattaacttgtctaattcttgggaaaacaacagtttattgcaatcgccaaagcaatcaagaacagtaatcaagtaatactcctcggcactgaaccgtatacaacggccagcaaccttagcccaaaattctttgggattgggctggtaaacctccctcaaaagtaggttatgaacaacttgagggtgaaaaacaaagtcaggaatatccaataaaatgcccaaactgggtgtctcagaacatagttaacaaattcacagacaaagtatcttaatgttattaattacagagaaattactcgtccatacacacttcaatctgtagaaatcattggaattgtatttgttaacccagtcctgcattttacaaagaaagcaaatataatgaaataacatatgcaagtagc

SEQ ID NO: 138949 - DNA, 689 bp, Cannabis sativa
aagaccaaaattgaagaaacccttcttcccttctctctctctccattcgaaccaaccaagaccaaggagattgttgttgattcatggtattttcagcaaggaatttagggaggattcaatcaaggtaaatcttagatactctttagctatattttctcaaggttttaattggtttcaagtagagattttaagttttagtggttgttagggttagaaatgcttagggttcagtttttatgttccttttaggttgattctaagttcttgcagctgattttagtgtatgatgttggaattgcataattttgagcttataaacccaaattttgatctttaatggcatgtttggtttctgtgtatttttttgagattttctggttggaatatattgtgtataccctatttaggtactctggaaactttggaggcaattatacaagttttgagcaaattggaggttttgtaggattatggttttttaccacgatcttgatgtactaccatgtatgttgtttcacatcctaaatatgaatttctaaaacaatggaatttaaacacatataaagtttaagaattcttacattggtcgcaacggaattaaatgactccttccgctcagatctctaacccttgtctcctttctgtagcagagtatcaccaaaatctgagcctgattctccttcacttga

SEQ ID NO: 138950 - DNA, 869 bp, Cannabis sativa
ggacaaaaaccagaacaaaaaccaaaaggaaaaaattgtgaacattgctgatagacagtgtcgttaggcttaaccgtgtgaccctccagctgataaaaaccatccttaagcttcccttgcattaccaccttccttgttgccatgtccttcacaaaacacacattagaaaagaattcaacaaacactttattatcagctgtaagtttagatatgctaatcaagttttttgcaatttttggaacatgtaagacatcagttaactgaagtttattaccactatttgattgcaaaacacctgaaccaatatttgaaataagcaattgattaccatctccaacggtgagtctgtccttaccactgtaaggagccttgtttttcatgttatcttggtccgaggtgagatgattgctagctccagagtcagcataccagccttcgtgatcaacaatctcaggtgtagcaatgtaggcattgggatcttgcttctcttgaccatgattgttgttgttgtttggtgtaaagcccatgaaagtctcatcgtatctgttataacaataggctgcagagtgaccgtaacggccacacacttgacatgtgggcttggtgtttcgacctctaccacgaccacggccagagtttccacttgagttgccaccacggtttggattccctctactgcctcggccaaaattgttgttgctgaagttggaatttcctcgacctgaaggatagtgagggttagttgactgtttgtttgccaaagcagcagagggtccagctcctgagttgtttcctccttttccagttgcaccaagaatattcagtcgttccaatttgctatcaaaacttagcaaaatctcctgcatttc

SEQ ID NO: 138951 - DNA, 632 bp, Cannabis sativa
  modified_base (593)..(606): a, c, t, g, unknown or other
ttggacgggttaacccgaccaaacaaacaaaatcattgggcgggttgaaatttttctaaatttttattgggcgggttacgattaaatatttgcaacccgatatttatattgggttaataaaaatatttatcaaaccgaccgacgtatacccttactatgcagccaacccaagagtccttatacataaatttcaaaaaatcacttttacttagcttgtttttcccaaacaaagtgacaacaatataacttaatatgtgggttcgattcaagttgttgaagtccgaacctatcccagaaattttggagtcaacctgggtgtaaggctagggtttcttcctaggttgactgctatgattcgtgtctacttaactccatgacgtcatctttcatgtcacgtgttaaacattgatgtccacatcactagaaaaaaattttgatttaacagacttgtattgggaaatcttaattaaggaattattgatttaatccctttccttaaatgccacgtgtcatacattcaaaaacacagataatacttatgtaccactaattcaatgtaaatagttaatctataggctaattagtaatttttnnnnnnnnnnnnnnacatgtactaaatcgtgccccctaaa

SEQ ID NO: 138952 - DNA, 1383 bp, Cannabis sativa
  modified_base (1000)..(1002): a, c, t, g, unknown or other
ttgttttagtagtttttttgttctgattttttaagattgggcttgcaaatataattgctattgcattgggtattgaggctgtgcagaacagtttttagtttttttaatcatgttttcttatattttgtttgatttgttttagtgttgttttatagttgttttgccatgattatctatttgatgttgatttcacttttttttttctcagtctcaccggaattaatgcttgttttccaattgttatggtgttcctgtggtggttctgtccgtgagtgtggaagatggtgaccttatttttttttttggtgcttacaatataaaagaaaaaaaattggctaagacagtataaaagtaatttctgcactgtggcagtatttttgtaaaaattaggccaaaagttagtatttttataagttttccataaattttaactttaacataatatttgtatggctaaaaaaaagaaaagaaataagaaattatataagtcaagcccatggatgacccttgtgtttgccgtttggttaatcatttatatgatctctaatctaaacaaaaagattgagtgggtatacatttggcttccaatgattgtatgtgggcggctctaaaatttgagaggtggaacttattcttagaggatcatatggttcaaaatgtgaagtaccaatgagtcctaccattgtacggatttaggatacaaatttgatcacatttttcttttccttttttttttttttttaaatattattatattagttatttatttaaaatttttacattaaaaatacaaaatattaactttattacctaaataccactacacggtaaagtaaacttttatacacttcatctttattttattactattttaccacatgcacactctccccatgcatgagtacacgtgagtcctatgacccgatcaatcaagcatccatcacttccctctctttttttattctttttccttttattttccatttcttttcagtttttnnnttttttaaaaaaaaaattagtaacctccattgatgaacttccctatccacgatcccacctccattttccctcatctttttgttcttcaaattttttttttcaactcccagtaaacgaatctcataaccattttccctcttgttgtccatagcctacttttgagggaagtataccagcccaatccaaaagaattttgggctaaggttgctggccgttgtatacggttcagtgccaaggagttttacttgatcactggtattgattattttgctgattgcaacaaactgctgttttcccaagaatcaaaccagttgattgaggtttgtttccgtggtgtaaaaaccatagatcataaagctatagaggatgctttcttgggaa

SEQ ID NO: 138953 - DNA, 804 bp, Cannabis sativa
  modified_base (556)..(556): a, c, t, g, unknown or other
aatttatttttatatgctaaaacaatcactgcattattatttaggatgcatagtagatgcacaaataataataataataataataaatgtgaatgttgtaatgttacgtactgtacctaaaacgttaatatagtgtataaaatatatgcctaatactatgattatttctaaatttaaaatatttgtagatagactattaattacaacaaaatttactatttttcggtttgccatcaaagtgtttatataagtagttaacttcaactaataaaactatattaagagttattctataattttatttgaatttagttgtgtaagtgattatttatttatttatgtttaaattatatttaaaagtgaagtgaatacattattaaattgtattatttggaaagaaaaaaatatactatatatatctaatgtaaaagctcatcaaaataaatttttaaaagttattttgaacttttagttttttacattaattttgtgaaaatattattaagagtatttttttttttagaaaaaatagcaatttcattaaatttagcattcngaatataagatatccaacatagtagtcgtagtgttagactcataaatgctacgatcataataaacttgagctaccctatcaacagtatgtgttagttaatttgctgactgttttacaaaataaattttaacactataataaaaaagttggtaagtaaaattattttttaaaaataaatacctgtttaaaaataattcaaattaacttaaaaataataataattcaaattaaaaattagaattaaaaat

SEQ ID NO: 138954 - DNA, 551 bp, Cannabis sativa
  modified_base (57)..(58): a, c, t, g, unknown or other
agtatccaatcatctttaaaagattaccctgcaacataaacttccccattttcatannagtcactaaaatttgcattttggtgatctgttttattcttaaggtttctggaatttgaattgtagtcagttctttgcccattgaatttgttctttatgtttttatttaagaaatagcagtctttcttgaagtgtccaagttttccacagttatagcacccttctgtgtcttgtggcccttgcaaagtagatattcctttgttctgtcctctatttggacccctgctaggactttgactccttcctttcccatgccaaagcttcttttgagtagatctgcctctactcaggtttagttcatcattagagccaccattttctctgatttcatctctaagtccttagattttaaggcagagataacttcatcaagagtgatagagggtcttccatacttaattgctgttttcacttctctataagtttctggcagtgaattaagtatgatgatggcttgattctcatcactaagtgcctcattttcccctgagttt

SEQ ID NO: 138955 - DNA, 582 bp, Cannabis sativa
aaaagatcatacatatcaacctttacaaatatatataggagattttcaagatgatattaattgaaattggaattcaaataaaacttctttattgtaactatcatgattacatttttacatttttctaatcaatatagcatattaccaaaatttctttttttagaatcaattaattataattgattattttattaaaataattaattaaatatttaacaagacctcttttaaccattaataattataaataatttttaatataaattcctactataattattttaaccgttaaactatttaattataatatttactatgaaattttatcttttttttttacgaaaattagatttctttttatacaaattagaattctcttcttgtataataaatttttaaataattaattatttttaaatgatattaaattattttttataactagaagaactaagtatgagtttttctattcgaatttgaggttgcttcgttttctgagggagcttgactttgtttttaaatatggattgattttttgagtaaatgactccttataaaaaaaatggaggagtttagccattt

SEQ ID NO: 138956 - DNA, 1343 bp, Cannabis sativa
ctggtaaaatatttccaacaccgtgaggggtaatcaaggagaggccaggcgatgttataatgttgccgcccacttaccaatattgatggtccgtgaagttatcgagccgggaacggcggaagaagatgagttgggtccccgtgtgggatccgaaaaaattgtagattccatggaggatgtcgaggaagtgccagtatgcgaccttgaccctaccaagatcctccggctgggaaaaagtctagagccggaggaaaaagaaaaaataattaaagtgctaagggcagccacagatgtttttgcgtggtgccaaggagccatgaccggcataagcccccatgtcataacccatgtcctcaacattaactcggatatgccaccagttcagcagaagcgacgtcccctcgacccagtgaaggcggaagccttggagaaagaggtggacaagctactaactagtggcatgatccgaaatgtgtattatccagaatggctggccaattcggtgctggtgcctaaaccaaatgggacatggcaggtatgtatagattttaccaatctaaacaaggcctgcccaaaagactgcttcctcctaccgcgaatcgaccaaatggtggatgccacctccggattcaagctattgtccttcatggacgcctatgccagctacaaccagatcaagatgcacattgcggatcaagaatgcactagttttagggccgataagggggtatactgctacctggtcatgccttctggactaaaaaacgctggtgcaacatatcaacggatggttaaccggatgtttaaaggccttctgggacgaaacatggaggtgtacgtggatgacttgttggtcaagtcaaaggcatgtgcaagccacgcagatgacctcgaggaatgctttgaagtggttcggaaatacggaatgtaacttaacccgaagaagtgcacttttggggttaaatcaggaaagttcttgggatttattgtcagccaacgggggatagaggcaaacccagaaaaaattcgagccctcctgaatatgccttctcctaagaagcacaaagacgtacaaagcctaactggaaaggtcgccgccctgagccggtttatctattgatcaacagacaagtgcattcccttcttcaacatcctgaagaaatgccgaaaattcgaatggaccaaagaatgcgaggagatattcaaaaaaactaaaagaacacatgcctaaacctctaatcttatcaaaacccgtcctcggagaagacttgttgctgtacttggccatctccgagaatgcggttagcacaaccttagtccgggaagaagaaaagactcagcac

SEQ ID NO: 138957 - DNA, 853 bp, Cannabis sativa
  modified_base (356)..(389): a, c, t, g, unknown or other
tttatcatttaacaaaacaaagggtccaattagtaacttttgtaaaacagagagtccaaaatggtatttacccttttttttataggaatggtccagtgaagatttgctcttaatagggcgagaatttttcatctaattagaaaatgaagaggggacgataatcattttttgttcccgaatattaaactgagcggggacgagaatgacacccccaccctgacaagaacctgcttaatattttaaatattttttattaatattttatattttataatatgtgttcgtattttttttaagtatataagtatcatttttataattttttaaattatattttgtataataattagtatatnnnnnnnnnnnnnnnnnnnnnnnnnnnnnnnnnnatgtaatttaatatttttatacaagtaaaatttaaaaataaaatttattttatattatgggatttctcaccttgaggatttcctccaatccctgataagaaataagcgagaatatgaattaaaattcttaatggagatgaggacgagggatcactctctgccaattctccgttctttatgcatccctcgcaactagtggtggagcgagctactcatcttaggagaggaaaaaaggggcattaataaaaaatattgtttaaataaaaaaaatatatattttgattatgtggaaaaaaataaaataaaatttataaatcgtcattttaatatgccatgaccaaatctaatatattatagtacaaaaaactattatgctaccgaagttaaactaatataacatagccaattttaatataccatagaaaaaaatttatattatgttgaataatataatatataaatta

SEQ ID NO: 138958 - DNA, 651 bp, Cannabis sativa
cattgaaagtcaaaaatctcatttgtcatagtgattcgcagctgatcgtgaaccaggtcctcagggaataccaggccaaaggcttaaaaatggcgagtaattagagaaagttcgaaagaacttggaaagattcgcttactttaaaattgaacaaattttgggagaacaaaactcaaacgccgacgtcttagcaaaactggcctcgcagaatgacctggatgaattgaatctagttccggtagagatgctgagcgagccaagtatatctgaaactgaagatgccgagatgatagatagctttccaacatggatgacgcctattattaattatttactcgacggacaacttccaaatgacaaaaacgagacgctaaaactattgtatttagtgcctcgctacacaatgatcgaaagcaaactatatagaagagggtattcaatgcccctacttcggtgtgttcttcttgctaaagcaaatgaaatcctcagagaaattcatgaaggcttctgtggggatcattgattcaagttggtccgaaaaaatcattgaaaaatacttggagtaaatgttatgttctttccaggacattagtaaagtatactattttcgaatgtatggagtatacattggaatggaccgatattgcaact

SEQ ID NO: 138959 - DNA, 977 bp, Cannabis sativa
  modified_base (174)..(174): a, c, t, g, unknown or other
tgaaagttatgtcgattttttttattttgtatgagttgttggtatatagattttttttgtacagtatatttcttttttgttgttattatattattattctcagatgatatttttttttattttgctatgtataatggtagtatataattttgttagcataatacaaatattttnatgtatgtatataattttattgacatgctacatatatttaattattgtttttatatattttaattgtatgacatatatttattttgaataatatttaattagtttctatttcttatatactatggtagtatataatttttttgttatgttatatatattttaattatggtatataatttggttagtatagtatacatatatatatattagtaatttatatgtttattaatattagtgttagtatatatgttttggtgaatggtgtatgtattttttgttatacggataccattttttaaataatatttaagttctattttctattgtacttttgttgacataatatataattttattagtatcctatatattttatttttatttattgttattattatatatatatatatatatatatatttccattgtaaggtatatattttttgttatatggtatttaagttttattgtatactttatgattttattttagatcatgcatattaaatttttattttattatacataaaagtgatatataattttgtaagtatggtataattattttatggttgtatataattttgttaatatggtatatataattttttttataatattatattattttatttttaatgtaggtatatatattttgttgtacggtatatggtttttgttgtctataatatatcatttaggtaagatgatatttagtttttattttattatatataaattttcgggtatgtatatatatattttaatagtgatatatataatttttttggcatgatatatat

SEQ ID NO: 138960 - DNA, 1709 bp, Cannabis sativa
tgataaattaaacatgcaacagacattaaacacataaatcctataagctatttaatcaatacaggtactctcgtcctatatcgaaattcagttctatttgactatagcataattgacactcacttctcagatcttggatcaaaatcatagacagttaattggtgattaagaaattaaaagtaattaaatacgaataaaatagaatacatagaaatcgagggaaaataaatcatattaaaaccataaagcaatgtcaacaatatccatctagatcctaattaagtgattagctactcatgttcattgtagcaaaagcacacatgttaacttcagaaaagagaagaaaatagagaagaaaagaatactgaaaatcctctgaagaatgcctccagtattgcagttggtctctgaaattcgtactctatcttctgctgtttttttccttctgaattgcttgttaagagtttctgagtttttatctgaaaacttactaaaaatgctaataataacgtgtttatataggctaacaaggttacctaaaagatactaaaaagatttaaagtttaaacttaaacaagataaacatcgaaaatctatccctttttcttgctatctttttatctgttttttttttttgaaatttcttgatgcgacgactgatagtatttgggccgcaactctctcgatattgctcagaattaaatgattcaagatgccctgaaaagaccattgtcgaatttaggcttgaagtttcagctttattttttgtacaattttctctattttatagttcatctttttgtgagatctttttatcttttttccatcttattcttttgatattttctaattttcttctattttaaatctgcaaaaagaaaaggtaagcattcaattgctccaaaaaatagtagaattaaattaaaactacactaaaaattaacctaaaaataatactaaaaacaacctaacaaattcccccaaactaaacatttactcgacctcgagtaaaacactaaaacgaagaacaaaagttaactaactcactctcccgaatatgagtaatttttaagtagactcaataacatgattataaaaaatttcacttatgcatacaatccaaaattttagttcaattacgcccttgacacgccttcaatttattttcattcagctcacgaaactatagaatgtaattaactaataattaaaccagtttatacatgtcaattacaaccattaatctactaactcaaaattccatatgcttgcaatacttactattctccactgatataaaccaatgcacaaccaagaatcaaaaggtctttctaggcttgttgtgtcaggcttaggtaagggtagatgaaatggtcatttaggcttgtctataccataagcttctccaatcatgtcaccaaaatatttcacacacaatcccaatacccgtattttttttttctaattacatgagagaaatttttcaacaatattgcaacaactttatatttatttttttctttttctttttttaaaatttgacacttattgtcagatttctctttctttttttttcaagttgctgtccaattttttttttctttcatattctctcaattttcacactttttccacacacacacacacaacaaacttcccatccaaattcccccaaactaaaggtccacttatggtatacttagggttaa

SEQ ID NO: 138961 - DNA, 1126 bp, Cannabis sativa
  modified_base (654)..(655): a, c, t, g, unknown or other
  modified_base (919)..(935): a, c, t, g, unknown or other
tcttctaaactgttgggaatagccttttttgtagtagtgaattgagtgggagctctaatcatagatacaaaatctataacttctataactatatagaattgaatgataattttctttgagcttgacttaatagagataaatggaagagctctttttttagtaattatattagtttactaaaatatcatttataggaagttaagtgttttaagaaaaaatacattgaagttatttcaatctaaacaatcaatgattctttatagatcatttacatagtgtagggataaatttaccatttcacctttcaatgtattttatctttaaaatacttagctacttataaataatatttcggtaaactaatatacttacctaaagaaggatacttccgtttatgtcattaagccaagctataacgaaaccattgtttcacttttaaataattatagaatttgtagattccatatatatgattaatgctcccactcaattgcactaccgaactcctaagatataagtataggctagtcctacgtgtaagtggataacaaacaagtcaaagaacctgtatagtgctgtgttttgtgccctaaataaaacttattttaatataatcagatttactaattaataaaagatcagaaattattttannttgcatggttcacatgatttattacatgattatgtatgtgtaatgtataaattttattaagtccacaacatatatttattcatgattatagtgttgtcaatacaatagaatataatcatgattatatgtttaaaagtttaagtcccatgatttgtcactacacttgatttggcctgacatgataatcgacgataaggtatacttacaccttggataagtgttatatcctttctaagatattggtaaagtatgctagtatcggannnnnnnnnnnnnnnnnggattggaccgatattgaacttgggtaagatatcataaacttacagttatatctttctaagttaatatcactggttggttttaggtgtataaatcttaatctcgatatggttaggttcgattttagttgtattattcatgttctttaatttgttcgttaaagtcaaccaattggatcttctcatgacatac

SEQ ID NO: 138962 - DNA, 1254 bp, Cannabis sativa
ccgatctaaataattttcataaataatcatgattaactgataatttccaaattaactaagcgggctttacatatagtgtacagtaaattgtacttagcagttctatataaaagattctcattacttaatacactaccgacttactttattcatatcgtataatcttagttctctacttccttacaagattatactttcactataagaataaggaattttcagatatttaataattatacttctataattaatgtatcacttatcttataattgtattttatatattctgtaatatattatccattaattacttgcttttaaggtataaatcttaataatcttcgaatggctaaggacatcattggcatgtttttaccattgaatatgattgtgtttctgtttctgcagtgtaacaagctatgcacatcattggtgggtgctctgatttagatgctataactaatgtcatgcaatacctcatttctagtactaattgcagattaatttctcatttgtttagagaaccaaactgtgtagctcatatattaaccaaaacaaatttagattctaaattttgtgttgtgtgtagggacgcacacgaggcggagaataaggggcagtgctcacccattcccatcgctattataattttaatccccatccccgcttattattctccatcgaggataaaaaataaaatttttaataaaaatttaaatatataaaaatattatacataaaaagtaaaggaattatttcacaaatacaaaataacaacaaaaaaattacaaaaatatggttgtatgaaattttaaatatttttacaatttttatgattctatttacagaaaatacggtattttgatgtatttttatggtgtactcttgttaattatttgttgttgatttttttttatttgtatgttttttttattgttttgatgttatttagatgctattttcctgttagttttatgtagtttttacgttatttttctgttgtttttgtagaataccgtaaaaatataaaaaaaaatctttgaacgtaaaaatataaaatatttacaaaagatagttcattatgtaattatcccaaaatttaaatattacacattaattcttattcaataaactaattattattcaaacaaaacttaaaattcatcaagaagatattaatatactaaaaaatgcaaacataaattataaattataaaatattattagaaatataaagagtaatttgcgacataa

SEQ ID NO: 138963 - DNA, 599 bp, Cannabis sativa
ataatattgtcataatatcattgaaaaaaaattgcactggtaactaatgtttgacatattactttcttattttctaattattttttaaaatctccaaacagaacatgatgatttgttggtaacgagtgaacctacaaaaaaaatcttactattaattaagattatattcaattatagaaaattaagcaatatatatataatatatatacctgttgcataagttcaatcatgcttgtttgattattttgatctccagatatactttgaatctatacaaacgcacattaaaaattaaattaaaaaacataacaattatttaataatatttaactttgaataaaaaattaaaaaaaatatacacacattaaaaattaaaaaaaaaacacaacaattatataataatatttaactttgaataaaaaaaataaaaaaatatacctgactagcgtttgatgatatttgtggcatatagaacaatgagcttgacaaattttgttcgccaaaagaaatattatcaccagattgagcatttgtattattggaaggaacctaacaatacaaattataatcattagtgcaattagaaaataaataaataa

SEQ ID NO: 138964 - DNA, 605 bp, Cannabis sativa
  modified_base (149)..(149): a, c, t, g, unknown or other
aatcagtattgtcgaaagtttaggagtgaaatttactaattattctttttaaattagtagaaaatttatattaatattttagaaaattaatatttgtattaaattaataattaaattagtgttaagcataaataattttatattattcnagtatttttattttactattttaattatttattaaataaaaatattataaaccattttactatatatttatgatgctaggttgatgttacgcgcaatgcacgtataattagttttgtttttaattaggttcaataaggtgatgttaagtgcaatacatgtatgcttaatttttttttttaattgagtaatgtattttttttttaattaatttttgaaatggagtgagattttgattttaagaattttttagctattgctacatcggtgtgtcattttgaatatgattatatatatgaatttttaaattttaattttttttaattagataacatatatgataatgtatatattgtaatttatttattcttaagcaaaactcacaactaaatttgagtgtgtctatatataggttggattcgtaaatttgatataaatgttttttatttccaaacttt

SEQ ID NO: 138965 - DNA, 831 bp, Cannabis sativa
atcttacctcaattctgaattcaactgtgctggtcaacctgagtggaacaactgctgggcgaattataggctcctaaatcacatcgatatcaacacacataagtgacccgttaaatcacaactgggagtaaggtttaaaaccaaaaccctatctactgcaacttaatataataatatcccaaactagcagggaaaatcaactaattagaaacctgaaactgacacgaaatgacaagttgaaaaaccggttttccccctgctgcaaaatctaggtaaccggttttacaagtagtgtaaaaccggtcagaaaacctacaaaaatcaaactcctaaccaaatcgtttctagactcaaccaaactttccagacctgcataatacaccccaataaacattttccaagtgataaaacaactacccatacacagaattcaaaactaccattgatgagccaagcttgatttcaaaaactcaaagcttgcccatccaacaaactagctatcaaaacctgctcaaatcaccttatataaccataatttaactactgaaaacaacaacaatcaataacagcaatcagagctccttaaaatcaaaattaagcaaagattcataactcgaaacttaagaaactaaggaggaagttgcttagagacttaccttgagttgaaatacaaagaacaagcttgaaatcccaagatgaagtagtaaaatcaacaaaccctagctgggttctaagggaaaaacgagagagagagagtttgaaaagagagatgctatcttttttttttttccaaaatttctatttttcgaataaatgaaataaaagattggt

SEQ ID NO: 138966 - DNA, 656 bp, Cannabis sativa
cctcatggtgttcttggaagcaacagacttagctcgggagtatgtgtaagccaacttcagactagcctgtgcagagaaaaaaatttagaactcgaaccaaataaagaggattaaaggaaactatcaagaaagacttacccttgtcaattccttcaagactcctcccatcaatagctccaaagaagagtcgttgtcagcactggccagttgctcactaacctcaggaaccaaccgattaatgtagtgggcgagcatctccttgcctttcttggcctctggaagcactagtaaaggaggagtaggagcccgcatctgctcggattcacccttgatcagctcaaatccaccttttggttgctcaggcctgtccgaacttcctcctcgagaatccttggacttagaaacttttgaagtggaggggtttgtaacagttagttccttgaaaagatcaataacctccccagcaggcgccttttccttggaaggggttccctcaccacccctggatttcttggccggaggagatgcgctcgagcttgctccaactctcttcctcataacatcaagcatcttctgagacatgtctgcatcgaacgcaaacaacatggttagagaaaacagacattagaaacacaaagcataatagtcaagaagct

SEQ ID NO: 138967 - DNA, 1225 bp, Cannabis sativa
  modified_base (47)..(58): a, c, t, g, unknown or other
ttacatagtgggcagtaatttacaaaagttgacaataatcgttacannnnnnnnnnnntcaaatcatgggatttgattacaaatcaagctaggtaaatgaggcttttatttatttattgggccgagatgaacgcgtaattaaagatatatggtaaaccttatcccatagggatgcctcgccgagaatggagccaagttaactttgatggcaaacagttgcttgtcatctgagttcccgagattaatattgtttcaactctgataactatattttctggtgtcgagatgatcttcctcacatgcatgccatcttctagcaagataaacacctcgatgtctgttatcttgactcgccaaactgtctacacttagtttgtatattgtgtaatatacgctaagtgtttttatcgttatcttttctcttccacgcagagaggttgaggcctcgtcatgcacacttgcactcacgtggtttctcgtcaatacataagttagcaattcgtacgtttctgtctcgtacaaggcaattcagtcaaccgagttataaacatactctgcgaattatgtttccaacgagttgttccatgctaagcgtactttcatttgcgtgtttgagttcttcgttcttcccagctcaacacatgtcttcctctgatgtgcttaccgaattttgggtataacaattacatatttatatgataaattatttttgatagataaaatccatcttaataaaaataattagttaaaattatttaccaaattttaaatttgtgtatgaaatctcaacattaaggccaactccaacaggcctttaaaaacccaataatagtgtgatttcacacaaaaatcactccaatggcatggtaaaagttacattaattttgggtttgtctacagtatcccaccatatttaggtgggcattgtagacaacactatataatttttttttttactttttaataattatataatacttaaaaaaactaaataattataaataaatattaatcaaaacttttataaatgtatttgtttgtatttttatatttttaagtgtgcgaaaaaaatattaggggtgttcacagtgcgggtagtgcggtttttgaaattttttttaactcaatccgcacatgcggtttttctaatttctcaaaccgcacccgcaacgcgaaactaaaaaattgcaaaaatcgcactgcaaaaaatagtgcgatgcggtgc

SEQ ID NO: 138968 - DNA, 556 bp, Cannabis sativa
aaattatattagcatttcaattcactagttaattaaaacttgttacataaaaagtcattaaattattaccttcccaacatttgagtagtttcttcgggaattgggcggccacgtacagggtctaaatggattattttctttggcgaaagcgacatctagcatccaatgtgcactagaaattatattggaatataagtaagatagtataaaaataatctgataatattgtcaaaagactcactcttctcttcatcggttataccattcactacgtgaagctctggatcataaaacttgaaaatgtttctcataccgttgatgctctcccagatttgcctaccaaaacaattgttaagtattagtgtcttataataatttgactagaatttgatatatatatataagtttaatttgattaaagaagagtatacatcacacaatgcaatctgctgcaaatcctctacaaataacgtgatctgggtacgcgttgctatgaatcccttaggcacaggaattgtgattatatcacgtttatctttgaggttcaggaattcaa

SEQ ID NO: 138969 - DNA, 525 bp, Cannabis sativa
tcttcaacatggcatgaaaataagttgtgttactatctcctttttgaatccaaataaccttgcttctttggtggagaaagttcaagtacattttttcctgaatgtgaaaatggttagcagcctcacgctccaactcaaggaaatgattgttgttcaggttagcttgacattggaactgagcctctttgtaactctccttggccttctcataagcattgccaatgttcccaatcaagtgcctattgaaggcttttaacttgtgcttgagtctcgtggtttttagataaatccccttcaacccacaacatcttagaggcttgccctagttgtccagcacaattttcttgtaattctgatgatcaatccagaagttgtagaaccgaaacggtttgcttccaatactttctgtagaaagtgaatgaacaacacaaagacaatgatcacaacaagtctcccaagagaaatgagcagatgtattcaaaaaatcatcaacccactcctcgttgtgagacacatggttaatac

SEQ ID NO: 138970 - DNA, 626 bp, Cannabis sativa
tttatttgttaattaagagattttctaaagtctaattaataaataagttatatagcaattttatttgataattaattataattattaaataaatagttttgacatttataggatgaaaattagataatatagcataagtgaaagaaaagataaattgttgaataaaatagtaaaattgtaactagtggggtccaaatcctatggtcggccacatagtgtcaattttgctgttattatcttttttattctatataattgaaatcctaaccctagtttaaatactataaaaggaatatgatgctctcattctcatccatcttgcttaacttagttttctaactctgtcaaataactagaaatttaagatcctccttcctttgctatttcgaaatcctctctctcattcttcatcaatttttaagcctgttgtaatagagtagatgcccacccgtattaagtcaagtactcaatcatagtgtgaaagattgtgaagaatccaacacctgaaggagatccaggcttagattttgttaatactatgcgaaggaaaggaacaagagttagagatctgagtgcaaggagccataacattccactgccaccaatgtaaggtttttttttttttt

SEQ ID NO: 138971 - DNA, 1000 bp, Cannabis sativa
tttgtaacccgctgactgtaaagtcttaggtgaggaatcaatgtacgaactggtacttagagtattaacgagaaaccatatgtcactaagggataatagggaggcaccagagaagagtaacacatacctcagcttgcaataagaagactaagtataaaagtcaaactggctcaaaatacaagaatgcaagacggccatctcgctacgaggaaacttcctatagtttcatccaactaacagaagcgagactcacaaccctggaaagtctacagatttccttatatccgcgatcaacgcaagacacaccttgtcgatctaggaaagaagagtggttccaactcgccattgggatcactacaatcaagtttctatcgagacatctccaaaatcaatcattaaagacgtgtttaatacacgatatttctgacctagtaaaagcgagaaaatcacagtggtatgactttcaaaatcatgcaccgtgtttacatttagtaatatgtaatcagatcccatgatttaagggacaataactataattacattttggtcagtcttgtaattaactggcactatccaattataaatagtggcagataatctcaaaaaagggaggaaaaaactcttatacgagaggccctaaaaaaaatatactcataaatctgaataagattgactcgtggactatgcagaatttgaaccgcaaaatcacgtaaaaatttggtgttcatatttttatttttctatagtttttattatttttgtgttgaatcataatcatgaggctcaaatttggttagcaaaaatctgcgttaacagttatctctattccataatggatagaattagagacatgtcttctgtttaatcagatccacttaataagcagtaaagaattcagtatccctagaagagtaatgcatatagaaaatgatgttgcacaatgtttatgaacacaaaggaagtaatggtggagagagcagttgcttaccacagacttaca

SEQ ID NO: 138972 - DNA, 714 bp, Cannabis sativa
ttcgtatctttggccaaaacccctctgtttatgaacactgctagtatttggccctgttgcttttttatcatgaattgtgtgaccgactaggcagtccttaatcctggctatcttcttatggccttgacaagtaagggtccgaatttactttgccaagtcgatgtatgcatgcacgacttagaggcaggtttagtagcttatactaagtgttaaaatttctttgcataagttttttgtgctagtttgatgcgttgtatagtatgggttccccacaagtgaccatgcagacaagtctcttggtcacttgctattaaccaagttttacagactttgtttgggttctgtcttgtgagggtaccatagtacgcatgtggaaataaaagaataactttaaaaagttaatctgtgagcaagtggttcatagacacaataaacaagaatataaatattgttattattcattaatttgtcttttttattatgcaacttacataaattgaatttaccaacctacattgcataactttagcttctagatgttaagtggctacccctgcttgcctagtaaagcagaggccactattgaagaatagtgggagaccacgccaataaggtcgtggatgctagcgctttttgtactctaatgttgagtaggtagaaccgctactttggagtagagttttgtaagttggttattggtagtatttgtgaagg

SEQ ID NO: 138973 - DNA, 690 bp, Cannabis sativa
aaaatatctaatttaagttattctaaaataactaaattttcaacttaaataatttttaaaatttaattaaataataaattaagtattttgaattaatcaccttaacttgaaaaaaatatctcaatttaagttgatctaaaattaacaaattttcaacttaaatatatttataaagaatatctgaataactaatatcctagaaaaatctacttgattattaattttataaaaaaaatctaatttaagttgatccaaaattaatttaaaaaattaatttacaacttaaatatattttttaagaaaatttaaataattaagtatctagaaaaatctaattagttataacttgttcatttaattaaatacagaaatatacatataatttatcttgaattaatttcattgaactaagtgtacttttcttaaattaatttcaaaataatctgatgaaaaataaatttcatgtattttgagaattaattatgttgctgatcaattttattaggttaaattagtgtaattaacctatattaattattcaaataaggcaaatgagccttcacaatttgggttcttcatgtaagggaggactgagttcagtatgttgtacccactactaatgaccccctaactctcatacaaggcccaaaagagaagaatttaaccttaattaaacaattattattcatt

SEQ ID NO: 138974 - DNA, 1735 bp, Cannabis sativa
gacccgaacccaaatccgtacccatacccggaccaaaaccgggatccaggcctgattccggacacagaatctaactagcactgggacaggaacccagacctaggactgtaacaggacctaaactcaaaccaaatccatactaggacttggacctggaccaggacctatgacctgggacataaacctagactgtgacctagaccaagactgggacccggacccaaacctagacccaaaatcgatattagacccaggaccgaacaaccaaactcggacctgggacccaaaacccagactaaaactagtactgggacccgaactcgaacctgaacccaaaccgagacctagactcgaatcgggacccgagacctgaacctgaaccggaacgtaaatttagacttggatcgggacctaggacccgaacatagatgggggacccaaacctaggaattgggcccccaaactgggaccaaaacttggatcgagatttggggacccgacccagacctaaacctgaacctaagacccacctcaagacttgggatccgggactatatgcttggactcgacccgtaccccatgagttgaaactagaactgaaaccagaagcggatcgggacccaagaacaggacaaagacaaggacttggacccagacccaaaactatatagggactcagacccggactgaaacactgacccacactcggattttgtgtcttggttcgggatctattttgggtttggatcggggtatgagttttggtctgagtctaggtctgggtttgggtctaggtctggatcccagtctggatcttcgttcgggtcaacgtccgagttcgggtcccaggtgcgggtccgagttcgggtcccaggtgcgggtccgagttcgggtcccaggtgcgggtctaggtttgggtttgggacaagatcttggaccagatcttggtccaaagtttcaatcccggtctgggtttgggtccaagtgcctaagtctatgtttgggatcgaatcccaaatttaggtccaactcctggtatcggtcccggtctagctacacgatcgtctccgagcccgagttctagtctctgtttgggtctagggctaggtctgagtttggttctaagtctgggtctgggtctacgtcacggtccaagtcttgttccagggtcctggttcgacggttcttgtttaggttccagttttgggtctcgggtctaggtctgggtcagggtttgggtcctggtctgggttcaggtcctagtctgagtcccagattcaaacaccgactacgagtctgttccaagccccatttctaggatctcaagtaaagatttggatccctgtcacgggtcccagtctggttctggttctggttaaggtcttaggtcgtaggtccgagtttgggttcacgattgagacagggttgcggttctaggtcccgacccctgttttgtgtctcgagtctggttcaatgtttgggtaggagtttggttgcgggtttgggttccgagtctaggtctggattgggatccaggtctgtgtcacagttcgtgtttaggtttgagttggagtcttgttccaggtctagttacggtttcgagtctaggtctaggtctggttacggttctaggtccatgtcccagttttggtcccattctcgggtcccgttctacttccagtttcaattctaattttgggtcacaaggtacgagttcgggtctaggtttgggtct

SEQ ID NO: 138975 - DNA, 634 bp, Cannabis sativa
  modified_base (57)..(59): a, c, t, g, unknown or other
gttggtgacttgagacttgtgggaattattcgattaaaagtgcatataaattcttgnnngaatctaagggtgcttggtgccgagatagcaatactaatttttggaagcggctttggtcattaaaaatttcatctaatatcagtaattttttatggcgagctgcttcgggtgtgcttccaacttgttttcaactccaaaagcgtcatgttcctgtcaatgtcgactgccctttgtagtactgaaactattcaacatgcattagtagaatgctcgtttgcaaaggctgcctagcatcgcagcatagtagacgtcagggctggggctgcaacattcagtagctggttgtcagaaattttaaccagggggcacgaagttgaaatggaggaagtggcgatggtgagttgggctatttggcgtgcgcggaatgactttgtttggcaatagaagagttggcttgcttcaaatattgtaacatcagctagaaacatgcttgatcaatacaaatttgctcaaggaaagaacggcctttcgttgtctcctttgaatgatgggggcggaactgtgagcgttggattgcacctgtgttaaacaagattaaagttaatgttgatgggactttatttgaacaagaggg

SEQ ID NO: 138976 - DNA, 506 bp, Cannabis sativa
ttaaataaaactcaatatttttttttaatttttttgctgaattttttttactattatttttatttcagtcgatggaacaacctcagcccatataatgaaaaaaaaaaaagagagagatttttctaattaaatcgaaaaattaagcataaaagctcatttttttttaatattacccattcatgagtaatacccattaagagcgcacccatataagacatatatatatatatgggcatgctcttaatgggtattactcatgaatgaatattctattattagctattggatcaaatctaatggttgatatttatagctattaattaaaattttaaattaaatattttttattttaacctattacctgatgacatggaaatcattttttatatcttttctttctatttttgtcctcattccatatatacattaatacattaatactttacaatttaattatggtaatttaaaaacttaattacacatttaaacttcactacaacaaatat

SEQ ID NO: 138977 - DNA, 1094 bp, Cannabis sativa
aatttacttaatatttaacaattaggtacctacagagttctaaaaatataacttaggtattattgtcgccaaaagttaaacttagatatttatttgtaagtaggagttaaacttaggtatgtataccacaaattactcttataagtataacaatgttgtttctaaatgatttatattttatccttttttaaaacttttccaatgatttttttaatgaaaaacttgttaggaaattaaaatataaaaatttttatggtacactcctaaaaatgagtgtgcgtatacaccactttagttatgggtggcagttcatattgccgtatcatattcgtgtttatattatgcaggttgacatgtttatttgatctaaccttaaatcgactcatatatatatttcgtgtcaagaaatctaaaccctaacccaacttgtcgtgttcgcgtgtcaactatacttatgctacaatacatcttgaccaatatgattaggatcacatatttattctttatatatactaaataaaaatatatcatgttgaaaataaataatattaattaactaaaataatttatcacaaattatctattttatattcttgtaagcaattttctttttaatccatatattttttttatgaaaataaataataattttactataaattaaaaattttaataatatattggatataaataggtatattcaagccgacttcatgtcacatgcgttaaccctaacacaacccaaataacaatcgtgacatccaggttcgacctaatttcgactcacgtctatttttcatgaccttaacctgcaataattcgtatcgcgagttcgtttcgtgttgttgtgtcatgacctgaatttccacccctaactttagtgttctcgatatttagataatcttaatattattttttatatgatagtgtacatcatagttatttaagacatcctacaaattatcgagcaatttaaaatattctaatgtgttgaacacaaggttctaacaatttcttacacacttttcttattattattttatatgcttatgaaatagactgtttatttacccataaattgattctgatgacgt

SEQ ID NO: 138978 - DNA, 534 bp, Cannabis sativa
aatataggttgcagcgctagttgcaagtttctatgtagaattgtgtaagaagtgtaaaaatgaaaaactcctttattttatttattgtgatttttacatttgtttttatatactttaatatatactcacttttatagatgaccctaatatactccttaggttaatatatatatatatatatatatatatatgctagatttgagtactgtaaggtgagagtatattttatattggacaacccattcacaaaagtatattttaatgatatataaaattaaggtatttttaattaatggatgtaaaaaagaggtattcctcaacttatcccaaaaaaataatttcttttgatttcttttcataagaataattgatatttttaaaaattattaaaaaaatatgtatatttattataagttttttttttattattatttaagctcctaaaatgtgatagttagtagtcctatgatccgtaagaaaaaatatcgggtaagctatgcaatcccacaccgcttggggaaggtcaagtgggat

SEQ ID NO: 138979 - DNA, 617 bp, Cannabis sativa
tgatgagtgaaattgggtttttgaatggattgggtttgagaaattgaagaaaagatgagaaaattgaagattggtgatgaaaatttgaatttttggaaaatagaatggcttgggcggctgagaagacgaagggtttttaattttttttgtgtagggttgaatggggggaaaaagtgggattttatagaaaaagttgtgagctagtcgtgacttggcccagggctagtcgcgactagcttaatttcaaatttatgctgtctctggaaaaatggcaagtcgcgactagggtcgcgacttggaaaaagggtcgcgacttgcattgaccctagtcgcgactactgggagttaaaaatttcctcgtttctgtgaaaactccaagtcgcgaccagggtcgcgactaccaaaaaaggtcgcgacccaggaacctggtggtcgcgaccactgggcacctggtccgaaaaataattttttttttcacgtttttcacgattcaactgaaaaaaaataatgtctggtacatagctaaaaattgaaaatactaaaaatactaaagcataaactaaaaacataatcaaaaagtctaaaaaattaaagaaaacacttgggttgcctcccaa

SEQ ID NO: 138980 - DNA, 626 bp, Cannabis sativa
tagcatttttgttcttcatagtgcattgccataactttataattcattgcaagaattcaagtattctctttataattttatattttggggggcttgtaagagccaactgattttctttctattgccaacatgccattttgtttagaacaaatttattttctttgtttatgctttcaattaaaaggttgaatggattgttgttatcatttaaattttaaataataattaatattttatttttaaaaattttaggcagtgttttttttttcaattttcttttataatattaatatgttttcttccataaaattttaaacagtaacttttttatttttttttttaaaattaacttctacttttataataatattttttttttactatatgtgacattatttattataattattaaaaataataatatattatatttaaaaataaattaactaagtatacgtgcatatgcacgtaacttcactctagtatatatgctatgcatatatgtaatgggagggggcgtgaattacattgaaaggaggcggctggtaatttggagctcctgccaccaaagaaaaaggaagaaaatgaagaaaaagaaaaagagaaaaaaagagagagttttattt

SEQ ID NO: 138981 - DNA, 934 bp, Cannabis sativa
aaaatacaagaacatctaattttatatttcttaacttgttatcaataattaaaattttagagacataaattattgtgattttattaggttccgtgatttttttatatttgtaaagttttttttttgacatcaagatatttgattcaatgcattgagttatacaataattatcttgtactttcaaaagtcatctttatcaatggtcaaaaaatgtcactatactatatagacaaaacaagggtacctaccatagaatttttctataataatatgtgtgtaactaatcatatttagtgtatatgataataataatgatgatgatgataaaaagatgtgttcgtcatttttgagaataaagagttttggaattaattttccattagtggttttctctcattttttgatatgagaaaatgaactatgagagttactcttttttgggtttatcttgccaaagatagatcaaagtggatctaaacttgtaaaatgagtcataattggaagagcaattttagactcatatcaaagtgaatcatggtggattcaaaaattgtgaaaagataacaaaattggagaatcaattttgaatcttaaataatcaaagtagtgaacaaaattgatgagaattttgtcaactttggtataattttaggctaatctcaatgaggagataaccttaaaattatgggtaaaataatcacattattttttaaatggtgatgtgagtttgatattttagttttgttgagaaaactaaaaatatcaaatggtattttcaaagtgactttaaagagtcatttcaagagaaaaacacacaaaagtgacattttatatacactttatggtagaaatgtgggggtgagccacaaacttaatcaaaatgtgatgagacattgttgattagttattaatttgattttgaactcaaattcta

SEQ ID NO: 138982 - DNA, 919 bp, Cannabis sativa
  modified_base (291)..(302): a, c, t, g, unknown or other
  modified_base (498)..(499): a, c, t, g, unknown or other
ttcgagcttggcttaatatagataaatggaagagctcttatttcagtgattatattaaggaagctaagtgttttaaggataaaatgcactgaggggtaaaacggtatatttgttcctactcggtgtaaatcatctatagaagatctttgattattgggattagaacgatggttaaaattttcatagcatatctatatcgtagaacatatggagcgttctatataattgagagtgaaatttcaaatctatagtggtgcaaggaggaatttataagttaggaaatttacttgnnnnnnnnnnnntctgcttattgaaagctcggttatatacgcccatggtccccatatatactagttaagacaatactgcttgtaagacttagttaattgattttaattgatcaattataattctaaaattagactgtcttatttatgaattttcactaagctagggcttaattgtgaagagaaaagattctagggtttatttattaannaagagactttattaagtctaatcaataaatatattaaatgaaaattttctttgataattaattttaattattaaataaatggctttagcatttaagtggttgaatttgaaaatatggcatttgtgaaataataggataaatagttaaaaaatagcaaaattacaagtggtgggcccacatcctatggtcggccacgtatgcttgattttactatttatttattaatttttttaattccaaataattcaaacctaaacctagaaggattcttataaatagatagtgatggacttaaaactgtcaccctaagttacactagcctttcagccaaaaattgagccttcttcttctctctatttcaaatccttctctctctctctttctctcttcaattgagaaccctatagtgatagagtaaat

SEQ ID NO: 138983 - DNA, 867 bp, Cannabis sativa
  modified_base (801)..(811): a, c, t, g, unknown or other
tcacccatatatatatatattttagattcaattttaatctcaaataatatgaatatgataaattttattttgttgtagccatgaaattattaaagaatataaactcgatataaattatttattaccattaattattctggtatcaaaataaatttttgtaattttagactcaattttaatctctaaataatatgagtatggaaaatttagttgtagagtgttttaataatatttcaatatacaattcaagtccaaatctttattcaagttgtagattcaagccctttatgatatttatttaagccctaaatttaaactatataaataatttgaattttttattattgttatagatactattttacctctattaattaaatattttcaatataatatcaatttttacctatgatattttgttatatctttaattgtttttataatttatttactttttttgaaacgatttatttactattgatagatattaaataatttttcttgttcaccgttaaatatataaattttactttattttctttaccttagttagttaaggtaataatattagtataaaacatttattcaaaatatctaatatctataattatccatctataatttgaattctaattattaaaaatttaattataatataacaccatgtttacgaatattatttttattttatatataatatcaacaattgatgtggtaagataataaagggtaaatactattttcgacctgtattttgcaaaacttatagattggatcttgtgttttgttaaatgacaaaannnnnnnnnnnttttctaaaatagtaaaaataggttaatttttgacaacttttttttttaatacaac

SEQ ID NO: 138984 - DNA, 570 bp, Cannabis sativa
cctttcttttgcgggatgatgagaagtactttgaaatacttctttatacacgatattttttatgaatgttgggtcttccacctcattatcagcatttattgttaatccttctcttgtagtgactcgagacactgtgacatataattggccatgagtgaatacatgcttaggaagatataatctgacatgtttgagcgattgtccttgacttttatttatagtcatggcaaagcatggtgccaacatgagttgtcttctattaagcttaaaatggccacttcgattccttcgaggacatgattattcttggaattgtacattttgaccaatgtttgttcttgagatgatatcacctctaattgaccatttaccaagacgagtgacagtcagtcttgtgtcattgcataaaccttttgtttgatttagatttctgaggagcattactggagcaccttcctttaggtttatgtaatgatttgagatgccattaaattttcaaactatgcaaaaactcagttggatacaaaagatcctcttcatttgtgtttatgcttgctttgcatatactgt

SEQ ID NO: 138985 - DNA, 1278 bp, Cannabis sativa
  modified_base (1030)..(1034): a, c, t, g, unknown or other
aaatgatggcagataatattagggtcgatccctatcatatctccatggctccaggaaaattgatcttgattcgccttcacaaagcttataagctgctatttgacctgctcgtccaggttcttcccaatgtatacacactttgcgggatttcctgggtcaagaatgacctcttccaattcctcaattagttttagcaggtttttctcatcttgaactcgggggtcaagatcttcatctttctgttcaatttcttctactaagatcgccatcaactgatgactggcttttctatgctgcaactctatgcgatagcaatcgcgagccagcatttggtcgccacgcaccactcccacgccatctggtatttggaatttcaaggataggtgcttgatcgaactgactgcccctaatccgatcaatgctggacgacccaacaatatgttgtaagccaatggtaggtcgacaactaagaggtctttcatatcagcagcagataaaggtgcctcacctaaggttaattcgagctcgattatgccaaggccagtgataccgtctccggtgaatctgcaaaggtttaccatacagggcctaaatttggttttttcgagccctattttctttagagtctccttataaaggataattatcgagctcccattgtctattaacactctcttgatccttctattggcgagttgaatggttatcaccaatggatcgacatgaggatacctcacgtttttctcatcctattccgtgagtacaatgggaggttcctcgatttttaccttcttggaaggttctgaggcaaagatcgattgctcgttctttatctctttcacatatcttttctgggcattattgctttcccttgcgatatgtggccctcccgaaataaccaggatgtcctctccttccacaagaataggttgtaacccctggttgtttgggttattaggcagagtgggtcggttgtaaccctggccatgtcttttcacgtactgtttaatggcctcgagcgatgagactnnnnntctcatctttcaattggcgacattcatcagtcgtttgcccaatatgttgggctttgtgccctaaataaaattctatttcaatgtaatcttctctattcaattatcaataaagaaataagtttattctcattacttatttagtatgtcatttggttcatttgatctatgtcatttggttcatgtgatcatttatatatttatttgatttataaattcatctgaatccttatcacattgatattct

SEQ ID NO: 138986 - DNA, 537 bp, Cannabis sativa
gagaagaaggtaaaggcggcgagaggataggagtagaaggaggatgaagatgagttgttagagtagaaacgagtagcgaggaagaatagggagagagaggttacaagaatggtgaagattttgacaaaagtaggagttttgataatgtcggttgctgtggaggtgatcagcttcatggtgttgagtgattggatggtgagaaaaaagatgtattttctcggaaaattatgggtttcatcagaaaggttctgatttctggtgagtttggattttgaaaaattctttatgaacaattaacataatgatcgcatctacatatattttgcttatattatagggttttgcaaattgcaaattaacataaaacaattaatttttatttacaattttacaatttaaaatttttatttttaaaaatatgtttataaagttttaaaattattaaattaaatcaaattcataacaattattaattaactataaataaattataaaataactaaaaataattaaaaaataatttcataacaactataa

SEQ ID NO: 138987 - DNA, 629 bp, Cannabis sativa
  modified_base (31)..(33): a, c, t, g, unknown or other
gtgggtaattaaatttttttgtaattaaaannnagcatgtaaaaacttctttatagcagaagataagtaatgagaactatggggaccccctgtattcaaaatattacaaattagtttattagtacattgctgggccgaaacactgcggctgacatgtacattgctgctacgaccccgaactcatcgctgcacaacctttgctttccccttacctgcaccataaagtacccatgagtcacaaagactcagcaagaaaagtgaaatagacaataactgaaaatgatcatcaattaatctcatgtcatcatgcttacacattacataatatcatagacacacaatcttggtactttataaagtatccctttaccactcattaatcacgagctatatatgtcactatcgttgcccgatgaagcaaatgataagtaagaaacctaaccgcggtttcaagagtaattactcgtaacggtattaaccatagtcttgataataatcaaggccataacctttcaaccattaatatttaaccacatatggtgggtaccacttttcttaccttagttctgaactcaagcgtacgggccaactcgagtggaaaacaagctaggcgatcccggtcctatgtc

SEQ ID NO: 138988 - DNA, 958 bp, Cannabis sativa
  modified_base (863)..(863): a, c, t, g, unknown or other
tattatgagctatataaagctctttccttttctgtaaaagatcaattgaataataacaaaatcaaaggcaaatattctctctgccttttccattctttctcatacattacctatacttgtacacattaattaattttttttcattaacttttaacttccacaattaaccatttgcatccacctgcatgctagttgtttttttcctcaaaattaggtctaggatctcttttgtgatgctagctattgttcttttaatatgcagaatttttttagaaaaaaaattatcgttttatagtattgatgttagaagaaaatatgctgtacatattaaaaatgtaattcttgaaaaaaaaaatatatatatttatattaaatgatttcttttagtctatttatacacacataatatatattaaatattagattaatacaattttttttaacaaagtgaatagaatcattcatgaatttacgagcgtccgtcaccggtgctggaacctcctcgaaccaggatagctcatcgtctaactgcagagcatgctttgccaaaccataggccgctaaatactcaaagcggccacgtgggacaaaactgtccccaaaaatttagacaataaagctataacatcttcaaataacgcttctaactcatttgacatacatcttcccattggtactagctgtcaccaaagctaacaaatctgaataaactgtaattccacctgaaacacatcagaaaaccaaaataaaactttaataagaaaattatcaagctaaacaaaatcaaccaaacaccaagtactacgcaactagaccccctatagaaatactagaactagccaaagggattaccctttggctantaacaactaaattatagcaatatatttcataaccttcttagcattctattacaatttccttttaatccccattatcccatgagtactcaagatat

SEQ ID NO: 138989 - DNA, 1117 bp, Cannabis sativa
  modified_base (795)..(800): a, c, t, g, unknown or other
tcttctgaaaaacttgattaacatatcttaatcaccgaaaaattgagctaaataaccttatttcaaaaccaattttgttaaataaccttcatataaaattattttaattttttaatttttttattaattaataaagtaaatgaccaaaatattcacctaaacaccctagcctcaattcctaagtgtttttttttttttttttttttcttgttctcttcatctctacttcatttcttcatctcaaccaactccaaaaataagctcaaccactattttttctttttttaacctcactatttctttttcagatttttttttccccataaatctatttctctcttcttttccttaaatctgcaaatgtacccccttaaaatccctaaaaataaaattttaatttgtaatcaatccaatctacatagataaaactaaagaaattcttttagtttaatcactatttcagtaaattttattatattatatttgtatatatatatacccacatagcataatatatgtacatatatatttttttttgataaacaatacatattcatgagcattattctctactttaattagtgtaaaataaatagaatataaattgaaattgcaggaagttttaatggttatatcaaatatgtaaacatcatggttacatttatttttaaccattagatcattgttgaatagttgtgataaatttagaaattaagagaaaagtaaattataaataacttgtaacttgatactttatttccttttaaaaacttaattaaaattaattatatttannnnnnaattactaataattattaattaatgttatgcaatttgttaatatgtaaagattttttagcaattatttttttaacttaaattattgaaataattgcaacagaactccttataatttaaagttattacacgcataactttaattaataaaaaatagtatgattgacctctaattagaggtaattttacgctcaatcttatttttttaacacttttaagtgccaaattagtgtgtcagttcgaaattggttcaagttatttaatttttcttcttttaaaaaatgaaaaactaagtaaaaaatctaataacaattataaa

SEQ ID NO: 138990 - DNA, 747 bp, Cannabis sativa
  modified_base (685)..(699): a, c, t, g, unknown or other
atttaggtccaatatgtgaagacccaacctaagcccactaattattgtattgttaaaacttgacactttttttttttcatatttattttcaaggcttatggtatttttgacaagatgtgctcaagctttgttgtatttgtgatagtttaattatttagtgatagtccaaaccgcaaaatccgcataaaccgcaccgcactgcaacattttttgcagttttttagtttcgcggtgtgggtgcgatttgaaaaattttaaacaccccatgtgcgagttggtttgaaaaaatagtcaaaaaccgcaccatccgcaccacgaacacccctactgatagtggtacccctttgtgaaatgtggcctggacccatctcgaatattttttgccactagtcacaatgaattcatactactaagacgtgaataagagatttgtttcgtgttgaaattaattaaaatggccccctaattcaataattgaaaatattcttctttttagggtaaattttaacaagcttttccttactcttacaatcgttagtgttctgttaaaatttcaccctacacatctccaaaaatcgtaaaatttcacggagacgacgccaagaccgttgtgcatcacatttctattggacatgttaagagcaaaagtagttttcatgtactaacaatcattttaatcgaaatnnnnnnnnnnnnnnntttctgatagtggtacccctttgcaaaatgtggcccggacccatctcg

SEQ ID NO: 138991 - DNA, 771 bp, Cannabis sativa
cattttaaacagtacgtgaaaagacaaggccagggatacaaccagcctagtctgccccataactcaaagaaccaggggttacaacctattcatgtggaaggagaggacatcctggttattttgggagggccgcatatcgcaggggaaagcaataacgcccagataagatatgtggaagagataaaaaatgagcagtcggtcttttccccagaaccttccaagaaggtgaaaaccgaggaacctcccattaaattcacaaaggaagatgagaaaaacgtgagatatcctcacttcgatccattggtaataaccattcaactcgctaataaaaggattaagagagtgttaatagacaatgggagctcggtaaatatcctttataaggagactctaaagaaaatggggctcaaaaatgccaaattaaggccttgcatggttaacctttgcagattcaccggagacagcatcgctagccttggcttaatcgagctcacattattaactttaggcaaggcacctttatctgctactgttatgcaagacttcttggttgtcgacctgccctcggcttacaacatatttttgggtcttccagcactgatcggactagggccagtcagttcgatcaaagcacctatcttcaaaatttccaagcaccagatggtgtgggagtggtgtgtggcggccagatgctggctcacgattgctattgcatagagctgcagcatagaaaagtcagtcatcagttgatgacgatcttggcagaagaaa

SEQ ID NO: 138992 - DNA, 874 bp, Cannabis sativa
  modified_base (587)..(593): a, c, t, g, unknown or other
aaataaatcacaaagtacttaccgcagccaaggcatggctgatgtcctgaacctggtagacagagttcaaggatgcacaagcagcgtaccgtttaggcgcgctctgagtcatctaggagacgtactaagtggtcatctcggaggcaaaaagggccaaggtgggcccgaggaaacagttgaaccagtccgtcagggggtccatgttcagatcccacggatttcggtagttctcctcgttaagagagttttgcaactcctctcgcaaaaccctcctcaaggcctccacctcagcgtgcccccgggtgtactcgtcaagggcataattatatttggctatccgaagctcctgcctctcctcatctctggggactgaagtcagcacaatgccatgaggcactgtatactcctccgcctcgggagggatcccggagtcatgactcggggccgaggtgtccaccctccgcgggcgtttagaagactcctcagctaccatcttgcctttacgcttgcgcacaagagcaacctcttgctcttcttcacattcttcaacttcctcaggaagaaccccttgctcttcttcaccttcnnnnnnntcctcaagaagtacctcctcctcgcccactaagtggatagtgttcggaggggtgctgaaagaagctttcccaggggtgaccatctgggaagaagtagggggaggggaaacatcaagactgtgggctccagcaagggtggccaatatcgcatccatgggatcagctgctgcaacaagagaaaagagtcaaatgttagaatgtctgtgaaagcagtgaaagaagagttttggggatcaccccacaaaaacactatatataccccctcaaagctcattaatggg

SEQ ID NO: 138993 - DNA, 1754 bp, Cannabis sativa
  modified_base (198)..(204): a, c, t, g, unknown or other
  modified_base (1343)..(1344): a, c, t, g, unknown or other
ttatacgtatcaaatcccataatttcaggggagaatttttgtaaagattacagttaactctgtaattagctgcctactatgtgtttataaataggggcaagttggactgaaaaaggggacgaaaaaatcataagaaaaaaggcccttagaaactatcaaaaatctaataagattgactcgtgaactatgcagaatttnnnnnnnaaaaccacgtaaaaacctttgtgttcatattatttcctttactgttttattttttctgtgcaagtttatcattcaggctcaaatttagttagcgaaaatctacgttaatactattaatgtatgattattgaataatcatatttcaattccaaagtttgatgaaagtctgaactttcccattaatttctttctcattaggatttgaaattccaaatgtcaaaacaatcactgttatcccaaatgttatccacctaacatggcatgtccacgtaagtaaagactgaggacacgtggaatacaaccttgtcaatagcaggacaaagtctttttgcaagacatggtaaaactgtcaagtaacaagaaaaaggagttaagcaagccgtcaagaagctggacaactatgtttggccagccaagggaagtacataggtcggccaggggaagcttgcttggtcgaccagggtttgagcacaagctggccggccaaagggtgactgtcagacacaaaacggcctatttgaccaaggaagcctgaccctttcaaggaaagttgtacaacggctagcccactgttgccaaagttggcaagcacttgttgtgcaacctacatgctagcagacactttttctgcagcatacatcctagctggcacttattgtgcaacctacattcttgcaagcacttgttgtgcagccaacatcatggcaggcactgttgtgcagcctacatcttgggaggcacttgttgtacagcatacatcctggaaggactacaagtcacgaattgagcttcaacaacccacgaaaataggggataaagatccgttatttacctatttttgggggttaattcacatataatttagttattattttattatgtaataaataggtaatatgtcctttttaagggatattaacgtactatctcttgtaagctcgcctatataaagagcactaagttaaacctaatttctctaagtttagaaaaccccaagatgagaatgttgaaagtcttgaagatctaagtctaaaactgtaatatcccagaaaataaataatatctaagtagacatattttattaaatatgtaattactttggaaacgaagtaacattatgatcttacttaggtaaactnntgagaaattatttaatgaaatacattattttcgggcccggcaattgtgagaatttagcgatgtggttagtaatgtcacgatgttaatgaaagaattatttttagattatctcggattaagttagaattttattagaatgtcgggttggtgaattagtgaaattaccgaaatgcccctagggctttttttttaaaaaaaattattattatggaggaggggtagattagtaaattcaaggtgcttttgacttttctttttagctgcctattattaaaaaaaaaagaaaaaccattatttaagaaagtttccttccaaggtaagaaaacaaaattttcaaaaacatcaagctcttcttttctccttctgccgaaccctagaagcagctgggaaccaagtgaatttcatcttat

SEQ ID NO: 138994 - DNA, 510 bp, Cannabis sativa
cttaagaagttgaaaaattcaaaattagggaactatacactaaacaagatatgtgatgaaaaatcaataataataaacaaaaactgacattaaaactgctgaggcagttatcagggacagttccagattataaaactataattggaactggggggagtagtgtttgggggggaaaaactggacttagaaataaaatggcgcaacaaaataaaggactgctaaaaggcccacattaaaagggcccattaaaataaatatacccaagcccaagaatacaaaaatataagcccgacccgatgtaaccaaaccaccaattgtcaatccataaggggacactacggacaaaaaggagaaaaatgccaaaaaccagggagcaagtaaagggaatcccgacggaagcagaagaaggaacagaaaggaaagagacgccgacggaccaaggattgactaaggaaaaatagtatagcaggaccagaagaggcacctggatacccttccgacggaagaaat

SEQ ID NO: 138995 - DNA, 752 bp, Cannabis sativa
  modified_base (92)..(102): a, c, t, g, unknown or other
  modified_base (222)..(232): a, c, t, g, unknown or other
caatgtaaggttttcttaaaccattatgtgtttattttattgttttagagatattcatatttaggacgttaattcaacatacttgttagtannnnnnnnnnntggtaaaatattcccaacagttgcatgtgtattttatttattattttattcaaacttgttttataaaacttattattgtttgatctaaattactctgattaacttgttgatagatccaannnnnnnnnnntaatcatagtccaattgtcaataggtcaaataaataatttataacaggtaaattttataatcttctttcatctgtgtataaacttggtgacatgataagatctatccaaatcagtctgtgcatgtgcctatatattttctttgggcctagatgcatatagggagcacatttaattttaataattaaaatggactaggttgctaaaataaaaatatcactttgatagtttttatttaggtccaactagtattggacttattctatgaataataattatttaattaaagttaaattcctcttctttgggccttgtgtgagagttaggggtcattagtagtgggtacgacatactgaactcaaccctccctcgcatgaataatccaattgtgaaggcccatttgctttatttaaatagttgtaataggttaattgtactagtttaacctagtaaaattgattagcaacataattaatttttaaaatatatgaaattaatttaagaaaaatacactagtttaat

SEQ ID NO: 138996 - DNA, 980 bp, Cannabis sativa
  modified_base (556)..(559): a, c, t, g, unknown or other
actatctcatatagcacccccgtcaatttccatatgcatgcagtgtccactcaaccatccaactgattcacacttgcatcacgcccttttggctccctcgatgtactaagttccaatgatgcggccttctggccatcatgcaaactctaacacccttcttgaactttgcaggctcacatgactactaagtctcactagcacgaccctctggcctccacataaactctagtgccatctcagcacttgcgctcggtcttctcagccctgctggcttctttaattcattcattccacaactctgcacctctatcgatgcctttgtgtgacttacgctcaccgacacttttacaagcccacacatcccactcaactgccttggcgcttctatatggattaaataaaactcgcatgtgaacacttccaagtacaaccatcctctgaagattgcggcctctgcccccttggtctccatgtgcatccctcttgagacacaacgtagcaactaaagcattccatgtctgtcccaatttgaaccatctcggttatcaactctcgnnnnctgtcgtgactaacaagaatttgatggtccctgcactacatccacactcctgccactaagctttcttttcaacaaaagcgcctcttgcggcttacgatgtcactcaggataacttagcctagtataccaagcatacagtatggagtatcccctcaatcttgtactatgccaacgagtttcaaacattctgttgcgcctctccacaattgcacatggtagttgtctttctagcatctttcctcacgcctacatcctctctaggataggccaaccaggttcacctcccactgagatgaacttggctctgataccaactttcataggctcacctttttaggcagcggaacaatcgtgcggcaccttgacttctctaagccaaggtcagccttccaaccatccaagtaacaatgggttcattttt

SEQ ID NO: 138997 - DNA, 705 bp, Cannabis sativa
agtgatcttgttcgggtcatctactctggttccatgtgcatccagaatagatagtattctttaattgattctagcattgaggcttgcatgaaatattgcagtgttataatccccatcttgtatccaactagttttcgccttttggtgaagaaatagttggtagttcttatgtgcctgtgtaaagtttttcctggctcccagttcttcctgttgcaatatctggtgtgagggatccaggagtagcttgtcttggcaaatatccagggtctttgctgcttgaatggctgttgattgtaagtcagtgaagccctcttgattaatcttcttaaaaaccggtttcaaggctttaagtttggcaacaatttggtacatttttgtaccaaaaaactgttgatgccatgtttgttgtagtcaggttgtgtattctgggtgtgaaatccacatcttaaagtaacgaaaaggcttttttcccattgcgagctagcttgtgaaagatcactagtgttggagaatgataaaaagctccttcatttcagaatatagcttcagcacctggccatgtttccatccattttgcattagccattaccctgtccaatttggaataaatttgatctcccccttgttgattgtttcaccaagtaaaaaatttgtcactgcacttgatgtcttccaactggcagcatgaaatgcagtccttaaatg

SEQ ID NO: 138998 - DNA, 730 bp, Cannabis sativa
tttaaatacaaaatagtttaacagataaatataatttgtgtaatattaatatatacaattttattaaaaaatatataaatcagtttaattcgatttattcgggttaggtagtttgtaaattttgttgaagacccctatcatacacccatataagtctattcgtataaaagaatgttggatcacattaaactcatttcgaaaaagctttcatttatttctctctttttatacattattttattagagattcctttagtttattaatttaataaaaatttaaataaattgtagtgatttaaatagatatttaatttaattaatttaaataagttatttaataaaatattttttttgactgatacctaataagaaggtgcatgcttgtctataaaatacctaatacaatttaataagtacgatctaattcaatcaaatccacaaaatgtaaatattcgtgcttgtgcgaattggattgaattgaaaattttaaaattcacacttatgcagattgaatgttaattaatatgtaaaagtaaccgatccaatcaaatttacacatatttatatatgttttttcgaaattatatatgcaattaatattttaaggcaaaaaaaaaaaatagtaatttaagaatctaatacatatgatatatattttaaaacttaattgattaaatttatattctattatatataagaaaaatataatttaaaacaaaattaatcattt

SEQ ID NO: 138999 - DNA, 1086 bp, Cannabis sativa
  modified_base (62)..(75): a, c, t, g, unknown or other
  modified_base (357)..(378): a, c, t, g, unknown or other
  modified_base (570)..(602): a, c, t, g, unknown or other
  modified_base (783)..(786): a, c, t, g, unknown or other
tcatcttttttctgaagccatcaccacctatttatagcaaaccacctagggttaggttagannnnnnnnnnnnnnaaataatgaaaaattaaatgataaataagctacatgagtggccggccatgtaaaggataatggaccccacttttacaaatttgtcattttatcatttctatatctcattttctcaaaaatgccaatttttcaatttaaccacttaaatgccaattccagttatttaaatacttaaaattaagtataaaaaaatattgtcatttaatatatttattaattagactaatcaatgtctcttaattaacaaataaaccctcgaaactctttcttcacaatttagcnnnnnnnnnnnnnnnnnnnnnnaactagacatagtctaatttaagaattataatttattaatcaaaatcaattaattgagtcttataagcagtgttatctcaactagtatggagaccatgggcctatacattcgagcttccaataagcagaccaagaacttaccaggtaaattcactgacttattaattacttgttgcatccactcatagaacnnnnnnnnnnnnnnnnnnnnnnnnnnnnnnnnntatatgttccacgatatatatatgctatcaattatccattgttataatccctgttgacttcagttttagccaacgacaatgagtcttttttataagcgataaacaatatgtcgtaataagaatatgtagtaaagcaataataagacacagaaattgtatagaggttcagccccgagcagtnnnntaatagcctaatcctcgttagttttattgacttaagaataaggaagaagtttccttttgttatagctcttacaataacatctctgaatatataattcttagataggcttagcttatagcgtttcggcttacaattttttgatccttttcccagtgaacattcctcactatttatagggttggaaacttgaagaggaaaaatttcctctctcgttacaatgcgcataaacagaaagatcgtgtgatcaatgctgaatgcaagaatcatgggattgaggctgaatatactgatagtgggatc

SEQ ID NO: 139000 - DNA, 768 bp, Cannabis sativa
tttttttttttttttttgttaaggctttgtttgttgtacttaataaacacttccattaataaagaaatatttcacatcagtgaaatggtttctgtatctattacaatttacaagcagtactacttttacttatttatcatataataacaaatcaatgaatataacagatttcaaatatatgattccattgcacttctttttaataacgagatttctatgtaaacacatacaacagtacctactaataacgtctttattaattaatcacgtttagcatctttctttcttctaataaaatatattattaataagattaataaatgtgtctcaattaataatacaacgttagggaaaacaatgtatatgcaaatgaatagtgaactataattaagtggagtacctttatcctggtcaaatttctttaatgtgacacgtggaaatggaaccattatatatatcacatcagtattttttagtacatctagacatgtcatcttgctgttaactagtgatactttttaaaaattattacattaaactatgtgagactcgatatttaattagaccacgtagaatgatatttctttgatacctatctatatgtaaatatcgttattgatccaactaagcactctcttatgtgtcaatatcactattattcgattaaatatcgagtcttatatatatataggtggcgtttggtaacacttttttaattaattttttatttttaaaattagaaaagtaaaaatattttttaaaaacatg

SEQ ID NO: 139001 - DNA, 600 bp, Cannabis sativa
  modified_base (48)..(59): a, c, t, g, unknown or other
  modified_base (495)..(504): a, c, t, g, unknown or other
attaaataaaactaacactacgtgacttggcacgtaacaatcacctannnnnnnnnnnnatatatatatttatatatttgatggatgaatctaaattaatctaataaatatacttgtctaataaatagaactaattcaacctataattagatcggttccgttgaaaaaatctaatattcattatataatcaatctaaataaacctaaaagtattagatgtaaactagtaattacaaatctaattattagctatatatattatctaattattaaaaaaatactaaaaatatatttttttattaaataaaataaaagtatttttaaaagattaaaataaaaatgaaaagataagttacattataattggattgaatctcaataaactatgtgaaccaataaacaagcctaattatgttaaaatgtagtttttatggattcattataataatatttttttcagtatttcattcaaaatatcactacaaaaaattttannnnnnnnnncaacaaaatttgtgactaaaaatgaaaaaattatgactaattataaatcatgattcctatgttgtgactaaaaggtccgtgaataaaagtattagt

SEQ ID NO: 139002 - DNA, 539 bp, Cannabis sativa
tactgatgactcatgttgcgagaaatttaatttgctaactgttggtcgccatgcgcggattgataaaaacaaacgtattgtgggcattgtatactgttcgaatatttttgaaacagggatgacattgtaaccataacgaacaccccgtgaaaaattgtaatttttaaaaaaatatttcgacatgtaattttcggcgtgaagattgagagagagatagtatcaggatgttcactatagcagtcccacagaaatgatgatatggaccaagtgtatttcagtgtaatatgggacgtacactgttcaatcgttgtactttgtcaattcacacagcactaaaatattattttaaaataaatgactgcttgtgacatgacatgatacacttcccaacgaaacaatcagccatgccctattatgttgtacgaattaggctttgaaattgggatttttttttgctccaagattgatcaagttaaaggtgaaagtgaaaaagtttaaaaaaaaaaaatcattttcccaccactaactcatttcgaaca

SEQ ID NO: 139003 - DNA, 905 bp, Cannabis sativa
  modified_base (248)..(254): a, c, t, g, unknown or other
  modified_base (433)..(439): a, c, t, g, unknown or other
gagagtcgatctctatgttttcgcaggaggatcgagaggatactcgcacatttcctggtacatgcgagttaaatccattccttggtcctacataatgcgagatttagactttggtcatattcgcatcatctcgctgattctagctcaagcgaggtttaaactcgaggagtctctcattgacatctcagcttttattgagaaaattgagtacacgtgtcctccaaacaggagtctggtctcgagtttcnnnnnnngagaaatctcactataacacatttcgaagtcaattgataagtgtatgccgttcttcaacatattgcgaggcaacaaaaagttcgagtggacaaaagagtgtgaggaggccttttagaacataaaaaggcatctagcaacgcctccagttttggcgaaactaataactggagagacgttnnnnnnntatttagccatctcggaagatgcgattagtgcagctatagtacgagaagagggcaagcaccaacaacctatttactatgtaagtaaaaggttaggcagaatctagatatccccctctagagaaactcgtgttgtgcctagtccatgcgtctcgtaaactacgaccatacttctaggttcaccccataaaggtgttaaccgatcaaccctcgagacaagttttatcaaaaccatgcttctgaaagattgataaaatggtaaattgaactagggtagttcgacataacatacaatcctcgaacttctgtcaagggccaagctttagctgacttcttgatagaagaaattccacctaatcggaaagacgtggaatcctggaagttatacgtggatggtgcatccaacaaataaggttcgggtgcagggataatattaatatcgccagaaggctttaagttccactatgc

SEQ ID NO: 139004 - DNA, 1319 bp, Cannabis sativa
tatatatttaatgggtattactcatgaatgggttattagaaaaatttaagtttttatgcttaatttttctgtctaatttgaaaaatctctaatttttacattctatgggctactgttgttccatcggttaaataaaaaaagattttttttttggcaaacaaatcgaaaaagttgagtttgagtttaatatttttcagataaaacatatttttgatatagtataaaaatagacatttttttttattttttttaattaatctttctcttttttattattagatcaaaatttaatggtttaatattttaaaaatttatatttatagttaaatttgtttaataaccattaatggataatacccattcaaaagtgttccatataaatataatagataacatattcgctcttcgtatggtatgatgttttaaatattgatttttgtgagatattttattttttaaattatatattgttataatttatattttcttttttgaactattattaatgaataaaacattttaaatttttttcatgataaaataaaaatctaaacttgaaattttaaagtatttataatacttagaatatttaaaattaggtacaaattattagatatttttagttgatatttattatgaaatttaaattataaattataactattttgaataatctgttaaatcttgttaatttaaataattttttatttttttatgtaaatttatatataaaaaaaagtcattaaaaaaatcaaaacacattatttatttagttgattgattcaataaacataaataaatatctaatttctatgtttgtgtaaaaaattaaaattaaaaatctttattactaacagaaatagaaaaactataattcttgaatgtgtttattaaaaatgttaaacactgtaaatcacaaatttttatcttaatgtgataagttacaatatatttgaggcaaaaactacattttagttatgtaaattgaaaaaaaataaaataaaagaatttaagctgttgttatcaccgtatctcacttgtaattgctactatattaaaggtcgttttaatcatcatatctcacttgtagcgctactacattcaaattcattattatcatcatatctcacttatagtccttcaaatttgttgtcactttatctcacttttaataaacactattcaaaattgttgtcattaccggtatcgaagatattggctaagcatcatcaaaattaatataagaaaaaaaataataaaataagggtaaataccattttggaccctgtgttttccaaaagttaccgattggaccttgt

SEQ ID NO: 139005 - DNA, 579 bp, Cannabis sativa
  modified_base (43)..(48): a, c, t, g, unknown or other
ctcccactaaattgaactactatgtccttaatctgtatgtcannnnnngatccattggtcgactttaacaaacaaattgaaaaacataaatgacagaactaaactagaacctaaccatctcaggattgagatcattttatctaagatcaactaggtgatattgaattagatagatattatggtaagtttattatatcttaaccaggttcaatatcagtcccttctgatgtatactccatacatccaacccaagcttactttaatcaatgccctggaaaggacataacacttattcaaggtgcaagtaatatacattgtagattatcctatcggttaaaccttgtgtattgataaatcataccaatactaatcacacagtcttgattactttccactgtgttgacatcacaataaataagaatatcaatgtgataaggatttggatgaacatataaatcaaactagtgatcacatgaaccaaataacacattaaacaactaataaaataaatctatttctttattgataaatgaatattcaagataacattgaaataagattttatttagggcataaaac

SEQ ID NO: 139006 - DNA, 1374 bp, Cannabis sativa
  modified_base (90)..(100): a, c, t, g, unknown or other
  modified_base (397)..(404): a, c, t, g, unknown or other
  modified_base (435)..(435): a, c, t, g, unknown or other
accattgatattgacttagaaagatacaacagtaagattataatacctttaccaatatcaatattgatcccagttcaatgtatactccannnnnnnnnnnctagcatactttgtcaatgtcttggaaagaacataacacttatccaatgtgtaagtaagctttatcgcttactataacattagtgtaaacccaatgcactgatgaatcatgggacattatcttttgaagcatataatcagaattaccttccattatgttgacatcagtgtaattgtgaataactatatgttatggacttaatagaaattgtatactttaaaccataaacatgaaaaactacatgtaaacataaatgacttctaatcttcaatcagattatattgaaatgggttttannnnnnnnataaatcccaacaaactcccactgcactaanataaaacaagtagtgcatttcaataaatctattgtcgtgatatccaaatcaagtgtggtgtacttgactaaacccaaattacatgaactgtacgtctgtggtaagcaaatactttctccaccattacttcctttgtgttcataaaacattatgcaacatcatattctatatgtattactcatttaaggatactaaattctttactgcttaataagggatctgaataaacaaaagatgtatctctaattctatccaaatgaaatagagggaacacagttaagacctttcttcagtttgaataacttttctagtacttttcgaaaacaacaaagttatttagcttcaccgatggagcttaaattattatagatcggttttttttacatccttctagaataattcctccacccctagagtaaccaccatctccaatattttgaggtggtgtagataagaggattttaatatacaccctatcatctaacatataggtcacattcagagattcttctttgattatctcctaatgttccttgtttgattacatcttagatgcctcgcactcaacagtaggagtctggttaagttcgtacacaagtgtacacttaggctcttgtcattggttcttaaggacctcttattgtgacataatgtcttagtctgaaactataagttccttctagactaagtcataaacatagcattctagtataaacaacaatgtaaaatactttcttaagattaagtaatcattagagttacgagaaaatatttcatgaggactagggattttgcctaagtcattcgaatagactttgcaaaattctcctatcttatcctcaaattctaataagttaattctatccatatgagtggtcagatttactttctttgttttattctaaagttcctatcatgatcataacatagtaatctatc

SEQ ID NO: 139007 - DNA, 601 bp, Cannabis sativa
agaatcatcacacttgaccttccttaggcaatgtaggattgcacaacttactcgatatttcccctcacggatcacgggactaccgactgtcacaatcacgaggagtctgcccagatttatcggtgaatgttgtgtgtttggcatgatcacggggagtctgtccggatttatcggtgaaccttcctttttttcctgtttccttgcttgtggttgttgcttgaacgcttgccacttgaatttttggaatagttggaaagttgggcggatgttccagttgaaggagccttcgttttgcctagcttttgctcaccttctgctcgttgaatggcttattcgagcttgatgaagccttcggctcggtcaaggaaatcactcattaagtctaccagcccgttcttccttatatccttccatagttcaccaaggacatcaatgctcctattatcgcacataactttccatcctcggttacccgcgaaactttggtcgcttctgtgactccgtcatgaatctgctaatgtatgcccggagtggctcgcctggtcgttgctttacttcgaccaaatctcccaaaagaaatgggagctgacgcgaggaagag

SEQ ID NO: 139008 - DNA, 1032 bp, Cannabis sativa
ttttatgagtgctaattggaatctgatattacaattttttaatcaatctttactttcgaaatcatgaaatattattttttaatttttttatgatgatattcgttatagttataatatcattctcgaaatttttaaatttttttaaataacttacaataccaaatataaaattcatgacattatagtctatcacacgtgttaaaaaaacttcaaaattatttcggcattgtaagttattaattttttttttaaaattataattaacaccaacatgaaaaaaaattaaaaaaatactccaacatataattttaggtacaaaaattgattaagagattataatatgaggctaacagtaacacttctctttttttttatatattcttagaaattatacataaagcattgataaatcttatcatatagagttatttatgatacttccaaacattttattcgcttcacactgagattcactttaccatgtgcaagtgaatcaattacctctcgaactaaaaagatgcaacaaagtcatctataggtcaagaggttcatcgctaagttatggcccctacattgctagtcagatagagcactagtgtagtggggatcaacttagcttctttgataaaaaaaatacaaatttgcgaatgctatttcttttcatgctatctagctacaatgatgatgtaattgaatttaatatctaatgaacaaaatcattgagtaaaccttgttggtacatcattgttattaattaattgcaactcacaggcctgacgacactctcaaccgctaaacaaagcttgtaaagttgttcttgaggtaccttcagttatttctttagtgagtaataaacactgccaacccatgaatctctggatgagtggacaagtgctcacacatgtaacaactccctaagatccatgatcaagaaagcccaataggatttggcatggcaaattaccaatgaaggcatctctacaatcactctgggggcaaataagacatagtatgttggaaattattttacca

SEQ ID NO: 139009 - DNA, 702 bp, Cannabis sativa
catgagtcgagcttatctctgacgatgattgtacatatcttgacagtcttcggtaaacaacctgtgactttgataccaaattgtaacgtcccacttgattaggactgctatagtgattttccagttactgtatatgcctttgctaatcaaagggtttcttgaaatttgcgttaaattaaaactttaaattaaactttaaacttttatacatatttaaccataaataaaaaacgggatcccatcttaaaattttacaacattattgaaaatgcacttttacaaaagtgtcacaatgcgactacaaaatgaaggctcaagtcgtctcgagaccaaacactccaaatctaatcatcccctagctctggaatcactggtgctcagccttcacgtttcttttacctacacatgtaaacaatatatgtgaggacagacttagtaagaaaagcacaaaacatataatatattactgacttgtatttaggtgcccgtacacctattcacacggctttagatgcattaagaacgttcttaacagaagtacgacctctgtaccacatgcactaagtactcgtcctgtattagtgttggcagagctgaatcacactttaagtgccactgagtgttgtaccacatgcactctgactcgtcttgtgctagtgttggtaacactgtaacatacccttttaacatcatatactgtac

SEQ ID NO: 139010 - DNA, 1067 bp, Cannabis sativa
tcttcttattttagataattctctcgagtcatcttttcttttggtgtttgaaccacttgggttatctaccttggttgagacggtacttgctgtggcagtacttatgcagggtttatttcctgagctagtcttcaacaacttcatctcgttccttgcttcctctttgtgcataaacacttgcgatctttcgttgaattcattaatgttccttactgggcgaccttgcaagtcatcccacaacttgttcccagccgttgaaagatcggttgtgatccctgcttgaagagcagtaagctaaatactgtcattcaagtttctaacctttgcagcgctggtgtgaagcgactcaggtaagccttaagcgactcgcttggttgttgttttatgttggttagagatgatgcttcaggtcgcctgtctcttgcggcttgaaattgtttcttaaagtcttttgatatttgttcccaagatgttattgaatggtgagtaaacttgtcgaaccatctatttgctaccccaattaaagaagtcgggaataagatgtaacacaaattattcaagacattgttggctcgcattatagtattgaaattattcaagtgagcgattggatccatagtcccatcatactgcgagacgtgtgtttttttaaatccctgagggaattcagaattcaaaatttcaggataaatggctcggtctcctcatccgagtcataaccaggtaatttcccatgttccccatcctgatacttcctgaacttatcctctagctcagtgatttgcaactggatgggatccacttgttgttgatttgcattaagttgatgcgtaagttaagtgcattttgatttaatcgctcacgaagattgggttatcttcgtttcaaatgttcacgaagatcaagttgtcttcgctcatgattactcatagatctcgtttctgagtaattctcagattgagagcttcgcgtatttctcatgctttcttgatcagcataacgtcaaggtctactcccttctcgcatttacctacctgatcaactgtgtcctcgagacattgagtgtc

SEQ ID NO: 139011 - DNA, 530 bp, Cannabis sativa
taaagtttaggaaaccttactgttgaccgagattttcggcaaccaatataataataatatttaaaaaagctgtagggagttaatgcatgaggtttttacgtggttgggatattaatgagccttaatccacgagtctgtgtatttatgagagtatttattacagagaatgttcttggtggcttttctctctagttcttatggaacccggattctcgacccctgccttaatgagtttgggggttatttatagtatttttgtggggtgatccacaaaattgaggtacatgtctttctgtaatattcagtaaaggcacacattcccaacgaatacatcaaaggaaatgtatggtctaatccctaggctttttaggggtataatggatgtaatccattatcctttcttgactgatgtgatttctcctaaagtagccgtcactaggcttattaatcatagcgtagtagctgcaaaagggggattacgccgtcagactttaatacttatggcagtttcaatacgcctcctcccatgc

SEQ ID NO: 139012 - DNA, 894 bp, Cannabis sativa
ttttactaaaataccatttattaacaaaatatataattatgtaataatttaccaaaatcggaagctagcatatttcttaatcatttatactgattataaagcatatttaatcttctagaacacaaacaatttattatccatatttatgtactaatttacacttcaaactttatatataaaatactaattaattaagtaaataaaataacaaaacatctcaatctagtcttaaatttatttcatagactagaattatattgtaacatcatattgacagttcccaaacagtgaacacaatttttaatatttactctatttaaaaatcaattaaatagttgattagtcacaaataattataataaatacttacagcaaccaagttattataaaaacctttttatttcgtaccatagatcgtaaatagcattacaaaaatacattttactgttttagcatcacttaactatttttcataattatttaaagtattaactaaataaattcatgaaaaataaaaaaaaaatgattgaaaccaaatcgaaccattctaactcagtttatagtctgtactaagccctaaataattaactttcaataatctgaacagtctaggtatttttcataattaaattaagaaacaacacaaataattcataaaaaatacaaaattaactaaattaaactctatcaattttgtaacagtttataatccataaccaatcatagaaaaataaacttagatttttctaagcaacctaagtatttttcctaattaatttaataaataaaccaaataattcataataaatcaaataattgcaagaaaattatgaaactttaacagaaaccctaaaataatatgtagaatcaaaatatacaaaaaatggaaaaaaa

SEQ ID NO: 139013 - DNA, 993 bp, Cannabis sativa
  modified_base (67)..(69): a, c, t, g, unknown or other
  modified_base (732)..(733): a, c, t, g, unknown or other
tcaatgtacaaacgaattgataatgaattcaatctctgtgtaatcaaaggacacttgctttgtatannnaggagtgatccaacatgaaatggacaagacagtaaagcgttacaacagtagactaagcagatctttatctgaccaaaccactatattcctttttgttctttatatttccagtatatttctagtacatttgtattcatagctcaaatactcgcgactctaggttgagtactcgcatattctctgctgatatctttattatattatttattttggtgttgtctaaattcctccaacaacagaatgctctttccaccattttggtggaatgactatactattttaaaaaggaaggaaagaccattccaatgtaacaagagaaaaaattaataatatttttatcaatttttttacgcattataaattttaattcattccattcctatttctattcctattaccattcgtattcctatattttaattcctccaaccaaatgccaccttaattatttagtttttttatttaaatatttaaaaaaataaaaaatgaaataggttgaatgtatttttaaaaaagaaatggctaaactcctccatctttttttttataaggagtcatttacttaaaaaatcaaaccagagtcaaaaaataaagtaagctcccccagtaaatgaagcaacgtcaaactcgaataaaaaaactcatacttagttcttttagttnnaaaaaataatttaatatcgtttaaaaataattaattatttaaaattttattatgcaaaaagagaattctaatttgtgtcaaaagaatctaatttttgtaaaaaaaaaataaaattttattgtaaatattataatcaaatggcttaattgttctctaaaaaaaatagttatagcagggatttatataaaaaattatttataattattaattgctaaaagaggtcttgttaaatattcaattaatcattttaagaaaataat

SEQ ID NO: 139014 - DNA, 660 bp, Cannabis sativa
ggaaccggaattccggttctgaactgggaaccaaaaatccgacccccacaactcaaatcaatcccaaatcttttcaaaacttccagattacctgtaaacattacactaaaccaattccaatcaacagaatccataaaatcacataaaattccaaaccaccattagagctccaacctaagctcttgaacttgaatttccaaccaaacactaaattagctagcaaactcagcttaaaacaacaaaacttacaattacctaacttcaaattaagagcccaaaccaaactcaaacacacagcccctaattcaagcctaaaaccatacaatctacttcaaacactaagaaaactcaaatagaaaagctaggaggaaattaccttgattcaaaggagtagaaaccttgccaaaattcactagttacaacaaagaacacccacctcctagctgggtttaggaaaaatcgaaagaaagagagggagaggtgaagaagtcttcactttctaggtttttctcataaacaatctattattattttttttattaactatgctttatcaaaggggaaaaataccagcccccaacccactaaaagacaaagcaccaaaagagtaaaagacctatttaacctttgaccaatccaaaacaaataaaaactttcaag

SEQ ID NO: 139015 - DNA, 720 bp, Cannabis sativa
aatatattttataactatttttttgttaattttaataatagaaaacaaaaatatgttttataacttttatttttattttctaattttatttaagtcgggtacaagccgcggatctggagcggggccatggtttgagttcagggctggggttaaggtcggagttcggattctaaggtttagagaaagatcagagtctaaaatattaattaagaaaaaaaattatttaaaaaaattttgaaagtggtttttttttaaaaaaaattttgattcttaattaaaagttgaaaagtaaaaacagttctttttcaaaaaaaaaaaaaaaaataaaaacagttttatagaacatatttttcaaaaatatttgtacttttctaattaaaaaataaaaaattaattaaaaaatattacaaacacaatatatctacaatttgaaactatttaagcttctagcattattttctttttctttttgaagcaactttattttctttttgaaagaggagaaaccacaacataaaaatttaaggttcttttagaagaatacttaaataccaaaccatataaaataaaataaaaaatcataaatgagtgtgtttgccttaagaatcacgtgtggatttcttgaggtatctatattctatcctagtacgactcactaatttcgtgataaattttattatggaaattaattcttggagttaaaataataataataataat

SEQ ID NO: 139016 - DNA, 582 bp, Cannabis sativa
aaacttcgaggagtctcttgtaaacgactcagcttttattagaaaactgagtacacgtgtcctctaaacaagagtatggtctcgagtttctaggtgagagaaatctcactataacaacacttgttaaagcaagtttttcattttcatcctcactacttttagaatcatcattccaagtaacattaaaaccctttttatttttctttaaggtattcgcacattcagattgaatatgaccatacctttgacattacctgcattaaataccttttttattttagagacagaaggtttagaaggattgttacctaaattgttacctcttggagtttttggaaaattctttttatttccaatagatttcatgtatttttgaaaattctttgtcaacaaggccatttcatcatcattttcataattagaaacattattttttgaaactttaaaagtaataccttagcttttctcactcaagacgctttgcttactctttttcttgatttgttgatttaactcaaaagttcttaaagaacccatgagttcttcaaccttcattttgccaaagtcttttgcttcttccat

SEQ ID NO: 139017 - DNA, 658 bp, Cannabis sativa
tgaagaacatgaatatgggaggaagtgtaccaccagccgctgccattcaaagggcagaaatttcttgtgtgtattgtggtgatgggcatacgtttgaaaattgtccttcaaatctagcttcagtttgcaatgtgggtaaccaaaatttcaactgcaataacaatccatactcaaactcctacaatccaacatagaagcatcatccgaatttttcatggggaggtcaaggagcaagttcaagtggagcacaagcacaaggaaaacaaccatttctactgggattttctcaacaaccaagacctcaacaaccacaccaacctcaaagctctcaaacaagttcattcgagtgtttaatgagagactatatggccaagaatgacgctataattcaaagtcgaacagccttttttcagaatcttgaaattcaattggggcaattggctaatgatttgaagaatagaccacaaggcacttttcctagtgacaccaaaaacccaagaagagatggcaaagagtaatgcaaagcgataaccttgagaagtggaaaaaatttagagtcaaaagtagtggcaacaaagggcagcgaggagccctcttcaatccaaaaagagggggaaacgaaaaaaaaaaaaaacaacaattttagctgctgaaattc

SEQ ID NO: 139018 - DNA, 634 bp, Cannabis sativa
aaaaaggaaaaaacaaacaactagtcaaagtccagatctatctctgccctccttttctctagaaatgtcaaccagtgaggaaattaattctcagaccaccacagaaactacaactcagtccataaactatgacagcaactctcttcatatcacagcccataaacttgatggaaaaaattatctgcaatgggcacaatcagtcaaacttgtcatttgtggacgtgggaaacttgggtacatcactggtgatctccctgcaccatctccaacagacaccacacacaaggtatggcaagctgaaaattctattgttcttgcatggctaattaattcgatggaaccaaaaattagccgcaaatatctattctttaagactgccaaggaggtttgggatgctgcccgaaaaatgtactctgatcttggtaatgcttctcagattttcgaaattcgcaccaagcttaaagagattaagcaaggtaatcaaactgttactcaatatttttcggacttacaagatctgtggcaggagctggatttgtatctggatactacaccactgtgtgcgaaatgtaccaccattcagcgacaacaattggaaaaagagcgggtctttgagtttcttactgggttaaac

SEQ ID NO: 139019 - DNA, 525 bp, Cannabis sativa
taaattcttgtgcctaaccattttgtgaagcttgtgtcttagggaaacaacataagctaaggtttactctagcaagccctcccgaatttgaaattgccaaaaaaaaacaaaggaagtccaaagcttgactggtcagatagtcgcactcagcaaattcatttcaaaatcaacagacaaatgcgttcctttcttcaacatccttcgaggtaacaaaaagtttaaatagatgggggaatgcgagaacgctttccaaaaattaaaaagacaacttgcaaaaccccttgtactctcaaaaaccctagatggagaagaattaggaatatacttggctatcactgaatatgctgtaagcaccgtgctgataagcgaagaaaacaacgtcgaacatctagtctactatatcaacaaaagactcgttgaagcttaaagacaatatcctttagtagaaaagcccacttacttcctgatcttagcaacaaggaagttaaggccctatttctaagctcaccctgttcgggtatacac

SEQ ID NO: 139020 - DNA, 763 bp, Cannabis sativa
caaaaaaaaaaaaaatatatgtgtgtatctaagatttatattacaccaagcaactattaagtcataatctcataatagggttctaataattaaataaataccactttgatttgattaaatcaatataacaaaatgttaaaattaataaatcacatacataaacataaaatatgggcttttctatgttggtgtaaacgattgaggattataataacattgaatctttaaaaaaaaaaaaaaaaaaacataaaatatgggttttataatttaagttgactattaaggatttttgtctgcattgatttattgtgtccactaaatttttcagtttgttaaaaatagtctccgaactatttacagtattgtaagttggtcattttatcaaattttatcacacgtgaaaaataaaatgaagacatagttgcttagccagttaccacgtcaacgccacgtgtgtaattaatttagaaaaaaactatttaattttacgtaattattttaattattaattgatttttagtttaatgattttttttaagatacatattttttaatttttaattttcaattatacacgtgttactgatgtggcaaatgtatggtcggccctgagttgaaataggccataggcaaaaaaaaaatttttggacccttattataaagaaaaatagtatttttaaaaaatattaaaaaatatgtatattttaagaaacttacaaaaatactggaatttaggttaacatttacaaaaatactgtcacac

SEQ ID NO: 139021 - DNA, 737 bp, Cannabis sativa
tgagccttttacccacgcctctttgatagtcaaatctttcgcttagaactgttttcaaaacgtcaaactgataaccagtatcagattcagtaccagacggatcgctctgggattgtcgtttaagtcttttcctatcaagctccttcaacaattcctcctatttaaataaaaattattatataataaatataaactataaattttaataataaatcattttattcacttacataatcttttgcagcaacttcattaacgaaagtgccagatggctttttcacatgaacctccttccatgcgtcaactacatgctctccgggaggacccccctatacgaacataaacaattaagttagtttattataaataaaaaatataattaacaattaaagaattaatatataccattccgtggcgtatggaagccaacaattttgtgtcttacgttgttggatattttatttgatgctgattcgctttatttttacttgagggattcaaaaaaatttcgctaacaaaaattaacaaatcggcttccaagtctcggtattcaagtggtcaggagggaatcccagaacttgcttccagtcttctggttttttgtaatgttgtttaaaatgcctgtgtgtgaatgtcttttgctcactatacctctccgccatctccgaacataagtaggtctcggtggggattcccatcgatatcaaaatagtattgtgtaataaaataatttaaaa

SEQ ID NO: 139022 - DNA, 1096 bp, Cannabis sativa
  modified_base (884)..(909): a, c, t, g, unknown or other
agaagagtcaagccctcctggatatgaactcgccaacaaaagccaaagaagtgcaaagcttgactggttggatcgcccagcttagcagatttgtttcaaaatcaacagattagtgtgtccaattcttcaacatcctgcgaggaaacaagcagtttgagtggacggaggaatgtgaaaaaaatttcaaagaactaaaggcacaacttgcaagacctcccgtactctcaaaacctctagacggagaagaactgggaatatactttactgtcacggaacatgacgtgagtgttgtgttcatcagagagaaaaacagcatacaacacccagtctattacatcattaaaagactcattgaggtcaagggccaatatccgttcatagaaaaactcgcttactgccttattctagcaagaagaaagttaaggccttatttccaagctcatcctttttgggtatacactgaccaaccattacgccaaatactgcaaaagccagatgctttcggacgactactcaagtgggcggtcgagttgggccagtatgaaatcactttccaaccctgaacagtaatcaaaggccaagccttagcagactttgtggtagaatgcacaggcaagaaagaaagcattccaaaaagcagccccgacccgatacaaacacctcagccaagtaacaatgaagataagccaacctggaaactacatgtagatgggtcagccacagatcagctatgtcgtgtaggaattgcccttgtcacgccttgggggcaacacctgtacgctgcagtcaagttctgattcagaacatttaacaacgaagctgagtgcgaagctctaattgctgggctaagactagcccaagagatgaaagccgaacacattgannnnnnnnnnnnnnnnnnnnnnnnnntaaatcatgtatccagagaatacgaagctcgaggagaaaaaatgatagcatatatgagaaaaatacatgatttgctcgcacaatcaaaaagctatagtctcagacaaattcccagggaagaaaatacaactacagacacgttagctcgattggcaagcagcaatgtaagtcacaaggcaaacttggt

SEQ ID NO: 139023 - DNA, 523 bp, Cannabis sativa
gatacatatcagccgcagtggcacaccagaacaggatgctctattttgaatatatttttggaatgcaaagtgtatgttctaaaagtactaataaactagtttgtaatattttggaaacagcgggtccccgtagttctcattacttatcttttactataaagaaatttttatatgcttgattttaattatcaaaaatttaattacccacacttttggtataattatatagtttttaaataagaattttataaacaaaaataacacacatgtggcgtccctgctggacagagcgttacaacatggtatcagagtgccaaggtttttagatcctgaaaactggtttgatctgtacatttgctacgaggactcgttcgactcattgtttagtaagcttttaattaatagatagtttgttaactttcttattgcctgattatctaaattgtgttaatatttgaaatgtgcagaaaggattatgatatatggaaatacttataagtattgttattacctgaaaagtgac

SEQ ID NO: 139024 - DNA, 785 bp, Cannabis sativa
  modified_base (737)..(742): a, c, t, g, unknown or other
cctttgcccagtgagtatgaatcactatttatagggctataagcttgggagggaagaatttcccttctaattacaattgatataagtggaaagattgcatttttaatacagaatacactaatcaagggattcggacagcttgtcatatctctgtgatctgatcccaaaaatatagggatttcttcagtgactcacgatgcgaaagctaaatttaagtgttagcgtgctgcgcggattgctcactacccagctaagagggcttcatccgagcaaatgtatgtggtgcctttttcggcatatttcttccaagcaggtacatcgagttgatttcacgtgtagccacgtcagagtgcaaaaattgaaataaaaaacctacaaataattatcaaaattagactataaacagcaatatatattattttaaaaaaatgataaaaaattcattttacaaattatttcattaatttgagatcctaacatttttgaagttataaaataagtttctagtcatgcatcagactagtcatattaatgtgtttttctttttggtctttttactttttttcgattgtattaataagatctttccaatttagccaacatattaattaacatccatgttttagctaattacaattacattggcataacttcttgtaagtttgttgtgatatgtatattaaacacttttcagtgggtattatctggttactaaataatttaattataaatattannnnnnaaaatattaaactattaaattttaatccaataataaataataa

SEQ ID NO: 139025 - DNA, 547 bp, Cannabis sativa
tcttcttcaatatttgatgttgggtatttgaagtttaataaatcttcattttctatatctttaacattctttcccttattattattatcatcataagaatcattcatcttcatcataataactaaatgtatcaagcaataataatatgttccaataattaaacacaaactaagtttgtatgtatttaattatctatcgtaaagtaaagaaagaaaacaaaaagttcgagtatactagtaattacgttcttatatatatatatatatagacattattatcacttcctaattacattagaatttgtatctatacatgttttttttttaaaaagttattttaaaatttattatgttatcttctttttatcttatatgaattaaaattattatctgaggtatatgcttggaagtaatttacaaaataatgatcatttgtttttttttatggtaaaattacttaaattttatattttttaacaattaaacacgtaaactaattttttaacagtaaaacttatcaaacacacattcaagtgctataatggacc

SEQ ID NO: 139026 - DNA, 609 bp, Cannabis sativa
tgccttttcgtactcaatatgggcactgcgagtttttagtgatgtccttcggcttgactaatgcaccagcagcatttatggacttaatgaatttggtatttaaggacttccttgctaactttgtgattgtgttcattgatgacattctagtctattctgaatcggaagaagctcatgaacaacaccttcgtatggtattacaacgtctccgagaacacaagctttatgcaaagttcaagaagtgtgaattttggttgtcccaagtgagtttcttaggacacgtggtaagtaaggatgggattctggtagatccagtgaagattaaagctgtttggggttggccacaacctaagatagcaactgaagttagaagtttcttgggattggctgggtacaataggagatttgtagaaggttttgccaagattgctactcctttgactgagctgacccgaaagagttataagtttatatggacttataaatgcaagaatagcttttaagaattaaagaagagattgattaatgcacaacttctaagcctgccagtcagtgatgaaaagtttgtgatatactgtgatgcctcaagacaaggtttgggttgtgtgt

SEQ ID NO: 139027 - DNA, 619 bp, Cannabis sativa
atagtatagtctttgattctttgtgcagcctcttgatccttataccactctattgtctctttattaataatctcacctttgttgcctaatcttctgttattactttcaatcaagcttaaccttgacattaacttgtttccatagtttttttttttatgcatttgaattgacaacttgttgttccagtggtcaagcttattactgtagcactaatagaagtgtgtcgtcatatgcagtgagtatttcttccttcataccagtcttcccaggtgacacaatatttcatacttatgataccatcgattgctccaaccatatttgtgtattgtatcttgattctcttcaattgaaacataattgaaagcctctttaatttgcaaaaaaattctcgctttctgaattgccctgccaatacctccaaatctttggaacaaacttatattccagtgctgattatctacttatgactataccatatatgtattaaaacatagaaagcgcactaatattccctttaaaataagttcaacctttgcatgggttatcgtagctcaattatttactttctgttgacttttaacaataggtcaactataccaatcttaaaacgtactaatca

SEQ ID NO: 139028 - DNA, 592 bp, Cannabis sativa
attcttgatttatgagaaattatttgaccactttttttttttttttttctctcttctctctgccaaagttaacgatttattcttaatttaaactaaataattttattttttctgcgcaataaaacatctgtaactatcaaacttccgttattctctctgggaagtaaaatccctaatatcctaattgtaattccacgatgaacacaactaatttagagaataagaatgctcctcccccagtacacttcctcaaccttcttcttcccctttcctctttcattgcagccgcgctgcgctcctcccccagtacatcatcatcaatatcaccataattaatattaatattaatattatactcactacttctggaagaaacgacagtaactgaatctccaggggaagtattcgtagtattggatttgataaggccattagaaaagagttcatcggcatgaacaaattttggggatggggcaataataattatatggagggttgaaatcgaaactctcatcaaattcaaggctgtttgctatagaagggactattacgttagataaccaactatcagagaaactctgaacggctaaag

SEQ ID NO: 139029 - DNA, 519 bp, Cannabis sativa
  modified_base (102)..(106): a, c, t, g, unknown or other
  modified_base (491)..(493): a, c, t, g, unknown or other
ttttggttcgggatcgagactggtgtgcggttctaggtcccgaccctagttttgtgtccctggtacggttccatgtttaggtctgagtttaggttcgggttnnnnncccgagtccaggtttgggtttggatccgggtccggttcccaattcgggtctaggtatgatttggagtcagggtcctggccggctacggttatggttcgggtccttcacagggttcgagtcaagggctgggtctcaaatccagacactggctacgagttttgtccaagccctcggtcctgatccggatcccaatctcgggtcccagtctgtgtccatttgtggtgccgggtcacgatctgggtcctaggttcaagttcgggtcttggttaggtactagtcccggttctgtttcgtaggtctctatcctgattctggatccatggatcattgattgtgttggtttgggtcccggtctaggttcgtgttcgagtcctagtctcggttnnngtttaggtctctgtctgggttttgat

SEQ ID NO: 139030 - DNA, 1043 bp, Cannabis sativa
aatcttacaagagtcataattcaaaaatagatattggcgtctaaatcactttaatttttaaatttgtaacagttaacccaaaaaactgaaattgacggttcctcaagcccataacatacgtggcagttcctcaagccaattatttttgcaagctaatagctttttctttagggtgaccttgagtattttattgacagcttctacttgtccatttgtttgtggccttgcgaccacagagaaacttttgatgactccgtgttgatcgtagaaatttgtgaattcgtcacagtcgaattgctttccattgtctgagactattttgtgaggcaatccgtatcaacatacaatgttctttatgacaaagtccaaggctttcttggcagttatgatcttcatgggttcagtctctgtccactttgtgtaataatccaccgccactatgacatattttatcccaccctttcccgtgggtagggagcaaatgagatctattgcctgtatcgcaaagggtcagggactagtcatcaaagtaatttcattgggtggggctcttggtatatttgcaaacctctggcatggatcatacctaaggacgtagtttatacaatctctcttcatcgtgtgccaaaaatacccttattttaatatggcatgttgcttgggcgtccagtgtggtctccacagaatctctcattgacttcttgcatgatctgtctagcttcaggatccgacacacatctcaaatatggcatgttgagcccccttcgaataagagaataccatatccatttaaataccgatgagcttggtactgtaattttttagacatggtcctttcttgaggtaattctcctgttgttatgtacttaatgaaagggtccatccaacccgacctttgctcattggtagccactgtttctttaccctgatgctaggttccgcaaggtgttcgacaggtaccacccccaacttctctatttaactatctgaggctagcttggccaggcagtctgcatggacgttcttttctcgtgggatttgct

SEQ ID NO: 139031 - DNA, 672 bp, Cannabis sativa
taatcatgaacaaataattatgttttggacttaatagaatttatacattaaatatagtcatgaaataagtcatgtgaaccatgcaaaaaaaaaatgatttatgatcttttttaattagttaatctgattattttaaaatgggttttatttagggcacaaaacccaacacatttgtcaatccgaatcacattaccaaaaactcgtagtgcccatatctggttcaaaatgcagtcttcggtatatcttcttcctaaattcttagctgatgataaccggatcgtaggtcaatctttgaaaacccagtctttccttgaagttcttcctagctcgacacgtgtcttcatttgatgtgcttaccgaattttgggtataacagtttgattttaaagtaatcaaatctttccaagttcttccaaactttctctaaatacttcaccattttcaagcctttggcctgtattctctgaggacctggttcacgatcaactgcgaatcactatgcaaatgagatttttggctttcaacgcctctgctatctttaagccagcaattaagacttcgtatttaacctcgttattggatgcacctgaaccctgttcgttggatgcaccatccacgtataacttctaggatttcgctgttgggttttgtgccctaaataaaacccattac

SEQ ID NO: 139032 - DNA, 572 bp, Cannabis sativa
gcgacggccaaaaatcccgtcgcagcgacgtttagaacaccccaaaactccatttttaaggccttaacatgccaacttttctataaattcgtacctcaatcataccatacccaaaattaacttcttacagataaaaaaataacacaacaaagtgctaataacatcaattccaacattaatcaacaacatccaatatttcacctcatattcatcaacatgcaccattaaatcacaagaacatcgagaacatcttcaaacaacttatttcagagctaaataacagaataaaaacactaataaaatcctttaaattctttccaaacctaaaccaaaataaactcaaaagatccaagcacaaagcatgctcacaacaacaagaacaacccaactatcatcaacatgcatctcaagattataaacacactaaaacatgtttaactcacttcaatttcagcaaaaattaaaaggcaacaagagatagaaactacctcaagatcccaaatcaccctagctccaaagattatcacacctcaagcttgaatccaagatatttctcaacaaaaatcaaaact

SEQ ID NO: 139033 - DNA, 738 bp, Cannabis sativa
  modified_base (436)..(446): a, c, t, g, unknown or other
atatgtattcatctcttttattatatttcagtcagttatataatgaatattatatttacataatcttcatgatatatgtaaaattttattgaggatacacaatttttaggatatatgcaaaattttattgagatgtataatcttcaggatatatgcaatattttatcaatgatacataatttcttgaatatatgtataatttatataaattttctctatcatatcatagataaacaataagagatacaatatgtatatatatataaattcaataataaacatataaaaatatatacatgcatatataatatatagatatacagatgaaaaaagggatctatatatttagtgtatcgtgaccttgaaacaattcaagaatttcaacaaaataatatttaccttgaagcttgagtagagactcgtgctgataacgtgnnnnnnnnnnntataaaatatataagaagaaaagacaaagaagatgaagagagaaaaaaaaaactgaacaagaatttctcaattgtttattccaatgaagtgaaccttatttatacaaaaatgtaactaaaaaaatgagaaactaaatgaatgtaataaaaagaaaatacaaagcattagcatttaccgtgataattaatttgttgatttgtacatccataaataatatttcataacacataatacaattttatttttctaaaacaaaaattctacttttaacttttgtgatttaaaagttct

SEQ ID NO: 139034 - DNA, 585 bp, Cannabis sativa
  modified_base (544)..(560): a, c, t, g, unknown or other
ggtccgataacgaataataaaagaaaattttaaattttttatgcttaatttagttacttaattaaagaaaataccaaaaaatacttctttttacactatatgaataatatatttacatgaaaaatatatataaatctcaagtatggatgacaaacatctcatttctataaaatctctatgattttcttctttacatttcttctttatcatcatgcagcgacattgtatacttattctatctatttataaacctactttcttctatttttctctcatttgatattctttatggatttttttttctttctttatatattgtgtattttatttgtataactttatttgatgtcttaagtagtagtaagttttacttattatgataatatctaacctcttccaagtaatttttatgctatgaatatgttgtcatatttactattttctcatcattgtaggagcttgttggaattattttaccaggatttaaatttactaccatgtatattgtttaacatcttattatgaatttctaaaacaatgtaannnnnnnnnnnnnnnnnttaagaaatcttacattgattgcag

SEQ ID NO: 139035 - DNA, 990 bp, Cannabis sativa
ttgcaccattaacatccatctgcaagagcttcttcacaaaattattagcttactgtcttctcttcctcaagcttcgattggctacatccaacgagaggccaactccaccgctcatcaactagcaaagcaagctttaggcctagatcagtaggctatagattaccagatctattcattcagtcctttacttgagattgcttttggctacagatctatttctctttcaaaaaaataattaatttattaaataatagtcaatgtgtaatattttaatttttatgtaatttaatatttttatatatttaaattattactataaactttatttttttattaggggatttccagttccgtccccggcccattcctaatgggaaataagcaagaattgtgaattaaaatccttgatgagaatggggattggagagcactctctgctaatttcccgcctcgtgtgcatccctaattgagaggtgattgaaaattatttatatttttttgacgtaaaaattatttatattgtttagtaagataggaggaagaggtgataatcattttttttcatttactaaattctaattagaattataataaattaataaaaaaaattaatgagtttaaaatataaataatcgaaattgatattttattataaggtaaatgacagcataagtacccaaagttttaagtttgtaagtcggataaactcaatatttatttttagcggcatattgtaaactgtaatttttctccaattttgtaattacaaactctgttgttgtctaaaacggggcacatctaaggactagattctagatcattaggtctagacataaatatgtagtattagtttcttctaaatgttcttttaacaaattcaaaacagtattttttactaacgaaattgaaggaaaattatatttttacaaacattgtgtacttatgccgctaaaaacaaacattaggtttatgccgcttacaaaattaaaa

SEQ ID NO: 139036 - DNA, 751 bp, Cannabis sativa
  modified_base (495)..(498): a, c, t, g, unknown or other
tcaagttgaagcagtcaacaagatattaaaggatacactaaagaaaagacttgaggatgctaaaggaaactggccggaggaacttcctgaggttttatggtcgtatagaacaactgagaaaacgacaaccggacagactccattcgtcgtggcatatggatatgaagctatgctgcccgtagaactcgaaccaccatcccacagaagattgacatatagccaagaggccaatcatatactccttaccgaatcacttgatgaaatcgaagagaagcgaaccacaacaaactttaaattgatggcccatcagcaaaaagtagctcgtatttcaacaaacaagttaaggctcagaaattctctgtgggggatatggttctaagaagagtatttttaaacaccaaagacagtacgggaggtgtgctaggacataactaggaaggatcgtattaggtagtcgagttctagactctggagcatacaaattgggtaagtatnnnnaaaaaatgcaactcgttctggtaccaaggtattggaatggggaacatctaagaaaatactaccaatacaagtaccaggtcgaatgaccatattaagtacgaaacaaaagaacatttactcttatgttaatggccttctgggcggaccacgctcaaaggttcggataaaatttttaagtacttaggtcggatgaccactattgaaggtaccatatttaatttctgcaatttgttttatttcatgttaagctaaa

SEQ ID NO: 139037 - DNA, 570 bp, Cannabis sativa
agttaatcattgcaatttagatcaaataaataataggtttgtaaaaaaaaaaattgaatatataataaaataatcaaacaatacaaacaaacaagtaacagataattcgaaaaatctggaaagtaggctaaaatttctctattttgaaatctaaaaaaaaattaaaatttaaaataaaatcttaactagaatttaaatttaggtttttagagaatatttgaaaaaaaaaatcaagtaaaaaactaagaaaccgtacattccctaaattttaactaaatttcaatatctaaccaatttttcaaatttcaagttcattcaaaaatttaaattatttaaatttctaacaagataatataatataatatcttgaattttaaatttagatattcgtaatattatattcttagtcttataattcaataaattcaaaataaactatttgaaaaataagatatttttatgggtaggatatttttttaattttattaaaaataataaaatagaataagtttaaaaaatttatggttcgaaaccctaaaatttctattcaaacctaaactaactaatttt

SEQ ID NO: 139038 - DNA, 572 bp, Cannabis sativa
gtgggggtttaataaaactaaaataaaagtattgggagttttaccgccatttacccataattataaatcttgtcctattactaatttactactttaaaaagtactaggattgactgactcaatcaatttcaaaaatacgttttaactcaactttcctatcctttatatgtttagaaatattaatttttaaaaattatgggacccatttttgatgaattttaatttaatttttagaaaatgatttaaacaattgaagtaaatttaaaaataaatatttctaatttcagaaaaaaaaagatatataattataaatcttgtcctattactagtagaaagtactaggattgactgattatacgttgttttaactccaaactatataatgataaataataaaaatcacaaactatatagtgttggaactaagttttcctttatatgtttagaaataattttaaaaaattatgggacccattttctgtatttttaatttttacaaaatgatttaaagaattgaagtaaagttaaaaaaaaaaatatttctatttcagaaaaaatatatatatatatat

SEQ ID NO: 139039 - DNA, 518 bp, Cannabis sativa
  modified_base (102)..(107): a, c, t, g, unknown or other
gactaaatttgtacaaattataaaggggtataaattttgatataggttgtattattagggtcaaaaattgaaatttccctattattattgttattattattnnnnnnattattattattattatttgtagcggtttcattatggtcattattttgtaaccgctacctactacctagctataagtagggttatttcttccattcaaaggggacaaagttgatttgaataataaaatacagagtacgagatctctttcaacagcgtactaggtaggccaagcttaaagcttctgctgaaccactatattttttttttttatgtttattctatactatttacatactcggatataattatatctatattctttgagtacttgctattctaagtgagtactcactatttttgtgttgtctaaatttctcagacaatattattaaagttaggggtgtgcagaaaatcatcacatccaattacaacggactgatccaatcccaaccgatctaatagaatcggat

SEQ ID NO: 139040 - DNA, 949 bp, Cannabis sativa
  modified_base (511)..(511): a, c, t, g, unknown or other
atttatttacggccgcggccaagatttggcagagagatgtatctgagacaggttcaggagccgcggccagatactccaccgccacggccagatctgcactcgccgcggtgagggaacccatggccgcggcgaggttccgtacaaagtgaggtcaatttcgtcttttgaatcctggaacgaaaaaataaaaagaaaactgcaaaaagaagtaaggggaagcgattttaagacctagaaagtagtcaagagcagttggagaagcaaaggggggcgacccagattcattccactaacagtttctttcttccttccttttaatttatttatgttgaattctgttttaggaatggttatggatttgaacatgaactaaactcccatttagggaagatgatgaatgttgtttaaagttttccctagttgatgttaattgccattcctttcatcttgattgtgaaattatctatatttgtgttaattccatgtttaagcttgatcaccttttacatgntctatgatctcaattcaaaatttgaaaagtgagaattgagaatgataaaattagataatctaggttgatgtgaaacgaaagtatttgcgtgacctttgtgacaattagattattgcttaatgctgatttcatgtgattctaattaaaagattatttagagaacatgtgatttagaacctagaagatctgaaaggagctaggttaaattgtataatctgtcattcacatcaggaaaagagatagtaattaggaattaacaagtgggtaaatatatcaacaagattctcttccctatcttctcattttgattaacttctgtctatctacttaagcttctagaatttttattatgtttttaatcttgaaaaatattggtttgccaaatagaatcataaatttagtctagtggtattcaatccaattccctgtggttcgacc

SEQ ID NO: 139041 - DNA, 980 bp, Cannabis sativa
  modified_base (441)..(448): a, c, t, g, unknown or other
  modified_base (479)..(486): a, c, t, g, unknown or other
  modified_base (513)..(520): a, c, t, g, unknown or other
  modified_base (848)..(851): a, c, t, g, unknown or other
aaattaattaaaattaattttaaactcaaattttaattttttataaatatatatgtgatagaattcgaaatttaatgtattaaatgatacattttcgaaaccattctaaaataaaataaaataaaactagaaaaattattctaatttatgttgacctaaaattaattaaattaattttcaacataaatataattttcatatttaattaaatctcttaagaaaaatatcaaatatttaagtttcttgaataaaatcaacttaaatattaatttttctatttaattaaatatatctaaaactataccaaaatgtctacctagaaaatatctatctaaataatttataatctcattattgattttctaattaaaatataatatgttttagtctatttattttaataaatcattaatgaaaatataacttgatttaagttgatcnnnnnnnnaatataacttgatttaagttgatccaaaatnnnnnnnnacttgatttaagttgatccaaaattannnnnnnnattaattttcaacttaatctaattttcaaaaatgaaacatttcaaaatatctacattaaataaatgcatttcacaatttatgtgagaaataattattaaaataaaataaaatatactctaaaaattattctaatttaagttgatctgaaactaaaaaatttccagcttaaacataattttctatttaattaaattcattaaaataaaaataattaagtatctaaaataaaatcaactcaattattaattctaatttaatatctaagaaaaataatctaatctaagttggtccaaaattaattgacaaattaatttttaacttaaatannnnttctaatttaattaaatttcataataaagaaataagtaattaagtatcttgaataaaatcaacttaatattaattctatttaagttctaagaaaaaatattctaatttagttggtttaaaattaattaa

SEQ ID NO: 139042 - DNA, 619 bp, Cannabis sativa
atgattttacaactattgtcatcatcaaatctcaattgtataatcactactacattcaaagctgctggcattattgtatcttatttgtagtcatcactaaatttgaaattattttcataattgtatctcacttatagttactgcttttatttatagttgtcactatcttaattaataagtttaatttgtatatgaaataaatcggtaaataaaattaccactaactttttataataatttaatcattttgttatagattaaaacctagaaaaaattggagattaaagattatttagtatttaatatatattaataaaaagtagatgcatttttttttcttgaaaaataaaataaattattgtaatatatgatattaatgtttagaaaaaaggaattaattatcaatattggtaccaaaccaatattctggagcagatttttttttataattaatcaaagttagaaaaaatattttggttttgaaagatacggttggataataaatactttagaaaaaataataaaataattaaaaagttgaagaaataaaaaaattaaacataataatttaataaattatatatatacactttgtattttttaagtgttcattgtacat

SEQ ID NO: 139043 - DNA, 763 bp, Cannabis sativa
aaattatttcggatgctaaaacagataggggtgcatcaatatatccattttaagggggtgcatttgtagaattttccagttttttttatcaacttaaaatacatactttcaaaaaaaaaatgtttttattaattttagattcttagtattttttttaatctttaatttctttttaatgatatggaccaataagatattgccacgtgtgtaaggatctgtcacttaacgttgaggtacctacagaagttctaaaatcctagcagaatgtatttttaccgctaaaatttttatttaggtattaatctgcaactataagataaacttagttatttatgccgcaaattattactcttaatagaataactcattaaatgcggaagtgacagagtatatttgcaacttgctgactataaggtcctatgcgagataaagatatacaaactgttgcctcacttattaacgagaagccatacgacattggatgcacaaggtgagacatcaacttcgttgtgcctggaaagacgtaagcaatgcataatgactgaaaacacttagcgtataatatacaaactaagtataacagtcaggcgaactaaaaacaactaatagcgaggcgcttatcttgctataggaaggcatactcttgatactttcacgaatcagcttcaaatatcttttagtgaggttattagtcttggcgaatcagtcctctcgagcagaagctgacatttgaatgatgactgctgaagtactctttattatt

SEQ ID NO: 139044 - DNA, 913 bp, Cannabis sativa
tagggtttgggttgttcttcagcatttcaagcattttccagcaagtgttaggtgatctcaagctctaggtaagttcctagcatcctcctctttagtttcttaaactttaagaaaatgaatttatgcatttttttgattttagctactgtagtttttgttggtgtatgatttgtgtttctgaagttagattatggttaaatatgttgatttaagctagttttaggggatgttattaggtttgagcacgctatgagttttagaactcaagcttggctctttaaaggtgttttttgattctgagcttctgtagttattttgttgcttggaatatatttattggggtataatatccaggtctggaaggttaggtaaggattggaatcgatttggttaggttttggatttttctttgggttctctggggtaaaccggttacccgaatttgttgctgggttccccaaaaaattcgtgttgtcaattcgtattagtttcagagctttggttggttacttggttgctagtatagggtatttccatgttaagttgtagtagataggtttttggtataaaacctaagtccctagttgtgatttagtgtgtcacttatccatgttgtgattgatgtgatttaggagcctgtaattcgtcgagtagttgttccactcaggttagctggcacacctgtattcagaatcaaggtaagattagtataatgtcatgcatatgttattacatgtttagcatacatattgtttatgcctgttagagtacattgatagcagtaataatatacgcatagttgtattgataactgataaatgtatgttggctgaaatactgatcgatgctgtcacatcaatatggctagagtatgactggcatattgagtataggctgacattatggtcgatag

SEQ ID NO: 139045 - DNA, 515 bp, Cannabis sativa
agacaattcatatttaggataggatgttaattcaacatggatgttaattcaacatactttttaattcaacatactttttaattcaacatactttttagcatactttttagtaaatctactttttagtaaatctagatcctggtaaaatattcccaacacacgagtccatattattaggcactctggccggtgaatgttaatacatatacacaaagggatggactttactccaatccaccgtgtttctcttgaagaagagaaagcttagtaggaatattctagagttaataattacagtaatgtctttacaaagaattcaccttcgatttttaggtggagagttgaagggattaaaggagaagaagtcgaagctttttcttttttggattccctgcatggtgcgtctttgggggtatttataggtcaattccctcgcatagagcgtcgttgatgaatcttcataaggatgaacccccaccattggattggtaggtggcatattttccatgtggtct

SEQ ID NO: 139046 - DNA, 618 bp, Cannabis sativa
  modified_base (52)..(61): a, c, t, g, unknown or other
aatagttcgaggggaatttctaacggctaaaaaagttcagggggcacgattnnnnnnnnnncaaagttcgggagaaaaaattacttattagcctaaataaaatatatattattatcaaaaatgcctatacataatttggttatttttactctattgataatatactaagtagtattatttggtaactgacaggttatttatacagtaaaacttttttctaaaaatactcaattcaataataacatcaatttattattaaaaaaaattaagtttcactttgggccaattataaataagaataatctctaaattttaattagttatacattttttaagtcacgttttaacaaaatatacctctatataagaataattacatctcaataatgtatatacatatattttgtaaatctatttatatagatttaataattttatatcaaattataatacatatataaatattatatatactcaaaaataattctattataatgtagtattaagaattgtttattattattgttgttatatactgatattttttggtgttttgaattttttttttctagtataactctatttagttataacctcaattagaatataatttacttg

SEQ ID NO: 139047 - DNA, 1082 bp, Cannabis sativa
agtcgccttccaagtcaagacttgcctcgaccccctcaaaacgggcaagaggactagcgagacaaccatgctcgacaggtacctcaacctaggggacatgtatgggaaagacgacgcaccatctcccatgataactatgtccgtccgagaccagcacccagggaaactagaccacagcgtgcacaaccttactcaccccgagatgatagttacttatcaagatctcgggctgtcgcaatgcagtcttatgcccaacaacagcctgcacctcgaggggtgcagcaacagagaacggtgagcttcatgggggagaattaccgttccgactcaaggagtcagttcgtgagcattcaagacaatgcacctcctccatattatgaggagcatcctcgataccccccacatgacggaaggagctcaaaccttcgggaccatctgaaccaaaggcgacaacctgatttgagagaccacttgaatagggggcacgcatagagggaggctccttatcgagcacagtatgacattcctccacaacaaggagaatatgcgccccaacttaatgtgaacgctcctccaccagccagtctcaatgctcctgctcctgttttaaatgacccacggattacagcattagaacatcaaattcagcagttattgaatgcccaaggaagagtcagcagatacgattctgatgaggaacttgagccttttgctccacacatttcggcattgccataccgtcaaaggttcaagatgcccaccacgacaaaatatgatggaagtactgacctgggagcccacattagtgatttcaacacattaatgaggacaagacaagtgagtggcgatctgaaatgcatgttattcccggtgaccttgacaggagcagcaaaaacatggttctataaattcaagaaacattgaatcacttcttaggacaaattgttgagtgatttcaaaaaagaattttgtgccgccaggtatcaaaaacctgaatgctcttccttggccaacgtaaaacaacaacctggtgagagtctaaaggcctatattaataggttcaacatcgaggcggccaaggt

SEQ ID NO: 139048 - DNA, 2123 bp, Cannabis sativa
tacatcaactctatttgggagacccttcttactcactgcaagtaagaagttggatacaaaagcatggatatttagaatggaattttatggtgaaacacaatgtgttagattctattgataggtacataaagaatgaatctttgttagaaaacccaacttgaagagcacatgagcacaacatgaagtcgagctaacgacgttaaaacaaagaaaacttacgggagtttttcttacccttttctttttattttgcattgattttatttgattgagccttgaggacaatgcttatttatttatttatttattatcattttttagtttagattatttttttactttaattttagtgagtgtgggttgaatgaaattctgttgacaatgattgctcgtgtttgatatgtgtttttactttgatgtcttatgcatggtcttggaaaaaataattttgttgatgatgaaattcttgattgtatgataattataattctaggaaaatgatagattctcatgatctgtgtgcttaactcatgattaattaccgctcaaacttaattttttcaaaaacttttgcacattagttgaattatcgtatttgctaatattttgaaagattaatgcatgtttgatgtttaattaaagtctcaaccactctaaaatttgtttggtaatcatttgaggcaaaattgataaattacatatgattttgagatatgatagtttttttttttatcgattgagtctttcaagcctatcctatttgtgaattccctagttttatccaatttgagcctaaatattgacatcttatttttttttttaaccctatacactaactttgagcctaaaaaaaaaaaaagaaaatccttattcatccttttttacaccatagtatattgatgttttatgtatttgtaaaggtgcgaagaggaaaacattcatggttatgtgatgatgaagaaaataattattattctcttagaataaatgtttgtaagttgtaagtatttcattaaaaagaaactaaaaatgatgagaaatacgtcgaaaataaatgaatacttgcaacaatttaagtgtgggggaatagtaagttttatgaaaaaaaaaaaaatagatacaagattgaattgttgagaagagtgattggggaatataaatgggaattatttgacagaatattgtagatgtatgctatggtgtgatttaagcctaaattaaccttctctatctatctttcaccctagccttacactataaacctataaagtcctattgatctttagattgtgtgtaattacattagtggagaatggtttgataattaagcctatggagtggatttttcgttgaaatacacatttattttgagataaatattgattgttggcatgcatgaattgatttgaatattaataatatgatgagttgattgcacacacacaaaaaaattaagtttgaaaagtaatttatcttgagttgaaattctattgaagaatttagatttttcttggaattataaagggatgtacaattcttgaaactaaatttttttcattgaggacgagcaagagtaaagtgtgggggaatttgataagttaatattttgccttataaatataactaatttatgtatgaatattcttaaattgatttttaaattattgattagtgtaattataatttattagggtattttgaacactaatcatgcattttgagtcatgtggagggatgttagcatattttggtagaaaatagtgagagtcggcgagctcagttttacaaggaataacttaattgcaaccttaaaagcagaactggacttggagctcaacatgaaagttttagatctcgttcttatctttctgaaacatcttgaatcgttgaattctgagttgtattaaaaaagttatgaccaaaatactaatcaggtgcagaataaaaattgtgttgggcgctatagcgccaaattatcactttttttaaaaaaaaaaaaaaatcctaattctaaggggattcatctatcttttcaagcattataaataggacctcttaggctacgaattcaatcattctgaagctacaaattagagagagaaactcatatatatatatatata

SEQ ID NO: 139049 - DNA, 819 bp, Cannabis sativa
ccaccaaaattgggccataagtcgttcaattttttttacaaaccgtaacagggatcctgaaacaagacattgcatatgagggaatagcttggataactcctttaagaagaacttccttaccagctcttgaaaatagtttattagtccaagtactcaatttagaactggctttttgcaaaaagaaattgaaatgttcttttttagaccgaccaaaacactgaggaatgcctaagtatttactaatgaaaggcttattttcaagacctaaagtatgacggaaaaactcagcctccaaagcactaggggaaaaaagaacagaggacttagtaaaattaacaagctgacccgtagcttggtggtacaaatcaagagcagccttaatagcaagacaagatcgagcagtggtagtagaaaatagaaggctatcgtcagcaaaaagaggatgagatataggaggagcagaacaacaaattgaaattccctggaaagaattatcatgctcctgcagtctaatagcagcagataaagcttccgagacaagaagaaaaatgtagggggacagggggtctccctgcctaatgtcctgagaggaagagaatttttcagtgagggagccattaataaggagacgaaaagaaacagaagaaagataactaagaatgagattaacaaacctaacagaaaaacaaaggtattgcataataaccttgacaaatccccactcaacacgatcaaaagctttttccatatctaacttaagagctgcccaaccaactttacctaacttcctatgagtaatagcattgaccatctcattag

SEQ ID NO: 139050 - DNA, 704 bp, Cannabis sativa
aattaacaaaattccttttgtagtcatcctgatgctgcaaagttttgcattctgggaattgaaccagaagtaaaggaaaaattagataagattttaatgaacactgttgttataggagagcatgcttggacaccttcatctggaataattctgtctgagtctgaaaagccttttaatgatactgaaaccttacatgaacaacttgagagtagtgattatgatctagagacgcttaatattgatagattttctaaagagaaaattagcaagagatcaactgagacacttgagaaacaaaatgaaaaggcgaaaaatgaaaaagggaaaatgaagaagaccgagcctgtaatgatatttgaacaaattggtcgccttgctgatgtcgtggagacaagaagtagaaatattgaaatagctagaaaggaaaatagtattgccgaagttatgaaaatattaaattatttgcttgaaatcgaaaaaagggagaagcttgtatttatttgcaactctcttgtttatcatgaaagagaagagagagatgtttgcttcattttggaagaacctgagttgatgcttacttggctcaagaatgaatatactctggaataattataatgctcgtgagatttcagaccactcaaaattaattttttcatatctacccaatcagagacatttgaggagtacccttcaggtactttcac

SEQ ID NO: 139051 - DNA, 726 bp, Cannabis sativa
  modified_base (241)..(259): a, c, t, g, unknown or other
  modified_base (537)..(545): a, c, t, g, unknown or other
agtatgactgacataccgagtataggctgatacagtaacacattggtacggctagagtatgactagcgtatcgagtataggcttttactatgtcaaaagaaccgtcgtacgaacgttcgagactcagtaaggtgtgggacatgggtattagggttgtggtcaagggtatgggcgtctgatcataacccaggatttatgtatgttatataatttatgcttttcttactgagtctgtcgactnnnnnnnnnnnnnnnnnnngtaggtaagggcaaggctaaggccgaggaatcatgaggacgagcagataaaggttgtacatgtcggggcggttaagcctggagcgcacgatcctcgggacattagggtttctgctattagtcgctgggcgacaaacttttgattataagtatagcaaacttttttaaagtattttgtaaacaggatcccggaatattattatctctgtattactttaagtaattaattaaataagaaaattttaattaatcatgattttcataaacctcgttgattannnnnnnnntgcacagtacgtttaaaatcacgttaacacgcctatgctagttagggtgttatagatgccatgggaaccaagttaaacctttcatcctcagatagatggttagtttgaaaaattattcaaattttggaagacatgtctgttgggttttatgccctaaataacactcatttcaatataatca

SEQ ID NO: 139052 - DNA, 1019 bp, Cannabis sativa
ggaggcgactaaggtttcacgaataaccgaaggcggaaagttgtccgcgatactggggcattgaagtccttggtgagatttggaagggaataaggaagaacggtctggtagactcgatgagtgattttcttgaccgtgctgaaggttttatcaaactcgaagaggccattcagcgagcagaaggcgaacaaaaacctagcaagtcaaaagctccttccactgggacatccgtccagctcccccatttacccaagcaattcaagctcgaatggtaaacgttccaacaacaataataggcaagggaatggaaaaaaagggaaagttcaccggcaaaaccgaacaagctccccgggagaatcctaccaagtatactgcatttaccatcttgacggaggacatagaaagtgtttacatggccacacagtcactagccccgtacaagaagcctgcgcccatgaaaaaagatgtccaagagagacatgaccaagttttgtaaattctatggagactacggccacgacaccaatgaatgggacaatttgaagcagaaaattgaattcctgataaggaagaataacccgcatatacagaattatgtcaagaccgatcagaatcagtggggtgataacaaccaagacttgctacctccaccgatagatggacatgtacaagtcatcattggaggcccgcacatagctgaagattcaggcaaagctcgggagaggtaagcccaaacagtacaacacgagcaacaaaaagtgatcctagccgtagaagagaggaagccaagaatcccacgagcaagagagcccaccataacattcaacgatgaagatgctgtcaaaatcagattttcgcacaatgacccgttggtagtggaggtccagatagccaacaagatggtggtcagaattatgattgataatggagcctcctccaacatcttattcaagaccgcttatgaaaagatggggttccagctcaaagatctaacccctgtctcctgcctgtatatggtt

SEQ ID NO: 139053 - DNA, 1135 bp, Cannabis sativa
tgtctttgaggcggtttaaagaagctgagaataatctttttgaggtcctcaatcaaaaagaaattttctggcgacaaagatctaaacagttgtggcttcaagagggtgatcagaacacgaaatattttcatgctacagctacctcgcgccgtcgctctaacctcattcataaacttcagaaagatgatggtacttgggccgattggggacaatggtcttcctggatgtccatagttgattatttcaagaccctcttttccagtggtacgtgccaatcgctgaatgttactaatggtattagtcctacgatttctgaagctcataatgtgtctctgctcgcgccaattactgatgaagaagtcaaagatgccctctttcaaatgcacccggacaaggcccctggtcctgatgggatgactcctgctttttaccaaaagtgttggcatattgtgggtaaggatgtcatcaagcaggttcgttcttttttcctgtttggatctttacctgagggattgaatcatactaatattgtgcttattcctaagaagaagaatccctcacatatgtctgatctgagaccgattgccttatgtaatgtcctttataaagtatgttctaaggtgttagctaaccggttaaaagttgctcttcctctggtcatttctgataatcagagtgcttttattcctggaaggctcatcactgataatatcatgatttcctttgaagtaatgcattacttgaaaaggaaaaggatgggaaaggatggttacatggcggttaagcttgatatgagtaaggcatatgatcgagttgagtggtcttttctgtgtgatatgatgctgaagatgggttttgatagccgtgtggttcatcttatctatcaatgtatttccacggtcacttattcggtcactcatggtggtcatgcattggatccattcactccttcccgtggtattcgacaaggtgatcctctttcaccttatttgttcttgatttgtgctgaaggattttcatctctaattaagtccttcgaggctcagggagagttacatggatgcagggtgtgtaatggagctccgattatatcacatatgctctttacagatgatagctacttgtattgtaaagc

SEQ ID NO: 139054 - DNA, 693 bp, Cannabis sativa
atgcttaaatgatgattctggcccgggtaaacattgcttttctctctggagccttctagcaggtatgtcgtccatctccttgttctctttgagtttggttcctcaaacggaggatctcgtccaccctaactggtatagtggtggtttgaccttttgcacttcctcttatttgcctactctctcatttcccctatgtaataaatgctctaggggttattatgagtttatttcccatctcattaactctgatcagagcattaattgctcacaacacttccttttgtctcccctaattaatttttcccatcattcccttttgtctcctcgccatttactcttgatttcccgtatcttttatcagaaaaacccccttgattatcgtaaattgggggcggatgcctgtgttcccaatgtccttcaggtttccctcattaatatggctgctggggatgcgacttcagatgtgactagggcggttctcaggtgtattctccgtggcttttggttcttcctatatatctccaagctcaggtatctttttcttcatcttcttcctctcatctggctttttcttgcttttctttttgtgttttcttcttctgttgctatggatgaatttttaaacaatgtctcaaatgctcttgttctccctcctgaagaatccactgtctttacttatgacactggttcttc

SEQ ID NO: 139055 - DNA, 516 bp, Cannabis sativa
tttgagatagaaaacactgattatcgaagttttataccgaaccaacatagcatataatgatattgagtattgggactatagcatatgatggtgcaaaagagtacatatactgaaggaagaaaatgaaaagaatatgcctggtaggaatatggtattaattaatctggtttgaaccattaataaagataatcattcatgaactgtattatatatatatatatggtgctaaataatatgcttaacaaaaatgctatctttacgtggatgaggcttatgagttcttatattttatcaaggtttcatactgaacagaatatacacattttttaattaattttatctcaatcaaataataaaactaataatattttaaaattatattgcaatttctagagagatgtaaagtaagtagtggtccagctgggtaatgtttagctttttctttttcaaaagtgtatattgtgtggtacataataaaaagcaggagtgttgtcagcccaacaaatacaatacatg

SEQ ID NO: 139056 - DNA, 929 bp, Cannabis sativa
  modified_base (892)..(895): a, c, t, g, unknown or other
taaagtttaatttccgcgctaattctattagtaatcccaattaggggattagagtttcataagtgacttgggtagcgtgcctaattatttagggcgttacaattagcaatagatcttctagcaccatgttttacaagagtttgagcagcccaaatactcctccaaatgaaacttggattttgtcctaactcggcattaaaaaacgaaccttgcggataatatcttgctttgtaaattttcgccacaagtgtgtcctccatagtaagtaatctccacccttgtttccccaaaaaagaaagattgtagtcacgaaggtcacgaaagccaagtccaccaaaattcttatgttgacaaagccgcttccaactaacccaactcactcccttactagctgaattcgattgagatttccaccagaacttcgccatcataccttcaaggctcgagcatatttcttgagtcaaaagaaaaatactcattgcatagctaggtaatgcctgggctactgacttaatcaagacttcttttccagctttagacaaaaacttagtctcccaactaaatattttcttcctcattttctccttaaagaagctgagaatgtcatttttatttctccccattatgcaagggagtcccaagtaaaagctatcatccgaagcctcatttagcctcataagaccacaaacacgatcacgcacagccaaataatatttttgctgaagaaaacagaagacttagcaaagtttactttaaatacacaaggatataaaataatgataatcaaactgaatttttaaaattaattgatgaggaggtcatattttgggacctatataattaattttttattatatatatacaaggatacactacaaaaaatcttactttnnnncacaacaaaacttatgactaaaagtaaaaaagtt

SEQ ID NO: 139057 - DNA, 904 bp, Cannabis sativa
tagaataaaaacttatttttagttatagtttcaaaaattggtgtcaggttatcatataattatatatgaataccatgaaagattttatcttgtctctattttaatctttttcttcgtctaatctcttaacttagaaacttttcatctaaaaattaatttccttaaaattgttatgagttattaaaattttattataattatgataatattataatttagttaattataatcataaatatataaaaaattatgttatataaaatttttattttctatatatttttaattattttttcttatagtatacatatttgtatgtatttaataaaaataatatataatatttttgaattatatttttatcattgtaaagaaaattgtaatttatataaaaaaataaattaatatgatttgttaataataaaaatataaaataatttttaaaataaaataaaaaataaaaaatttaaatattacttatttaaaatgtctctttcctttattttttttatttttgtaatacataataaataattaaatatatttttagtataaaataatttattatagttgtttaattcaaagaattattttttttacaaattttttttttcttaaacattgagttgtactaattttaactttatactgtaattttcttataaattatttataattgtttttttttttgaaatgaaatagcaacttcattgaattaaaaacattctgaatacaagaaagccttaagatcggcccaaacattgtgataaaaaatgctacaaccagagaaaaatcgagcatgcctagcaacagcatgaacaacttgattggctgatcgtttaataaaatttattttaacactaggtagagaagacaacaaatgacaacaatcctgaataaccag

SEQ ID NO: 139058 - DNA, 652 bp, Cannabis sativa
gaaataatgaaaatcaagcgtaaaacttctccaaaagacaccaatagaggagataatgctaactttaaagacctgaaacataggctaattataacctaacatcaatccgcttgagacttatcccattctcactgagagagcgagctaagagctagctgatctccttgccaccaaactctattgcaacatggactgatttggcgacaaagttcttgtccaagttttttcctccagcaaaagctaccaagctgcgaggtgaaattaataatttttgtcaactggacaatgaatctctctatgaggcttgggagaggttcaaagatctcatcagaaaatgtccacatcatgggatcgaaaaggggatgttggttcataatttctacaatgggctgattggtaataccagaacaattatagacgttgcagctggtggggcatttatgagaaaaagtgcaaacgaggcctatgatctgctagaagaaatggccatgaataaccaacaatggccaattgaaagaagctaaacgaagaaagttgttggtatgcatgaggtagacgccatcacatatttgacagcccaagtggaggccctaacgaagttgatgactgctcaggtgaaacaggctcaagttacttgtgagctatgtggggg

SEQ ID NO: 139059 - DNA, 538 bp, Cannabis sativa
atttgattgtcatactatttgcatttacttgattaatttaattaattgcatggttttgtgttgaaaattttaatttaccgaaattagcttaaattttcaatttaccccctcttggacacatatcttgagttaacaattggtatcagaacttgtgctcatttatttgattagatttcacaatctagagcatggtgattctaagtaataattcacaaaataatatgttagaatgtttgatcacaaatagagcaccatacttcaatggagtaaattttccaataagaaaaattagaatgaaaacttaccttaaatctatggattatgatttgtggcatatagtgtctaatggtccttacattgccaaacatattataaatggtatagaagttgttaagacttatgaggcatgtgatgtgaatgataagaaaatgctttctaagaatgcaagagctaaatatatacttatatgtggtttggtagagacgtgtttaaaattattgaacaagcctctactgtttgatatgtgaaaactgtttga

SEQ ID NO: 139060 - DNA, 697 bp, Cannabis sativa
  modified_base (42)..(57): a, c, t, g, unknown or other
aacgatgaatattgtttatttgttgatttggatgtgttcatnnnnnnnnnnnnnnnntttgatgaatgtatgtgaattatgaaattttttcataatataattttattttcattctgaaaatattttatttggattccttgtgaaaaattaagcaactttggtttttacggaactcgattttgataaaaattgacaaagttatgaaagattgatttttcgagttgaatgggtgtcgagatgcttagtcgcacgcacgccaggcgcttggacaaggtgggatgcacgcgcggatgcatcaaacacgtcttgtctgaactcgctgatgctgcacgttcgaacaggggagatgctgcaccatgccaggattggaggttgcagacgtagagttttctcggctcaacaccctgcaaatgccccatgcgcgcgcataaggtggctgcacacaaccttcctgggcagcaggtgcttcatgcaccaaaaatgcgatttttttcggattttttccataaattttgaattttttcaatttcaaaccctaaaaatcaaaataaaatgttatttttaatatatttaaactgaaatataaattttacaaattaaaaatatttaattttaatagattattattaatttttgatattttgaggtttaaatttaaaattgattattttgttttttatttttggttagattttaa

SEQ ID NO: 139061 - DNA, 807 bp, Cannabis sativa
ttcttgaggacaggccttctgttagccatgcttgttcccagcaactacttatagtaatcaacaaatgttgttgagatcagattggggtcaatgatcctggaacctagctggttttctatagagaaaatatgattatgtcttgctctttccttgatacttgcatgaaaaattgcagtattcaaatctccattttggatacaagtgaccttagccttctgttgcaggaatgttgagtagtcttgctgcacctggattagcttagttctcgcagccaattctctatcaagcatctcaatatcaagagggccttgctgtaattgttgttgcacattttctagatcaccttgggctctctggacagccgtgtgcatatcagagaaaccaactttgttaatctcttttacaaccggttttagagctttaagctttgaaatcacttgatacatcttggtcccatatacccgattgttccacacctcctgaaccttattgctgaagttcaggtaattactccacattttgaagtaacgaaatggtctccttccttcaactctccttggatacaaggataatacacaaggagaatgatcaaatgtcccttcgctcaaaaaattagcctctgctttctgatattgatcgagccacgcttgattagccataactctatcaattttggaacaaattctatcttttgcttgttgtttgttcgaccatgtgaaaaaattcccagttgccttcacatcttccaaccgacactgctcaacacagttcgcaaaagctatgtccagataatacttgactttatgg

SEQ ID NO: 139062 - DNA, 772 bp, Cannabis sativa
actaaaatgaaattttaaaattaataaaagaaattactcaattagaaataaattagacttcaactaaaaaaatatacttatgaaattaagcatatttttgtttttttaattatttgtgaatataaatatcaaaaaataaataactagataacaacctaactttaatataaaaattaataacacatcaatattgtaaaaaaaacttaaaataactaaaaataacctatacatcaactaattgcattttattatgaaaaaaaaaactctacatcaaacccgcaatgcaccgacaattataatatttcttttttttttaaaccaattttatcataatatttcaaccataaagcttgtgacttttttttcttggatgatttaagtttcaagtttatcttaatcttcctatattatgtttgttattgttgatttgtttggatgactattatttattacaattttacatcatggccttagaacgattattaaaatttatatatctttggggattaggatgaaaaacgtttagaatcagtattttctacggattgtaatttctacaccaaccagtgcatctgctttagcagtatagctctttcattcttttttttttatatatataaataatttatcaaatagtttgattttcttttataaaaatttgtctgttggattgtattctgttgttttgaatcatactttttttggggggggaatatcaaagtcttcaaacttttctgaactcttaggagggacctgaaagtaggtataacaa

SEQ ID NO: 139063 - DNA, 586 bp, Cannabis sativa
  modified_base (502)..(505): a, c, t, g, unknown or other
ataagggtggtattttagtactcttagactacaccaaattaggtttctagacttgcattaatgctagaaagtctactgatgagatactctgggggtggagcaataattttggagaggtgtaaaaacctatctaaaatctctaactctaccagttagattgaatgttaaagttgcaagaaggatacttattcagcctatggaaagttctatgtagtttttgacattgtaccaataaggaattaactactagtgttacttcctgactaacacagatgtagttgcacaaaagtaaagaatctagtatccctataggagtaaacgtataaagaggaatttcacaatatcaataattttgtgattaaggatatgtaatggtggaggaaagtttgtattgaatacaaactatcagatcctattacaaagacaatactacatactacacttgatctggacatcaaggtgttgagattaattgaaatgcattttttgttttatattagtnnnngtgggagtttgttggattttgtgtcctacagaaaatctatttcaatataatcaaatttactaattaataaaagatcagaaa

SEQ ID NO: 139064 - DNA, 664 bp, Cannabis sativa
agcggcggggttcctgcaaacagtgatgtattttcatttaagatgattagacatggtatgcataatttatttaattaaaaaatcaacatatgaaaggcatgtaaaagtagacaatttaaaatatataaatcacttccgtaaatccaataaatatactaaattactaataatcataataataacaataacaataaaagtcctggattctgattaatctacctcccagcaaagacattaggatccaagatgccaaaacgacctacaaattcacggaatggctttcttgtaggatatccagcacaactaatcctaatggcctccataaccccctgaaataagaaatttatcaattacattatgtacataatgcaaccaaacacaatcaattggtagtgacacaagaacatttgaaagaccacaataaaaaacataccccgcaacgaagctgctgcaaaatattgctattctcaaatatagagggcttcagaagattaatgggctttacacatcttatgtagtgaggctcagtaacactcaacgtttcaagcaaagactgcagttgttgctgtataaagtacaagaaagattgtcaccataatagatctgactaatatacccgaagatataaatattaggaaagaaaaacagaccttaaagcgagagc

SEQ ID NO: 139065 - DNA, 1021 bp, Cannabis sativa
  modified_base (671)..(673): a, c, t, g, unknown or other
cttaggagttgttcttgatgattttaattttattgaaaagaaaaacattaatgccaccaatcatatttctaagcttgaaacaagttgtaaagacctgatagttacagatccaatattaaatcttcgctcctaaaagaacaaacttcaaatacacacaatactaaactaattatttcagaaacaaaaaaaagttaattatatatattggttattttaacaaactagcttagttttcaaaagaagaaaagtagtttaatttttggacaaattctaacaagtaactagtaactagtaactagtaaacttgcaatatttaagcaaataaaaaactttttatgtatatataaagagtgagattgtatgaccaaaactggggtttgaggttgttttagagagggcattttcccaattttttaaaatgaagtagtaagagaaaataggggaaaataaatctttactcactcactcactccaactaatcaattagattatgttttatttatactgagcaagggcttgattgaaaaaaaaaagaagagattttaggatctatttgttaattaagaggctttgttaagtctaattaataaataagataattggtaattttatttgataattaattatagggtaaattgcagcatatatacctaatgtttcagattttatannnttaaatacctaatgtttatttttgcaggcaaaaatatctcatgttacaattctcttacacagttacactgttactaccactttcgttaactcataaatatggacacatgaagggttcagatgcattacagttattttattttattttaaaacttaatattcttaatatcagaaactaaatgctacttgtttcccattcaaaaaaaaaaatgctacttgtttaaaacaaacgtgttctcattaacaattttcacatgatattgacacttcaattcgataatcatgttccatatactatactggttcactcagctatgataatttagtattgcatgtctcttattttttt

SEQ ID NO: 139066 - DNA, 777 bp, Cannabis sativa
ttgttatttggtattttatttattttaatttgttgttgaagacataaaataactatcatttattttattttattgctagttatgtgaaaaaaaaaaacaatcataaatattaaaaaataaccaatcaaaaatttaaacaaactgcctaaaaaacgacaagtcgtttcagtaaaaatgacagactgtttttctatataacaacatacataaaaattatcagagcaatccaaatcataaatttaaaaagaaaattaaaaaagtaatatataaagtaattctactataaatgatggtgtatagtttgtacatggaaagaaaaatattaacaaattaacctacttaaaagttaatagcattaccatattgttattagtttaattaattaattaaatattagatattttttgattaaaaagtttttaccataaaatgctaatatcaccaatagaatgctaatgttgcctatatgcatttttttataagattgaactatagtaatgtattatgtggtttaaatttgataaatatttaaaaatttattaaatttaatacaaaatataacatgcgtcaaattttacattaaaataaattaataaatattattttttatttatttttatttacatatttaatagggtgtttatatactttgaataaaatttaatatatttatagatttttcacaaattttttttaaatattattttaaagtatatttgagcataattataaaatttatttcaaatatatataattttattttttaactaaatttaa

SEQ ID NO: 139067 - DNA, 1122 bp, Cannabis sativa
  modified_base (561)..(566): a, c, t, g, unknown or other
tgccataccacaacgaccttctcgtgagaacgacaaccatggtgggaggagtgagcgccctccatcccagcaaagacgacgagtaacaacctcacgtcgtgagaataggaggaataatgtaaccccctcctacacagcaacaaactaggagggatgcacaaggacctactgccccacgagacaatactgtagatcccccacggggagactcccgtgaggagaggggcacaacacgaaataatgggatcccaccatctcaaccacctccagaacctagggatattggtgtggacgagaggggaagagatcatgttcgaaaccctccttcaccaatcaggttccccccatcaccaataaggcatcctgagcctccacgtactaatgcaccagcaccacatcaaccagccccaagggagaggtcacgacagagggaagcacctcctagtcgccctccaagccaagacttgcctcgaccccctcaaaacgggcgagaggactaccgagacaaccatgcttgacaggtacctgataaaagtctaaatttgtatattttaagccttnnnnnntgtatgtaaaattaatttaattaaatattttaatggttttaattatataattattttaattaaaatatttaatttattttaattttatgttatttttcagatttggagcaccaatggtaaaattgcaaatgattaaagaaaaagcccaatagctcaagcttgttctcccttgcactctctctccaatcaagatacattaacttgttaaagctttacgagtcttcaacatcctaagccaaacattttttccaagttataactcatgccacgtatgaatgggttggctaattaaatggaagtttcactttcctattaattgacactaagctagcctatggtcggttttgaatatttcaacaaatagaagccatatctaagcacaacactaatgggccacgtctgccacttgttcctcatatttgcaaaccatgccatttctctagttctctcagctttcaaagccactttctccactaaatgaggcactaaaattctaatttgtgggagcaaatcttcactataaatagtactcttagcattgtaaaaaggcatcaga

SEQ ID NO: 139068 - DNA, 777 bp, Cannabis sativa
cggtgcagggcacaacagagctacgtaagctgagtttgaaccgtttctctaatatttagatgcatgtgtgttgtattgcagggtttgttgttttaacaggactatagcttgaatatttaacaatatgcatgaatatttttaatgtgtctacgactttgtgcgatatttatgcgattcatatgcgattttatttcattttccataactggtgttctgtgcgatttttatgcgacatgtatgcgactttgtgcgactttgttgcaccaattttttaatattttctttgcaatgcctatgcgatttctggcgacatttggcgatttactggtaacatgtctaatatgctatgctatctactttttacgatttttatgcgatatatgtgcgacttttttagcgagttaattgtcacgatttgtgcaagttattattacaactgtgatattatttgcgatgtctacgcgatataggtgcgacatttgagcgatttaacatttcacagtataatataatataattgcaaaagtttatgtgtatatatgaataacattacaaaaaactaccatgtcaagttctggtaaaataagtccacacaccatctatgtctaaaggtaagcatgttatcatcattaacatgctcaaacgatcggtccaacatgcagtgctcaatgtactccatagaaaatattccacaatcgccactacaaattaaaaaattagtaaatattagcaacaattaagttaagtaattcataatggagtgcaaaattaaataaa

SEQ ID NO: 139069 - DNA, 960 bp, Cannabis sativa
tttcattattttagttttaatgttgaaagtactacttgttgattttcatgattcagattaccgagttgattatctttaaatagattgatttcaacacatgtattttagacttgaattgagagtaaagcagtaatgcacacaaagatttacaagcttcatctgcactgagaacacatctcagccgattagtgcttgggttccccgaaccagggtaatctcatctactaattctcaagagttttgtattacaatttccagttcactctaaggaatttaatacaaactttacagcaattagtaatgaattaccaacaacaattaagaatcttgattgcaagtacacaatcccttgtgcagcactgagttcgtcttcgacacttctttaacctgaaatcctttcagatctgatgacgaagttgacactgaactcccttcaagctgaactcagcaacttcaggctctgatcgttctgccatagatgaccatcttcaagctatacaatcagacttgtagaaacaacaacaagaacagcaagaaacaatactaacacacacgatgaaactgaactaacccacaatatcgatttttatggataatctatttatagaatgaaaccgactatttatacccaacagaacagtccacctggcactaactaacacctaacgataagtcataacagactcataccaccttaacagtacgcaagtgtgcagatataacagactaaaaatccagacatgactagacattctattaaaataatctgtcacaaaataacgacacttacattctcccccttgacagattatgttcaatgactcaaaaaaaataaagactaaagacctcaaaagacacacagtaatcacagaattaatgcaccaaaaaaaatgtctttagaattataaacaaagcaacccataaaaccatatatcaaaaaaaacataagtacaaacatct

SEQ ID NO: 139070 - DNA, 1559 bp, Cannabis sativa
ttcctcaattatacataattatctagttagggttttgctaatccattcctaattccgggtattacagagacgctggctgctagggctggagttaaatgcagaaataaaatctcattttgctgaatatttcccttttaatgagtcataacgcaaaaaacacaattactacattgcccttaaggccaaattcccatttttaagtatataagggcaaaaatataattttcacatttcatacacaaataataaatttcagatttctcatataaaaaataaaatgccaattaaacatcctaaaattgtatttcggccccgaaatccgttcgacccgaaatacccggttgtgactataacgcgccaaattgtcagaacacacctgaaaaaggacagataggcacactatataataatatagtccataagcacataattaaattaaattcatagttttaccctacttgggtcaaaattactaaaatgtccctagctcaccaacgaggtcttaacatgtcataaatcataataattcacatataataaattatataataatataattccataattatacacagttaactagttagggtttggtaatccattctcttaatcttaagatattacagttttcatggtatgtctttaagtgcatatttatgtttatgaatagtgggtgatatatataagtatttgagtttttgtttattatatttattaaattttaataataaagattgttgttgtttggtggtggaggtgggtgattgtgagggttatgcttaagcaagtcttgaacagaaagatgcacctttttttgttgctaagtttttgctttatccatttagtagtgttttctcttgtgagcaacaaaatattaagcctatgctaatttaagagaataaagaaacaaaaacttaccaatttccaatttttggtataagagaaaacactgctaagttttttgttgttacggtttctgcttaatccattttttttatttaatgtacaatatactatactaattcttatatatattctttctataaaggtacatatttgtcccttaaaaatatttttattgtgcatttactgggtttgaatctttgttgttagcttttaaaattaaattacttagttgttccaaataattattacaaattgtgccttttggaatgtattcatgacatgtctttgggaactttattcatcacaacaaacaagtttcatatctttagagatattgttgttagttttataaaacatgcaaagaaaaaaaacctaaaaaaatgtctttgttaataatcatagtattgtgttactaattagacaattatataaaattatttcttgtggtaaggtacaaagattgtgctttcctgtaacaatatgtgtctattttattaattttatctgttttcttcataataatgttttgaatcgaacatatttaggagtacatgtttgtaatgaccgctttagtaatttggattagtaaaggcaattagttctaatttatgttattttatgattatttatgaaattaattatttgtggacccc

SEQ ID NO: 139071 - DNA, 1246 bp, Cannabis sativa
  modified_base (342)..(343): a, c, t, g, unknown or other
aataatttgctgcatacaaatttaaatttaactctaattacaaataaatatttatatttaattttttaccgtaataatattaagttatattttgaaactttataagtaacccttaaatgtcaaattattttttttattgatatatttaaattaatttttttaaaaaagaaataaaaattcatgatctggaccaatcaaagaaagatctccaagtgtcaatcaatttatttaatatttaacaatcaagtacttacggagttctaaaaatataacctaactattattgccaccaaaaattaaacttaggtatttatttacaactaagagttaaacttaagtatnnatgccgcaaattactcttttttttctcatttcaaaatatttttttttatgaatcagtataaattttattgctcacaacaatatttatataatctataagcaccttggcaaagtttgctaaggccttggtatatctatctatacataaactttacagttgttaaaccaaatctcatctttttgactaactttcttaggccatacaaagatgactctttgctttacattctctttgattttggcagttagatgtacccaaataggctcctttccttgccaaattagcccattcctcattttccacacatggtaaacaaggctggctaaacaagcagccatcacttcccttgaaaacttgctggttttggttcgattaatccacttggagacttggtttagctctgtcgtagcctgccctccccagccaagccattgtgcgacttccattagacattgctttgttttactgcactcaaaaaataagtgattaacagtttctacaccattgttgcacaacaaacaacttgaacaatcaatgatgccaaatctatgtaatctttcccttgttcttaatcttccttgaagtgccaaccacaagataaaacaatgcttgggtatgttgaaacgaccccatacttgtacaacccaacacttcctatcttgaggaggacaaagcagtctataacctgctgctatttggtattctcatttcaatattaattatcaaaataaggttaattaagattttcgcccctcaaactttacatgtatcaaattatgctccttgagctttgaagaccattaaaaattgtcgtgaactattgatattgttagatttaaggacttttgtctaattttaataagaaaagtctaacataaataaaagttcaagaggcatgattta

SEQ ID NO: 139072 - DNA, 533 bp, Cannabis sativa
  modified_base (230)..(241): a, c, t, g, unknown or other
tagaagtgaaatgaagattttcttttagcttggcttaatagagataaatggaagagctcttacactactacaaaattgggttttagctagtgacactctttagtgacccgcactaaaaggttaaggatgagttttagtgacacgcacaaaatgactctacaaattcagtgttagtatcttataatacgtgtcactaaaaatatgaggtgtcactaaagagaaactcccannnnnnnnnnnntttttttaaaaaaaaaatatattggtctatactgacacactaggtgcgactaggtaagtgtgtcccgacccacttggcgcgtcactatatccaactttatttttttttaaatacaactgtaaacaaaaattaaaaaaatatatatttaatataataataataaaagtcacgcttatctctctttctcaattaattttttatttttttcataaataatctttcttaatcaattaccatcatcactattctattagcaaagaaaataaacataaaaaaaaattaaataattaaa

SEQ ID NO: 139073 - DNA, 900 bp, Cannabis sativa
atttcatgacagatgttcctcactgaaattgaatcatatgtgctttgctgacgatcttttggttttcagtcatggagacttcatttcagccatgttgatgctaagagggctgaaactcttctcttcaacttcgggtttaatgccaaacgaacagaagacggcaatctattgttcaggcatgtcagatgctgaagttggaagaatcctagatgcctcacaattcaagcgaagttcccttccattcaggtacctcggcatacctatctgtttaaagaaaatttctcattctgaatgtcaaattttgctagagaagatggtaagtaaaataagtgggtggagctctcgaaatttgtcatatatgggaagagttaccttgataaatgctgtccttatagctattcatacatactgggctcagattatgatattaccaaagaaattgcttaaagaaattgaggcaatatgtagatcatacttatggaaaggaactcaaatgatgatgggtcctggtttggtggcttgggagcatgtttgtacccccaaaaatactggtggacttggccttagagatattcagaagtggaacacagcagccatgacaaggtacgtaagggatatagctagtaagaaagattgcttgtttgtcagatggattcataatgtatacttaaaagatagttgctggtgggattatgaagcccccaccgattgtagctggttctggaaaaaattaattggagtgaaaaaccaggtgaaggctaaggtggatcggcaaacttttagcatgcagaaattcagtacatcaaacacatatcacttgttgtttatcaggccggagaagaaggactggtgcaaacatgtgtgggatagacttgttattcccaaacacaagtttatctt

SEQ ID NO: 139074 - DNA, 547 bp, Cannabis sativa
  modified_base (495)..(511): a, c, t, g, unknown or other
actatgccttttcttctttttaatttttgtgatatgcataggagcacttgcactagcactttagatttaaaaacttattcattatattcgtgtgtgacctcaaacatttatatattaaatcgtaatagttcttgaatttaatgtaaaaaaaaaatacatagctcccgtataccatgtcttatgcataactcccgtatacgatgtctttttgaatgctcatgtaacatacatggctctcatgttccataatgtatgtgacatacatggctctcatgcaccatgattttttgtgaatgctcatgtaacatacatagctctagtataatatgtcttattttcacctcaagtgattgaagaaataccttcattggtcacttgccatacaaaattccattgggctttcttgatcatgggtcttagggagttgttacatgtgtgagaactcatccactcatacagagattcgtggattggcatgttgggttttatgccctnnnnnnnnnnnnnnnnnatataatcagatttatttattaatatagatcagaaa

SEQ ID NO: 139075 - DNA, 639 bp, Cannabis sativa
gataggcatttatataataggtaataaattgttaattattttattttttttttttaaattttatcgaatgaccttaaataactaaaacttattacatgactattaaagtaaatagactattttttttttctaaatgctaaaacaaatcggaaatacattagtatattctttttaggaatgtgcattgtagaagcattcaaaaatatttgatatactatcattctacactgattcactagtaacctaactctctaatatttttctagcctctatatctaatcctaatgttctttaaatatttatgaaatatataaataaggttagacaataaagaagatggttatttctagaaaaactatcttatgtataatcttaataaaaaaatataattgataatcatttttatgacgcctattaacttatagattgttaagtgataaccaaaaaaacaagtagcatattactatttgtccacatatttgttgacatattaaaagcttaatgagatgtattttttttaaaaaaaaaaactaaataaatttttataataataagacaatattaattaacaaaaaaaaattatttaattaaataaaaaacaaaaataaaaatgtgaaaaaaaagccataacgcatttcg

SEQ ID NO: 139076 - DNA, 535 bp, Cannabis sativa
gtataggtttatgaaacgacgaagtgttacaaatcgcctatacgacaaggacaaggtaaagatcttagagaacgacgattcataaactaaaacgacataaaatttatgagtacccttattttttgagtaatattttttttctttctgaaaggtaaatggaaatttttattaataggtaaattggacattattgacgtataaatctgtccaacactcacgggaggagatataaattaaagtaagtaaaagagagacatatgcaatttatagtattgaaacacataggaagaaacagcacaagtatgcacaatcaaatcatatcgaaaacaacaatatcacctccaaacaagagcaagctatacataattatttctctatttttcattgaggagtatttgttcacaagagtttctccagaaaaaagttttcatcgtaaatataatacaagtacctgttgtgagtgtaattgtttatccgaagtaaataaaagagagacacatgcaatttatagtattaaaacacataagaagaaaca

SEQ ID NO: 139077 - DNA, 683 bp, Cannabis sativa
  modified_base (629)..(640): a, c, t, g, unknown or other
ctattagttgtttgggttcgcccgactgttatacttagtttgtatattatacgctaagtgttttcatagtcattatgcatcgcgtacgtcgtcttcccaggcgtaacgaagttgatgtctctcgccttgtgcatccaatgtcgtatggtttcttgttaatacataaggcaatagtttgtatatctttatctcgcataggaccttatagtcagcaagttgcaaatatactcggtcacttctgcatttaatgagttattctattaaatgtaactaccgttgcacgcatcgacccatattttccttaacttgacacgtgtcctctattgaaatggtagccaaattttgggtataacaattgcctcttaaaaggttctttttaataaaaagtactttttaaatgtctaccagagtgtatccgtcacaatccatttttcaagaccacgcatgccctcaattttaacggctccacggtttcgagggtcattattaacattaatgaacttcgctttcaccttctacctcattcccaactgttagatttcccaacctttggccattccattattgggttctgagtataaaatgatggcttggtttagccatgttccatatgttgggttttatgcccnnnnnnnnnnnncatttcaatgtaatccatttaattcaacatcaataaagaaaca

SEQ ID NO: 139078 - DNA, 2038 bp, Cannabis sativa
taaaaaaataataattaaaaaaatgtcatcacgagagtttcaatactagaagtaatatttttttttttctttacttatatttaatttaaaatttcaattaatttaataattttgaaactctatcatatcatattaattaatttttttatatatatatttggattcaatttaatctccataataactcaaatccaatccaatctacaaaagtacatattgaatcagttattttagattagttactttttaatattgaattacttaaaaattttaataattcttttttttcttcacacataactaacaaaaaaataaataaattgttgttggtttatgtctctgttataaccatattttgagcaataatatagtgttgacacgtgtaagaaaaaccagctcgtgttataaagcaattaatgtattcaataaactcgccttaagaaatgcatgtggtagaaatattcaaactcacattttaaaagataagggcgagctatgaataataactaccgattgataaaatttgtaaaatgaaagatcaacttatagaaggttcatctcgagaaatacaaaatacacaacagaataaaatgcctggaaagggtagataatgaattatttacaaaacttgcagctcattgactcatatactcgcgagtattgctaagagacaaagggtcacattcctagcatgattcatctcaaaattatcatattgtgatggtgtcttgcatttgcttcggctaacacttatggaaggacgcgggtattacttaaagtatacttaggctctgaaaatcgtcttcaaaataaagtatcttgagaagattatttgtgttataaaatttcaaaaaaaaattgtataagaatttttccataataaaaaattcaattaatatactatcatataaatttaaaatagtttaattaattaaaataaatttcaaaattgaaaagaacattataaaaattgaattttgtgggatcctgaactaatagtggatttggattgagcatgtcatcgtcgtggttgtggaaactaaagaaacaactgtcccgctgaatcatttactttgtcaaaatatatatatatattggtgaagtatatatcgatcctttaatataataagcatcctataagcttctctatcaggttgttgtctccctatcgactaaacgataactcgcccttaaaggaaatacccctctatacaatcttaatgtgccgacgagatacaatcttataataacctatcttgctacatgttacaattttgattgcacgtcatacaggtcaaaatttgggataacaattatattgtgcaattgttgatcttaaaatataagagtagcaattcgataattcactacgtctaaaacatctcatatagttatccaaagttctcatatactatccaatttgaatgagttcaacactaatcgagatcattcagattttttatagtgcaaattttttcatctatttattatgtatgcttttcttgacaaagagccgtaacttttcgtttgaatgttatttattaatgcatgcgttattttattgttcactattataattcatgcaatacaactgtcaatatatattaacaataaaaattataagacttcccaccacgataattgtagcttagaaatataatttttccatacattattgttcaaaataagaattttaaattaataaattaatttaaaaagttaaattaataataaataaaataaaataaagcatgtctttgcaaggtagcaattcgatcgtttaaaatgtctttgacgctcttcataattatctaaagttgtaatagaccatcaaatttgaacgagatcgacagtaaatcgagatcgttcaaatatttttttagtggattttttttatctatttatagtatatatatatatatatattttgaaaaattttattattcaatttttttagatattattattattattattgcatgtgctattttattgttcactattatattttatttaatacaaccattaatatatatta

SEQ ID NO: 139079 - DNA, 598 bp, Cannabis sativa
agttattgttagcatattgttttcagcaatattccttttgtataatctgctgccatctgtcccttgtatccaatggctgtaatcatttgtaaaaatcttaaatagcaatgaattcactcatgctcattgagctgagatttatcatcatcatcctctgtatttcttttactctctcacttggtatcagagcacggttgtactctagtcatggcatctgatgaatctcagactccaggaagaacaccaggacaagcttcacaagccaatctaggtcttgtgtcgtcaggatcattttctgcaagttctgcaacaatagctactcctttcaacaacactttaagtcagccattcaccatgaagctcgacagaagcaattttcctttgtggaaaacaatggttttaaccattataagagggcatcatctggagggatttctcaatggtctaaaaccatgtcccttagagtttcttccttcagaaaatactgaagctgaaatccctgttccaaatccagagtatgagctttggattacacatgatcaactcttaatgggttggctctttggatcaatgacagaaggcattgcctcagaagtca

SEQ ID NO: 139080 - DNA, 1648 bp, Cannabis sativa
  modified_base (205)..(208): a, c, t, g, unknown or other
  modified_base (1608)..(1616): a, c, t, g, unknown or other
caaagggagaaagcatcacagggattaataaaaaattcaagcggtccttccattctgggaagaagggttgaagacgtgccacaccctagtaatctttcttgcacgaaaaatagtgtgcacatgagattcattttgaatttttatgaagcaagctttggcttccgcgaaggaagataaagctgcataaaaattcaagcttagactnnnnttgaaaagatcaaagggagaaagcatcacagggagtaagatagacttcaagtggtccttccattttgggaaggagggttgaagatgtgcgacatccccagtgatctctcttgcacgaaaataacatgcagccgagagtcatgttgaatttttatgaagcaagctttggcttccgcgaaggaaggctaaagttgcataaaaattcaagcttagacatcgcttgaaaatatcaaagggagaaagcatcacggggagtaaggtagatttcaagcagtacttccattccaggaagaagggttgtacccccatgatctttcttgcacgaaacaatgtgcacatgagagtcatgttgaatttttatgaagcaagcctcgacattcgcgaaggaaggctatagtggcataaaaattcaagcttagacttttcttgaaaagatcaatgggagaaagcatcacagggagtaagatagacttcaagcagtccttccattctaggatggagggttgaagacgtgccacacccctagtgatctttcttacacgaaaaacaacgtgcatacaagagtcatgttaaatttttatgaagcaagcttcggcttctgcgaaggaaggttgaagttacataaaaattcaagcttacactttaatagaaaagaccagagggagaaagcatcacatggagtaaggcagatttcaagtagtccttccatttcaggaaggagggttgaagatgtgtcgtacccccagtgatctttcttgcacgaaaataatgtgcacgcgagagtcatgttgaatttttatgaagcaagcttcagcttccacgaaggaaggctaaagttgcataaaaattcaagcttatactttgcttgaaaagatcaaagggagaaagtatcacggggagtaagacagacttcaagtgatctttccattttgggatcaagggttgaagacatgccacacccccagtgatctttcttgcacaaaaacaacgtgcacgagagagtcatgttgaatttttatgaagcaagcttcgacttctgcaaaggaaggctgaagttgcataaaaattcaggcttagaattttcttgaaaagataaaagggagaaagcatcacggggagtaaggcaaatttcaagcattccttccattctgggaaggaggattgaagacgtgccacacccccagtgatctttcttgcacaaaaaatagcgtgcacgcaagagtcatgttgaatttttatgaagcaagcttcggcttccacgaaggaatgttgaagttgcataaaaattcaagcttagacttcgattgaaaagatatagggagtgagaaagagttcaagcgttccttccattccgggaaggagggttgaagacattgttgggaatattttacaaggatctannnnnnnnnacaagtatgttgattaacatctgaaatatgaa

SEQ ID NO: 139081 - DNA, 569 bp, Cannabis sativa
caaactctggaaatagggaaacacccaaccacagcatagaatggacgagaattgaggaaatgaaaggcccggggaaccctaccaaaaccagctattcggttacctggtttgcactagttcacccaagaaatttcatttcttgctcagtcctcaaccaaatgctaccaaactgtccatagtacctaattagggtatacacaacatattccagccaataaaccaaagaaaaactcactgaatcaaaacaagccattagggatcaaagttaaggtttctatgctcaaacttgcacagaacctaaatcaaacattaataccagcagctaggacctaaaaccaactcaaattacgcttagaattcaaaccctaagcatccctaaccctaacagcccctatatcacaaaatcacaaactcacaacaagtaaaaacttaaaaattaataaagggtgctactagggcttaccttagctccaagaacacttgaattccaaggtgaattcgagacaaaataatggtgaaaagaggtgatctcccctggttgcttcagccgaaagaaagaaagagagaaa

SEQ ID NO: 139082 - DNA, 665 bp, Cannabis sativa
catcagattcacatcaacaaatctagtaccgtaaaaatatctgataaactaatactgaccgatgtgttatatattccagaattcaagttcaatttattttctgttaatgcttatcttgaacattgtcataataaactcacatttacttttaatcaatgtttgattcaggatccctccctgacttctacgattgggatagctaagaaagttggccaactgtttttctttaaacaagagcggcattttctcacttccaatatttctatctttgcaaacactacttgtactttgaaggatccatggcatcttcaccttggtcatccttctatgaacattactagtatactaaataaaattttgtatttatgtgaaaaaccttttggattatatatgcttaatatgtcattttgctaaacaaaaacgacctctatttatttctaacaataattttgccactgctgctttcgatttaatacaccttgatatatggagaccttttcatattattagcattgaaggttatcgatatttcttaactattgttgatgatttttctcattacatttgggtttacatgctaaactctaaatctgatgtctcttttattattccacaatttttttcgcttattgcaacacaattttcagttcccatcaaagcagtgc

SEQ ID NO: 139083 - DNA, 782 bp, Cannabis sativa
tatgaggaaccgcagcagtaagttcctcactggcgtagtccacgccctcaaccaggacgtcatcatcagcatcaactggcttctcggcctcattgtatccccatagtgtcggggttcaacctcctcctcttcctccgccacggagggactgctaggacggacatcgtcctactccttaatctcctagacctcggcgttcccttcatgatcctcctcctcctagacgactagatcttgtttggcgctgggtaaggtggcgtgccgggccacttgagtgtcggatgcgtcgaccctatgcattgactttttggtacaagccatcatcctatggctggacgaaagacttaaggaagaatgcctgtcactcgaagatgttgacctaaaacgaagacgatgatgatcctcttgcaagagttgaagcaaatgctggtcgattttgtgttcgcttccccaaaactcacctaggttcatctacaaaaaacaacacacaagatgagtgtttcatcaggatatcgaacgttaaaacgggaaaatatgcggaccaggagtactgaacaaattaaagaataagaatattcaacgaaaggtcaaaattcaggaagttgaaatttctgcgagttagggcaaaaaattttcatgaagcttagaataagcaagataaaagacaggaattatgaagtttaaaaagcaaacattagggatgatgaaatcgcatgaaccgtaacaaaggaaaatcgcagagtttctaaacatagggtttcctacatatcttctacagaaaa

SEQ ID NO: 139084 - DNA, 748 bp, Cannabis sativa
aaaaaaaaaaaaaaaaaaaaaaaaaaaactccattaacgaacaaaaaagctccattcataaacaacataacatcaatcatcaatcaatcattcataaccaaaattgtttctcaaactaccgacaagatctgcaaaaatcgttttactatgattatatataagattaaagtcactaatagaaactattctcaccaacaaaaactccattaacaaacaaaaaatctttggttacaatcgccacaagatcgatcatgagttcagtaccgaaatcgttcctcaaactaccaaaaatacctaaaaattagagacaaaatcgttgctagataaaggaacaactcaaccgacactttaaaaaaattgattcaaaaattgctctgttctactgtatgatttttatttttcttgcgtttcaaaagtaactttttggttacttatgatattgataagaaactaattaattacttttacgtaaaaaaaatattgttgttattactgttccatcttttctaacaatatactataaataacatcaatcaactaacatctacaatataattagtttcttcatcaccacgaatttctatttttttttttttgaatttttctgcatttcaaaagtaacaatttggttacttatagtggcgataaaaaaattaattagttacttttacataaaaaaaattatttttatatcatataattttagatacaatttgattacctttaaaatttatttgtaaacatctta

SEQ ID NO: 139085 - DNA, 1032 bp, Cannabis sativa
  modified_base (46)..(48): a, c, t, g, unknown or other
  modified_base (295)..(296): a, c, t, g, unknown or other
  modified_base (1000)..(1006): a, c, t, g, unknown or other
aaaaaaaaaaaaaaaactgagtttaaatgagaattatgtttattgnnnattttaagttattttgaaagatgttcatttaaaattactaatttatttaagaataaatttaatttaatacaacatataatttatatacaacgtgcgtatcacgtgaaaacttcactaagtatctagtacaaatttaaataatctatgtgttttgggcttttctaaagtaaattagaaaaaaaaaaatcaattattgatttttttattaattactattatatccttttatttaatggcaagaataatnntaattttttcaaatataatttgatcatataaaaaaatgacaatataggcatagattagagagttccattttgttatcattattagtaattgtttttacaatatcatttgtaatagatatatataaatagaatactttttaatgggtattattaagtactaaataaatttaactataaatattaattttaaaaatatttaaccattatattttagttcgatagcgaataataaaagagaaatttgaatttttatgcttaatttaactacttaataaaagaaaatatccaaaaatatctcttttttacactatatcaaaaatatatttgtatgaaaaatatttaagtcaaactcaactttttttatcattttttttgtcgaaaaactttttttttattatttttttttcagctgatagaccaatctcagtccaatataatgtaaaaatgagaaatttttctaattaaatataaaaattaatcataaaactcaaaattttctaatattacccattcatagataatactcattaagaatacacccatatataattatacattatttcaactataataataaaaatataagattaaattatttaaatctccactatcaaatataaaataatataggaaaatttatatcataatttttataaactaggtttcataatatatatgtgacagtcagtagtcccatgatccgnnnnnnnaaataccgggtaagctgtgcaatccc

SEQ ID NO: 139086 - DNA, 834 bp, Cannabis sativa
tagagtattaagctcaaaacaaattatttaataatccaaatcactctaatattttcacctctgtctcacttgatggaaccattttggtatgtatattactttaaaaaattttcattatgcaatgattttgttagaagatattaatggtcctggttggtcgggtttttaaaaactatttttagattttttagaagatattattgatatgttttttttattataattgtaaacataaaaataaatatagccaatattatcatatatatataatcaataattattaccatatatatattataaaagaatttaaaaaaaagtttttaattatatataaaaatgtatgagaaaatgataataagattttttgcacatattttataattaattaaagtaatgtatataaaattgtaaaatgccctaaataatatgatactaattattggataattattatattgatttttaattcattcatgactctaacaagtttatacagtggaactcttactatatggaaccaccaatcccatgtaagggcctaaaaatggacaattctctaatttccaaattcatgtaataatttctttcatttgaaacattcttctaattaataacattgtttgctcacattgtttcagaaattagaaaaatctttcaaagtcacaaactcaccaggtacataacattcattaatacaaattccaaaccaagtgatgtcatagaagttcataactagcaaaaactggattgtgcaaaaattgaactgttcttgtttgtttgggttgcagtgaagccagtgcgcaatgattgttacaaaatttattaaggtatgtt

SEQ ID NO: 139087 - DNA, 986 bp, Cannabis sativa
gcatgattagccttttgatcataggtcaatcttctgtgggacggaggttctagttctacgggcaacatagcttcataaccataggccatagctaatggagtctgttgagttgttattttttcagttatgcggtatgaccatagtacttttggcaattcctccggtcagttccccttggcttcttcaaatcatttttttcaaagtatctttaagtgtcttattgactgcttcgacttgaccatttgcttaagggtgtgccactgcagagaaactttttacgattccatggttcgtgcagaaattcagtgaacaattgactatcgaacaacatgccattgtccgagactattttgtacgggagcctgaaccgacatattatgtttttcaccatgaagtctaatactttcttggatgtaattgttgccaatggctcggcttctgtccactctgtaaaataatccactgcgaccactgcatattgtactccccctttacctttaggttgttgtccgattaggtcaatatcccaaatagtaaaaggccaaggactttgcatctaagttagctcattggacggtgcacgaaatatctttgaaaatctttggcatttatcacatttctttacataggcctttgaatcttccatcatggtcgacaaaaaatatccttgccttagtattttctttgataagctttgcccggctgcgtggttgccacagaatccatcatgtacttcaaataaaagtcgtgtagcttcttcttgtgtaacacatctaagtagtggcataaagaatccgcttctatacatgactccttctacgatgatataccgtacatctttccttctcatctttcgagcttcatttctatcatttggaagttcttcagtattgaggtaggttgatattggtgtcatccaatttggagctgtgtcaatcattttaatttcttccgcacaggtgatgctaggttcttcaaggaattga

SEQ ID NO: 139088 - DNA, 1013 bp, Cannabis sativa
gtaaaataaattccaacatatataactaaatataatcttgttcctccgcactcgggttgcccaaatgtgattaactaaagccatgacaacctgaggcccttcttcctcaagcctcttccaatgtgatggaggtctttcctcggtcaacctcccctccgatgtagtgtttaagtcgctgcccattcactttaaatactcttccggacttttcattcttgacatccacagctccaaaaggatacaccttgacaatggtgaatggccccgaccaacgagagtttaactttcctagaaacaacttcagccttgaattgaataacagaacttgctgcccttcttcaaatactcggtgttgaatcctcttgtcatgccatctcttggttttctccttgtacaacttagcattttcataggagaaaaacctcatctcttcaagttcatttaattacaacattcgggcttctccagcagcttggagatcaaaatttagcttctttatggcccaaaaagctttgtgttcaagctctaccggcaagtgacaagccttcccatacaccaatcgatatggggacatacccaaaggtgttttgtatgctgtcccgtaagcccaaagagagtcatctagcctttgagaccaatccttgcgactaggattaacaactttttcaagtacacccttgatctctcggttagaaagccccgcttgcccattggtttgaggatgataggcagtagcaatcttgtgtttgacattgtatttagctaacaaggcagcaagtattttattcacaaagtgagtacctttgtcgcttattaatgcctatggtgttccaaagcgagtgaaaacttacttttggaggaattttatcaccacttttgaatcattagtgggacttgctactgcttcaacccatttagagacataatgcaccaccaacaagatgtatagattgccataagatggtggaaatggccccatgaagtcgattccccaaacatcaaaaagttccact

SEQ ID NO: 139089 - DNA, 979 bp, Cannabis sativa
cgatcttacttatcactttattacttgtttgactgtgtatacttgcgtatatataattttcacaacagacctacacggatgacatcaatcgtcagatatctataatagctgctcggttaaggtctttacaaccaaggctggagttgaaaagtccctatccatacagacatctgtacagatgttcgtacagggacttgggggaaaattcaatgactggacaaatctgccttgcacaggatgtcaattgtcaggggttctaaaacagttaagcaggaccgaacaagggagaaatggctagccagggaaccctagtcgaaccaaaccctggccggccaatgaacttctgtgtgccgacaatggccctaaaatagggttggcctaccagcatgtggaaataagcctcaaatagaggctggatggatggtggggttcacaagctaaaattcagttacgagacagccttaactgaccgtggaaataggggatcatctccaagctaatatctacctatcctttagggatattaatgatctttttttgcaatttaaatataagatagaaaagcgattttccctatttcgaggagatatttatccattttgaataatgatcttttgtaagccttgaattatataaagggcattagggaaggtgaaaaatgattaaaactctaagggctcgtttggtacgacgtattgtattgtgttagattgtgttgtattgtattgtattagtattatttaatacaatataatatttggtattgacttgtattaattgattgtgtaaagttataatatatttttaatacactctatcccaacaccaactacgggtctgagttctgggtccgagtcccgggtcccagttcccgggtctcaggtccgagtcggagactggtgttgaccccaaatcttttgtaaatattataatacaagctaatacgtaccatttattatgtattaaataatacaacata

SEQ ID NO: 139090 - DNA, 600 bp, Cannabis sativa
atactcatgtgcaatgaataatctcaatatgctatcatatcttcataattttactaaatcaaaatgaaataattgtaaatatcaaaagatttcaatgcttttatcttattcaaattctcatctagttgattcaaagaatcccatagatcctgaaaaaagaacctcatcactccatgtttgtattttcaaactctgaataatttcttctgatagttgaagttgtaccatttgtgaatcaaaagtctttttgggagcatgttttgaaaagtcatgatgacaactctaacaacctgtcatacatttttcataccattactaatatgaatcttaaaaaacaaaagataataaatatggtgccaagggccggtcctcggaatatatgaatcttaggcgaattaaatttttgagctcacactctcaaaaatatatatgtatatgtataagaaatatttaaaatgtgttgtaaagtccttttttggcaagttaggtgacaaaataatttttccatttatggtaagattgctatgcattcattttcgatttctcaccttataaattcggtttttagttgcccctttccttagttggaaagttgcactt

SEQ ID NO: 139091 - DNA, 845 bp, Cannabis sativa
  modified_base (356)..(360): a, c, t, g, unknown or other
  modified_base (733)..(741): a, c, t, g, unknown or other
tgctgcaaatcctctccagataacgtgatctgggtacgtggtgttatgaatcccttaggcataggaattgtgattatatcacgtttatatttgagtctcagaaattcaataatcatccattttagcgatttagggatcaaatccatgacctttcgtgagaataattcatcttcttcatcatgatcgccttgtggagaaggcatgggacatttccccttcgacacatcacatcttgaaggcagttgagcgagtggaccctatacaaaatacgccataatatatcaaatttgatcctaattgtaccgaaattttggtagcataacggttgtaattgaatgcccccaaaaattttaaannnnnctatataatgacaaataacacagatataacagttgtttattcatccatcccaccacagcacatatattcgcagaatctacttcactatggttgaatattgaagatattcaaactccgctaacattaataattaatttataacaaaagttaccttgggtgttgtaataattgagctcccatatttcttcaataatcccataatacgtcatagtacctaaaatagggtttctatcttttgcacttgcaaaatgcatggtttctacgacgatacatatgccactattttgaacctttcgagcatcatctcttgactttgtatggaaacgtttaccccttacagtgtacacgtcatgctttgctaccgcaaaagttnnnnnnnnngcaatacgactcaacacatcagatactccatgattcggttcgttcaactttgctataatggtattcctaaaccactaataaaagtttgacgatgttggtctgca

SEQ ID NO: 139092 - DNA, 553 bp, Cannabis sativa
  modified_base (123)..(124): a, c, t, g, unknown or other
  modified_base (349)..(355): a, c, t, g, unknown or other
aaaccctcccactatgacaagttaccgtgactttctgtctaagaacactaaaggtattatcctcatcggttgtatcaagataacagaggcagtgttaccatcttatatatagaataagatganngaacacttttggaataaaaaaatatctcctctactttgctactttatttcagatttagtcatattcttagaaaagtagtattttttgaaacaaacactttcttatcttaatgaccataggatggtccacgcctaatcacttagagtagctatcaaacatgcaaacctaagttaacattctagcttttttaaggtcacgattaggacatccatgaatctagtaatnnnnnnnactaagtacacaaccattccattattctgaaattttcttattagtatggtattccctagaatgacttaggcaactactagtaactaatcgtaaacctttcattaatatgcaaatcaaatttctggggaggtaagttcgaatacaattcaaatttcaacttaatgatctttgaactgcatatccaaatatttctccacc

SEQ ID NO: 139093 - DNA, 559 bp, Cannabis sativa
taagcttatcaaaaccacattcatctatcaaattagcattgtgaagctccaacatcagggctcttggatatgatcggaagttgcaaccaaagtcaaattcaagtacacctacagttatttgatacctcttcatgtttctagagatgaaatcttttgacaaataagtatcatgttggattttcaaatatagcgtgttcagtcgggtcaaaatctttagctctgcaagactgacattacttctttcactgctgactttttccacctcccatgctatctccacatctctcatgtacagctcttctaaatttttcaagcttgagataacatcaggttcaatcacctcaagatcttcgcaatcatctaaatttaacagttgtagatgagttagctgactcacctgttttgacaatgttttaaatctagaccggaaagatctagacattttaatttcttgaaacctcccaaaaatgacgtgtcttttaagtcacaattgtttagagaaagagtttcgagactctcaagtagacaacaaaaggatgaaggtggtgagcgtagatca

SEQ ID NO: 139094 - DNA, 553 bp, Cannabis sativa
aagtataaaaattggttctgtttttgaattcattagcttatgcctattattgttcttatatctccctccctattgatgtttatttgactcattgatgaattagaataagataatataattactttgctcaattagacttatttatttattgagataccaacatgtaggtgcgctcccatatttttaagtgctcttaaggtaatcttggtgctttataaatccaaaaaacagaggatttgtttttttttatcctttaaatcatttaaattttttgttttagctttactcagtgtgttcaatgttgcaattgcagtcactgttcaaaaacttgcaaccggagctcaactgtattcggtgccaaaagttggattgctcccgcgtgtcgatgataatggcgttattgtcccaagacatgttccctgaagttattaccaaaattctgtctcatctagctgtaagcttgtgttttcaaactgctatgtattttgtgagaaacaagctatcgaaaaaccatttgtatggcccatgtcttccaatttcgtagttgtcttat

SEQ ID NO: 139095 - DNA, 979 bp, Cannabis sativa
  modified_base (635)..(648): a, c, t, g, unknown or other
tttcatacaggaattaaagtttgcatttttgtttcattgattgaaaaatattagtagaaagtttatggaatgagaattttgaatatatgaaaatagaattgaaaaatgacatttgaatcgagaatcaacgtttattgttaatctttatgcaaaaaaaagtttattgttaatctgtaaagataatatgagtagaagaagacagaaaatttgatttttatttcatctaatatgtatataatgtttttttttttgaataatatgaatttttttgaattagttttttctaaaagaattattagtttggccaatactatatttacatgtgacactttattgatcaactaacagatacattgagtgttaagtttagaaatttgagattattaatcataactaaaatgatgacatcaactttatatgattggaatataaaaataatgcattatgaaaaaacttgattcataatctcagacctgtttcatcttctacataatctcacacctgctattttttttttgttcaattcataatgtttgattcataataaattttttatataaaaaaatatttttcttatattctgccgagtaaaaaaaacttcacacatatgtagttatgaatatatatatatatannnnnnnnnnnnnnattatttaatttaatattattaatttagtttttttaaaaataatttatttaagatagatatttttatagaaaatttattaaaataatagtaaagtattaaattgtaaatttatgctctaataaaatattaaaaaattgagagaattaaggaaaaaaaagaaaaatagttttaaagagattttaaaccgccacatcactacttcatacttctcctttatatatatttatcaatctataaatatagattgataaatatatatttattattattattttattaaaatataaattttttagggtaaatggcggcaaaaccctcaaaattttcatt

SEQ ID NO: 139096 - DNA, 1167 bp, Cannabis sativa
attggaagcttgattatataggctcatggtccccacactagttgacataatactgcttgtagactcagttaattggttttaattattctattataattataagattagactatgtcttatttatgagtttccactaagcaatggattaattgtgaagaaaaggggttttagggtttatttgttaattaagagactttgtaacgtctaattaataaataagttaaatgacaattttatttgataattagttttaattattaaatagatagttttgacatttaaatgattgaagttagaaaatatggcattagaaagaaaagataaattattgtataaaatgacaaaattgtaactagtgtggcccaatgtattgccgaccacttaagtgtatttttagctagttttttttttttatttatcttttttaattccatataatttaaatctaaccctaggagaaatcctatataaggaataaggtggctctcattctcatccatctttcataacctagttttcattgtttagtcagacaactagaaactgagagcctctttctctagattttgaattttccttcttttccttttcataaatttcgaatcttttagtgatagagtacatgtccacacatatcaagttaattactcaatcatagtatggaagattatgaagaatccaacacctgaaagagatctaagctcagatcttattattactctgcgacagaaaggaacaagggttagagatttgagtagaaggagtcatattattctgctgccaccatgtatggttttattaactttatatgtatttatttttattgtttaggaattcatatttagtgtgttagattatagaatataatcaacatacatgctagtaaatttaaatcctggtacaacatccaacatcaatatctagagttgttcaagttagatttcaaggacagcatccttttaacaagggataattgtaatgaccgcatgattagacatagaaattaacagattattagtattatattaataattaactagtaaatcatgattatatgtgcatttttatgaaaataagtcctatttttaaaaatatgcatttgtaatataatttctcaattaaggagattttattgaattctaggtgtgctatatatgttatatataa

SEQ ID NO: 139097 - DNA, 732 bp, Cannabis sativa
cgttaaaattataatctaaaatatagccgttaaaatataatcattaaaatatagccgttaaaatatagccattaaaatagaactgttaaaatatagtcgttataatatagccgttaaaataagccattaacagtcaaaatgtggttgttgaaatgaaatagtttaaataaatgataattcatttgataaaaatatagtcgttacaattagataagaacaatacataagaattacaaatttaaaataatacataacaattagataaaaatacatatgaattaaaaatttataatattagtcttaatatgagctaccgagttttcatgatcttttttttgctcaggagtcatatttgatgtgtccaagaatagataatccatgtatttttccattacttttttttcttgtaccggcaccaatttctctaatgcatttacttttcgttgattaatatcataaaatgtagcaagttgctcatcttgctttccctttccctttctctttgccgccttttggccaatagggcgctcttcatgaacttcacgatcactgatgtctgcattggatgatgaagtatatgcccctcatcttgacacttttactctcttaataccttctgattggtacattgcattccatttcggctcgtcttttaacaatctccaacagtctacaagaaaatttgaattgttattttcagacttgtacatctcatgtgcattctcaataatt

SEQ ID NO: 139098 - DNA, 697 bp, Cannabis sativa
  modified_base (618)..(619): a, c, t, g, unknown or other
attaggggattccccgccccattcccgctcccattaggggattccccgccccatccctgcccccattaggggattccccgccccatcccggataagaaataagcgaggatgtggattaaaatctttaacggggatggggacggggtggagcactctccccaattccctgccccgtgtgcatccctactaccagccctcctatagctacctcctcctccaatcatagtcatttagccccgataagattctattttctttgttattaattggtatatatagtaaaaatactatatattatccttaaaagtgagcattaactgatatttatttgtgaaattattttagtcatttcactttttcttattttgttagactcttttttttcgcaaattggaagggaaaaaacttggtgggtaccacaccatatttttcttctcatttttcgtttctttttaatttttcttaacaaataattcaatttcattttttcttctcacttttctctcctttcttttgctttctttcacttttcttttctctaccaaacataggaaggtatttactttacaaaatacaaaattaaaaatacatacatatatatgagtgcacttttaatgnntattacccatgaatggataaaattagaaaattttgagtttttatgcttaattttttttatctaattaaaaaaatctct

SEQ ID NO: 139099 - DNA, 635 bp, Cannabis sativa
  modified_base (182)..(188): a, c, t, g, unknown or other
atccgagccttgatcttgtctataactccattggtcctctaaactaattttggacctaagtacttcctttctccagtttcatcccagtgaataggggaacgacatttcctaccatatagcatctcatagggagccatccctattgtactctggtaactgttgttgtaggagaattcaattannnnnnngtacttactccatgaaccctcaaactccatgacacacactcgtaataaatcttctaatatctgaatagttctctctgatttctcccatcagtctaagggtgaaaaattgtactaaacttcaacttggtacccatagccctatgaacactcacccaaattttcgatgtaaactttggatccctatctaaaacaatggatttaggagctccatggagacgaactatctcctttacatacagttcaacgtactgatccactgtgtaggtaattaatcttcactcgtaggtagaaaaatgagctgactttgtgaatcgatccattatgacccatacccaatcatacattcccgtggttcttggcaaaccaactacaaaatccattgcaatgtcctcccacttccactcaagatgggctaatggttgcaacaaccctgccggcctctgatgt

SEQ ID NO: 139100 - DNA, 518 bp, Cannabis sativa
  modified_base (419)..(425): a, c, t, g, unknown or other
  modified_base (490)..(493): a, c, t, g, unknown or other
accctcctggatgacgtcatacatcgagtacatctaagaggggaggttgcccgcggataagaaagagggtcgaagaatctagtataaagtcgcgaggtatgtcctgatggatggagttctatacaagagaggatactccatgccactcctgcgctgcataagagaaagtgaagcacattgtttgaaatacatgaaggagagtgcgataaccacgcaggaggatgttcaatgtcaaggaaggtattagaacaaggatactactagcctagcttggagagggatgcaatggcattcgcaaagaaatgtgacaaatgccaaaggcatgacagctacagtaaacgtcccccagctgagctcataagcatgaccagctcgtggcctttcgccatgtcgggaatgttggaattattttactaggnnnnnnnatttactaacaagtatgttatttaacatcctaatatgaactactaaaacgatgaaataaacacannnnaagtataagaaaccttacagtggtt

SEQ ID NO: 139101 - DNA, 1084 bp, Cannabis sativa
ggtcaatgtgtatcagtttttagtgttaaagtttttgaccttttaaaaaaaaaaattacaaatttcttaatgtgtacacctacaaattttttgatttgaccttgtgctatactttcaaatatcacattcaattttgtagtcacttaaaggtgattcgatatacttacattttttaagtctaaatgtgaaaagaatgtattagtcccatcactaatgtgcagaaaaataataccatatattagatatataagttagttatgtgataattaattaattttaagatagaattcatgcaccttcatcttaaattctaacgtattataaatctatatttatatatctatataaagaaacaaaaatataaggcagtcacatgtcgccttttatgaattttattttaatttttttatattttttatttacttttaaaattttattaatttttatttagtgagttattttggaaaaaaattcacattgtcaaatgttatggcttaatgaattagggtgagtcatttattttattttttaaaaataatggaaaaaaaaaaacgattgtagggtcataattattttggtggttaatccatcgtattcatcaataattttcagatttaatgagaatataaaattattgccacacaaatgttatgatattattagtacgtactataataacacaagaatgtccagcaacacgtggcatcctacgagaaaaaaccccaatcagcaagataagtctcttttgatgcaaacccattctccctaaaaacaatttagagaatgaaaagtagaaggcagttatatttacaactcataaaataattagaaaataaattgtactttgtgagcagttatttaaattttttactcataattttaataaaaattaaataaaagacgataagtgaaaaacgttaccaattgttaacgcaggttttcgttaaccaaatttgagcctcacagtaatgatttcacatagaaaaaataaaagctatacaagtcaaagtatgaaaacagggttttttacgtggttttgcagttaaaattctgcatagtccaccagtcaatcttattcagattt

SEQ ID NO: 139102 - DNA, 556 bp, Cannabis sativa
  modified_base (404)..(405): a, c, t, g, unknown or other
ttaagctcaagttcttatttttaccactttagaaaatacgggatccattttgtcatttaacaaaacagatggtcaaatcaatagcttttataaaacacaggatccgaaatggtatttatctaattagaaaaacaaaagtaaatttaaatataagaaaattctacattgcactaccttaaaaaaaatattgatgcgtcgttatatgcttttacatcaaagagacttttttaaccatttttttttatatttgtgtatattataattatttaagacatttgcaaaattttgaaaatttttaacatgaattcaaattgtttgttgcacgtgagactcttttattatatacacgtgtaaaatggactatttgagcattgctttctatcttgtaaattattctgaatttnntaaaattttataaaatgtcttaaacagctataacgtatactaggggtgttcgcggtgcgggtggtgcgatttttgactattttttcaaactaacccgcacatgcagttttattaatttcccaaatcccacccgtaccgcgaaactaaaaaa

SEQ ID NO: 139103 - DNA, 506 bp, Cannabis sativa
gttctgtgtccctagtctggttccatttttgggtctgagttcaggtttgggttcgggtcccgagtccaagtttgggttttggttccgggtccggctcctaattccgggctaggtctgatttggagtccgggccctggtccggttacggttctggatctagatccaatttcagttatgattcgaagtccaagtgctagttccagtcccgatcaactttcagtttttgttccaatttttggtcacagggtacgggttcgggtccacttttgggattgggactgggttcaagtccatgtgtgggttcgagttcttgtcagggttcaggtccagggctgggtcccaaatccagacactgactacgagttttgtccaagccctgggtcgagatccggatccctctcttgggttccatttttggtgtcgggtcacgagctgggtcctatgttcaagcccgagtccaggtctagctttgggtcttattctaggtgtgggtgtttgagttcggg

SEQ ID NO: 139104 - DNA, 920 bp, Cannabis sativa
  modified_base (752)..(752): a, c, t, g, unknown or other
caccatgacttgaacaaggtattacatctttatccaaaagcttattaatatttttaccccatatctctaagcgctaaaggaattctctatatagaatgtgtaaaatttatttccaaaaattatttttaagtgtaaaaataaaaactcctaatgttttccatatagctaattaattaatatttaacacatttttctctataattaaataatatgatgtaataataaactcattctatattgcaaaccatgcctatctccaggacaggtcctgagggtaagcgagctaggcgtacgtcttggaccccgagacgttcagggtcctgaaattgttaaaaaaatattattaatgtatagataaaatattaaataagaaaaaaatataataaatattgtttggtatagtggtaaagagtcttattttaagcgaggtaaagatcaatcctcaacctctccacttctctatttttttaaaaactatttaatgcgtagatatgaagaattgaaccttagagctcttaagagtttttaaaagcattaccattaatacactaaaacatatcaaaaatacatattgataataaataaactatatataagagccccaaaatttaattttaccttaagcttcatataccttactacctacccttcctatcttatcaactattttattatatcaaccttaattagtttgggaaaacaaagtaatatacgatcactcactcattaatctaccgatatatttatacatngttataattacagtacataacgagataactatccatattgaaaatcaactcattgtctttaactagtcagtaatcccgtgattcgtaaggagaaatattaggtaagctgtgcaatcccacaccgcttagggaaggtcaagtggtatgattttgagactgtgtaggtat

SEQ ID NO: 139105 - DNA, 525 bp, Cannabis sativa
agtactttgggctcatagaacaacagagaaaacaacaacagggcacactccattctcattagcatttggctcaaaagcaatgctaccaatagaagttcatattgcgacccacagacgtgaattctacaatcaagaagaaaaccaaaaactccttaagttgtccttggatttacttgaagaaagacgtactaagtcgcaaatagctaatgtagcttatcagcatcgaatcacgaggtactttaataaaagagtcaagaaaagactctttaatgttggagatttggtgttaagacgagtatttataaatatacgagatccgtctgctggagtgtttaacccaaattgggaaggtccttatgatattgaagcagtagtaggaaccggagtttataaattagctcagcttattggctcgctaataaagaatcacgggaatagtaaacatttacgacctaactatcagtaaagttaaaatgtaaatgttgtatttatctctgtaatatgtaaattcttattattaataaa

SEQ ID NO: 139106 - DNA, 719 bp, Cannabis sativa
tcaatattgatcaaccgatcaagaggagaatgaaactaaaaaaggttggtggtgactggttttgggcgccgtttaaatatgaatttctcccaagcttctgttatatctatggaattattggccacaatgaaaatttctgccacaagctgtttgatacaccggaggaggccattgtcaagccgtatggagaatggttgagggctcaaactcgccggaaaaactatctgcttcattctcaatatttgcgcactggtacggaggccgatgtgcaaacttttgggccacgagaaccggctgctgagttcaacgccgatgaccaccttgtgccgactactgatgcgattaacagaggcaacgagaagttgccttttttagttgatggagagaatcacgacacttcaaagtccaagccgacttctcctaattttatgggaggtaatcaatctccactattttctcattcttttcataataattcatttattgagaattttagtcagagtgctttgaatgtaccaaagaccactaatttattattggccaatggggagaattcggaccataaaaggaggaggtcaaatgatgtagtttttatggaaagtaggcctaatgatgtggaaaaaatagatgggccgaatgatgctatggaggctgaattaattatgtcttccaataatgctactctctcaaaaaatgggcttttggtgggttctggtgtc

SEQ ID NO: 139107 - DNA, 674 bp, Cannabis sativa
  modified_base (354)..(354): a, c, t, g, unknown or other
gatgccaggcgaaacaccaggagccagggcaattcagttggatcaaatgaaggtcagggagctcagattcccccaaatggtcgtggctgaggtagaggtctaaggggcagggcatgtggccggggtcatattaacccaccacaggctgcccaagttgcccaagctgcccaagaatgggaaagtaggtttgtagaaatgcaaactagaattaatgaacaagatgaagtgattcggcggttaagacattagggtgctcctgcagtgcctgttccagaaatgccaatggcacctgcccctgctgtgtaggccaaacccgttgtcacaatgaaccagatggaacccctgtatgaaagnttccgtaagcaggcacctccagttgacctgggaggtcccgatgttatgaaagccgagcaatggctaactgtgatcactaggatcttgaactttatgggcgtcactggcaatgatagagtggtctgtgccactttccaatttcaagaggacgctctggtttggtgggacatggtgtccatgattcatgacgttaccacaatgacctgggagaaattacaggagatatttaatgccaagtactataatgaggcagttagaagtgctaaaagaaaagaattcacccagttgactcagaaagagaacatgagtgttactgaata

SEQ ID NO: 139108 - DNA, 669 bp, Cannabis sativa
tatgtggcagccataatttttagtaaattggatagactacatgatagttatgataaagggttttgaaccgtactgcctggtggagaactagtcatctccaaaagatggataaggtttatgctgattagaagtgaggatagggagttgcgtgctgacttaatagaaatgttttagcaaattttgatatcatacttggaatggattttttatccaagtactcagctaatattggttgtaaacagaatatggtgatcttcccacccgagggcaaggaaccgtttgtttttgtggattggttcagggatcctggattctagtgattttagtattaatagctaaagaattgttgaaagatggatgtttagggtttctgactgtggtattggataccacatggcctgagacggttcagccagaggatatcagggtggttcgggaatttttagatgtttttcctaatgaacttccaggtttaccaccaaagagggaaattgatttcatcatcgatctagcacctggagcataaccggtttctaaggcaccttatagaatggctctagaagaacataaagaattaaaaatttagcttcaggggttgcttgacctagggtttccatgacctagtgtgtcaccctgggaagctcccgtattattcgtcaagaagaaaga

SEQ ID NO: 139109 - DNA, 529 bp, Cannabis sativa
tcattaatcacgcaaactgaattgggtgatcgcatatatccttgattaaaggcatgccgcaacacaaattcgaggattataaagtaaatatgggattcagttaacctatatgcagtttttatttgtacaacaataactatttaatgaaactttaatttcaatattttttcatatttatgtgcaccttaatttcgtctgagtaaattatcataagaggaccagaataaatataaggcttagggtttattcgcttaagtacattgccacataaaccacattgctatataatatatatatatatcgtaatacatggaagataatactcgacttataatgaggacatatcgcgatgattcatatgtttattatataatgagaaacgtttgtgtttgaatgttttagtctaaatgctaaccaagtaggagaataaaaaaatattttatttaaggaaatatatttctatttaaataaataaatttctatttaagaaagtaaataaataattgattttctgataaatgaatatttt

SEQ ID NO: 139110 - DNA, 1144 bp, Cannabis sativa
  modified_base (714)..(723): a, c, t, g, unknown or other
  modified_base (800)..(801): a, c, t, g, unknown or other
  modified_base (1106)..(1109): a, c, t, g, unknown or other
atcctcctcgaaaccacttctcgcatatgttgcagccgctccaaaacctttacaagcttcatcctcctccaccgtcgttgcgctcgtcttcttcctcctctaaattttcttttacaagtttcgaattgcttttcacttgacgatcctcaaaactttcttcgatctgcaagcttcagatttattttgaacacacacaaatcaagatcaacaaaccaaatcatggctaataaaaatttaaacaacaaataagataatattgtttacctttgtgttgccacgagagagcggaggagagcgacatagcgagagagagtggaggagagggacagtgtggctcgtggtcgtagaggagagaaaattaggaaataaaataaatttacaaatgactttgaaaaaatgagatatgattttttggggggactttatatcttaagaggagggaaatgaaatttaagatggggaaataaaaattaaaaatttaagatgcgggaaatgaaatttcagatctaaaatgcatgaaattgaagcatgggaattactgacagtttaaaactgtcaggtatattatagacgatagtttaaaactgttgcctatagtatagccagtggttttaaaccgtgggcaattctcttttacaaatttaaaggattttttaaggcacatttaaaaatcgttgcctatacctccggatagtaaaattgaatgaaattagnnnnnnnnnnttaaatctaataatctcaatagtcagggggaagttttaacgaccaaaaaagttcaagaggcatgatttggtacatgnnaaagttcggagaaaaaaaatcttaattagccttaaattaaataagttgtcatatatctataaataaaatgcaatcaaggtctttcggtgtaattaatccttattttattagggtgaatccctatttatataaaaatatgactagaataatagaatattaaatcaataaaataaaggaaaatacaataatatttatggtataattgatttaactgattaagacatccatatatataatatttcgtaacacttaaatagtgatcattaggaaaaccctgttagaaatattttaccaagatctagatnnnntaccatgtatgtttcattaacatcctaacatgaat

SEQ ID NO: 139111 - DNA, 622 bp, Cannabis sativa
ttcgaagctcatttgaatgttagcttctaactcgctggggttataagcctcgctaacgtaactggatgaagttataggaagtctttccatagtaagaaggtcacctcgcttatctggtttcgagtcgatccgattgttacacttagtttgtacattatacactaagggcttttgcagttgatatgtgttgctttccttgatgcctcactatttgcattcagcgacatatggtttctcgctaatatactgagcaccaatttgtatattgattcctcgcctaagacctttcagtcagcaggttacaaatatactctgatactaacgtaattaatgagttattccataaaaagcgattgcatcgatccatattccttttatcttgacacgtgtccatcactgagatagcagccgaatttcgagtataacaattgccccttaaaaagttctttttcagtaaaaagtcctttttaataattacagagggcatttttgtcaaaattccttcttaaaaaaaatgcgtccttttattctggcggttgtacggtttcgatggtcattatgaatcgtctcttcatattctgccctactcccaactgttagatttcccaatctttggctttct

SEQ ID NO: 139112 - DNA, 1303 bp, Cannabis sativa
gtcacagtcgcgttggtccacgtaatttggacaaaattaagggcaacatttaccccccaagccttgttttgtgggaagtaaacgaggcttgcttaggtgcctccggtggtcttattaatttcctggcacgtgctttgggcgcgtggggatgcagttatgaccatcatcattccagtttttgcttgttgtaggcaacgatttgtttcctatccatttaatgatccggcgcattaaatgggtgtcagtcgagtactcaagcgtttccaactgccttgatgaacgcttgtcccaaccattggatctatagaatgcgaattgcttgctattctgaccgtacgatgatgcttgatcacagctgcctcacacccgttctggcctatataagccagccttctcatttcatttggttactttcgttattttgccaaattttctcagagcgtccacagagagaaaaaaaattccagacaccatagatatctgttcttttttcttcaccgtcgccagtcttctctttatcgacgatcaacaccaacccccagtcttcaaacttcgtgtaagttctcaggacactttagactcgtctactgtttgtttgtattgcatgtttagagtatctgggttgaatgttgaatttctgggaaataattttgcctgagtttgttgtgtgatgcgtagaatctctcttatttgcgccctagttgtttctttttactgcgttttcttttgggtatagtctcttgtgtcgtaataacgcctttagggcatagagtgactcgcgttttctcagtatttttcttctttcccctttctttttctttttccactgtcgctgcctttgggattttgcacccgatgcttgtcaaggaaaatcttttgtggtttctttatttggccagcatccggagggggcctccttctagcggttaggggacccccattccctttttaaactctagggtttggtttggggcctagctgctggatttcttctttttacagaaaaatgtctacccctgtctccgggactaagccttctaagaaaggggcggatacctttgccaccctggaggaggttatgaaaggaccgattgcccaagaaaactatacttctcgcgccaacggctgggaagcggatgagctccattctactttggtttgcgctcatcaacttgagaggattgtgacggtggcaggcatcaagtcgtccgcgtccggggttgtgcaccgattgcctcgagacgaagagatgcccaactataactacgggggttcggagcttggagccaaacccacctgatgt

SEQ ID NO: 139113 - DNA, 841 bp, Cannabis sativa
aaagataacaaaagcatgtaatactgggattaaaagctgcccggtcagcctgttgtctgtaaaatgaaaaataattgcaagtttaaagaccgcttcaccggtcatgatgtcttagaaaaaggccttatggctgaataagatatatataaaaaagaaagataaaaagagaagtatctaaatagctggagtcccaggttatcggttcatgtcttttgggtcggtaggagctgtaggatctgttgtatgagcggaaggaacataaaaattctggctagaggtagaagcagtcgcctcgggttcactataagccacttgggaagcgcagtactcgatatacatatctttggcttcgcccaaggaatcaaaattttcctaagggttagccttccaaaaatcataaaagatctcgagaccagctgtctctaaggcatgaagtttctcttccaacctccccaccttagttgtaagtgcctcctccttagtcttcttctcttcttccagccaacggaagacagtccgaagaactcccatttcctcttgaaggctattcacttctgccgacagagtgccaatggtagcttcaagctggtcggaggcctcgaggtccttagtcaactagactagtttcctctcagcattaaaagcttcttgttgacttcacccagctccattcggacagctccaggttccacctggcgtcatcagcatccttcctagcatagtccacctccgccctcatggtgttggacatggcagcatttttggaggcagcagatttagctcgggaataggtgtaagccaacttcagaccagcctacacagagaaaaaactttaaagtct

SEQ ID NO: 139114 - DNA, 1552 bp, Cannabis sativa
  modified_base (1500)..(1526): a, c, t, g, unknown or other
taaatattaaagaaattaacaaatttttaaaatctgaccataatttttaaaaaaataataatcaatttctttaaatttaaacctcaaaatattaaaaattaataataatctattaattaaactaaatattattaatttgtaaatttaatatttagtttaaatattaaaaataatattttatttagatattaaagtttgaaaattaaaaattttgaaattgggtgaaaaattcccaaaaaaatggatttttgggttgaagatgcgagttgcccacgaacatgcagcctcctaggcgcatgcgaggaaggacatttgcagggtcccaaatgcggcattcttcggtgcttgtagcctccagtccgcgcatggtgcagcatcaaccctgtccgaatgtgcagcatcagcgagttcaaacaagacgtgtttgatgcatccgcgtgtgcacccctccttgtccgagggcctggcgtgtgtgcgattaagcatctcgacacccattcaacccgaaaaattcaaactttcataactttgtcaatttttatcggaatcgagttccgtaaaaattaaagttgcttaatttttcacaaggaatccaaatataatatttttagaatgaaaataaaattatttttatgaaaaaatttcgtaattcacatacattcatcaaataatacataaactaacatgaacacatccaaaacaacacaattaacatattcattgttttaaatttatattaacatgaaagtaaatcattaccatggctctgatacaagttgttgataataatttaccaggatttagatttactaacaagtatgttaaattaacatcctaagtatgaatatctctacaacaataaaattaaacacacataagagtttagaaaatcttacattgattgcagcataatgatatgactctttccactcagatctctaacccttgtttctttttgtcgcagagtattatcaagatctaagcatggatctctttctctcatttgggtttggttaccaccatcttacccactatgattgagtacttgacttgctatgtgtgtgcatgacactctatcactatagggcgactatgaagaacaatgaaggaagcttgaaaattatatagaaggtgtctttcatctactagttgtccgacaaaaaaaactaggtttgatttggttaaaggcaatagttaagttggatgagatgagagcatcatgttctttttatagtgtttcaactagttgtaaaccgtctatagaggatcattgattaattttaaaagaaataatggataattcatatcatatctatattttgtatatagagcgttttatgaaattaggtgtgtaatttcaagtctaaagtggagtcgtgaggaatcaataagttatgaaatttatttgttaaatttccaatctatcttcttgagaccctaaattttattggcccatagtccacgtattatggggtaagttaaaaaataccacttttattnnnnnnnnnnnnnnnnnnnnnnnnnnntttatatttatttgaaacatacctct

SEQ ID NO: 139115 - DNA, 654 bp, Cannabis sativa
catgttataaactagtgccttaaaatttatcgttatttatacttatctttatttgtcctcgcagagatgacttttctgaagtctgcaccggtactcaaccgcaagccaaaaactacaacaacgatgacatctcctatcgttcctcagaagagaaagagcgatgtggtggtcacccctgtcgcggattcctctaagaagcctaagggcacgcaatacaaggagaagaaagtcgtgatcgatccggccatccgagctcgcaacatcttaactcttcaagagaagttcgttggtgatgagtttatatcaaaggtcgacaggacccctgctgaagagttgctgcctcgttctgcaaaattggcttcgcagtttattgctatgttttcgagggcatttgtcactggatccaaggaagttgaacatgtgagaagacagaatgttcagcttcaggaggacatcaataagctgaagcaagatgcgactaccaaggacaaagagctcgaagaactttgcaaggctaaggagcaagtcgagctcgaacccaagagcgctcagatgaaggtcgaggagatgtctcgcgacttggagttcgagaaggagaacgggaagaagaagtatgaccaggcggtctctgactatatttataccactctttcc

SEQ ID NO: 139116 - DNA, 1297 bp, Cannabis sativa
aagaaattttataggcaccactttattgcacccattaattcttttaactagaaaaaataatttttttaattctaatatgtaaatattaatttaattaaaaattaaaaaccaatatatatctgtaacaagtgtcttctattatgtaaatgaactattaaagtcagggccgcctcaaagtgttgaaaggcttaagatgaaatttaaattgagacgttttcattttacaaaaatttaaatatatattaattaaattttgacataatatcaatttcatctattttatctctataaaacaaataacttttctcgtcgcataagctaatttaattgtgctatatatttaagcatttttgtgaagaaaaaaaatgtatgtaaaaaaatttatcatttttttttatcatatgttaatagtttataaatttaaaaagacacataataattaacaaatatactttttgtttaagttataattcattaaatttttaagttataatattcttattttttgaaatatttaatttatttactattatcgtgataattttttaaataatttacaccaaaaaatactactgtgtaatttcttaaaatattatattaaatataatatttgttacttataaaaaatatacataataattttttttaagtattgcatttttatttttatttttttgagaaaaaaaaaacattattaccttcccataaaaaaaaagatatacatatatataagataatgcattaaagatattttaaaactagaaaacaaatcgtgtgttgcgtgcggttgcattttatttagtgataattaagttataaaattttatcaaattttaaattttaacatttttatataatttgtttaatagtgagtagctataaaaaattttattttttaactcttaataacaaaagaaaaataaattaatatttttagactcttaatttttttttaattattttgaactaaataaatgataattattaattaatttaatagatatatatttttataaaatcatttttcaaaatatgtatcttttgcataaattaaattgatatatagaattttagcaattggataaatattatttttgtgtgattaaacttatataaaatataaaattaggaaaaaaaaaaagagttgatcgggataaatctataggaaactcatcaaatttaaaattgttgtcatcaccatacctcacttgtcactatatttaaaatcgttgtcatcagcgtatctcacttgtaattgtcaatatcttgaaaaaaaaaatataatgatttttttttt

SEQ ID NO: 139117 - DNA, 1379 bp, Cannabis sativa
  modified_base (220)..(228): a, c, t, g, unknown or other
ggaagaggttattctcgacccaggaaatcccacaaagtgtgtatacattgggaagaacctggacgagtagctaataagctttttgaaggcgaaccaggatatgttcgcctggagccatgtgaatatgatagggatcgatcctaatattatctgccatcatttaaatgtttatccaaactacccatcgaagagacagaaaaggaggcccttggattccgannnnnnnnnggcactaaaataggaagttgacaagttgttagtcaacgactttatacgagaggtgttttatccctcatggatcgccaatcctattctcgtctcgaagcctaacagaagttggagaacttgtattgacttctctgatctgaataaggcctgtccaaaagattgtttcccacttccaaagatcgaccagttagtggatgcaactgctgggcacgagcttatgtcattcattcactattctggatataacaacatgaaaatgtatgtcccagatcaggaacatacaagccttgttaccaacatgggactctattgttgtaaagtcatgccgtccggactaaagaacgttggggtaacatatctgcgattggtaaacgaaatgctcgcaaatcaaatagggcggaacatggaggtttacgtcgacgatatgttggtaaaatcaataaaaagtaaggattatacctcaagcctcgcggaatgctttaagatattaaagaagtataacatgaagctaaacccgaaaaaatgttcctttggagtttccttgggaaagtttttgggattcatagttaacgcgaggggtattgaggcaaatcctaaaaaatcaaggcattaatagacatgccaccactgacaaaacctaaggaagtacaagccctgacaggaagaatggctacacttaataggttcatttcaaagtcaactaataagtgtgtgccgttcttgaacatattgcgaggaaacaaaaagttcgagtggacaaaagagtgcgaagaagcctttcagaacataaaaacgcatgtagcaacgcctccagttttggcaaaaccaataactgaataaacgttgtttctctatttagccatctcggaagatgcgattagtgcagccatagtgcgagaagagggcaagcaccaacaacctatttactatgtaagtaaaagtttactaggggcagaatctagatatccccctctagaaaaactcgcgttgtgcctagtccatgcgtctcttaaactacgaccatacttccaggttaaccacctaaaagtgttaaccgatcagctcttgagacaagttttatcaaaactagatgctttttgcaagattgattaaatggtcaattgaacaggggtagtttgacataacatacc

SEQ ID NO: 139118 - DNA, 542 bp, Cannabis sativa
taactcttccattctggagtcaaaatctgctggtgttgtggctctagctgctgcccaaagcatctgtttcaactcgagtcccggatagtcctttttaaagtttccatacatgtgtctcacacaaaagcgactgtccggggtgttgaatatagattccacagcattttggagacccttttgcctatcactcatcatagtgaatgtgttagggttagtcggtgtcaaatcatccttcaacaactctaagaaccatgtccagctgctagttgtctctttttctgtaactgcatatgctattggaaatatgcagttagccccatctatcccaactgctgccaacatcactcctttgcaataacctttaaggaaacacccgtctaaacctattagtggtctgcaccctcttaaaaatccatccttgcaggctttcaagcatatgtatactctcttgaatattctttttccatcaactaagtcagtctgaatcttagctgtgctaccaggatttgtagctaaaacctgattgcaataatcctccaaca

SEQ ID NO: 139119 - DNA, 505 bp, Cannabis sativa
aaaaaaaaaaactacttatttagtatattttaacttcaaaagaatatacattaaaattaaattaacaaaataaaacctgagcaattgaaattacaaatttcagaaaatttgttaacaacttatcaaaaataactacttatttactatatttttaattcaaaatattatacattatattaaattaacaaaataaaagttgagcaattgaaaagtttgaattaggaatgtattatacaatttgatgatattaatggattaattccttatgaaataagttctctagaagagatggagatgatgagtctctcccctaattttgcaccttttttttttccttcatctataaaccataaccttaattttactaattttagggatgcttaaaaaaagagaaaaagaacttttatgtattgggccattctagtaacgtttgagtgaaggctttagtttaagcccaataagtctttcaaatctcagccctttagagaaggcccatgggaagcaa

SEQ ID NO: 139120 - DNA, 1217 bp, Cannabis sativa
aaatgtcacaaaatcaaatgtcacctatatgcaatattgatgtagtgtgggttctgaaattcagtgagattggaaatttaatctgaggaaatgtgcaagaaataagttaaagacagtgaaggcatgcaaggggagtaatctcaagttgcaaaggaaatttaaaggtctaatattcaaaaatgacgaaatagactgatacttttgatttttataccatattataatcaccgttagatcaaaagaaatctgatctaatggatgagaaaattgaaaattagaagagactgagcatttaatactaatgatgtgcctcgaagttctgaaccgccaaaaatccaaagcatgtaatttttcaaaattggattaatacaatgacacccttgtaatcatttaaaaagttctttttaattaaaaagtactttttaaggagcaattgttatcgaaattcggctgcatcccaaaagttgacacgtgtccaacagaaggaatatgaatcaattttgaatgatataataatattatatcaataaatgcatattaaataactcgttattattaaataaaggtttgatggataatattcaaaactcgttgactttatagtcaaaagagagacaaggataataactattgaactatgactaacaagacatatgcatgcctcggggtatacagacaagaaaggaatattcatccactcgagtagaatgaatgcaacaacaagactgcctcacattacacatagtgagaagatgacctagcattaataaaagaatatgacgagacaaactactttccaacacttaccattttttcttaagatggacaagaaggaaaactcatatcaagcgagatgtaaccttccacgtcagtaacaactgcctaaaggataaaactaaagagtggttgggtagttataagatattatcccacattgtgattaaaagaaacgtggggattatccacgtttcatgagcatttgtatttgaatcagtcccaaaaaagggtaactgccaacctatattcctaaaaataggaacagattctatggaaaaagggatggaaaatttgagagatagttattattattcgaattctgagattgaattttgtactcgataaatatccctaataataaggactcgtggagtatgtagattttaactacaaaactacgtaaaatatctggtgatatctgataatttattatttatata

SEQ ID NO: 139121 - DNA, 1098 bp, Cannabis sativa
gtaaagaagtacttgagacttttgtggttagtgtaaatctcacaccgttctccatacaagtagtgttgctaaattttcaaggcaaacacaactgctgcaagttccaaatcatgggttggataacactgttcgtagtcttttagttgtcgtgaggcataaccttgtctgcttgcatcaatacacatcccaaaccctgtctagatgcatcacaatacaccacaaacttttcttgattagttggcaaggctgagagtggggctataattaaccgctgcttcaattcttggaagctttcctcacacttatctgaccacacaaatcgttgattctttctagtcaactcggtcaatgacattgcaatcttagagaatccttatacaaaacattaatagtaacccgctaagccgagaaaacttcgtacctaagtaactattttctggccttggccaattttttattgactcgaccttccttggatccaccataatctcatcttttctgacaatgagtttgagaaaagacacatgtgatagccaaaatccacactttttgaattttgcataaagtttatgatccgtgagtcgttgtaaagccatgtgaagatgttgctcatgttctatttttgtctacgagcatacaaggatgtcatcaataaacataattacaaaattatcaaagaaatccttgaatactcgattcataagatccatgaaggctattggggcatttgttaatccaaatgacataatcagtaactcataatgatcatacctggttcggaacgctgtcttcggaatatcttcctctcgaattctcaattgatggtagcttgatcgcaaatcaatcttggagaaaaccgtcttaccttgaagttgatcaaacaggtcatcaattcgaggtaaaggatacttgtttttaatggttaacttgttcaactctcaatagtcgatgtacatccaaagattcccatctttctttttcacaaacaaatatggacctccctagggcacacggttcggtaaaccctagatccagcatcccttgaagttgtatctttagctccttaagctctgctggagccattcgataaggtgcttt

SEQ ID NO: 139122 - DNA, 519 bp, Cannabis sativa
tgcatttctatgctcaggagacatctgcagtgcatcataaacgcttaaaagagcatggatgcgctttagatgagccaatacatcatattttgctcgcgtcatttcatctccaccagtgcttttacctcttcgattgtcattagtgaattcttggttggacgaagatgaaggcttttgaaggtcttgtttagctttttcaagctctttcgcttatttttccttctttgcaaaaattttccatagcatatcttgcaaggtaatttcatctacctctttttcactttcaagtgaggtagattcaggatcatcttttgtcaacaaagtcataccgcaatccgacacactgtcatcacaaccagccgccttgtcctgtaactcttttggtaaaaactcctccagagttatttgattttgttttggttgtttgaattcgtttcttttggaaatgaccttttgttttccgatccttttcttattcttttgatcctttatatttggtctaccccaaaatttgactcc

SEQ ID NO: 139123 - DNA, 823 bp, Cannabis sativa
  modified_base (597)..(597): a, c, t, g, unknown or other
tttttcaaaaaaaaccttacctttgactgaatttggtggtggcggcgacggttcctgctcgtggtggcgacggcggttttttgtgggtttggctcgaagatcgatagacggtttcggttcgcctggtttgtgggtttggttcgtgggttcgcttggttcgtgggttttttggcttcgtggtcgacagcgagttcgtgggttttggtttgttggttcgcctggttcgtgtgggttcgtgggtttgtgagttcgtgaagagagcgagagagagagaaaagtcagagagcgagagagtgggaaagtcagatagagagagtgaaaagtttattttaggggtattttaggaatctttttaaattagtggaatcaatttgtacaaaaaaataaaggagtataaattttgatatggggtattttattagggtcaaaaaatgaaattacccttatttaaatggtcaaattagagataaaaataggtgcttttcttttttacctcaataaaggaaaataaaaatatttatatatatatatatactttttctactttttaaatttttggagagtttcatatcaatatatatataaataattttattntaagaacttaatttgtactattcaatattcttaaattgttatttgttcaagttaaaataattttttacaattaaaatattttctcttaatttttatttgttcaaaagttaaaattttatttttagaaagcgattatcaatgtcatgtatttatacaaattgatttttttttttattttggcatttttgttattattttttttttgtaagtttagtttaaattattt

SEQ ID NO: 139124 - DNA, 672 bp, Cannabis sativa
  modified_base (30)..(36): a, c, t, g, unknown or other
atattgtaaaattagtccaagtattaacannnnnnnaaatctaactacaagttaacctaaaaaaataagctagggaagaaaaattcttagacctttccgcatcaatcgtccaagccattgtgaatcactgccataaaccgttctatccactgtcgctatattggtaacaactcagtttttagattgtattgctacttatctccaaactgttaaaaaaaataaaaatttatattagtttatacatatatcttatttgttattataataaatattataattaataattaaaacttacaactttttgatcttgtatgtaacggttggagtttccacgtgctacgatgtcagtcatgtattcaaaacataaaaaccacattcttggtttttaagttgtcttggacgatttgctagtgaaatttcttgccacgggccaataaacatatttgatgtccctatatatttgtatgctctgtttgaaaaattatattagcatttcaattcaatagttaattaaataatttgttacataaatagtcattaaattattaccttcccaacatttgagtaatttggtcgggaacttggtcacgtatagggtctaaatggataattttctttggcgcaacgacctctagcatccaatacgcatagaaaattatattgggatataag

SEQ ID NO: 139125 - DNA, 520 bp, Cannabis sativa
  modified_base (216)..(225): a, c, t, g, unknown or other
tattttattagtttaattaaaaagcaaaaattttaattaatcacgatttccataaaccttgttgattagcaacgagctgcacattatgtttaaaaattacgtcatacgcctatactagttagggtgttacaaaatcaagtttcgagacttgccttagtgtaacaacctatctaaagtctctaagtctaccagagacactgaatgttaaagttgcannnnnnnnnnttatttagtctaaggaaagttctatacattttgggcattataccatcatttattaactactagtgttacttcctgactaacgcagaagtacttgccaaaaagtaaagaatccagtctccctagaggagtagaaatatagagaagaatttcacaatatcaagaattttgtcattaaggaaatgtaatggtgcaaaagaggttgtattgaatacaacctgttagatcctatttggagagaatactacatactacacttgatttggatatcaaggtgtagaaattatttgaaatgcac

SEQ ID NO: 139126 - DNA, 750 bp, Cannabis sativa
  modified_base (309)..(309): a, c, t, g, unknown or other
  modified_base (714)..(724): a, c, t, g, unknown or other
ttacattgaaacagagttttatttagggcataaaacccaacactctataacacttaggggtggaaaaagctattgatatatgtagtttaaatttttttgaactctagattatactcaatacaccacagtatctctatgacacacatattttgataagacatggatgtaatataatgaacaaattagcaaattattagaacttattcttgatcctgtattttgttccaatttatatgttactgttgtaatagaaatcgataccaataaagttcttagacatagtatcacagtaccttatttgagtggganaattttaaaattctaagcccatctttatttggatgacagtagtgatagattactatgttatgatcatgataggaactttagaatataactgagaaagtaaatctaaccatttatatggatagatatacttatcagaattttgaggataagataggaaattttgcaaagtctattcgaatgacttaggcaaaatccctaatccttatgaaatgttttatggtatctttaatgattacttagtcttaaaggaagtattttacattaatgataatactagaatgctatgttaatgacttagtctagaaggaacttatagtttcagactaagactatatgtcacaacaagatgttcatgagaaccaatagtaagaggttaaatgtacttttatgtatgaatttaaccannnnnnnnnnnttgagtgggagccatctaagatgtaa

SEQ ID NO: 139127 - DNA, 665 bp, Cannabis sativa
aattccggttgtacaaccggaattccggtgcctcgcaggaaacatgcaaaaattcataacttgctcaaatcaaatccaattcaaaaaaaaaaaaaaaaaaacccttccagacttgttctaaatacaccatagaacaattctaaagcatcaaaaccatccagaaaacacagatacgaaaagtgccatgtgagctccaagctttgagttcaaaacttaaacttggctaaagctcacctacaaacattaaagctagcttaaatctactcattcatgcatataaacactgcagaaactgaaatcaagcacaaacaatctcaacagcaagaaatttcacaatttcactttgaaaaaccatagttttgagtaaaagtttccaagcttgaatcaaagcaacaaacatgcatcataatcagctctaatctactcaaataatcatgaataaacttctgaaaacatcatcaaaaactaacaacatcaacacaactaaattaagcatgcaaaacatcattttcttccaaaatttccaagaaacttaaaagaaagttatagaaatcataccaaaaacttaggaacactaaaacatgcaaaaaggagcttgaatcaccaagaaaaacccccacttccttgctgctcaaggtgggccgaaaggagagagagagagagag

SEQ ID NO: 139128 - DNA, 579 bp, Cannabis sativa
agcagtcccgaaactgccccctacaccaacacctaacagtcaaaaaaataggggcaatgctgtctttttctctttgtgcggatccaaagagaatattcctttctctaatccgaatatgccccttttgaatatcagatctacttttcaaaaccctattgcatttaattgcaatataaatcaatcttttctctttctatgaaaacctaggtgccatttttccctttcacagccggcctccttcactcctcttctctccttcttctcttttctttgaacaacttgctaaacccagcagcttagttcttcttctccttccttcaaccttcttgctgcaactccacaccagccgaaacacaccttaaagcccctctaatattttctgcaaaataacccagccatgaaaactcctctttgctgcaacacaaacccagccgaaacccttgtgtttcttcctcttctctttcaagttcttcaagagctttttacacaagaacctacacacaatagacaaccaaaaatggtaataacaaagataaaaataatctttgtttgttgatgagagtagacccgaaagttatg

SEQ ID NO: 139129 - DNA, 577 bp, Cannabis sativa
attgagagctgaaggaagcgtctgcaagtaggcagtaatattataaaacaacaatggtaaagactcgcaacacacgtcaacctcgtcctcctcaagacgctcaagatccaaatgatgaggatgtggcctcaagagcaaatctgggctctgaggaaggagaaggaacccacgatgatgaatacgaaggaaacttcgatgagtacgacgcctacgacgaaggcagctatacagagctagtacacttgagacaaaaggctgctgaccacgaagttgaaatcgcagcccaaaaagaacaaaaccaagagatgaaagaggtgatgctggccatgcaaaaagccatggaagcagcaggaatccacgtacatcataaagccatccctgctggacatggagagacgccaggagaatcctcgccaagtgcccaaaagcataaatctagggagcctagccctatcaggtatccctctgaagggaaccagcagaaaaaccctacttccactccatggaaaaagaaaagggtgcagtatctgttgggttttatgccctaaataaaactcaattcaatataatcagattt

SEQ ID NO: 139130 - DNA, 599 bp, Cannabis sativa
tcattcgactattcaggctaagtcttgtgaacgagaccctccacattatgtagttccagattccggagaccaccacatcattattgaacaaatatataaaatttgattctagtatatttagttcattcattcttttattttcttcaggttcatactgtttgattaatcatttaatattctcaatattaaacatttgtttgttcaaaattgttgttctgaaagtgattaatctagaaccatccattagtcacatctaattaattctttaattatgataattaatgaactttatagatcccatgactaatcaagttagatgtttgaaatgaaccattttatttcacatcctttattgttttagatcactaacataattaagtgattctattatttaagattacataattaataagaatacttatttttcgtttattaaatgctcttttggcgtaagcttgagaaaattctttggcttcatagtcaacgccgagggaatagaagcaaatctagataagatccaagcccttttagacatgaagtcgcccacaactatcaaggacaaagcctaactggacgcattgttgtactaagcagatttg

SEQ ID NO: 139131 - DNA, 793 bp, Cannabis sativa
  modified_base (48)..(74): a, c, t, g, unknown or other
gaaaactcaactttggcttcaacaaaccaaactcaatcaagcagccannnnnnnnnnnnnnnnnnnnnnnnnnnatactcaaaaacctaccctaaacacacccaatcttaggctaatctctacagccacagaaatgcaaaaccctacctctaaaccaacaaaaattaataaaattcacaacctataaggtgtaaacttacctcaatctcttctaggatgatcttaggttgaattatatgctcgaaaggctaaagaaaatggtgaggagagcttctcttggtggctggttggcttgcatgaaggggagaaaaagaatggagtgttttggttacttgtttcataagttatgagtttatatatatatatatcttagtttcttttcttttctttctttttttttataatagacagccctaaaagtcaaaagggcaaaaatccaacaattaataaaagactaatctacccctccaacaaattttaaaataacctaggggcaattttgtaattttactaatccattaaatcgacattctaaaaattctaaccaagtctagaatatcctcaaaataattctcccattaatgtcgtgacatttctgactacatcattaaaatccacagtcgtcgggcccaaaaaaaaatatttttatttcaaaaatagtatcctcgatacccacatatccgaatataacccccgtaattaataaattacgcttcatataatcatttaataaatcctcgctaattaccctaagtaagatcatagtcttacttcattaccaaaataattacat

SEQ ID NO: 139132 - DNA, 598 bp, Cannabis sativa
aaaataattgaaataaacctagatattttacaaattagtttcatttttgaattttaaattttaagaagatgtttaggttattttttataacaaccgtaaattttcaaaatagtttgttagttaaaataataatttaattatataaatatcttacttcataatttgttacatgaatattgtttgtttgtttaattgtttattccaattttttttaacaaacttattatttatttgatctaaattgtcatgattaacttgttgacagatccaatgatttgattttaatcatagtcaaattatcaatagatcttataaataatttgtaacagataaattttatatttctttcatctatgtaacctagaaacatgatagggcccatccaaatcaatttgacatgtgtgatgcttttgggcttagatgcatataggaagcctatttatttttagatagataattggactaggttgctaaaacgaaatatcacttttcatagtttagttaggcccaattagtattgagctttttcaatgaataacatttatttaatgaaaggttaaattcttctcctttgggccttatgtgagagttagtgggc

SEQ ID NO: 139133 - DNA, 501 bp, Cannabis sativa
aacgaatgttacaatctgaagcgggaaattgaatttctaataaagaaaaacaatccgcacctgcagaagtatgtcaagaccaaccaaggtcaaaaaaacaaggatctactacctccacccatagatggacacttacaagtcattattggaggtccgcacatcgctggagaatcagcaaagcttgggagagctatgcccgaacagctcagcacgagcaagaagaagtcatcctagcagtggaagaaaggaagcccaaagttccacgtgcaggagagccaaccataactttcaacgataaagatgttgtcaaaattagatttccacacaacgacccgctggtcgtggaagtctagatagcaaataaaatggttgctataacgatgatcgataatgaagcttcttcaaacattttgttcaagactgcttacgagaagatggggctccaactcaaggatctaaatccatgcctccagcctgtttatggtttttccggtcaaggag

SEQ ID NO: 139134 - DNA, 583 bp, Cannabis sativa
ttttttgggttttattttttttataaaatattttcaaatattttaaaggttatataatcattaccataaatccactctcccataatccctgatcatcttcttcttctactacattctcagctggttacaaggtgtgggtagttttatatttcttttcaaaattttttagttattacattttcttctcaagctctcctcttaatttttccctccatttttgttcttttttctctataaatactactcctcctcaatctaaatggcagttacacgttcatccctatcatcccctgttgctaaaaattccccaaaacaaccccaaaaaatgaaacccaaaccaacaataggtaagaaatatttgaaagataatcatcctagctctacttctcttgttgcccctaaaagaaaactacctgctagaacttccaagaacactcgaggaaaatgtccttaaactgttgtggagaactcggctctgattttgagttggagactgagtttgtgaagtctcctaaatctgtgaaggtattttcgtattgatcttgtgttgttttaggggtttttttacattttcattgtattg

SEQ ID NO: 139135 - DNA, 759 bp, Cannabis sativa
cgttgtggcactgcttttgtatcataagagtactgtggtactccatgtgcctcacacaaagtggtaataatatcagcgagcccaagtccacctccacaagagccctcaaccaccatatcaaatgttaccctgactatgtcccccacattcaagttgtaccctttcataattccataaacaaacttaagcctatcaatcagagcatcagaataatgtttgtttggtaccaaccttgcgctcacaaagtataaccatgccttggctaccgggttgagttcacatcgatacagctgatacggttctccatcaaattcatggaacctaaggcctggataccctagggtttcggctatgtcctcataattcaagttccttgcttgaagttgttgtctcaatggttgttgttctacaataaatgttggtaggtcataaacagcatgaatggcagctgtggaaacaggtaccttaacccccctaacttttaccttgtcatcttctctttctggccaatttgctaggaattctaaggctaaggtttggttgctgcgctcagtgacatccacaaacttagtccactgcctatttaggatttgttctctgatggacgcaaatacagcagggatgtttgcagtttggctcgggttaccaatatctatccctcgatcttcaatgaagggcctatctttcaattttaaaaatcgctcttgggcctccatattcacaaatcgcgctctatcaacattagagcgacccctaggt

SEQ ID NO: 139136 - DNA, 715 bp, Cannabis sativa
  modified_base (685)..(690): a, c, t, g, unknown or other
gaatatcgtctacaaagaagtatttcaaaacactcactcatcatcccccaaaacaaaagtatcacattttcacaatttcttttttaatatgcacattgtttatatttatcatcaagaaagatagtaacacaagcaaatatttcagtatggaaaagattagtcttatggatcatcacctcctattctcacattacaatttaaggtacaaatttcatctttacataatttgttcaaattaatgattttacctaattatttagatagaaaacttcaatcactaacattctacataattcatcaattaaagcttacaaaaaatgttgtgtggtccctttcgcaattgttatcatacattcacctatggagaagacatacattttttgtttaaatgtaatgtttgttaaacttataattttttttcatttattttattgtaaagacacaagcaaatttatttcatatgttaattttaacccctttttacatatttaaaataataatttacatttctaattttctaattttcctttatttataatataaatatcaaaatattatattttacattacatcacttaatccgtaaaataaaatttacaaaacttgggtcgaacccgcgcgaggcgcggctttgttccctagttaataaatatattaaataaaaatattatttaataattaattnnnnnntattaaataattagaattgacattt

SEQ ID NO: 139137 - DNA, 1015 bp, Cannabis sativa
gacagatttacaaaattagctcactttttatattctggagattttattaaactctaggggtattatttgatttatatgtgatttatattatttttacaattttttctcggcgacaacggaaaattcgatggataactaatttaatcacatgggcaagtccagaatcttaattcttagtgggaaatatattggagaaaatagaatattggggttttgcggggttatggtttttgaccattttacccctaggttggaaataagctagaattaatcattaagggcattttagtcttttgccaaggtaagtggtttggtggcttcctaggaacttgacacctaacagctattattcagcaataattaatgtagtaaatcctttttcatttagaaaaaatacaagagaaaaaccaacattcaagagaaaacactctcatcccttccctctctctacgaaccagcctagaacaaggggaaattgttgttgatttatggtgttttcagcaaggaattcaaggcaaatcaagccaaggtaagccctagcatctctatctctttattcttgaattttagggtttgattgaaaatataatttttaaaattaggggctgttagggtttactttttctgtacttcgaattgtagggttatttgagttagatttagcttctagcagctaattttggtgtgtgggattggatttgtgcaagtttgagctttgaaccctaagctttaatctttaatggcatattgtgattcagtgtgtttttttgagaattgttggttggattatgttgcatatacactgtctaggtactctagaaagtttggtggcaattgtatgaattttgtgcaagttagagcttgtttggggaaacctggtgcaaaccgggtaactagtttgctaggacctatgataactctaagatttagagttatttttatatctttaagcttgaattttaagttgaattgtggagcaattaatgtctatagtatgtaattgtgtttagtttgt

SEQ ID NO: 139138 - DNA, 518 bp, Cannabis sativa
aattatttcttttccattccattctatttcattacctccaaccatacgtttcctaagtttttgtttggcattatttttttagttttttgttttcaaaattgtatttcaacaatgataacaaaaaataatttttaatattttgaaaacataagattagttaatgttttctcaaaataaaaacagtttttaaagttttaatatttattttctaaaaaaaaatcacttcaatactttcagatctaaattcgaacacgaaccaacttgaccccagctagtgacttccacccgacttgacccgaatctatagacctcagactcaaaccccgatcctgaccccaatctaaccccaacccaaacttaaacccagacccggacatggatctcgaacccctgaccccagacctcgatccagacccagatccagacccaggacccatgacacggacccctaaccgtgcacttgagacctagactttgacccggaccggatccaatgcactaaatatttagtaaaaaaa

SEQ ID NO: 139139 - DNA, 688 bp, Cannabis sativa
cctttttttcccttgttcgtgcgagcaggggcggagccagagctaaattttagaggggaccaaaaatatatttatacatacagttaaatctaatttaatatgagtacttaattaaaaaaaaaaaacatgctggctagtattatttggtttaaaaatgatacctagctattgggtaagtattttagtactgttttctaataagaaaaaaagatttttattaacttttaattttcataaaaatataaataagagaaacattaaaaatcactattagtgtctaacatctttcttgatgtctattggtgtaattaagtatcgagtctcttatcacttaaaataataacttttaagaaatatcgctaaccaatcgtgtgacatcacctctaaaaagtattggtcatcactaatgcccaatagcaatgccttaaaaataataataataacgtgagttatttgcggcataacctcctaaagtgggcagatttttgcaactaaccccaattctaaaattttggtggtataacctcctaaacccagcttctgttagcagttagccctttccgtccatttttggctgttaagtgacatgttggaatgtctacgtgtacacaattatacgtggcacaattcaattaatccacgtaataaatatataaaattaaaatataaaaattaattattttaaaaa

SEQ ID NO: 139140 - DNA, 570 bp, Cannabis sativa
tataattgcttttattgcttttattatattgaattatattgataattatattgataatcaataatcaaaaaataaagtgtccaccataacacattatttttgtatcaaactatcaaaatttttttaattttagagcaacaattataaattagttgataatgagatttgcacaatcaatttctgtttacgatcaatagattcaaaaaaacacaaaataaatttcataatataatcacataaaactcaaaactttaatcttaaaattctctcaatttactcaacgattttagtcacataatatatcaacagaaagagaatttcatgatgaacaaaaagcctaaaattttaaaatggaaaaatgaaaaaatctaacataaaataaggaaaattatatgtaattagagataattaacctataaatatcaattgttatataaattataggtcataaatcatatataattggcagtctgataccgcatgttataaaactaaaataaaccaagatacaaattttgtatataatctaaaacaaaataataatatataataattaggtatgtgtacctg

SEQ ID NO: 139141 - DNA, 744 bp, Cannabis sativa
  modified_base (186)..(187): a, c, t, g, unknown or other
aagtttctactaaaatttggaatgaacaaaacattctctaaaactaaaaatttcttttcaaacttgaggcgagcttttcctttagcttggactgatactaattcatcatttcctactttgagctttaactcccctagatttaaataatcccaagtttcaagcagctgcaatgaagaacaaacatgnntagtagatccagaatcaacaatctaaaaggatttgttattctcgaaaacatatgattcaaaaacaaaagcgttacattcgttcgaattgtctagaagtctgggaaatctttcttcctgaagtcccttctcatcacaatatgaacattgaagagtacgactgttcattatttctattattgatcttgaagaaacagcattgttagaagcatcatagttaattctttttctcttactcatgtttgcgaaattggagggtggcctccttgcaagcaaactccgctcgtaagcacgcaattatgggtccagcttatctacgtcggaagagttaaaattgttgaccatgtaagatacaacaaatccattatactcaggtggaagactattaagaataaattgaacccattattctcttgataaatcaattcccagaaaatttcctttccagaacttcagattcatcatcattaggtgtgaattaatgctcttaccaaaagacattttcacactatagagttcatttgtaaagacatggaaaaggtgaggttcggggtgtggg

SEQ ID NO: 139142 - DNA, 1018 bp, Cannabis sativa
ggtcgagaaaattgctcattgagtctaccgggtcgttcttccttatgtccttccaaagttcattgaggacttcaatgcccccaagtatcgcggacaattttctatttttagttacccgtgagaccccccagtattgcggacaattttccatctttagctacccatgagaccttggtcgcttccatcaggaatctgctgatgtatgcttggagaagcttgcctggtctttgcttgacttctaccaggtctcatagatgcaatgaaagttggaaagaggaggagaattttgcatggaattttgaagagaaggccttccatgagttgaactttccaggggccagcttgaaataccattgctgggcgacttccgagagagtagcaggaaaaattctgcaacacacatcccctcgtatcccttgcagatccttttgcatctcaaaatacttgaggtgggaaacaggatcttctcttccagtgtacattttctaggttggcattttaaacttgtggggcaatgctaggagattgatctcgggagagaaaggagttccacgtgctcggtccaactcgaactacagattatgttccaaggcatggctcgacagagaaacaatgatctttgagcaggaatttaagcacgggttctgggctgtacgatcgttgtcccaagctgatcgtctactcctctccttctgttcagatcgcttcttagatcatgagtcgtccccaacctatcgaatacaaaaacgcctggctgtctcagtaattgattggcttggttgacaagtggaatggcagagttagaatggtttcaactatcaggtatgacttctcttgatgaattactagacaaggtctgcccacctactgcttggcccacaagcggaacatgtgaccggagatttggcagcgaccatttatagtctgggaagtattcatcgctagatcttcgtctgcttcacctagggggatgacattcggggttgctgcccgacaatttggtaggcttttcgtatca

SEQ ID NO: 139143 - DNA, 900 bp, Cannabis sativa
aaaccctaatccgggaaactcaaatccagaactcaaggctctgatataatcactagggactacactatcttaggaaacagggaaacacccaactaaggcactgaaatggacgagaattgagaaaatgggatattcggggaacctgcgaaaaccggttaaccagttttacaggtactggcaaaccggttaaccggtttgtacccgttttcccaaaaaatcccaaacttgctcaaaactcaattaattgccaccaaactttccagagtacctaaacaatgtataaacaacatattccaactaataaatcacagaaaaactcactgaatcacaatatgccattaaagaccaagtttgagttttaaagctcaaacttgcttagttccatcaccatacaccaaaactaacatccagagcttaaaatcaacttaaacaaagctcaaaattcgaaccaaacacaattcaaaccctaacagcccttataattcaaaatcacaaactcaaccaaagtaaaagcttcaaatatacaagatcataggttctagggttaccttagcccaagaacacttgaattcctcgctgaattccaaaaaaatgaagatgaaaagcttggtttccttctggtttgggttggctaaacaagaagagagaaaggaggatgagtttttcttatttttttctcttattttctaattaaccaataaatcaattgcttaacttggctggaaaaataataaaaggacagctgccatcaccaaaagcagccacctaagtccccttgaccaatttactgaaatgcaaattgatgctttacttaggcaaaataaagtctaggggtaaaatggtcaaaaactataacatcgcccaaactcgatattctattttctctaatatacatcccac

SEQ ID NO: 139144 - DNA, 557 bp, Cannabis sativa
tgagtttatggtggagcaaataagggagttggcattttgaattttaattttgatagttttataaatcttaactatagttaagataaggtcacgacatagagttaagggatgggttaatgttaaacttaggcctataaatagccatatagttctcttattttgcactcattcaaagaagctagattgacctctcaaacattcaccctttggtcatttctaaaatccatgccataatcttcttctcccattttattattctcacttgattatctaaagcataaaccttactcgtagacatcttatcctacattttttgtcatcttctcacacacatatatatatatacatatacatataaatctttcatcatatcagtatcatcaccatcatttggaagctaattaaggtttttcataaggcgattattgtttcacatgatcactcttattgacatcaagactaggactccacattcgaggtaaggaaattaagtagaaaaacataagttttctgtatgtaataacattcataggaagagcgggaatagtaaaagagaa

SEQ ID NO: 139145 - DNA, 828 bp, Cannabis sativa
tgatagtgggcccgattgccatatcgaatatattttttttgttagggcctgataggtccgatacatggatcgattgttgtccgatgcttatgcacaaattttctcactgccattctttgtgttttttttttgtagtcttctaaagttccacgccttttacttccagtgtcagaacattacactggtcgtgtgacttggcagggaggtagttggtattacccaaaagtgaaacctaaatttatggaaatgcagttgttggaaagggtgaaagatgaatcccctttcaagcatttttttagagagagccattagcatttttggatgcacttatccatcagttgttcatgcataagatcaaattagataaggatgacgaagtgcatttttacattgcaaggaagagatacaaagtcgcccgagctgagttttccatggtgactaggcttaacatgttatgtggaccctgagtttgaggttgaagagaaggcgacgtcagaccatttgaaagtagaatacttcaatggggatccatccatcaacattggtcaactgcgcagcgtctttgagagttgcactaagaagtatgatgtttacaagttgggtatggtgttgtttgtgatgggttttctgactggaaagaggagaagaccttagtttcgccacttatcatgacaatggctgacgaccttccttttttctacgagtacccgtgggggatgatttctttcaacttgttgaaagaaacttagagtaaggacttcatagaaaagaagaagtatacggataggaagcttgaaaagggaatgactcagaaggagtcgaagtact

SEQ ID NO: 139146 - DNA, 676 bp, Cannabis sativa
  modified_base (331)..(332): a, c, t, g, unknown or other
gtaggccatgtgatatcatgtctagtggatttggtaccttgttacctactacagaagtggtaatctccaggaggtgggtaaggtctctccagtgttattagaagggagagaattttcagtggatctaattgaattagacttagaagtttttgatgcaatcctgtgaatggattagttgactaagtacaatgctaccatagattgtaagagaaagatggtaacttttgaaccagagggtgagatcccatttatttttatggaaaggtgcagggatctcagattccaatgatatcggcacttaggaccagggaattattgcgagaaggatgtnngggatacctggctagtgtgttggataccacaaaagatatacctgaggggaccggaaaaggttcgagtagtatgtgaattttcaaatatattcccagaagagttactgggattaccaccaaagagagagattgactttgaaattgaattagtaccaggggctgagccagtttctaaggccccatatagaatggcaccggcaaaattgaaggaattgaaagtccaattgaaaaacctacttaatctacgattcacgaggccaagtacctctccttggggtgcatcagttttgtttgtcaagaagaaggatgggtcgttacgcatgtgcattgattatcgagaattt

SEQ ID NO: 139147 - DNA, 2219 bp, Cannabis sativa
  modified_base (1617)..(1624): a, c, t, g, unknown or other
atgtaattattttggtaatgaagtaagattatgatcttacttggatcaattagtgaaatctataaaatgattatataaagggtaatttattaataacggagtttatattgagatatgtgggtatcgtggatactattttggaaataaaaatattttcgggcccgacgactggaaatttgacgatgtggtcagaaatttcatgacattaagggatggattattttaaggatattccgaactattttagaattttataatgtcggtttggtggattagtgaaattaccaaaatgcccctaggttattttaaagttgaatttacttttgagggtaaattagtcattctttaaataaacttgttttgtccctttcgatttttattttagggggctgattgtatataaaaaaaaaagaaaaagaagaacccttactataaattacttagaagctgagtaaccacaaaaaaaaaattcaacctcctctcttcttcccgtttgtgcaaccttaaaccagccacctagaaggctttcttcagccattttcttcttcttttcaagctggttcctggcccaagttagcctagaagagtttggaggtaagttctcaaccttttgcattggaaactctaagttttgagttggttttgaggtagggtgttgctttctgtggctgtagggattagactaagattggggtgtgtttagggtaggtttttgagtatgttggagatggttttaagtggtttctatggctgcttgattgagtttggtttgttgaagccaaagttgagttttcttcactttaatgtgtgaatttgattcaatgattatattgttgtgttttgaagcttggaatatgttgtattatggttattatactgttctgtgaagttggggaacaattggttaggttttgagcaagttttgggactttgaagagctgaaatttttgagtttctattgtagtgaactggaattccggatggtacagggctgcaccaaccagaattccagatggtcaattttcaagaatcctcaattttcgtattttagccataacttttcactcgagcgtgcgttttagacattctatatatcgtatcgaagcttatgaagagctctatagtataagacatagactagagccaaaagatgtattttattttagggtgttttcaccataagattcggtagaaaaccctaggttattttatgcgagttttagacagtgttttggaatagacccttattgatttacttttgtcgtgacataagacccgagattttcaagcatcattcgactcaggttggcctgcacacttgagttctgaatcgaggtaagaaaagtggtaagcactgtatgtggctaaatgttagcggttgaatgattatagccttgattattatcaagattctaattaaatgtttgttgagtctcggttgtgaccgagggttggaagcagttattaccgttatgagtaattaaacctgaaactgggaatagatttcttacttatcgtttgcttcatcgggcaacgatagtgacatatttagctcgtggttaacgagtgggaaaggggtactttataaagtaccaggattgtgtgtttatgatattnnnnnnnngtgtaagcatgttgatatgagatttaattgatgaatattactggttattgttttattcacttttcttgctgagtctctatgactcacgagtactttatggtgcaggtaaagggaaggcaaaggttgaacaaccatgagttcgatgtcgtagcactaatgtacgttttagctgcagtggcacgaccaagtgaacatgatgctctattttgaatgtattttaggaatgcaaagtttatgctgtaaaacaaacactattaaacaagcttgtaaatatttttaaaatagggggacccagtagttaatattacttatcttttatcataaagcagtttttatatggttaattttaattatgaaaaatttaattacccagaattttggtataaatatatagtatttaaataagaattttataaaaacacactcacgtggcgtcctgttggacagagcgttactggtaaactttgcgaatgccctggaaaggacataacaattatccagtctaaatctagattatcacgccagtctaaatccagtgaactgacaaatcacgggaattaaacttttgaatagggatgttcgcggtgcgggtggt

SEQ ID NO: 139148 - DNA, 523 bp, Cannabis sativa
gtattcaaaacatgaagcagtgcctattcaagcattttttatacagtatgcgattatgccaattttaggtcattttttctggaattacccagtttcttacttaaaaaacgtagcctcattcatagtccctacaaacatttattcctaaactctctcatgcatgttaaaaacccagaaaacagtgtttcctctcaaacagaaaacgaaatgcagcaaatttttgaaaactaacctttccttctggtaatctattcccacgaattgcccacgacagcactggagaatcgagaaaaaaaaacccacaaagaaaagcgaaaatctgggcaatttatggaagtttttgatggtttctctgaaagagagggaacaaggaagttaagggagttaaagaaaatgaagggaaatggggatttttgattcaaatcagagggtttaaatacccaaatccctcattaattgggatcacgacacgtggcaattggaatgtctagagtcgcccaatccaacgaccaaagatggccac

SEQ ID NO: 139149 - DNA, 505 bp, Cannabis sativa
  modified_base (467)..(473): a, c, t, g, unknown or other
gagggagtcgtacatattcttgctgaagatgttttttttttagagaatcttgttgaagaagtttagtgagggtgacgcttaagttttcctgtttaggttatatttttattaatattttaattatttaatggtttttaaaaaacagaatttacagtaaataaattaaaaatggaagaaatgaataaaaaagggtattttggtccttggaaaaataaatttgaccaaaatcataattaggggactctttttttatcattttaataattacaaggttctttttagaatttatgggaacagaaggttcaaagtagtatttagataaatcacaggggaccaaaatggtattatccctttttaatattcctagaaccccataaattctttaaatttccaatcaaattttgataacacatgataactctatggtataaagttatttttttatgcttttaaactaaaagtattgnnnnnnnagtagtgaaaatgtgtttgtttgcttaatttt

SEQ ID NO: 139150 - DNA, 548 bp, Cannabis sativa
tttcacgtttcgacggtgatttttttgttgcatcgactgatactattttggccataaatctctcgatattacttggaataggacgattcaagatgttccagaaagataaaagaaatatctagaacttttatggtttaactttttccaaaatataaccagaagatagtcgaattcaagcttaaagtttgagcttcatttttttgcgtaattttctctattttaaatatcatctttttgggagatagtcgtgcacagtgggagcccgtcgtcgttgtgcgcatcgtctgcacagtgggaggccatcgtctgttgattgggaagcaaagagagatctcatcaaaagcttttttattttttattttttgaaagcaggaacacattttacagatagagaaagagagatgagggtatacgactggatgctagggtttggtctttttatattctcaatgtattaaaaaaatatattttacttcactttatcaattaattattttattacaaatgatttttattttacatattttattaaactgaaaaaaattaaa

SEQ ID NO: 139151 - DNA, 947 bp, Cannabis sativa
tgcactttctttagaccagtaccagcaatcatcacaaggagtatcactcagttgaattgacaagatcaagtttctgtcatgagcattgaaaatgtcattaactatctcctcatcccagcccctcccttccatcttcataaggcagtccacggttcttcctactagacttggatggacagttgtaatgcatttattttcattcccaggaagccaaggaacaccaataaccgcagtcaatttaccatcaccaatagcccttcttgcacccatcttgactaaacttttagcctcccatatactacgccatataaaacttgggttagaccccaattctgcactaaggaagtctctattaggaaaatatctagctttgtaaagcttagaaacaagagaattctcatttgtaagtagcctccacccttgtttccccaaaaaagctaagttatattcccttaaatttcgaaacccaagaccccctacatccttgtgacggctcaatttattccaactcatccaactaactcctttagaactagaatcggattgagatttccaccaaaatttggccatcatcccctcaagctgagtacaaatttctttcgtaagaagaaaaacactcatggcaaaacttggtagggattgagcaacggatttcaccaagacttctttcccagctttggacagaaatctagtctcccagcttaggattttcttcctcatcttttccttgagaaaatccaaaatggcattcttgctacgccccatcgtacaaggcaaaccaagataggtactattttctgtagcagccgacataataatgatactattataaataaaatattttattagtataataaatttatataattttattcttttaattaaattactataattagttttcttcttaaattttatttttttaatcatgtacttataccatacat

SEQ ID NO: 139152 - DNA, 862 bp, Cannabis sativa
  modified_base (57)..(59): a, c, t, g, unknown or other
ttctattttaccagcgcaataccaacttttgtcagcacaaaaatatgctggcaaaannnacatttcttgtagtgtgtatatatatcaaactgcctaactcaaattaaattataatatatattttaattaattaataattcaacatttaaataattaatcaaataaataaagaaaaatcccaaattctaaagaaccttgaatttttgtaattcaaattcaaactttaccacaatttattaatcacttgtatttacattaatatgcaaaaaaagggttaatgtaaaacatcatttgtttcaaattctacttcattaattaagaaggcaacaattattattaaaaaataatagtcaaaatgtaattattctcaattaattgtttctaaattaatactctatctaaaacacacatgaaattacaactacatagaaagtaaaaaaaattaactttcaatttaatgatatgaaatttagttgttggcatttcattgtcggagtgaaaaaaaacaaaattgttaaaattattttttaggaaggtaaatctctcatgttttttttttttaatttaaatttattattttgagtaaatcttaagttttgaactatttgtagttaataatcttgctttatatagtattagcatttcatttggtgagtggaaaaataagaattctaaaattaatttcttaacaaaaagataaatgtcattttatatatttctttaattttattattttgaataaattttaaaatttcttatgaagttttgactttattatatacattaaaaaaaatcttacttttagccacaacaaaacttgtaattaaaagtaaaatttttttgactaattataaattatcat

SEQ ID NO: 139153 - DNA, 929 bp, Cannabis sativa
tctatctgaaacgatagactttggtaccccatgaagacgaacaatttctttcacatacaagtcagcatactcatccactgtataggttaccttaacggacaagaaatgagctgactttgtaaaacgatctaccacgacccaaaatgagtcgtacattcctgtggtcctaggcaagccaaccacaaaattcatcgcaatgtcttcccacttccattctggaagtgttagtggctgaagtaatcctgcaggtcgctgatgttccgctttaatttgttgacaagttaagcacttagtgacatagtctaccacatctcttttcatcccataccactagaaatagggtttcagatcttgatacaacttggtggttcaaggatgcaatgaatagggggtggtgtgagcttcatccagaatttctttcttaagctcactgatatcaaggacacacactcgtgctttaaacaatagcattccactatcagagattgaaaagtccttagctttgcctgctaagacatcttctcgaatctttaatattttaggatcttccaactgtgccaccttaattctttctagtaagtctgactgaagcgtcagattatataatcccttaattctttccagtaagtctgactgaagtgtcagattatataatccttcactagctctaaccatctccgttgtctcatattcaaatccttctgagtgaaaaagtacttgagacgattgtggtcagtatagatctcacacctttcaccatataagtagtgtcgccaaattttcagggcaaacaccactgctgcaagttccaggtcgtgagttggatatccagatttcaagtcaatcttggagaataccgtcttgccctgaagttgatcaaacacatcatcaattctaggcaaaggatatttgtttttaatggttaactt

SEQ ID NO: 139154 - DNA, 1021 bp, Cannabis sativa
caacaataatcgagaaagtgcttaactataagacccgaaacttaggctaaaaatagcctaacaacgcataagtgtgttgaagtcacttatttgtactccaagattcgtacttccttcgtacttggttgtggtcggcatcttaaacccttgcagatatggtaaggccaatattctaggagagtaaggcttcaactcctcattcgaattacacccaacgacattttggttgttggtcaccgttcattgttgtatcatttgttccaaagcattgagcttaggattattgacctatccttcctcaccatggctagcttgggggaggttattttgatgtcccccattgatattatggttattatttgccactggtgggattggatttttcccttctattcaaatgttccctcaaatcaagctgtctttgattgaggtgttctcgcaaatcacggccttcttgcttcccttggagaacggttgttgtggcgtcattcataattgcggagtgcattattatgaacactaatggtgcgacttttagagtcagaccgaccactatccttggcaaagctcactattctttgttgttgtagatgataaggagagtgtggggaccgcttgaagtatggctcggagtaggaggtcaaagtagtgtctgattcggacacataactattttcttgggtaagttggagccttgggggcgtcctttgtttttgcccacgatatgtgagcctctaacgagtgcgatcttcgcgaggtgcgatgcgtcgcctatgcctcctaggtggttgagcatgtggcgcattaccactggaggcggaccgccttggttcttgcagagtggtaccaattgacggatcgaggtaccttataggtgacggcatcgctcgaatcggggaaggttagtctctcctttcttctccagccatgttattattttcacagttaggccttggaggaacagtttgggtcccatgagttccacgaccacctccatgtaatggtacatgggtttcttgtg

SEQ ID NO: 139155 - DNA, 1061 bp, Cannabis sativa
gctgggggtatagccaacctgtatgctacttgccctatcctctcaaggatttcaaaaggtccaatgaaccctgggctaagttttcctttcctaccaaagcgtttgacgcctttcgtaggcgatactcggagaaataccatgtccccaatctaaaaattaatttttgacgctttggatcagcataactcttctgtctgctctgagccgcgagcatttgcgttttcattttatcaactgcctcaattgctctctgaacagcctcagggcccaagaactttctttcacgcacttcatcccactatataggtgattttcactttcttccatataagatttcattaggagccatcctgattgttgcgtgatagctgttgttgtacgagaactcgatcaggggaaggtactttagccatgatccttcaaagtcaagcagacacgctcgtagcatgtcttctaagatctgaatagtcctctcagactatccatctgtctgaggataaaatgttgtgctaaactttaactgagtacccatagctctatgtagactctccaataatcttgatgtaaattttggatctctatccgaaacaatggactttgagactccatgaagacgaacaatttctctaacatataattcagcatactgatcaatggagaagttcgttcgaatatgcaaaaagtgtgatgactttgtaaacctgtccactatgacccacaaagagtcgtattgtcctgtggttctaggcaatccaaccacgaagtccatagcaatatcttcccatttccactccgggatattcaatggctgcagtaaccctacaggactctgatgttgagcttttacttgctgacaagtaagacacttaacaatatactcaacgatgtcattcttcatgcctggccaccagaacatggctttgaggtcttgatacatcttcgttgaccatagatgaattgagtagggagatgtatgagactcattcataatctctcttttaataccatcatccataagcacacaaacacgattcataaatcgtaacattcccatttcatcc

SEQ ID NO: 139156 - DNA, 990 bp, Cannabis sativa
gacgattgtctgcttgagcgagtagtgtgagtgtcaaatcttcgatgccctgcatctactgtatggtttcttttatcgtgttccctcagtactgttgctctccatccacgtcacccattggactcgttcaagttggtcgcttctctcattttatgggagtggtaaccatctttctgactggttcaatatctacttggttccacccgtttggctaattggccggactcagacccaattgcggggtgaaatggctcatggcccataagctcacccgtttgtctatttcaaggcctagtgagtttgtctggctaccttattgggcctaataatattgggttcattactgataggcccgtgtgacttgcatattggacttctcaaacatgttgtaaatattaaacaactttttcaccgctacagtacccatattcacatcaaatataatgttgatcgaaatcaaattttgattcaaattgagaaagtcgtgtatcttatctaccaaatctaagaatttcatatctttatgcaccattacgagtttgatttcaagataagtatctttgttgtttgcattctatctttcattaaaaactatgtccaacatccttgattcttcttctgcaatattacaaatataaaatcaattaggcttgacgatttccattcttttgcactattgctcacatattagattaaaagttattgacatgattacttttcaaaaatttactccaaaagctagcttctagaataactgtatctgattaattacaacaagaaaaagaaaaagaaaatgctatatatataggtgtgtatacctataacacagggagagagtactaactttatcatattagctatatatatggttacctttaataaaaatcatatgtataaaatgtttgtgtcttttgcacaccttagaaattgcaaaaaaggcaccaatacaagctagaaagtcaaccttatcaagcttccaaatatggtagg

SEQ ID NO: 139157 - DNA, 1549 bp, Cannabis sativa
  modified_base (32)..(59): a, c, t, g, unknown or other
tttagaaagttcttatttaggatgttaataannnnnnnnnnnnnnnnnnnnnnnnnnnnggtaaaataattccaacagaaggaactttgcactatacgaagccatgacagaccagctcctcttgccaataagaagctgaaattgaatcctcccccggcttcttcaagttctgaagaggaagaaccaatggaggtcccatttgatgattctgagaccaaatccatgtctatcccttctgaaaaagagcttccagaagactttggagtctcctctgacaatgaggaaactgattttgaacctgagcctccatagaccaaatctgctcctacacctcctcatgcatcttcagcagccaaagcctctactggtgccaaaggcaagtagcctatgcagagttcatctcctggaaatatctctcattctcaagctgtcaattccagattttattatcgtgataatcaacgttactggaatctttatgctacccgaatgtttgaaagtgagaggaattatgatttacatgctcatagggtgtatggtattgttaagtttgttcaataccatcaatggaaaaatactcactggttttgaagggtatattgaaagtattgtcaaagaaatatatgccaatttgactaatgatttgcttgatgagaactctgaaattttttggtaaagtctatgttcgggggcattggttttattttactatcaacgacattgttctggctttgcaattacccgaaggtgtgtccaatgctatcatgtctatggattgccatttgatgctcactgaactcactggtgcacgggtcgaatggaaatctgggcagagtcttcaaattagacatctcacttatgctcatgcatcactcatgaggtttgcaaaaccgtggtatctcaagatttggcatcctttctctttcgtatcacctcgggggcatccattgatctgacttcttcaatcttggaccagatgcttcattttgaagaggtaaaaaccgtactcataagcttgtgtttcctaacttaatctataaaattttgtcctcttagaaagatgtggcctactctcatgaaatacttgagcctccccttatgggcaccatctttcaaccctcagagtattttgaaggagcttttcccaagcgtcctaaagctagtgatgttgctgttgctggtggaagttcaagttctgctcctgcagatgttcaggaggtcaagcatgaggttcaacaggtgaacaattgtcttgctgccatggaggaggttcagcaagagatgttcaagcagttgtcctcattgatcaagctctatggggcataagtttttctttctttttcttgtttttgttggacatattttcatgatttttgtctttggcccttagataaacaaaaaagggaagtaataggttgtttttaatttcttgtctcaactctggaccctttttacagggggagttgtgtttggtacttgtggttaacattggatttaaagttatcttgttattttgttatttcaatttttgattgtgtttctcaggggg

SEQ ID NO: 139158 - DNA, 500 bp, Cannabis sativa
tataacttcatttaattattatattttttttaaaaaaaaaataatatgtaataaacatttttataagttttttagctaatttattatatttggctattttcttaaaacttttaagaaggaaacatttactcacttaactttcaaaattaaggccattttgcatcttagccctaaaaaaagttgggttgatatacaaaatgattttaaatttagaaattaagtaagtaaatgttactctttttttttttaaaaaaaatagtaaattgattaaatattaaattagttaataaaaattataaaaaaattatataataattaaattaaggtattgaaaatttttagtatttcatattaatatattgtaataaaaaaataaatatattagatcattaaatatgtacaatagtatttaatatatcgtatcactgaaaattactataccgtagtgttgctccagaattcgcccaaaatacgtggaccagtcgagaggggacacgtgg

SEQ ID NO: 139159 - DNA, 870 bp, Cannabis sativa
aaatatgatatatatatataatattaaaaagtaatttgtggtataaatagtttaactctcagttgtaaataaatacttaagtttttttttgcggtatcaatacctataaaaaatttataaacctaataaaaaatttgcgacggatgtttaaaattttttaaattatatatataataaaaaattatatattttatttgatgataactaaattataaaattgcatcaaattttaaatttattaatttttatataaattttaaacaaaattattattaatataattaataataataaaatggtagaataaatatggaaaaataaataaatatttataaatctaataaaaaaattaaaaaaagagaaaattaaaaagagatgagataaaattgtttgaagtgattttaaagtgtcacgtcatcgcatcatacttctcttttatatatatattgatatattgattgctatattgatatattgatgctatatcataggctataaaagaaaaaatattatatactatccattgccattaattgctataaatatattaagcaaattatcatatatctgttagagatattattacaatggaagataaactaagatatatacaactcaattgtaaaaataatataaggacaataaaagaaattgattaaatatatgttatacaatagacatatatacactatatatcatatatacactatatatcatatataagaaaggtagaagaagatagattacaacacatgtaatataatatatgtatatatatatataacaagagaatactatatatgtatacactcactcacagtattgactgtagattagtggggatcaccatgacttgaacaaggtattaca

SEQ ID NO: 139160 - DNA, 650 bp, Cannabis sativa
aaaattttactttcattttttgattaaaaaattagaaaacaaaagtgttaccaaacagtacctatattgttctttttttatgaaatttgtcattaaaagtttattctttcaacttttttttcctttttttttctgagttagtgatagttaaaaaaataactataacctaaaaaaaaaacataaaaataaaaaataaatgcacatatatacaacaaaaaaatttatctagaataaactgaaaatatacatgataaaaaatatacataaactaaacaacaactgtacaaaaaaaatacataaaaataatagaaaaataactattaaacaattattgaacacctaaataatataaaaataactataaaataacaaaaaagacaactataaatcaaaaataacaagacatatataattcttgttaaaatatgaaaatcattcataaattaactctgaataaactacaaaacatctaaaaaatatactacgtacttttattgatcatgtaaaagatagaaattataggagtgctcttaattttttttgtaagagagagaaagagtattaaaaaaaaagagataaaaatgtacacttattatatatatttatataaatatatacaaacaggggcggacccacattgtagcgagggg

SEQ ID NO: 139161 - DNA, 544 bp, Cannabis sativa
tgcataagtcaattactttgtatttttgagatctatttaatgaattttatttgaaggcgtggccccaagtaacaatctggaaggattgttgaaactacatacaaaaaatttgtgtgtatttacttttctgcactgttcatttttttagtttattctaaagttacagagttgcctcctatagctacagaaaaactgtttcagtacctgttgacttcacttctagccaacgatagtgagtcaagataaaatgattaggtaaaataaataacataaagcaaaaataataaggaaaaaataatactaaattttctagaggttcgaccccgtgagaatggtaatagcctactctcctttaagttgtattgattcgagagtacgaatgaagtgttctttctctccaaagctcttacaattaatctctgattaattctctctcgtagatcgcttttctctcttgagtgttcttctaaactcaatttcttgtcccctcaatagtgagattatgccactatttataggagcttattacatgaagagtggtttc

SEQ ID NO: 139162 - DNA, 870 bp, Cannabis sativa
ttgctccgttagttgcaataggaatttaattaaaaattttgaaatataaaaataaaaaaattcctaattattctatatatatcttgcaattttttttttaaaaattcacaatatttattatataaaaaataatatttaaataataaaataaaagagtcgtgtaagatagtttaaatttattaaattttttaaaatttctcacaattttatgaaatcttttaaatgactataaaatatatataaaaaaataagatcatttcacaaatacacaaaaacaataaaaaaattacaaaaatacagttttaaaattttaaatattttataatttttttaattttatttatagaaaatacaatcttttttgctgtatttttgttaatttttttgttatctgtatgttattttttgatgttgttttagcgttatttagatcttttttttttttttttcatgttactcttaagtaattttcttgttgttgtcgtgttgtttttataaaaaaccctaaaattataattttttttaagtttgtaatttttttaaaaaagtaattattcctacaaaaattactaaaaatttctgcttaatacaaaagtgatagaaggtgcgtcgatacaattgagtgaaccatagaatgttcctatatatttaattttatttttcgatcagcacatttttgtacgtctagcacactaaacatacagagtaacagatacatactaaacatagcagactgtagtagagttcggtgaacatggtgatcaactcccttgaaggtctaatccctagagaagaaagagtagtaacaaaaacaaaatacgaagaagaagaagaagaagaaaatataagttatgatgagcttgagaggcg

SEQ ID NO: 139163 - DNA, 1183 bp, Cannabis sativa
  modified_base (579)..(589): a, c, t, g, unknown or other
  modified_base (983)..(985): a, c, t, g, unknown or other
aaattattaatgtttaatttaaatattattattttttaaaaatttagtttaattttttttatataagtatttattttcaaaaaataattttagttaccaattttgctatcaatataatatttatcaatataaaatatcaaactttatttttctctcctaattaaaggctacgctcaattttaattctctctttctctctcttttagtgtctcttaatctctctctttctctctctaaagcaacaattactttacaccatattttaaaaaattaagtaaagtggattgaaaccctgtgaagatagtaaaaataagtaagtttaaatcttctcaaactccatttaattatttaaattttgttatttgagtttttggaatttatttgctgaatgtgtatcacattattatagttatttaagacattctgcaaaattttaagaaatttggaaaagtttaatacactgaaaacaaggtttaaatagtgtgttgcacgagtgactattttattttatacgcgtgtaaaagagactgtttgaatattactttttatattgtaaattattccgaatttttcaaaatnnnnnnnnnnntcttaaatagctataacgtacacgaatatgaaaaaaaaattagactaaatttttctggataccgaaacaagtaaagggtacatcaatacatcccttttaagggactgcattgtaaattcacccaatatcatatatttctagagtttaattcaatattatgattagcaatattacaaatataaaatactaatgtaaaatagataaatgaattattttcgtataatgttttatattagactttaatttaattatttgtggcataaatattgaaaatttaattctgggttacacattattttttacagtaataatagtagttaagttatatttctgaactttcgttggtacctggccatcaaatgttaaatcattatccacatgtcattttcttatnnntatatttaaattaatttttaaattaaaaatataaattttataacttggactaatcaaggactgtgacgtggctattaacttggtacttaatggtcaggtatttacagaaattttagaaatataacttaagtatcattattattaaaaattaaacttaaatatttatgctacaaattactcattttataaatgataaaa

SEQ ID NO: 139164 - DNA, 626 bp, Cannabis sativa
agaagaagaaaataaaaatgatatatcattgtttagaattaattttttttttgttttaagtttatgtttttagaaaatgtataaaaaaattatatatactcggatttcgagtgagtttaggtgtaacttagtttttttgagttttagatttatgaaatccgaacccagccataatgaatcgggtgtaactcgaacccggtttactaaaattgagagctttttttttttaggattttttgagttttgggccaggtaggtttcgggtttctggtgtaaatgtgcacctctaatttgtatgatttatgatacttttttgtaaaaaaatatttttaaagaagccttcagattccctagtaggtgctacaaatataactattataattaagtaaaaaagtaatgtataaattaatatacgtgatattaataataatatatactattggtatatatttcttaaagatattacataaactatttaatttagaatataaataataaattaaaaattaaaaatatagggtaattttacaatggacaccccaaaatcagatatatcaatacaccccttaaactcttaataattattgggtcttatatcaagtccacacactatttggtggggtgca

SEQ ID NO: 139165 - DNA, 909 bp, Cannabis sativa
  modified_base (66)..(79): a, c, t, g, unknown or other
tctcttcacaaatgagaaaaatgcgaaaaatgaaatctaaaagagttgattcgaatggctgctctnnnnnnnnnnnnnntagaacatagaaaccctagagacaactataaagtcgaatctacagttgtacaaaactttcctaaatacaatgctattttgtagcatcagaaatagattctatcatagaaaattagactagaaaaggaaacttgccaaaaacgagtatcatcttgtattgggtcttgatacctgtgataaacagtgtgtttgatctcatcttatcaagacacaatcaaacttattaaggaaaataataatagtcaaagtttcctttaaaaaccaactttgcataagagaatttcttctcttacaagaagtttccatacatgaaaagaccaagtgaaaatcattctttcctaagatagaaaagagcaataaaaactgaataataaaggtgagaaaatcggttatgaatgtaaataaatctcaccacaaaataaaaaatattttgggatctaaattgccaaaaaaaaagactttacaatctccccctttggcactttagataatcaaaatattttttaacaaagaactacctaaaaatcaaagttagctaaacaaaaaaatacactccccctgagagtcataatataagaccaaagtaacaaaaattataagctaacttttaatccaaagttaatcacaagtaccaaaatacaactccccctggaaaaaggatctagagttgagaaaacaagaaattaaaaacaattaaaatcaaactattactccccctttttgtttttctaatggccaaagacaaaaagtaatgaaaagatgaaaatgcgtccaacaaaaaacatgaaaatgcaagagaaacttatgccccataaagcttgatcaatgagg

SEQ ID NO: 139166 - DNA, 653 bp, Cannabis sativa
ttaaataaaactaacactacgtggcttcgcacgtaacaatcacctagtatataaatatatatatatataataaactaagaaataaatggcgctttgattgcagttatattttactttaaaataattaagtcataaaattacaccaaattaatttttttatatttttgataaaaaaaaaattattagtattttattaaattttttatattttaaactgaagactaataaattaatatcttcacacattataggaaaaaaattaaagattgaagaatcatcatacaaaatggaaatctaaacaaagaaaagatattataaagagaaatgtaagtaaatgaccctatttctaactatatagatagttaatgtctctttttttaaaataataaagcaaatgtctttttttactttttaatacctaaaataccattcattatataaaaggtattatatgttttattcctttaatttatgaaaaacaataaatcaaaacctctctactgaatttttgtcaaatattttttcattatataaaaagtattatatatttttattcttttagattttgatgctgttgttgttgtctaatatgttatttaaccatataattaattttttattaatatatcgtatgatatacaaacaatatacct

SEQ ID NO: 139167 - DNA, 1635 bp, Cannabis sativa
atttcctcaatatttgtgttattgtatttatcgacaacatccttgtatactctcaatcagaagaggagcacgagcaacatctctggatggttttacaacagcttcgagaacataagctatacgccaaattcaagaagtgcaaattttggctatctcaggtgtcctttcttgggcactttgttagaaaatatgggatcaaggtggatccgagaaagatagagtccgttagggatttgccaagaatgaaaacagttacagaagttagaagtttcttgggtctagttggttattatcgtcgttcgtataagggttctctaaaatttctacacccttaatcgagctcactaaaaggaatcagcgttttgtatggacagagaagtgtgaagcaagttttcaggagctgaagcaaagattaatcacagctccagtgttagccctaccttctgataaagagaagttcgtggtttattgtgatgcatccagagagggactggggtgtgtactgatgaaggctgaacgagttattgcctatgcctctcgtcaattgaaagagtatgaacagcggtacgcaactcatgacctagaacttgccgtggtagtatttgctttgaagatttggcggcattatctctacggagaaagatgtgaaatttatacagaccataagagccttaaatatttatttactcagaaagacttgaatatgagacagaggcgttggttagagttgattaaggattacgattgtgagatcctttaccatccagggaaagccaatgtagtggctgatgccctgagcaggaagggtcctgaacaagtaactattatggtttagatttcaccttagatagcagaagacatggtcaaatcaaacatcaagtttgttgtgggtaagcttcacaacttgacgctacaatctgatctattagaacaaattaaagctactcagttaactgatccagagttagtgaaaattagagaagaggtttcagttggtcaagtcaaagattttacagtgtcagatagtgggatgctgttattgaagaccggggtttgtgtttcaagttgcacggaacttagaaatgaaattcttgaagaggctcataccactccatattccctgcatcctggcaccaacaagatgtatcaagatcttaaaccctacttctggtggaacggaatgaaggagaatgtggtagaattcgtatcgcaatgcctaacctataagcagattaaggttgaacatcagagaccaacaggtttgttaaagcctttaacactacctgagtggaagtgggaagatatcacgatggactttatggttggattacctagaaccacgggtttatttaattcaatttgggttgcggtagatcaattcacgaagtatgcacattttctaccagttaagacaaccttttcagtggattaatatgtggatttgtacgttaaggagatagtaagattacatggcatacctaagtctatagtttcggatagagatccgaagcttacctctaaattctggaaaattttacaacgagctatgggtaccaaactgaagttcagtatagctttcgatcctcagactgatggacagtccgaaaggaaaatttagatactggaagatatgtt

SEQ ID NO: 139168 - DNA, 1137 bp, Cannabis sativa
tcctggagttgaggtaacgtttgacaacgcctccggtgttagctttgtcatcagatccagagaaatttctagtttattgtgatacatccagataaggtttgggatgtgttctgatgcaagctaacagagtcataatttatgctttttgtcaattaaaagattatgtgcaacacaattcaactcatgagttaggtcatgttgtggtggtttttggctttaaagatatggcgacattatttttatggtgaaaatgtgatatttataccgatcatgagaatttcaagtacgttgtcacctagaagaatttaaacatgagacggagaagatggctagttttggttaaggactacaatagtgagattttatattaccccgggaaggccaacgatggggccgatgcgttgagtagaaagaattgtaggcaaatttgtactactgttttgatagccttaactagcctctgaaatggttaatgcatggattgaattcatagttggaaagttacacagtttaatacttcaatctgaatgattagaaaggatcagaaaagcgcaattggaataccctgagctagttgaagtttcgagcccatgtaatggtcggttgacctaaagactttttagcctcgaacagtggaatgttgttatttaaagctcgagtttgttcttctaatgttgaagcgatcaagaaagaggtacttgatgaagctcataccacacttatttattgcatccaggaaccaccaaaatgtatcagaatttaaaaccctatttttggtgatatgggatgaaaagagaagtggtggattatggtttaagtgttaaacctgccagcaaattgaagctgaacaccagaggccggcagggttactgcaatctttagtccttcctaagtgggagtgggaggacattgcaatggattttgtaactagagtacctagaactacgggaatgtatgattcagcaaggtacatagtggacggattcacaaaaatcagctcactttctaccaatgaaagctacatattcagtggatcaatacgctgaactgtatgtgaaggagatagtttgtctccatggagcctcaaaactactgtatcagatagggatccaaagtttacatcgaaattttgggtga

SEQ ID NO: 139169 - DNA, 820 bp, Cannabis sativa
  modified_base (746)..(773): a, c, t, g, unknown or other
ttacgcatttcaattaaagagcagtgtagctggcttatttattaaatatataagagcaactgtgtatatggttttcagtttctataagataaatttaatatacttttccttattaaaacttctacttcttaagaagagttattaaataagaaagtgcaatgttacttagctagggccgtttggtatgcacgttttatttcatgagaataggtttaacattgctttgagagtaatgaagggaatgataaacttaggaaagcagcattaccgtatttggttgacattgaaatggaatgtgataattttttttttacaataataattatttttttttttataaaatactaataattctatatttttttctttctttctaagtgtttaaaataattttatttattattttcatataattttataaaaaaaaattaataataataaataattataaagagtaaatttatacacaaattgataatatattttaatataaaataaaatatataaaaaaacaagaaaaatacttcatcgtttaaatatttttatatacattagtatttatatatataaaaaaaaattttaaaatgcaaaagtttgtgtttgccaatagcattggaaagtgaaaatcacatttttattgggtttttcttgccagccaaactaaagcccaccactttcacttagccaacattaaaatattaaaaatctaaccaaatataggaaactttcatctatgttagaatttnnnnnnnnnnnnnnnnnnnnnnnnnnnnaaatttaacaatctcaatagtttagggagaatttttaacggccaaaa

SEQ ID NO: 139170 - DNA, 856 bp, Cannabis sativa
gaacaagaaccaaaatcaggaccctagaataggaattggacctggacccaaaactggatctagacgcagaaccgaacacagacccagacccagactgggactgataccaggacccaggcccaaacccggacccagacttgcgccaagacttgtgacttaggacccgtgactcgagacttggaccagaacctagacccgtacaagaactcagacccagacccagacctagaccaagaaacagactgaaacccggactcagacccaaacccagacctagacccggacacaaacctggactagttctataactcgtactcgaacccaagacttggacccggactaggacccagactgggacccaaacccggactaggacctagacttgaacctggactaggactagaactcagactgggacctaggacccgatactcagacctgggacatgagaaccgaaccatgacctagacctaaaccaggccaagacccgagagaaggaccattactgaacacagaccaggacctacacgcggactgggaccttaagaccgggaactaccacttgacttgaatcggggaccaagacccatgacttggacctaagacccgaaccaggacctaagacatgagctagaactggactaggatctagattttaacctgggacaggacccaagacccgaggcttggacccgacccatagtcggtgtctaaattagggaatttgaccttgacctggacctagactcggaccaaaacaagaacccataccaaaactcgaactagactcgacatgtggttggtgtttggattggggaccaatactcagacctgaaccaaaacacggacctagacc

SEQ ID NO: 139171 - DNA, 696 bp, Cannabis sativa
catagcccgttgcaaaatgtgccagaatttagaagtaaatttctgatctctatccgaaactatagactttggtactccatctaatcttactatctccttaacgtataaatcctcatactgatccactgaaaaggctattttaactggtagaaaatgtgcagactttataaattgatctaccacaacccaaattgaatcaaataaccccgtggttcaagctaatccaaccacaaagtccatcgtaatatcttcccacttccattcaggtagtgttaaaggctgcaaataacctaccggtctttgatgttcagccttaatctactgacaagttaggcattgcgatacaaattctaccacattcttcttcatttcgctccaccagaagtagggtttcaaatcttgatacatcttggtggtgctgggatgcaagggatatggagtaatatgagcctcttcaagaatttcatttctaagttccgcactacttggaagacaaaccctagtcttcaacaacaacattccagtgtctgatactataaagtatctaacttgaccagctgatacctcttctgtgagtttcactaactttggatcagttaactgggtagctttaattcgttctaacagatcagattgtagcgtcaagttatgaagttttcctacaacaaactcgatgcttcatctgaccatgtcctc

SEQ ID NO: 139172 - DNA, 1314 bp, Cannabis sativa
  modified_base (385)..(385): a, c, t, g, unknown or other
caaaatggaatccctaagattagggatatctgcaatagctagtcttccgatatggtatagatacccttcaccattaactgtccacccgtctagttgctcaccgtcctagtaattggatttaaaaaatcatccaatctaatccaattagacttcaaaatccaatccaattactaataattggattggatcgattttttgattggatatctaattacacacctaaattttaatattaacataaaaatatgaagaaaatacgtaaaaattaaatattaccttctatttaagtttaatactcaatgaatatatcatcattacaatgtaatgcagctaaaaatttcaaataattaaaataacaacatttctaagtaataaaatagaacanaacatcatgaaaataaatacactaaacaaccaactgttacaaatttaacacaaaaataaaatccaataaaaatataattaatatatattatattttttattatataaataaatataaataattttttaacatatataaatgtaattggactagattggattggtttttaattggatcttgagattgatatccaataaccaatccaatccaattacaatccaacttttagcatccaatccaatccaattattattggatatccaattttttgtaattggattagttcagttcaattgcattggattggatgttgcccacccctaatagtgttatggttttacaagttgttattcaaaatacataatagatggaaaatatccctaaaaaatggggtagttacactctgacgaagatttcctacttttgtgggaagttcaagtttttccaaagttgtaggtgtgttgtagatgatttggaatcttttgcaaggcctttgggaagagcacaactattagagcgtaatacgtgtatttttcagctagccatatttggaggttgcccggtatacaggctgtcacccttggtcggccagctaaatgttcggccagagtcatgccaatgcttgtgtatctctatctttactagagatacttgtattaagatgaacttgcttcagaaccttaaaagatgagaattttgtaaatctccatgctcttcttgttttagtgcatcttgcaacattgagattttgagggataaggattgcacgacactagcatggccggttagtactgaccggtcccccatgtattttttacttttggccacgtggaggtggaggtatcacgttagatgaacaaaaattggaataatagttttatataataaaattagtaagagtcatttattttttatatttttaataaaaa

SEQ ID NO: 139173 - DNA, 540 bp, Cannabis sativa
aaaaattagaagatgaaaaataatttaataaatgagatatatatagatgaagcataaaagaatcaatatcaattttatgaataaaaaatacaatagctacattctaatctcaccaatattttataaatagttcacttttgtcacaagtaaaactaatttagaaataagaagtaatgaaagaagtataattgttactctaaaatctgatgatgtttacattatctttgttctaagattcatatatttcgtgcatgagaatagtagtttagtggctcaaaatgttgagataaaatgggaaaacatgggtgaaattgcatcgggtcgggtaagatgagtggcgcaatattagtcggcgttgactgtgtgcatagcaagtgggtcccaattgtggcagaatcttgctctagagtggaattgagtaatgtgaaaattacataaaatataagatttcataccaaaaaaaaattagaaaaatatggtatttataggtttgtcactcttttatgatattttttcatatttaagattttttatggtatt

SEQ ID NO: 139174 - DNA, 1140 bp, Cannabis sativa
  modified_base (219)..(223): a, c, t, g, unknown or other
  modified_base (501)..(506): a, c, t, g, unknown or other
tggtaaaataattccaacacaaagtccataatacaggctcgcagtaaatctttcagtatctgaattattctttttgattgaccaccagtttgagggtaaaaggctgtgctaaacctcagcttgatacccatagccttctgaagactcacccaaaacttcgatgtaaatttggggtccctgtctaaaacaatagacttaggggctccatggagacgaacnnnnncctttacatacagttcagtgtactgatccactgaatatgtaacttttactggggaaaagtgagctgattttgtaaatctgtctactattacccatatcgaatcatacattcttgtggttctaggcaaactagttacaaaatgcatcgcaatgtcctcccacttccactcaggaaggactaaaggttgtaataaccctgctgacctttgatgttcagctttgatttgctggcaggttaagcatttggagaagtagtccaccacatctcttttcatctcnnnnnnccagaagtagggttttaaatcctggtacatcttggtggttcccggatgtagtgaataaggtgtggtgtgagcttcatcaagtatctcttttttaaactcattgacactaggaacacaaactcgagctttatacaacaacattccattatttgagattgaaaagtctttaggccgaccagccatcacctcatctcgaaccttgattagctcgggatcttctaattctgcttttctaattctctccaacagatcagattgcagtgtcaagttgtgcaactttccaaccacaaactcaacccctgcattaaccatttcagaagctagttgaggggctatcataacagtggagatctgctcgggacctcttctactcaatgcatcagccacaacattggctttctcgggatgatacaaaatctcacaatcgtagtccttaaccagttccagccacctcctctgcctcatgttcatatctttctgggtgaaaaagtacttgagactcctatggtcagtataaatctcacatttttcaccataaagataatgccgccatatctttacagcaaaaaccacaacagtaagctctaggtcaggagtgttgctaaaaattataaacactacgcaagtatacgca

SEQ ID NO: 139175 - DNA, 1459 bp, Cannabis sativa
ttttgtccataatcaccttcctgtggaatcgaccgcccgatctatactacaaccaccgctagtggaagtcacatttgggcgttaaacagcagtaaaccgagcctcaagcagatcccgctcagcctgagaaactctggccccaatattaccaataccatcttccacctgttgcacagaaggagaagtagaggagaaaattgtaccaaaataacgctcaatctcactaacaatatcttcttccgtactcaacctgcggccatcctccgtcgtaatctccacaattgcgttcttctttttcctccccgtagccttattgtggaaatacttagtatttctatctccaagagcaagccaatccgcccgcgatcttaatttccagtaacattcctcacgagttaaaaggtcattcaatttatactcaagatgctttacctcctccatacggaccaaaggcacagacacattaagaagatcatccaattctttctgagtttctcgtacctgtctaggaatagacccatacttactcttattccactccaccaactgatccgcacacaagccaaaaatatcaataagactatcttgactagctaaaggataatccgttgacaaccaggtcctattaattatttcttgacagtcaggatccttcaaccaatgagtttcaaaccgaaaacccctctttttatcatactttcgccgcctagtaacattctccaaagttgccacaataggtctatgatccgagtgaagaaagtcaccattaagtaccttaacaaaagggaacaaatcatgccacctttggttgcaaacataacgatcaagacgttctgggacatgcgcacccccattccttttattcatccatgtaaaacattgaccctcaaaccccaaatccgccaaagagcacccatccaatgcattttggaactcagtcatagccaccatactccgatcagaaccaccctttttctcatttatcgaaagaatctcattaaaatcaccaccacagatccatggaagatcaaataaatccttaagtctacataataatctccatgattcagaccgacaactcgcctttgggttaccataaaacccagtgaaacgccataaatccctaccaggacacttaaccagagcatcaatatgaccagaagtgaatgacttaacactcacctcccaatcattattccataacaataacaggccaccactcttcgcaacacaatcaacatgaaaactatttgaaaaattaacttgtcgcctaataccttccgcccaaccaccataaagtttagtttccgacaaaaaaactaaacttggggagaacttacgaaccactgctcgcaaggctgtcaacgcactagggttccccaagccccgggcgttccaacataacaaactcatggctcctggcgagcctgctctgcagacttcgccaatactgaattca

SEQ ID NO: 139176 - DNA, 679 bp, Cannabis sativa
  modified_base (347)..(371): a, c, t, g, unknown or other
acgctgttctcttctctgatcagcacggcactcacggcatgttccgtgacagctaagtatattcccagctcctccccgtccagaggttttgaaagtaggggaggtttagcaagttgtccctttatctcttggaaacctttttcacattcttctgtccactcgaactatttatttcctcgcaggatgttgaagaatgggacacatttgtctgttgattttgacacgaatctgctgagtgcaacgatctgaccagttaagctttgcacttctttggtttttgttggtgagttcatatctaggagagcttgaatcttttctggattagcttcaattcctcgggcattgannnnnnnnnnnnnnnnnnnnnnnnngctgactccaaaggaacactttaaaggattaagtttaatgttgtattttttgaggactttgaagcattcgtccaggtcgtctatgtgccccccgacctttctagatttgacgagcatgtcatccatgtacacttccatatttcgcccaatctggtctttaaacattttttctaccaatctttggtacgtagctctagcatttttagacaaaacgacaagactttgtagcaatagagacccatatatgttcggaaacttgtatgttcttggtctggtggatgcattttgatttgattgtagcctgagta

SEQ ID NO: 139177 - DNA, 694 bp, Cannabis sativa
ataaatctaagaatgaaaaatcttcaaaatgtttagtcttaaaaactcatattgatgtctaaaacttgattctttcccaaatgtcctatgctttcgtaccactcaaaatttttgttatttatttccacccaaatagtagccatcatcctagtttgaggtcaaacctcaaattactatgtcaacccatactccatcaacatcttgacatgcatatgaacctgttgttgcttctgcatcatcaaaattcatgatgtctactagttcttctgtaaaattatttagttcatctaaacactgatcatcactttgatcttcttgactaaaatttattggttgggtcgatagaactatggatcgtgcagagttaagtggatcttcaacataaaatacttgttttgcttgagttcccaaatattaggctcaaatttcattgaaggcttaagttgcatcaacttttagttttgagtctaccactatctatttataggaatctttctaggtttaggtttgaattatttgacgttaaaaaattgataaataaatggtaaaagggagctaaagtggccggccataggatgtgggcctaccaattacaattttgtcattttttctttactatttatcctttttttttttcacaaatgccacattttctaattcaaccacttaaatgtcaaaactaattattaaataa

SEQ ID NO: 139178 - DNA, 1026 bp, Cannabis sativa
gagtcattatattctgctgcaactaatgtaaggttttcttaatcccttatttgtttaatttcattgttttagagatattactatttaggatattaatcaaaatacttgttagtaaatctgtatcctggtaaaatattcctaacaagttcttcatcgaaggtaacaattgatctttcaggctgactgcgacacttgtatcgactggcttcagagcttgctcgtaaaatttttgaaggcaccgactattctctctgctttatcaagtaagtgcattaaccccctgtctgagtttcttggtgctatacatttaaggcaagataagttcttgcttaggttagggttagggacattctcaggtcatatagtaaaaaaatgtaggtgaagatctcgtcttcccatttgctcaatgttccaagaaatttgcttgttctttcatggatttaaacgaagttccccttacaagcaaatccatatccattgggggagaaaccgttcaggccggcaaaaggcctttcgtgggactaaacatgtataaaagttaatttagggctttcgatttcaattgcatcttttgattattgtttaatatgattatattcttattaccaatttttatgcaatagatagcatgtttgtttacttactaactaaggtaataatttgtttgtagtcttctcagatatataaacttcaattacatgcaaattttctactcttgtgatgaactaaacatgtaacaggcattaaacacagaaaccttatatgttatccaaaccatataggtattctcctcctatatcaaaattcaattatatttcactatagccaaatcgacactcacttctcagatctcgcatcaaaatcatagacatttaattggtgatcatgcaactaaaagtaattaagtacgaaataaatagaattcatagaaattaagggaaagttaaatcatattaaaaccaaaaatcaatatcaaacaatctccatctagatcctaataatctgttagctactaatgttctttgt

SEQ ID NO: 139179 - DNA, 754 bp, Cannabis sativa
  modified_base (708)..(716): a, c, t, g, unknown or other
tagtccctgcttgaataccattacgacttatcaaatggtagtatagtacttttgatatatagcataaacaacaacagcgctgtaccataaacaacaaagctatgtttttttaattctcttcacatttagacctaaggcaaacctatttgaacttttttggtagaaagactctaaacatgtcatatattgaaataaaaaaacaattaaatttcaagtaatgattcatctctatatatacacaatttagctctaagaccatttttctcatttttcttcttatgacaatatgtacagacccacaaaaaaaatgtaggagattctttatagaagcaacattagtaggagagtcaatttaaaacactgtaagaaatcaattagctcagaaaatcgagacgaacaaaaccaagcatgctcgtgatgtcaagtaacagagaattcaaacttttttttttgtgtgggagagaaagagatgttagagctatgaatatggacagactcacaaaattatgttcaaagtatggtagcgttaatgatgaccgatctcattaattatctaaatatcaagtatccatacagaatttcaacttaaataatatagcagttatatggagcataaaatcaagcacaacaaataatcacatgtagctattggatattgcttgtttacctgatgaaagttgatgttaatataagatatatatatatatnnnnnnnnntatatatatatatatatcaataaagtcctcttgggctc

SEQ ID NO: 139180 - DNA, 1464 bp, Cannabis sativa
tcaagatcctcgtccttcttttcgctttcttctgtcaagaccgccattagctgatgaccgacttttctatgttatagctctatgcgatagcagtcccgagctagcaccactcccacaccctctggtgtttgaaatatcaaggataaatgcttcatcgaactgaccccgtagtccgatcaatgctagacgacctaacaatatattgtaagccgatggcaggtcaacaactaaaaagtcttgcataaatgtggcgcataggggtgcctcaccgaaggtcaatgcgagctcgattatgcctagactggcaatactgtcaccaatgaagctgtaaagatttaccatacaaggcctcaatttggcttttttgagccccatcatcctcaacatttccttataaaggatgtttactgagcttccgttatctattaacaccctctttatccttttattggtgagctgaatggtaatcaccaatggatcaacgtgaggatatctcacgtttatctcatcttcctctgtgaatattattggaggttctccaatttttaccttcttgaaaggttccagggaaaacgccgactgctcgttttttatttctttcacatatctttttttgggtgttgttgctctcccctgcgatatgcggccctcccgaaataaccaggatgtcctctccttcaacaggaggaggttgtaacccctggttgtttgggttgttaggtagactgggctggttgtgtccattgccttgtctcttcacatactgcttgaagtggccccgagcgatgagactttctatctcatctttcaactgacagcatgtgtcggttgtgtgcccaatgtccttatggtatttgcaatactttgtaggatctcttttgtgcctcacatgcctcatgggctcgggcttaccaaaggcaaccttctactcatgcgcgaggtaaatattttccctaatttcattaagctcggtataaatagtatacactggcacgtacttatcgtgattcttctgtttctttttgtcctttgacaattccttaaaatcgtcctttctttttgagccagaggcccctgagttatcaactctagtatagacaacacttgttgaaacattgctgggtttgcctcccgagcctgttttcaacagattcatcccttttcaagcttcctcttttcgaacgaacacccgagccctttcgttgaactcagtgatgttctttactgggcaaccctataagttgtcccacagtttgcccccagcggttgatggatcagtagaaatcttcgcctgaagggctgtaagttgtgtactatcatccaaatttctaacccttgcagcagccgtactaaaacgacttaagtatgccattagtgtttcgccgggctgttgctttatattggttagcgaggctgcctcgggtcgtttatcccttgcagcctagaactgttgggttttatgcc

SEQ ID NO: 139181 - DNA, 2823 bp, Cannabis sativa
  modified_base (1760)..(1769): a, c, t, g, unknown or other
tattattatatagttcaatatatgagaatttatttgattaattatgtgttaagaccccgttggtcagcaaggggcattttagtaaatatgacccgagaagggtaaaatgatgaaattaaattaattatgtgcttaataaaactatattattgtatagtatgtctgtgttgtcttttcaggtgtgttctaacaagttggcgcggtatagtcacaactgggtatttcgggccgaaccgggttcgggccagaaatgcaaattggattgaattatttggcattttctttgataatgagatatccaaattttatttgaaaataattgagcatgaaatgactaaattccccttttatgaatgaatatgtgagaattggcccttggggcaaaatggtcttttgacctatattgattcacttgaattgaaaattgaattttatgaaatgaaattagaaattctggattctctctctctaacccaaccctctcttgaaatttcaagcttaattggtgtgaattgcttggagttggcttgatttggagcttaagacttggattttattgtgcttagccttgcaaggaattgaggtagtttctttaaagccttaattctagttatgttgctgaactttgttgttggttgagcatggaaaaggggttgtgatacttttatttgcatgtgtttgaattttgaattgttctatgtgagtttatgcatgatttggttgtgagttatgttgttgagctataggtggagttttgggggtgttctctagctctaatccatgtgttttttatggtgttttgctgcatgaaattgattgagataattgggtttgaagctcttgttcaagagcttgaagttgctaagttaagcttaatttcatgcatttatgtgtaatctgaaatatagggctattatttgattttaatgcatgaaagttgttattttaattccctatcctttgttagcaaccttaccttgataatttgaaagtttgattgtgatttgtggtgaaattgttgaattttggttcttgaaattcgtgttgatcatggctgatttttgggttttcaacccaggtgccgcggctcgcccctgttggtggaacctgggaatttgtcccaagtgtcgcggcatggcttgggcatgccgcggcccgctctgaaatttttgggaagtttgggattccaactttgaaaatgcatatctttttattccgaactcttatttgggacttttatatatcattggaaagctcattctgagctctatgggattatctaaatttaaaatgccatgtgaatattttataaatgtgtaatcaggggttaaccctagttgtgaaaatccaagattgtgtgactatgattaccggcacctagtcaagagcacctagggattcggaatctctgcatttgtgggacaataggtaagatagtggttagcacgtagagtatgcgcagtggcgcttatattgaaaatgatatgtatgaatatatagtaacggagatgaaccattctaagggcttattgtatttagacgtctgagagcaacacataggtttacgccacgtagacataaataggcatgtgagagcaacatgtaggtctgtgtaacacaaacatatatgtgaatggcattactgtttaaatagcatgatgagcatattattgttatgatttataatgtctttagctgattagctatgagtgcaggagctgggcgaagaatgtacatgttcgggccatatcagaccaagnnnnnnnnnntctaccagtgttgtgtttttgagattctgttttgccgcttaggtcggctgaaagaaaaggacttgtaataatattttgtaattgtttttgggatcccaacttctataacttttagtttataaactttaaattattacaagtttattttcattcttattgtcattaaagtttaaattctacgctaattttgattagtaatcccgtttaggggattagggtttcgtaagtaatttgggtagcgtgcctaattatttagggcgttacacatggtctgcaaaatgctggtggtaggaagttttcttacaccttgtacctttctctggtgttaggtggttcggagttgtaggagtggtgaaggtcgtgtacccttcgttggctgtcacgccttgcaagtttggtgcctccactactcgtacccccttacttttagagcttgtagacggtgtggttgtggccatactcttgctaccttaatttcacacatttataaaaatttcactaagtatagcaacgtcattgtggaagttgtaggccgagtggtatgcatgaaatgcatgccgagtgagttgtgcatgatgcatgtcgagtgagctcttgagatgtgcatgtcaagtgtgtgagagagatgcatgccgagtgactttgtcatggtgcatgtcgattgactttttcatggtacatgccgattgactttgtcatggtgcatgccgagttacttttttatggcgaatgtcgagtgactttatcatgttgcatgccgagtgactttgtcaaggtgcattctgagtgactttgtaaaggtgcatgctgagtggctttgttaaggtgcatgttgaatgactttttcaatgtgcatgctgggtgactttttcaaggttcatgctgagtgactttcttaaggtcatgccgagtaactttgtcaacgtgcacatcgagtgactttgtcaaggtgcatgccgagtgacttcacaaagagcgtggccaagtgatttcacaaggagcaggtgttgggttttgtgccctaaataaaatccattacaatctgattagttat

SEQ ID NO: 139182 - DNA, 819 bp, Cannabis sativa
tttccttgggcttcaagtgtgttagggttggcccaaaatacaatatgtgggacatgtcaattacactaatgaaaatagatagatattagaagaaattgcaaattttatggattttatactatatcatcaaaagtatagtttttttaaaaaaaaaataaaaaatgaattattttatgggaaaatgcaataaaaattaaaataatgacaaaacaaattctatgaaataatttttttaaaaaaatatatatttttacaaacttatactttaaaataataataaaaatataaattcccctacatatatgtttctcgtaatgatctttaaatttgtgttgctactatggaataataactttatgttcttagaccagattgaaccatttacgcttaataataaactgtttaaggtagctaaacctagaaaccacaaagagcaaaagatcgataatgaagacgaaacatatattatctatggcacttacatcttggtcatatagtctatgataaactttgtaggttaaccaaaggtggtccattgaaaaatatcaccttaggtgaattacaagtttctaaatcttgcccaaaaaacaaaatgacaaaatattatttctctataaaaggagagcgtgctaaagaaccactaggaatagtgcattcagatctttgtggaccactgaatgtcaaaactagaggtggttatgagtactttgtcactttcatcggcgattactatagatatggtcatatttaccttatgcataagaaatctgaaacatttgagaagttttgggaatttcttgcattggctcaaaaccaatt

SEQ ID NO: 139183 - DNA, 575 bp, Cannabis sativa
taggataaaattatttgatacaagtttctcttaaacttggttgttaggattttttgttaattttcgttatggataaatcatgaatgcgtgaggtgcactggttactatatagttagttatttagagtaaaattagttactagttagttacaaattatatttagtatactatagttagttactaactagtaattcaataggttctgcgatatattgtactacggtcggatcgatgggtggaataatatacatgttagatgagtttgaatatcttaaatattcatctgtagtgaaaaaggttctgcgaatacatgtactgcagtcggatggatggtaaatttttgtattgtttaatgttgttgtgattattttatattgttttgaattatgttttgttgttattaatagctttaaattttttgaaaacgttgaattatagccgttatgctgttaaaatttcggtagaattatgtatactttctttaacctacttttatatgaattaacaaatacatcctaaatattgattctaatacttaacaaaaaaattctattaatttattttaattaaaaaaa

SEQ ID NO: 139184 - DNA, 785 bp, Cannabis sativa
  modified_base (55)..(59): a, c, t, g, unknown or other
aatcataaaaatgtttaaaatttcgtgaaatcatatttttgtaatttttttgttnnnnntgtgcatttgtgaaataatccctaaattattgattggattctcaataattttggtttggttttttaagatagtgtttataattaaaataaagtttgaaacatttttttaagattaattgaattttgtaagtaaaattatattttttaattaatttaatattttaatcatgttttaaaataacttttattatttttttctgaattaatagaatattatatttttaaaattatttttttttaataaaagagggaaaatttttgtattggtcatagttcaagggtaaaaattaggggtgtttaacaaaatttataaaccgcctaacccgaataaactgcccaaaccaaaccgaataagccgacaaaaaatacaatccgaaatagtacaataaaaatccaaaccgcccaatgaatatattgggtggtttacaaattattctaaaccgtccaattaacccgaataaatcgaattaaaccgattaatatattttttaataaaagtgtatataatatattgcataaattatatttattagtcaaactattttgtattgagttatttgcggcataacctccttaagtggtcaggtgtttgcaactaacccccaattttaaaattttggtggtgaaacctcctaaactgatattctattagcaattagccctttccgtccatttttggttgttaactgccatggtggaatgtctacgtgtacacagtgtacacgt

SEQ ID NO: 139185 - DNA, 1047 bp, Cannabis sativa
  modified_base (623)..(626): a, c, t, g, unknown or other
gttgccacgcaccactcccacgccttctggtgtttggaactttaaagataggtgcttgatcgaactgactacccctagtccgatcagtgatggatgacccaataatatgttctaagccgagggcaggttgacaaccaagaagtcttgcataacagtagcagttaaaggggccttgcctaatgttaatgcgagctcgattatgccaaggctagtgatgctatccccgatgaatccagaaagattcaccatacaaggccttaacttggccttttcgagcaccattttcattagagtctccttataaatgatatttactgagctcccattgtttattagcactctcgtgatcctcttatttgcgagttgaatggttatgaccagcggatcgatgtgaggatatctcacgttcttctcgtcttcctctgtgaatgtaatggggggttcctcagttttcacctttttggaagttctcgggcaaagaccgactgcttgttctttatctccttcacatatctcttctgagcgttattgctttcccatgcgatatgtggcctcccaaaataaccaggatgtcctctccttccacgggaataggttataacccctggttgtttgggttattnnnntgacggggctggttgtatccctggccctgtcttttcatatactgttcaaaatggcctcgagcgatgagactctctatctcatctttcaattggcaaaatatctcatcgtatgcccaatatcttaatggaatttacaatattttttaggatctctttttctcctcaaatacctcataggctcgggtttcccgaaggctaccttctgctcatgtgcgaggtaaatattttcctgagtttcattaagctcggtataaatagtatacactggcacgtatttgtcatgcttcttttgtttctttctatccttcgacggttccctaattccgtcctttcttttcagagcagaagtcccctagttatcaattctcgtggaagcagtccctgttgaaacattgctgggtttacctcccgagcttgtttt

SEQ ID NO: 139186 - DNA, 1023 bp, Cannabis sativa
caaagaattctttgaggctcatttgaatgttatcttttggctcaccaagattgtaagcctcgctaacgctaacgggatgaagttatatgaagtcttcccataatcgagacgggcacctcgctttagttgttcttgagccgatctgacttttacacttagtttgtacattgtacgctaaggactttcatgattgatacgcgtcgctgtttttggtgcctcgctattcgcattcaacgacatatggtttctcactaatatactaagtgcgagtttgtatattgattcctcgcttaagaccttatagtcagcgggttacaaatatactctgatacttacataattaatgagttattccataagaagcaattgcatcgattcacattccctttatcttgacacgtgtcgtccattgagatggcaggcgaatttcgggtataaaaattgccccttaaaaagttcttttttagtaaaaagagctttttaataattacagagggcatttttgtcaagatcactcttggcaaaaatgcatcttttgattctggcagttgtacggtttcgagggtcattatgaatcgtctcttcatattctgcgcttctcccaactgttggatttctcaatccttaactttcttgtcactagactttgtgtataaaagggcggctcaagcttgtcattttttacaaacctttggctttttagtgagatccattttcagaatggatcatctctttcctgctagaatgtgccttctgagttcagaagttcaccctccaaattcataataccagaatgcaccaactattttccattagttcccaaggacttcgagcctcaattggagtcggaaacgatggattccaaggttgaggagcttccgatcaattcaaaccagaggatccccgtagcccgccatgggcgatcctcacaagtgatccttgagggcatagatcttgtgagcgatcttaaaggtcctcctcaggctgataaagaattcgagaggaaggttggcgtggtttcta

SEQ ID NO: 139187 - DNA, 547 bp, Cannabis sativa
caaatgggtagggcgagggcatcattctaagttcttttggcggtatgcgaggtatatgtgaaaacctcttacacttatcacatttcttgacaaactcatgtgtgtcattgatcgttggctagtaatatccttgtttaatgatttttttagacaaactttgccaattcgcatgatccctacagaagctttcatgaaattctctgatgatttcatttgcttctgtaggaagaacaagtaggggtattggataccctcttctatatagtttgccttcgatcattgtgtagcaaggcactgaatacaatagttgttgtgccttgtttttgtcatttggaagttgtccatcgagtaaatagtttataataggtgtcatccatgttggagagctatctatcatctcggcgtcttcagtttcacatatacttggctcgctcaacatctctaccagaactagattcagttcatccaggtcgttctccgaggcaagttttgctaagacgtcagcgttggagttttgttctctcgaaatttgtttgattttaaagta

SEQ ID NO: 139188 - DNA, 905 bp, Cannabis sativa
  modified_base (779)..(781): a, c, t, g, unknown or other
aaaataactaaactacccatacccatacacagaaatcaaaatcaaaaaaatcaccattgatgagccaagcttgagttcaaaaactcaaagcttgctcatccaacaaactagttaacaaaaccagctcaaatcaccctataccatcataatatagctactgaaaatataatccaataacagaaacaagaacagcaagcaaaatctcatttcatgcaaaatttctttttcttacaactcaagaaatcaacaaaaaggttgcaagaagcttaccaagaacttgagaccactaattccttgctaaaaccagcttgaaattcacaaagtaacaccacaccctagctgctctaggggccgaaagagagaaagagagagtttgaaagaaacctctctcttgattttctttttccaaattttcaattttttgagtaaatgaattaaaacttagttttaccacattaatctcagcttaaaacataggaaataaatcagcttattaacttaattaaaaatcaccaaagacaaaatatatatggggcaaaatgacctttttgcccctcccacattaaaataacataaaagggtacttaggggtaattttgggaaactctaaaatcccgtctatttccggcatttaaatatctaactattgtcctgctatactaaaaaaaaaataataagatgtgattcaaaagccatacatcgcgttccaatgttgccgagcgccaaaatatgcaaaattatgaaatttctatatgtaacataaaaatgcattctgaatnnnaataaatcatcataaataattaattcaatattaataaataattttcataacaaagccctaattatctactagtttccaaattaaagctaaacggtctttacaattatccccccttaaaaggatt

SEQ ID NO: 139189 - DNA, 729 bp, Cannabis sativa
agggcttaaatggattgattagtactacctatatcaacaaggtgcgtcttgttttttggtagctcatcacgaaagaactccaaagtgtgcttgacctggggtaatttcaagattggtgacatcttgaaaagttttttcaggaagcgtgtgaatgaggacaaagtacgctagaaatactcgtatttgtctatagggccattcgtcagtctaagaagcagccagagtgacgtactcgtgtataagagccataaatccgtgggggaagacccaatggagacttaaagaagggatgtaacaaatatgactgtcatagtttaatattaaaatttaaattagagcgatatgttgagatgctatcaaacaactatcattattaaagaacccacaatgttattgttgttcaacccatgagtcgttttcaaacaaaattattttgatatataatataaatgtactcaaattaatgtagcccaagtgtgagcatgttagactttttatttgggcttttattaacttttagttttaataaaatatgagttgattaatagttctttgttgtgttactacatatttttagtgatcaatagttaatgagattaataactgtgtgtaattaaagtctagttgaagcagaagtagacttttctagttaactaaagagcattgctattaggcaccagtggtgcctagcactttctcgacatgtcgcgttgcgattggctagcaata

SEQ ID NO: 139190 - DNA, 531 bp, Cannabis sativa
  modified_base (232)..(232): a, c, t, g, unknown or other
tccagtttagttgtgggtacctggtatgagcagtgttgcctctactgtataggtttaatcaaattactttataatggtggttaatcgtaaatgattggaaaaaaatctgaaactccattaaaaaatctttcaattttaacttttaatttttaccatatgcactcatctatggatgggacaatttgtgttgggaaaacctattgcaattaaccacaatattttccctctttgnatgtcaaaaatgggatacttatcaaacaccacaatatgcaatattaaagatcaaccaaagcaccacaaacaatattaaatacacaaatcaatcataaaagtgagacaccaagatttttacgtggaaactcaatgcgggaaaaaccacgggaccgtagtccgctcaaatcatccactatcaccaaggttcaataatagaattacaaagttcttctctagtaaaactagaggctcacaacaacatcaagattaaataatcttggatcaccaatacaatcatcatcatcatctcaaaagatg

SEQ ID NO: 139191 - DNA, 1236 bp, Cannabis sativa
caagaaagttcttgactttgttgtcaaaaacattatctgcagggtttgaattcccatgaagatagaatctgataacagaactcagttcgatggtgacttgttcactgagttttgcaagaggaacaaattaattaagagcttctcatcagtatccaggcctcaggcgaatggacaagtggaagctattaacaaaacctttaaggatactatcaagaagaagttagatgctgccaaaggtagatgggtggacgagttaccttaagtactttgggctcatagaactattgaaaagacggcaacatgacatattccattctcgttagcatttggttcggaagtaatcttgcctgtggaagtaaacatctcgactcatagacaagagttttataatcaagaactcttaaaattgtccttggacctacttgattaaaaacgtactgagtcgctaattactaatgaagcgtatcaacaccgagttacaagatacttcaacaaaaaggtcaaaaagaggctattcaatgttggagacttggttctaaggcaagtatttgcaaatacgagggatgtatctgcaggagtattcaacccaaactgggagggtccttatgtgattgaagcaatagtaggaactggagtttacaaattggctcggctgaatgacttgctgataaagaactactagaacgtggaacatttgcgaccctattaccagtaaattaatgattgtaactcacatttctgatgtaatgttttgaacttcagttatgaataaagttaatcatttctttttcaagtaattacaaagtgttacactttaatattacttgaggggcatatgtgtatgattaaccagaatttatctggaaatacatgatatagtgcaaacccaccactttaattttttttgaatttatttttaagtttttgatcaaacctttctgacgagaaagggaccaaactattataactttctgattaaaaacctgtttgacgagaaaggaaaatcaaaagttaaaaatgagatataactcataactcacgtgcgaagttgaatattaacgactcacactgtgtaagaaagtattaaatgagacatcaaggtgtcttgataaaagtacttaaacctaatgcatgaatagataatctaactattcatgtaagcaataaaaaatatacaaagtgataagttcattaaaagtatattcaagttttcttgaaacaaattaccactgatta

SEQ ID NO: 139192 - DNA, 721 bp, Cannabis sativa
ctcctctcattcccaagaaaattgtgtcaattttttttaaatgatgattaaagttgatgttaacctcttatacacattattatatgtttttcacttttttttttcaaaattttagcaacaacccaccatgtgatgttttccttcctaagataatgtatatgtgtttttatatatacatattcctcttgagaaaaatcactaaacacacacacacattatttatttttcatgtatttgagctctttctctcctattcatcatcttctttgttttttttttttgaagtctacaatattacccaaataaaagctaaccctctccttttgtagtaggtaacaaaaaaaaaagatgtatgtgaagatcaggaagaagaagaagaagaattgggaaagaaaagagtgtggttgtgtgtgtgtgtgagagagatggagatcttgcactgcgatgaatttcttgtagaaatctttcaaaaactcccggccactaagttcatgttcttcagtatctctttggtctataagcgttggctccatctctaccgtacttccaagtccaccctctttcttcaacttaccttttttgttactgatttatttttattattattttattattgttataaggttgttttactgttgtttcctttcatttctttatcatattttctcaaatattattgtactgctctatttttaatagtaatagaaaaataatgaaattt

SEQ ID NO: 139193 - DNA, 615 bp, Cannabis sativa
tgacaaggtctgtgattgttcctgtaattcaataaactatttagtatattatattttttatagttttgtttggaaaaattggttttagggttatgaagtagtacctgggttgcatttttccatcatgtacaagattcttggtatttcagagtacgattcgtgtggacagcgtcttgcatctacaatagccttttctctagccctccatgctttttggtaagatatggagacactatagtcatctgccatgtcatccactatttcatttggtgtgtagtctctctttgggtttacaaatttggttcttattacactaccaatcaggttgcttgttgcattagggtggtctacagatgtgacatctaatgagcatgtatgagaatgctgaatctttctgattttgaacatgtttgtttttccatgttttgatgccaagaaactccatttacaattttcatcgatgcaaactagcttgtagtcaagtttggaggatctttttaccttgaagggctgatttcttcttattgagtataggctgacagcattttgtagtgtttccttgtttgaaaaaacttgtccaacaaatatgttatcaacatgaggatctgagatcac

SEQ ID NO: 139194 - DNA, 586 bp, Cannabis sativa
  modified_base (62)..(63): a, c, t, g, unknown or other
ttttgtcacttggtaaaatagtgagttaggtggctgcccaaccttgtgacaccttgcaactnnttttctcagccaaggttaagtgaattaacccattactcatttagaaagaaagaaggaattaaagggaaataagagaaaaggccaagattagagaattcatcttctctccctctctttgatcggccaaaccagaaatcaaggggggtttttgctgctgatctttggagtttcagcaaggaattctagaggaattaagctaaggtaattttagaatcatgtttgtttattgttgaagctttaaagtttggtttagtatgtgatttttgaaattagtggctgttagggtttaaagattgtagtctgatttctaagattgttttgagttgattttaagctctggatattagttttgagctatggggtgggaattaagcaagcttgagttttgaaactcaagtttaggtctttaatggcataattcgatttagtggctttttctgggaattattggttggaaaatgttggttatgcattgtacatgtattctggaaagtttggtaaagtttggcttggttttgaggtc

SEQ ID NO: 139195 - DNA, 705 bp, Cannabis sativa
ttttgaagtatgttcattttttttaatttatcctctcatagttttattggtgtatatttgcatgaaactatttttttaggtgtcttgtatcagtttaacttctcagttgtttatttatagtttttgaaacttgtttttctaataggaagctggttttttatgtgtcttatttatgttcaatgtcttagttagtcgtactaaataactggtttccatgtttaaaagttagtttttttttaaatataattgaggtttaagttttttttagttattttaagaaattggtttcattgttcagatttctaattagctaataactgtaattgatttctgtgagacagattccaacgtctaactccggtggcgactctagcatcaaactccggtgacgatgataattctgacgactttttggtaactttttctggggacgatgccaatttcagagaattttccagatgcattagtaacttcattgactttctatgtaacaccctgatacttaggcgcgctatagtgattttctaattaatgtgtcacctttgctaatcaaagggttttctcagaaagtatatcaaattaaatttaatttaaaactattaaactttataaatatatatacataattacataaatcggaatctcgtgtttgaacttttacaatctatatcaaaatactttgacaaccttgtcgcacagtgacta

SEQ ID NO: 139196 - DNA, 827 bp, Cannabis sativa
tgtcaaagttcggaaggaaaaattcctaattagcctttttttttcaaattttaaaatattttattcatttcaaatatataatatattaatatttatacatatcccatataaaaagaaaatttaaacccctaaacaattaataaaaaatatatttttaaaacaatcatcttcattaacacaataaataaaatttaaacctccaaacaaataaatgtataacatgaatagtaaattttaaaaaagttttttcaaaaaaaagtttagagcatttgatgtatgtaacatattcttgatttagttctttaaatattttaaaaaatccttattttaagagaaatgctaaaaaatacttatgatgtctagccctcttatgagatataatattgctattagtgcaatttaatatcggatcccacttattttactttaataaagatgatagagatcactaactaattataggatgacacctcatagtggtgctaggtacctccaggggcggacccacatagaggcgaggtggggcagtcgcccaccctaaaaaaaaatcgaaaaaaaaatatatatgcattttagttagttacaacatatatttataaataaaagtgatatctatacacataaaataagctttggtataataataaagtcatttcatgcatgtaaaggaggtcatgagttctaattccaataaaagcatgtttactttaatatttttattttactttttaaacatttaccaataatatttatatttaatgtcttaattattgaaccaaatattttttattgttacttttttactttatactatatttaatactaaa

SEQ ID NO: 139197 - DNA, 644 bp, Cannabis sativa
ttagctcataaaattgtcaagttaagattatgactagataataaattgatttggaatggtcttctatcttctatgtaacttgcttgctttatatttccattgttttattctaatgaagcacaagtttctctcacattttttttttcttattgtcataattttagaaaaataaatcaaatattaggcatagacataaaattgtaatcattgctagtcttatatgatatataacgaacaagagataggttaattgagattcgcagcgaatcgtggaagaggtctccccaatcaaattaattaaactttggattgttattattttgattaattactatattgaaatttattattacctctaatttgttgataggagtaaagtagtaatagggcatagatgattatatagtactcattttgaaaagactattatatgtttgacatttaaaatagttttttacttttgttttttggtgataaggtaagtgttttgactgttcatttgtaaatattttaaattttttaaatagtttactgataaaaataaagtttaaatattttattacacatatgaatatctgttcttatacatatagtaaataattgtttgagttttatttttgacattgtaaactatttaaattttt

SEQ ID NO: 139198 - DNA, 961 bp, Cannabis sativa
ttatagacccacttacatccaattagatgataatcattaggtgcgtctacatattcccacactttgttctttttcatggaatccatttctgaatccataccgcctaacaattgtttccattttagacttgccattgcctatttttaggttaatggatcgtcatcaatactgtcaccaatgaccatattgattttaccatccaagccatcacaagcaggttttttggaaaccctcccactacgacgaggagccgtaaccttctgaacgggaacattagtggtagatttctcgattttatcaacttgcattagttcaatcgagggagtgggattatcatctacttgagtagaagaggacgaaacattggttggagttatttctgaaagcctttcctctaatactactttactttgcggcttaaagttctttatatagtcttcttcaaagaatgttgcatttgtagaaacaaataccttattattcttttgactataaaatagtccacccctagtctccttagattttctaacaaacatgcaaacttcagttcgcgcttctagtttgtcttctttctttcttaagacatgagcaaggcaccccaagattctataatagcgtaaactaggtatacgacaattccatagctctataggtgtcttaaggactgatttagatggaacaacatttaaaatgtgattagccacctgaatagcatatccccaaaaggacgttgatagggttgagtagctcaccataggcctaaccatttataaaagtgtgcaatttcttctatttgcaactccattttactgtggagtgccagaggcagtaaattgagatttaattccaagttcaattaaatgatctttgagctcgttatccgtatactgtccacccatatcagttcgcaagatctttaattttttacctaattagttttgagccaaagcatgaaattcct

SEQ ID NO: 139199 - DNA, 514 bp, Cannabis sativa
aaaactcttttgaaagttgagataaaatttcatgtcttaaggtaattaaagaagagcctcattgtgctaaaattcttaggagttgtgtccaaatgagaaaaagttgaatggtggtgagaaaataagtgttggagagaatgtttttgttattctccaaataaagttgttgcctaagacaagtaaaattcaatgcacaattggtaaaaccaagtttgattaggagcaattattattattatgtattattctaattttgcttctttaaatcttggctcattaaggtaaacataggttttgattcaattgactagtcggactaatacttatcctataaggatagttgaagatatttttgtgaagaataatggacttgtcactccaagtgattcttacataattgagatggaagatgagggtaatctcaatcttacatcaactctatttgggagaccattcttactcattccaagtaagaagttggacacaaaatcatggatacttagaatggaatttg

SEQ ID NO: 139200 - DNA, 835 bp, Cannabis sativa
  modified_base (784)..(788): a, c, t, g, unknown or other
gggcgccagatgggtaagtcctccgtccaagattacggaggtgcgccttcaaactctagaccagggccgatacttgggcaagcaggactgctccattctcaccaaaaataatcgtgccacaaaccctgacaaggggatgtgcgcctggtcgggagccaatggtcagcaagcagcgttgatgcccttgcataagtacttcaaggatgtggcagacttcttcggtctctgcccgacccaattcactcctaagggcattaagtatttgactgccctctttgtcctctacgcttcccaaggatggggtactccttctcctcacgaggttgtctagttgttcgatttgaagtccacccccaaataaggaaggtcagggtacttctatttctgtgagccaggcttcaagtggttgaccgacacggatgacaaggccatcaggaaaatagggcattttgctgatgagtacttcatggtgaaggatgcaagcattacctggactcggttttagcagattctgacatatcactatcctcccgtcactcggttttagggatagagctcaaaaacttgctcggttgccgggggaagatcggaatattatctagttgacctccgatgataatcttgtgaggtacgagctttatcccaaggactttactgctaagtccgtggcagggaagaaaaagaagtctggtgctggccggactgaacgagctcataaggagaatgagttgattcaactaaagcatgaagctaaggtgaagggttgtaacaccctaactacctnnnnngtattacgtgatttttaaacgtatggtgcagctcgttgctaatcaac

SEQ ID NO: 139201 - DNA, 982 bp, Cannabis sativa
gcacagttggacgaactaaaaaatatgctccaaggcctggctggtcagaggaacaacgatatcgagttggaccgagcacgtggaacccttttctcccccgagattgatatcctggaattgccccacaagtttaagatgccaacctagaagatgtatactgggaaggaagatcccttatcccacctcaagtatttcgagatgcaaatggacctccaaggagaacgaggagatgtatgttacagagtttttcctgccaccctctcaaaagccacccaataatggtatttcaaaatggcgcccgaaaagctcaactcatggaaggctttctcctcggagctccatgctcaattctcctcctctcaccaacttctgtggcacctaggagatctggtcgaagtaaagcaaagaccaggggagcctctccgagcctacatcaacaaattcatgacagaggcgactaaggttgcacgggtaaccgaagacggaaagttgtctgcaatactgggggcattgaagtccttggtgaattttggaaggaaataaggaagaacggaccagtagtttcgatgagtgactttcttgaccgcgtagaaggtttcattaagcttgaagaagccattcagcgactagaggttgaacaaaaacctagccagtcaaaagttccttctatcgggacatctgtccagctcccccattacccaaacaattcaagctcgggtgataaacgatccaacaacaacaataggcaagggaatgggaaaaagggaaagttcactggcaagaccgaataaactcccagggagaatcctaccaagtatactgcatttcccatcttgacggaagatatagaaagtgtgtacgtggctacccagtcattatccccgtacaagaaacccgcacccatggaaaaagatgtcagcaagagagatatgaccaagttttgtcgttttcatggggattatgtgttggaaatattttacca

SEQ ID NO: 139202 - DNA, 1242 bp, Cannabis sativa
gacgaatgttcttaatcttcaactgaaaaatcgaaacaaaaaaacaaaacatgaaacaaaaacaattaaaataacaaagattaataaactagcaccaacaataataaatcagtaaagaaactgaaaatcaccttgttcaacggcaaatcaaacatcttgcctttcaagtctctcaaagttggatttttggtcccaacatcattggtctaattaagaattcttgcaatccttaatgaaactcttttgcaaaaggtgtttaccatcgcatgacaactttcataaaaccaaacaacaaacacccaaggacagcccaactgtaacgccctaaacaattaggcacgctacccaaaatacttatgaaaccctaataccctaaacgggattactaatcaaaagggtgcagaatttaaacttttataacaataggaatgaaaataaacttgtgttgctttaaactttacaaactaaaagttacagaaattgggatcccaaaaacatttacaaaatattattacaagtctctttctttcagccgacctaagcggaaaaatagagtatcaaaatacatctctaatagacccaaccctctttgtctagtatggctcggacatgtacattcttcgcccagctcctgaaactcatggctgatcagctaaagtcttaccctttcctacatagtagagcacccgtgagctaagcccaacaagacagtataaatcataacaataatatgctcatcatgctattaaataagtaatgccattcacatatatgtctgtatgatacagacctgcatgttgctctcacatgcctatttatgtctacgtggcgtatacctatgtgttgctctcacacgtctaaatacaataaggccttagaatagttcatctaggttatggttatggagtccaacctgattatgccttgagcgcataatccataatttcattacatttaacatggcatggcatttacacacatatatcactagggtaatcagcctaggctattaaaccgctcgtgttagggtaataaccttaatcccggttactataaactcacatataacatttccaatataagcgccactgtgtatactatacgtgctaactactgtcttacctgttgtcccacaatggcagatattccgaatctctgggtgctcctgaccaggtgccggtaagcctagtctcacaatccaggatttcacaactagggttaacccctgatttcaaactcata

SEQ ID NO: 139203 - DNA, 1030 bp, Cannabis sativa
ggttcgagtcccaggtaaaacatgttgtaatatataaacgcttaaatcaaaaaaaatatatatgcagaagtagtcgaatgcagctttttacccataattaaccatttccttctctctttcttttactctttatttggtccacgttaagtaaaaccacgcgtatacaactacaacacagcaatggcctggaaagtttggggtgtgaaagtgaaagagtaaacttgaagatcatagagagaagaaacaaacaacaaagagttaattattttcttacatttagtatttttaaagcatggaaaactgttcaattatgactttttctatagccatatagcccagcaggttgagaacactttcctcgtagtactgctcctcaccatattttcaatattatgattgaacaaactcctcccaacaccaagttggtaagtaatcattatacattattatattacttcaattgatcttccattaattaatttatttttatggtgttgccttgtgcagtaaatttcaaaggcattttgggtgaaatatccttctcgaatcaagtatttcctaagctttcatgtggatcaacagaagaggtagagttgaccaaaagtagtgatggaaaggtatgaattaatacaaaaagggttggaataaatttgtttgcacaacataattaattaatgcaattattctttaagtaaactctgttactccttattattttcaggagcataatgttgatattgatgattctaaagaagattcagactctgggcccaacaagataaggaaaactagtccttatgataattctgaaggtatatattcattatcatcatcatcattataattgaatgcaaatatggctatagagttaacttaattatgcaattgttgtttttagctgcaaatgagacaaaatcagtatctgaaacaaatactgatcatgaaaatcaaggcataggcactaataataataataataagaggccttcatctgaagcagccaccaaattcttcacagacaatccttact

SEQ ID NO: 139204 - DNA, 551 bp, Cannabis sativa
  modified_base (45)..(46): a, c, t, g, unknown or other
atagctgaacccgtaagttcatcttgggtggccacttgtatgacnncttcggaagttatgtagatgtgaagtcggtagaataaggattggttgataggaaccctcacatactcatttttaccttatactctcatatattcaaagaacatggcctaaagagaaatatgagtcttgttgagtacctttgcaatgaatgactcataagattcagtggaatcaagatgttccactgtcttttctttttgtttacatttctctttccccttcgagctttttgaactatgaagcttcttaattaaaggaccctacataattaaaagtaaaattgtaatacaattgatatataatataacattaatgtaaatacaagtaaattattgcacacctcttcagtcaaaataaattccctaggccaaggaaccaatgtgttacatgcatcataaacataccgtattgcacctcttggatatgggatttcagcgtcccttgaataacttgtgtgatttgaacccatacataatcatttgaaattatgtcaccatgatatgaaa

SEQ ID NO: 139205 - DNA, 1288 bp, Cannabis sativa
caacgaagacttaatccacctatgaaggaagttgtcaaaaaggaggtggtcaagtggttagatgctggagtggcctaccaaatttcagatagtaaatgtgtgagtccggtgcaagtagtaccaaagaaaggggggatgacagtaataaaaaatgagaagaacgaattgatccccacaagaacaattactggttggaggatttgtattgattatagaaaactcaaaaaagcaacccgaaaagactatattcccttgcccttcattgatcaaatgctagaccggttggcggggcaagaatattactgtttcttagatggctactttggatatcatcaaatagccatagcacctgaggatcaggaaaagattactttcacatgtccttatggtacttttgcttttagaagaatgccattcagattatgtaacgctcctactacatttcaaaggtgtatgatggctatcttttcagacttaatagaatcatgcattgagatctttatggatgatttttcggtctttggttcttcattcgatcattgcttagagaatttggagaaggtgttaatcagatgcgaaaagtcaaacttggtcctaaactgggagaagtgtcactttatggtaacagaagggatagttttgggacacaagatctcaaaagcaggtattgaggtggataaagctaaggtgtcaagaatagagaatttgccgcctccagtttctgtgaaaggagtaacgagtttcttgggtgatgttggtttctactgaagatttattaaggacttctcaaagatctctaaactgttgtccaatttacttgttaatggcgttccttttgagtttagaaaagaatgtttgaaggcattccaagttcttaaggagaaattgatttcagcaccaatagtcacttcaccaaattgggagttgcccttcgagttgatgtgtgatgcaagtgactatgcaatcggagcggtcttgggtcaaaaggttgacagggtgtttcatacaatctactatgctagtagaaccctgaatgatgctcaactaaattatgccacgacggagaaagagatgttggcaattatgtttgcttgtgataagtttcgcccctatgtaattggaaatagggtgatagtctacacggaccattcagcaattaaatctcttatgaccaagaaggatgcacagccaagattgattcggtgggtacttctactccaggagtttgacatagagataaaggacaagaagggcactgaaaatatggtagcagatcatctatcaagac

SEQ ID NO: 139206 - DNA, 571 bp, Cannabis sativa
atcagatgttccttcaaactgagtttgaaggatctcccaagcttccttggcagattcacatgatataagtttaatataaccttcacatacaccataagatatagcatgcaatgctttgctattataggcagaaagtttatcatcttcaatagagcattccagttcaaattttaatgtagaattacctgcggaatctgtctcaacttgagaagactaacctgatagaaccatcctccaagccttctcatcttgagatttgatgaaggccctcattctaactttccaataagcataattagaatcattaggcaaaggtggtctggaaattgaacttccttctgcaaaaaatgacattttacacaaaaatgttaaaaggaccacactaagagtttagtgtcccgctctgatactaaatcgaaaaccgagcttttgcaaatgtcaataatatatacgaaaatataaaactatataagtctatagaagcagaatgtaattctgttaatgcagagaccagttttgcagtgacaaaacagaacagacaaaatataaaaataattgcagaaaattaaat

SEQ ID NO: 139207 - DNA, 547 bp, Cannabis sativa
cttcttaacttcttccacccctattagatcaaaagatctttttattaaacaaaatcttaataattgcttaagaaattacaattattcataaacatttagtttaaattcaaagtgtttatgtggtatatctctttgcagagaataatataccatagattttgcatcaataataaaacacaaacgcatacaaacatgataaacatataaatataattggtattggcatacaagttaaagaaaacatgaagctcaattgataaatgaaattcataatgaaaatttcttaaagagaaaattttattaataatctcaaaattgtcataatgaattgtctgcataaatatgaaataggaaataaaatccaaaccaataattgaaactaaattttttataaattaaaacaattaaatcaaaaatcaaagaaaaattggagcttcatcttcacttggacaatcaccacccttctgttcaactatctgattaactcgctaggataacaatccaagttgaagcagatggagcagaaataagaagaaaataaacttgg

SEQ ID NO: 139208 - DNA, 716 bp, Cannabis sativa
agttatttggttaaatattgtattaaaatgagctgatttttcagttgagtatttgtttttgttagtaaattaatgaattgttgtattacgtgatttgtagttgttttcaagtttcgtttgtaattaagaagttattttggtgttgttttaaagtttcttttgagttgatttgcatattataataatgttgttgtttaattatttattcgttattatttaattgttcaaacaaaagagaaataatgatatgtatattttttacttgatgtctatcttctttctaatcaagtatatatatatatatttttaatccattgagttaaataagtaatttatagttgatatgtttgtattctttaaactagggttttatggtttgaagaagggaaataataatgccgaaatggaattttttttttctttcttttcattatgataatatgttaggagaagtaactaacaacaacttccattatttggggaatgatagctgatcaatatggtcgaaaaccaatcgcagactacatatggttagtcaatctccttttaatatctttttctcctttgttttgttttgtgttcatggaaatgatcgtctgtccctctctgcgttgactctctatctgttccgaaatgtgtttatatcgtcgtgatctgttcctatggttgtaagatatgaatctattcgttttgttgctgagaaataattttgaatt

SEQ ID NO: 139209 - DNA, 614 bp, Cannabis sativa
ttttttgttacaatttagattgtaacgctagttgcaataaatatttctatgtaaaattccgtaaaagtataaaaaaaaagctgttttaaagtgtaaaaataaaaaaaggggtttctaaactaattttgttgatgtgaaaaagatattttaataaatattaaataatttatatatctttatatgtaaactaagatataagatgtgacacacattctaaaattactccaaataccactatttattctctcattaattttttcttttttttatatatatttttttaggtttaatttgttttctcattattttcaaatatttttatcaaaaaaaaaaaaaaacttatgttgtcaactatgactattttttttttcttctttataaatttggttaagtagctagttacaatcagagttgtatatttctttataaaaatggctaagaaacaagtgtttttgctatgaaattgcaaaaaaaatagttagttaccgtcatgattagtgtaggttataattttgggcaaatatcattttggatcctgtgttttataaaagttaccgatttgatcttttgttttgttaaataacaaaatggactatgtattttctaaaatggta

SEQ ID NO: 139210 - DNA, 627 bp, Cannabis sativa
tttttttgcatattttttcttttgtaaagagagagttctttttgtgagaacctagttgttcatctaggttttagtgtttatatttttattcttatactggtcttagggtcgattagaacaacttatttgaataagaaaaatgtcttcgagagaagacttgttcaagccttacttctagaggaagtaagcattcacacttcaaagacgaagggagttcgatgtttgatggtggttctgaaattagattcgtgaagtgtattacaaaggattgcggcaaagatttagagggagtcttttatttaagtcaattatctttgtaattatttgagactttactaattgatttctttctctaagcgtggccccgtggactaggagtgttcgaaaggacaccgataccacgtacaattccttgtgtcaagtaattttattttctgctggttttctaatttccggttctggtttgtttatgcaaatctgtgttctgcagtgatagaattacattttgctgctacaggctgttatagttgtgtttttttattgttattgtgtaaaaatttattggctttggcaaaaacaagattttttaataaactgttgtatataatcatcattacaatactcaat

SEQ ID NO: 139211 - DNA, 1082 bp, Cannabis sativa
  modified_base (38)..(42): a, c, t, g, unknown or other
tttgagccaatgctagaaattcttgaaacttttcaaannnnncagatttcttatgcataaggtagagtaatcgtcaatgaaagtgacaaagcactcataacgacctctagctttgcatgccggccaccgtaatttctagcctttggttattccaacaaaaatcatttattttttcttcatattggcgagtttaggattttgggctcatagaattagcttgcttctcctttctagggcaatttcgcaaggtaccgggattttgcgatgttggtagtggagggtgccttggtgatgatcggacctctttccattgtgccatgcctttacactacaagaaaacctagttttactggcgcaattggtcaattgcgccggtaaaagttgtcagaataaatgaaatactgaacttctaattcgattccaataacttttaccggcgcaattttgcatcggcaaaaggtactcaataccggcgtattattacatatgtaccggtgaaaaatcaataatgaaccgccaaatggcgcgagcacattttcacttctctaaggcttttgttggcgcataattgcgccggtaaaagctagcaaatttttggtgggaatcttgaccgcccacgtgaaattttgaggggaaaaaatctcgcgtggaaagtggtggtaggtgggattacttttactggcgcattaatgcaccggtaaaagtgtgtaacgaaacggggcgttttcatttagggttatatgaccacttttaccggcgcaattcaatgcgccggtaaaagtgttcatataacctgccccttcgagcagcagaccccatttctcttttttttttctcaatttttttttcctctcaaactctccttcagccctctctctcaatctcactcattctcactcaatctcactcaatctctcttaatccctctcaaaattttttattttttttagaaaaaaaatcaccaccatcggcaaccaccaccgtccgctaccgtccgccaccaccgcagaccaccccaagccccacctcctctaatttgtgtaaggtattttttattttttaattttttttaaatgtttata

SEQ ID NO: 139212 - DNA, 832 bp, Cannabis sativa
  modified_base (582)..(583): a, c, t, g, unknown or other
  modified_base (773)..(788): a, c, t, g, unknown or other
aaagttcatatttagggggttaataaacatacttgtgagtagatctaagatcctagaaaaataattccaataaatatcacatcatcagagagtatgtggcgaaaggggatgaactggtggagaaagtggacactgaggacaacctagctgatcctttcaccaaagttttggcaggaactgcatttgaaaagcaccgcatgaatttttgactaattgaaatgtacttattgttttatataagtgcaagtgggagtttattgggctttgtgccctaaataaaactctctttcaatgtaatatctatcatttaattatcaataaagagacagaagtattttcatcacttatttgatgtgttatttggttcatcttatcatttatatttttatttgatttataaattcatccaaacgcttatcacagttatattcaattttattgtgttgtcagaacagtggaaagtaatcaagattgtgtgattaaatatatattcctagatttatcagtacatagggtttaactaatatgataatctacaacatagattacttgcaccttgcataagtgttatgtcctttccanngcattggttaaagtaaagtttgggctggatgtatggagtttgcatcggaagggaccgatattgaactttgattagatataaaaaatttactgtaatatctattcaattcaatatcacctagttggtcctagatcaaatgatcttaaaatttacatggttaggtttgatctcaagagtattattcatgttnnnnnnnnnnnnnnnnaagcctactttttggtcagtgtgacacgtacattttgggaacat

SEQ ID NO: 139213 - DNA, 684 bp, Cannabis sativa
ttgttcatgattatagtgtcgtccgcactgtggaatataatcatgattatatgttcaaaagtttaattcccatgattggtcagttcgctttatttagactagcatgacaatctacgataggtatacttacaccttcgataagtgttatgtcctttccagggcattggcaaagtttacatgtaacgctctgtccaacagggacgccacgtgagtgtgttttaaaaaattctcatttaaatactataaatttataccaaaagtgtgggtaattaaatttttgataattaaaatcaagcatataaaaactgctttaggataaaagataagtaatattaactacggggtccccctattttcaaaatatttacaaactggtttgatagtgtttcttttacaacataaactttgcattcccaaaatacattcaaaatagagtgtcctgttcagtgggccttgtcactgcagctaatatgtacattggtgctacgacatcgaactcatggttgttcaacattcaccttccctttaactgtaccataaagcacccctgagtcatagagactcagcaacaaaagtgaataaagcaataaccagtaatattcatcaattcaatctcatatcaacatgcttacacatttacacaatatcataaacacacattcctggtactttataaagtacccc

SEQ ID NO: 139214 - DNA, 568 bp, Cannabis sativa
aaaataatttccaacatgaacttcctctttctatctcctcaccatgagaactggtttctcatctctggatcttggagcagaagccttcaaactagggtttatttcttctaactcttctctctgtatttctgatttgtgttctttgtaatctatctttgctttgctttgatttcctgctttttatattagtgtagagtcggtgaatcacagatctaggagttagttacaataacagttgtaactcactcctttttcttgatccactagaggcgaagccacctaggattgagtccaacttgtgtttgtttctattgtaaatgctgatgtggatatatttgtgtataagggactggttataagtggaatttactcaacaatttctacctgaattcctcttataacaaattctgatgtctgttgtttatctctgagagtcttagcttgatagttcctacttttagtcttctgagtcgattcttaacaagttcatacaatgtgtgaacttgttaagagtcacaattttagtacccatgtctgctgggttatcctcagtaggcaccttttcaat

SEQ ID NO: 139215 - DNA, 914 bp, Cannabis sativa
attaattagtgatgtagaacaaggcatgaaggcatggatcagcaagcatgctcactaaaattaaatctaaagagagaatggtgatatccatcttactattctcattccccaaaagctaaccctatataataaatgatgaagaaataatgcattacattattttttaaataagtgaacggtgtaaaataagtatagtagacaaagaagtaaaagtatagatatgataattggatatagccattagctagctaagcatcattcattttaaacccaagctaggacatgtagtcaacattccttaatttatagaatcatataaaattatttagggtttggattgtatttggtaaaagttattgaatggaccttgtgttttgttaaatgataaatggactttgtattttccaaaatgataaaaatattgagcttaatttttgacaattttttttttagtataaccaacttgaagacaattcttaatacgaacaaatacagaaaatataaataattttgtcatagcacttttagatcgagttataattaaattttattttaataaaaaatcaattcagaatcctatttgtactattttaaaagacacatagtctattttgtgttacttaacaaaacagaaagtctaattaataatttttacaaaatataagatctaaaatgatatttacccttctaaatattaattaattaattaactaaaaaaatcatcatacataattaaatcacgtcttcttatccggtttagaatttttaacttatattctaattaattttttctctatttgttttatatttagttaaatcaacaaaaattgattaatttgttctttatttcttttgtattttttcttgacaaaagaaatatatatatatatataatggagaaagtagagagtaat

SEQ ID NO: 139216 - DNA, 552 bp, Cannabis sativa
aagttattgagccaggaatggcggaagaagatgagttggatccccatgtgggatccgaaaaaattgtagaacctatggaggatgttgaggaagtatcagtatgtgacctcgacccaaccaaggtccttcggctaggaaaagtctagagccaaaggagaaggaaaaaataattaaaacgctgagggcagccatagatgtttttgcgtggtgccaaggggacatgaccaacataagtccccacgtcataacccatgtccttaatgttaacccggacatgccactggttcagcagaaaagacgccccctcgacttagtaaaagcagatgccctagagaaggaggtggacaaattgttgactagcgacatgattcgggatgtatataatccagaatggctggccaatccagtactggtgccgaaaccaaatgggacatggcgggcgtgtatagattttactgatctaaacaaggcttgcccaaaagattgctttcccctaccacgcatcgatcaaatggtggacgccacctttggattcaagctgttatccttcat

SEQ ID NO: 139217 - DNA, 1453 bp, Cannabis sativa
  modified_base (79)..(85): a, c, t, g, unknown or other
atcatgtgaaccatgcaacattgaatgttatttctgatctatattaataagtaaatcagattatattgaaatgagtttnnnnnnnggcataaaacccaacaagaactacctagaaaatagtcacgggacacactcctttctcgctagcatttggcttggaggcaatgctgcctgttgaagtgaatatatcgacttacaaaagagtgtttgataatcaagaagaaaaccaagaacttttaaattgtccttggatctacttgaggaaaaatgactgagtcgcaaatcaccaacgctgcataccaacaccgagtcacaagatactttaacaaaagagtcaagaaaatactgttcaatgttggagacttggtgttaagatgagtctttgcaaatacaaaaaatgcatcagcaagagtgttcaacccgaactgggagggtccatatgtcatcgaagcagtagttgaagtcggagtctataaataggctcgaccagatggctcgctaatactggaacgtagaacatttgcgaccttactatcaataaataaatgatgtaacttgaattactaatgtaagctttaaacttcagttatgaataaagagaatcatttatatgaagtaattacaaagtttcattctttaaaattacttaaggggcatttatgtatgactaaccgaaattcatctaaaaatatattgtataatgcaaacctgccatttcaatttttttttgaaattcaaaggttctcgactaaacctctttgacgaaagtggagtcgaaccgttataactacctgaccaaacttttttgacgagaaaggggtcgaatcgttataacaccttaatcaaacctttttgacaaagaaggaatcaaacaactataatttttaatttataacctatctgacgggagatgaaaatcaaaagttataactcgcgtataaaactgaatactaacggttctcgcaagctaggaaagtactaaacgaggcatcacgacgccttgataaaagtacttaaacctaaaaaatggatagataatataactattcatgcgagcaaataaaaatatacaaagtataaaatccttaaagtatatttaagtttgcttaaggtagattataacagcaattgtaaggcaaattgacaactgctcaaaagttataaagtttggtagattactaactcaagaaagagcatctgcatacagctcagaaaaataatgtctacacatagcttgagaaagaccggctacacgtagagagccttgatttttgacagacctccttcccctcatcattagaagatcccatttcctgaagtcgagatctatttgacagcctcaagaaatttctcaacactgaaaagaggctgacgcaaagatctcttggcacaggttagggtcttgagttggctggattctctgatagaaaccacgccaacttccttcccagat

SEQ ID NO: 139218 - DNA, 520 bp, Cannabis sativa
tttttaaatttacggtttgagttgttccggtaatttttgtgtgagttgctatttgaattttagttacgatttaaattgctctattagctattataggaatttttatgttgaatttcataaaaatatataaaaaaaataaattattttaaagtataaaaataaaaaaccccataaaattatgttgtggtaaccagtttaccatcatattactaacaaagtaaaaaaaaaaaaaattaataattattacttgttactattattaatttaaaatggcatattttttaaaatagaaaagagaatggactaaaatttaccatattattcattattttaaacttatttttatttattttatatgtgtataaattaatattattgaataaatatatattttagaatttattattttaatgaagtagagaaaaaataaacaaactaatgtatagtgtaatgtaaaaatttgaaataaaataaaaaaaaaggctaattaggatttttgctccctaaactttgacatgta

SEQ ID NO: 139219 - DNA, 511 bp, Cannabis sativa
  modified_base (136)..(141): a, c, t, g, unknown or other
atgaggaagacgaagggctaggctagggttataaaccctttttgcgttagttatttcctaataaccgacgccataagtggcgtaaaatttccgtctaaaaattttcaaccctacgccgtataagggtcgtattgtnnnnnntaataaataacactatgtttgaattaagcaatgtactgtattaattattacgaccaaattttttaatacaatgtatgttgtgttatttaatacataataaatgatccgtattagcttgtattataatatatatttacaaaggatttggagtcaacaccaatctccgactcggacctagatattgaccacagaccccggacccggactcgaactcggactcggaccccggactcggacccgggccctgaccctgacctggacccggacccagattcggacccagaccctggactacgggcatggacctgggatcccagactcggacccggacccggacccgtagttggtgttgggatcgagtgtattaaaa

SEQ ID NO: 139220 - DNA, 752 bp, Cannabis sativa
tggtaaaataattccaacaggcacaacatctattgtctatttgacatagacctatgtgttgcgttcacacctctatttgcaataagcccttagaacgatttatctcgattctgattatcgagtctaacctaattatgttttaaccatataattctttatatcaacatacataacacattattgctttcatactcacatatattctaggataataatcttggaccatattattactaaacttagagtaataaccctaatctcgattttttgcataatatataaacaacatacatgagtgccactgtgctaatttctttgtgctagtttactatcttacttggtaatccaagtatgtagagattccaaatctttgagtgttcctgagcaagcacatgtaattctagtcacacattcttgagatttcacaaatagggttaatcttaaactcatgttcatacatgtatatgtaatttgaactctaattatagattaacacatagacgccaaaacgagctttccaacgatatcaagaacgtccaaaacgaaattctaaatcaaaagttatggcaaaaatgagaaaacacaaaaactaggaaaaataaggccctcgttgcggcgaccaaagccctcgctgcgacaaccacaacatggtggattgttagtacactggatttatactgacatgataattagtaataatgtatacttacatattggataattgttatgtcctttctagggcattggaaaag

SEQ ID NO: 139221 - DNA, 1501 bp, Cannabis sativa
taccgatgtgatactgtcaagtagtacagtaccatcaaccatgatatcagcctatactcgatacgctagtcgtactctagtcgtaccgatgtgatattttcgaatagtacttaatccaacatacatttatcgatatccaatataatactaaacatactaatatcactattataatataatctaacaggattaactaacatgcacactaaacatgtaaatgcatatgcatataattatactaatcttaccttattttcgaattcaggtgtgccggccaacccaagtggaatagctgctcaacaaattacaggcccctaaatgacattattcgtaaaactggtgagtgacacgatgaatcactttctggggactaaaacttgaaactaaaagttttcctatcgataaacaacatggcgatgccctaaatatcgcaaacacgggaaaaactagggttcccaaaactttcccaaccgatagaccggttccccaactggaattccggttctgtgaggtttcttgggggccaaccggaattccggttcctacaggtcccactggaatggtcgaccggtttagtgcaggaaaacttcaaaatttcactactctctcaattcaaccccaaactcaacaaaaccttctagagcggctaaatataccattataaacatattcaaagcaataaaacaactaaacaagctcagaatcaaaatctaccattaaagaccaaagtttgagttctataactcaaactttgtctaacaaccaaattaagcaaccaaccagcttcaaatcagctcaataaacataattcaaactttagaacacttcaatgaaaacaaaacacaacaacatcaaccttaaccccaaaatcatgcataaatcttgcttgaaacctaagaaattacaaaaaaaggtgctaggatatttaccttgaattaattcaccaagaaatttgctaaacttccagaataaggctaaagattcacaagccgtagttggcttctatggagctcgagagagagagaaagagactagagagaaagagaagctattctcttgaatttttctattcttgaataattgaataaatctttttttttttttttaatttatctaaagtcatattcatattagtaaagcttaactatagctcacaaaaggacaaaaactaattgatcaaaaagaccaatttgccccccactaaaaccaaaaagcttctaagccaattagggatattttggtcaattctaaaatctcgactaatcccgatcttcccaatgtctaactatatttctccgccatactaaaaatactaaaatgtgattctaatggccaaacgccgcgttctaatgtgtcaggcagaaaataagaaaaaatataaaattccatatatatcatatataatgcattctgaattcaaataaatctccataaaacgataaatcataaatatcatgcaagtttcataattaaaccctgattatttgctaatttccaaatt

SEQ ID NO: 139222 - DNA, 1571 bp, Cannabis sativa
  modified_base (142)..(145): a, c, t, g, unknown or other
aaatgtaatgtccactagcttcataattttcataattcattcgatcatcaaattgtccattgcagaagactaggaatggaatgtctttttttttcctgtgattttgaacatgttattagtgcaaggcaacgatattgaaacnnnnttgattctgttatgaaatagagtagatacttacttttatttccttccctttgttcaagtcttgtatttcctgttctgattcctgcttttgtcattttaatttattttattgctgttaataaattataataaaactaaaatgaaactattaagaaacgtttaaatttatttcagaaactaaccatatctcaaagtgctttctccttttcttatttccaaaataaattcctgcaaaaaaatgaattaaactattataaaatgatgatgcaactgtaaatcaacttgaaaaaccataacacttaactcaatttaacgtagttctggtcattgtgctttttcatcagttttatttgaatcagatcaatttccaactattataaaactaatttgcaaccaattacataaatcgtaccttatatttctactattttttggtacccgtcaagtgaaattccttcataatttgtaaactattttaaaatgatattgcaactgtaaggcaacgcaagaaaataaaaacagtcttatatgtaacatgtcgttccttaattagaatcagatcttgtttattgtttttaagaatttgaattgcctattgtaaaccaggaatcaaccagaatgcaactatatatgacgtagatttatttttgaaaaaaatttcatatcataccttgttttggattcgagggggagctccagatctgtttaatacaaatctacattgcttgaatctgaattttcgattctggagtgagttattttgaacgattaaaaccgaaatcaaatgtttaatttcagtttttcgtaattaaaatcctagtttttctggttttttttcgtaattttctgtttagattattgcagttcttcttttccaatcaattttcgccagaacttatggttgtattaccctcgttttggtttcattctggttgtgttgcatatttgatcgatggaggtatcttcatcttctccgttcattccgtgcggcttaaagtatagaccaggtggtatttttgtaattttttcattgtgggttgtataagtgttgaatgggccggaatagtaattttgtaatatttttctttttttggaattttctgttttttcccttataaaattgtgttgaatttctttaaaaaaatatttaaattttaataatatatgtaattattatacaacatttttatttattaacaaagtaattaatattgtagaatgtcatatttcttaattattttgaactaaataattaaaaagcctacatagtattaaaattttacaaagaacataatatcatttttaataatataaatatgataataataaataaaaaaacaccattgtaatagctcattgttataaaataatataatataatataaagtagatgagaaaaaagaagaagaagatgaagagagaaagag

SEQ ID NO: 139223 - DNA, 1618 bp, Cannabis sativa
tctcaatagttcatggggcattttaacgaccttaaaagttcagaaggcatgatttggtacatgtcaaagttcaggggcaaaaatcataattagcctatatatattatagggaaattttcatatatatacgtaagaaataaattaattatataaataacgttgttaaaataattaacataaatcttgtgacacaccaccaaagttataacgtcaaacaaaacaaacacttactgcaattaaagaaggaaatcatcaactaatctccacacaaacacaccaccttgtttacaaattattgcatgtctaacaatcgaatgaatacatttaaatatcatccaattaatttgccaaatcatacgatcctaaaataaaaaactagaaaccttcatcggaaaaactccattaaaaccgatcaaaaaagcttcaatcgtgaatcaaaaattacaaagcttcaaccatgaaacgaaaaatcaactaaacagtcggcatagcaattcaatcaaaaatctgaaacaaaaaaataacgttacctttcacattgtgatcaacaattactgaatcatcatcgtcgtcgtcgtcgtcgatacttcatctctattgttcttctcatcactttaaatagtaaccgtacaaccaaaaactttaaccatgtaattttaaaatacattactatccaagctaattagtaaacgaaatattttaatattaattaatatacttttcaaataatacagttttatgaatataacttaataaattgtcaccactttttgttttcgaaacataatatttaagaacaaaactttttacttatcttatgttgcataaagtatataaatatttaatattttcatgaaaaatagtgcacaactacaatcagtatgtttaattaactatacactaatcaaatgtatacatatataattataattagatatttttatttataaaaagtatacatttattgataacggtgaagattaaagatgataaatgaatgcaaatgtttatgaacaaattaaaaaaaaaaaatgatgataagaccaaatattctataatcaaatatgtctatactagcatatataaacttattagtttattttagcatattaaaataaattttcattttttgtttacatagtagcatttttatataacctatcatcgaatatgctaataaatttttaatttggtatattgaaataagattttatttttctttccttatattaaaaaattcaatatttcattttataaaacatactattatatatgtcaataaacttactagtttctgtttgttggaataagattttttttcaatacagagtaaactatataatcaaacatatataataatatacgccaataaacttattagtctatttttcgtgcattagaacaataatatgcattttttgtttcaaacacaatgtgggcctatacaataacaactagttagtctatttttttttccagtcgaaacatcaaatctagttgtatacaaagtacataactgtaacacatcttacacagtaaacctggataacaatatatgaacttgtcaaaaatttaaatatgataaaatgtcttactcataagtttatttggtatatat

SEQ ID NO: 139224 - DNA, 590 bp, Cannabis sativa
ttcctctcaaacgctcacccaaaaattcattctcaacccacaatgattgctcaatctaattccacttctcttgctatatgtatatactatatatatatattttgaatcaactagataaagagagaaaaagcaacaacatttttctttgattaggggtggtacaccccaaacttagacttaaacttgctttttttcttttatattttatttaatactatgattgtacatatatgtatatatatacttattatttttttttgttttttttaacatatctatatatagcaagagaaggattctattgttatgtgaatcaaaactctcaccaccccgaactcacatcccatcacgtctctagtatgagcttgtttttccacatcttgcaaagatttatcctcacttccttattccaaataatgtttggcttgtccttgataaatttcagcgattaggttcgggttatgaatggtgaaatttaagtgtgtgtgtgggtctattaactttgatgggtgttaagaaaaactaggcttttggctcaatgaggggtgactattgacaatcaaaattttatcgggttagcttgaaaggct

SEQ ID NO: 139225 - DNA, 1481 bp, Cannabis sativa
gctgcacagtacgtttaaaaaatcacgtaatacgcctaagggaattagggtgtttcacatatagtgagcagtttaatcacaaagttgactgtaatctttttacgacgatcatcccctagaaccatgggatttgattacaaatcacgctaagtaaatgcggtttttatttaaatttcacacagctgtgaacattctacttttattgggccaaaatgtaagccttatcccattgagatgcctcgctgggaatggagctgagttaactttgatggcgagctggagctcgtcatatgtcttttgaggttgatattgcttttactttaattctgacaactacaatttctggtgtcgagatgatctttctcgcgtgcatgccctcttacaacgagatggacgcctcgctacctatcaccttgattcacccctctacttatacttagtttgtataccgtgtactatacctaagtatctctattgtcattatatctactccacgcgacgaggttaatgcctcgtcttacacacttgtagttacatggtttctcatcgagacacaactcaacagttagtacatttttatctcgcataagactgttcagtcaactgagttataaacatactctgttaattatgcttttcacgagttattccacgtcaagtgtaattacgattacgtgtttaagttctccattcttcctagctcgacacatgtcttcttctgatgtgctcgctgaatttcgggtataacagtgatatagggctgagatcaatggggatagttctccacttgggttggccaacatgtacgaacctagattaaaggtaagaaaagtatattgtactgcatagcatgttatagcgcaatacaattaatattgttgtgaattgattaatattgagattaagatatggttattattgttatataatgaaaagattgattggttaagcaatgataatgtgatgatattatgaatgtgatatacgggctcacctgattaggtgatgtgatattcctggcgacgtgtagatacgagcgttagtgatacgaaaattgccaggttatggcatagaatgaaactgttatagggttttctcctggtgacgtgtcaatatgggcgtcagtgatatgaaaattgccaggttatgacatagaatgaaatttttgtaggggacctcctggcgaactgtagatacgagtgtcagtgatatgaaaattgccaggttatggcatagaatgaaaccgttgtaaggtttcctcctggaaatgtgtagatacaggcgttagtgatatgaaaatgcctggttatggcatagatcgaaaccattgttgggtttcttcctagcaacgtatcagacgtagatacgggcttcagtgacatatgataagtaacgagtgtaggtacaggcttatctgattagacaatgcaatatatgttgggttttgtgccctaaataaaactctttacaatctgattagt

SEQ ID NO: 139226 - DNA, 518 bp, Cannabis sativa
tctaatctaataataaaaaaaaaacttattataataataataattaattatttaaacatcaatatcaatcatcaatcaatatatataaatgaaggttttaaaaagttgtgtggcatgcttgaccttcttattttttctaatacctatttttctaatttctttttaaaaattaattagtatgtaaccaataattaacactaaattaatacctattaattaaaagaaatcaaaccaaaaacttatagtattctataataattaccatgatactaaattaaaagaaatcaaacttaaaacttatagtattctaaaataattaccacctataaatcaatatctatatatatttataatgttgttattagagtaggtgacgtggcgccctattatttcttcttcctacctttatctatttttcccatttttcaattttttattcacttttgatcttttaattctatttctaatatttataagtgtgaaatattattatatatttattgatttcattgtaatta

SEQ ID NO: 139227 - DNA, 1165 bp, Cannabis sativa
gaatagggtattcaagaatttcctggatatttgtgttattgtatttatcgacgacatccttgtgtactctcagtcagaagaggaacatgagcaacatttctggattgttctgcagcgacttcgggaacataagttatatgccatgttcaagaagtgcaaattttggctatctcaggtgtcctttcttggacacattgttagcaaagatgggatcaaagtggatccaggaaaaatagaatccgtcagggattggccaagactgaaaaatagtgacagacgttagaagtttcttgggtctggctagttattatcgtcgattcgtagaagggttctctaaaatttcaacacccttaaccgagcttactaaaaagaatcagcgttttgtatggacagataagtgtgaagcaaattttctggagctaaagtagaggttaattacagctccagtgttagccctaccttttgataaggagaggtttgtgatttattgtgatgcatgcagacagggtctgaggtgtgtactgatgcaggctgattgggttattgcctatgcctcccgtcagttgaagaattatgaacagcagtacccgacccatgacctagaacttgccgcggtagtgtttgctttgaagatttggtggcattatctctatggagagagatgtgaaatttgtactaaccataaaattctcaaatatttctttacttagaaagatttgaatatgatacagagccgttgattagagttggttaaagattatgattgtgagatcctttaccatcctgggaaggccaatgtagtggttgatgccctgagcaggaagggtctcgggcaagtaactagtatggtttgaatttcacctcagtttgcagaagatatggttagatcaagcaacgagtttgttgtaggaaaacttcataacttgacgctacaatatgatttgtcagaacgtattaaagctgctcagctaactgatccagagttagtaaagatcagagaagaggtttcagctggtcaagccaaagactttacagtgtcagacagtgggatgatgttattcaagaccagggtttgtgttctaggtagtatagaacttaaaaatgaaattctcaaagaggctcataccactccgtattccctacatcccggcaccaccaagatgta

SEQ ID NO: 139228 - DNA, 694 bp, Cannabis sativa
tcttcggttcgatataaatgggtcggacccgacccgacctgcccattcctatctatttatttgtttttaaagaaaaatagttggattcatttggtagtaaaattcattaggtaaaaatttaatttctttttttgtatgaaaattagtatgattcaattatgcataatagaggaaaatttgagattggacttttgttcctaataatattaggtacaacgataataactactaactgtaaactcaaatactaaacactacattttgtcctccacttatattttgttctcatccatgtcctcactcatatcctaaaaataaaaacaatgtatattctaataatcaagatcaactacgtaaggctcccgcaaaaaattaaaaacaaagaaaagtatagtaataaaaatgagttttttcatttttacacttgaaaacaatttttttttggtatttttacggaattctacataaaaactttcataacaactaacaaaacacatagcaacccacataaaaatcaatggagaaaccaccgaagcaacccaaaccgtaaatttgaaaaaaaaaaattaaaaaacagtatatagaataattttcctaatactagcttttgaacgtgcgttgcacgtgtaacatatattattaaagatcgtattcagctctgatttatattttttttttgactaaatgtagacat

SEQ ID NO: 139229 - DNA, 1452 bp, Cannabis sativa
atcccacttgagagtcggccagatgctttaggttttgtaaaatctaccacaatggctggtcagtctagacttttattgggcgagcttggaagtacggccttagctttctttgtgctaagagtaagatgaacattagcttctccatgagtggctatcaacttttaacgtcgattaatctcttgttgatgtagcatactggatgttgtataccgtcttcttctcttgttaggattgcactcatagcatgttctgtgacagttaggtacacacccaactcttcattgtttagaggttttgataggagaggaggttgagccaattgttttttcagctcttggaatgcattttcacactcccatatccactcaaattttttgttacctctgagtatgttaaagaagggcatgcatttgtctgttgatttaaacacaaatctgcttagtgtcgccatacgtcctgttaggctttgcacttctttgattgttgtgggcaacttcatgtccaaaaaggcttggatcttgtccgggtttgcttctattcccttggcattgactatgaagccaaggaatttggtcgagcctactccgaatgaagatttgagggggttaagtttcatgttatactctttgaggatcttgaagccttcgtctagatcctccacatgtcccccaacctttttgcacttgactagcatgtcgtccacatgcacttccatgttgcggtcaatgagatctttgaacattttgttcacaagtctctgataggtggcccctgcctttttcagcccaaagaacatgaccttgtagcagtaccgatgttaacgcagattttcgttaactaaattaaagcctatttcatgatgaattggcacagaaaaaataacagtaatggaaatagaaagaacacaaagcttttttacgtggttttgtagttaaaaatctgcatagtccacgagtctatcttattagatatttctgatacaatactaggactttttctcttgaggaattttttgtccctttttcagtgtatcatgcccctatttatagttacataggagggcagttaattacaaatcagactgatatcctacaacaataatcccatgaaattgtaggatttgattaggtcccacgtaaaataaatgtgattattatttgaaaatcacacagctttgattggtccgcttttaccaagtcaatgcatacgaggattaaatacgctgaaagcgtatcacgctgggagatctccctgtgaacatagcaacaataaccatggtagcgagctagagcttttgccatgtctttttaaggttgaaaatgtaaatctcgtcatttttatgattgaagacataacgctccatctgacaatcacagttcttggtgacaagatgaacttcaacagtcaacatcatttgaatgtcagcttctatctgagagagctaactcgacg

SEQ ID NO: 139230 - DNA, 617 bp, Cannabis sativa
ttctcaatgtcaaatttgcattgaaaaaaagaaataatagttctctccaataaatctaaagagttgtttcgtaaaaaaaaataccaagctaactttgatactcctctcaagatggagtatagatatctttcaaacccatcttgtctttgaaggtattaaattggttaggaaaaagtggcttagttagaatatcagctagctgatctcttgtagaaacatgaactattttgataagaccttgttgcaccttttctcttactaaatgacaacctattttaaagtgcatgtttagttcttttatggaaaactggatttgcacctataagttgagcaggtttgttgtcacaatatagcaatgcaggctcttcatgctcaaccttcagttctttaagaatggaaagaagccaaacaatttaacaagtagtggtagtcattgctctgtattctgcctctgcagaagaccttgaaatagtgtgttgcttctcgctctttcatgagatgatagaggtttcaatgaagatacagaaacctattgtagatcttttcgtatcaggacaagctgcccagtctgagtctgcgtaagcatgaaacttcacttgtggaggttgaaacacatc

SEQ ID NO: 139231 - DNA, 919 bp, Cannabis sativa
  modified_base (40)..(55): a, c, t, g, unknown or other
  modified_base (641)..(641): a, c, t, g, unknown or other
gataaaaatgtatgtcctagatcaagaacatacaagcttnnnnnnnnnnnnnnnnctctattgttataaagtcatgtcgttcgggctgaaaaacgctgggggtaacgtattagcgattagtaaacgaaatgttcgcaaaccaaatagggcgaaacatggaggtttacgtcgatgatatgttggtaaaattgataaaaagtaaggatcatacctcagacctcgcgaaatgctttgaaatattaaagaagtataacatgaagctaaactcgaaaaaatgttccttttgtgtttcctcatgaaaaattgtgggattcatagttaacgcgagaggtattaaggtaaatcctgaaaatatcaagacattaatagacatgccatcaccgacaaagccgaagaaagtacaagccttgatagttagaatgtctacacttaacacattcatttcgaagtcaactgataagtgtgtgccgttcttcaacatactgtgaggtaacaagaagtttgagtggacaaaagagtgcgaggaggcctttcaaaacatgaaaaggcatctcccaacgcctctggttttggcaaaaccaataactggagagatgttgtttctctatttagccatctcaaaagatgcgattagtgcagcnatagtgcgagaagagggcaagcactagcaaccaatttactatgtaagtaaaaggttactaggggtagaatccagatatccccctctagaaaaactcgcgttgtacctagtccatgcgtctcgcaagctaaggccatacttcagggctgcccccataaaattgttaactggtcagcccttgagacaagttttatcaaaactagatgcttctggaagattgataaaatggtcgattgaactggggcagttcgacataacataccatcctcaaacatccat

SEQ ID NO: 139232 - DNA, 825 bp, Cannabis sativa
gttatttgtatgttatatgttatggttttcttaatgagtctgtcgactcacagtgctattgttatgtgtaggtaagagcaaggctaaagttgaggagccgtgagagcgagacgatgaagatggtacatgtcggtgcggttaggcttggagtgtaagatccttaggacatcgaggctttggctgtatagtcgctgagcgaaaaacttttgattatatgtatagcaaacttttataaagtattttgtaaacgggatcccgaaggttataaatgtaatactttaagtttttaattaaataagcaaattttaattattcacaattttcaataacctcgttgattagcaatgagctgcacagtacatttaaaataacgttaacacgcctatactagttagggtgttacaatttggtatcagagccgccaggttgttttccgaagatcgtcacgacatgtacaatcatcatcagcagtcaactcatttcacggttcagtaagtttttattgcttaggagtttatttagtagtatgacttaagaaaatcctgttaggaagcatgttagtagcctaatagtagaataggcgcatgttcttaatttccaaataagcgggattagtaagtttttctttgatcacgatctgaccagactagctcttggttacgtaggctattcaaattagtatgaacgccaagcgaaacaccaggagccagggtaattcggttggatcaaatgaagggcaaggagctcaaattcccccaaatgtccgtggccgaggtagaggtcttaggggcagggcacgtggccggggtgatgttaacccgccac

SEQ ID NO: 139233 - DNA, 578 bp, Cannabis sativa
ctctctctctctctctaaagcttcgaccaagctagaacccaagggaaaacaaggatttcctcatcattttcagaccaaaaattagaattcttagcaaggttggtggagaggaagatcaaatggcctttaattgtcgagtagcagtttccacttagagttaccaacacgcttgcatttggaataaagataagactagtataatagttccatatatgtataaatgtttagtgtgcttgtattagtgagatgtacatagagttgcactgagatgccaacagatatatgttagacaaatcaatagctaacagattagcatatcagggtattagtgaggtgtacatagagttgcaccgagatgctaacagatatatgctaggatttccgatagtatgaattaactactaccacatcagtatgactagagtactgattacaggctggattcatagttagtcatactttgtcgagaacgttcctgacccagttatcaaatcgtgagtagacgtataagtgcctagttacggtctggttatatgtttatttttatgattatgcttttcttactgagtctgtcgact

SEQ ID NO: 139234 - DNA, 990 bp, Cannabis sativa
  modified_base (339)..(340): a, c, t, g, unknown or other
tttaacgagtgaatcaaagaactcaatgaacacaaacatgagttcatgtatactcggaattcagacagatctactaatggtcattgttgtgatatgaataactctttcatgataaacgatgcgttgatgaaagatgttattacatatcggtccagtcatgtctaatcaaattatacatggtacccttacctcatgtctatccacatatgtaatccgaatcaaaatcatacacattagagtatagttcatagtaaaccgtacttggtaatttcatattaaagattctatactttaatacactaccgacttgtttattcatattgtatgatcttaattctnntgtactaccttacaagatcataccatctctatatgaaaatgaaattttcagatatttattaagtatacttcgacaattaaaatattcatttatcttataattgtatttaatatattttataatatattatccatttaatacttgcttttagggtataaaccctaacaattttcccttggcccagcgtccaggttggcatcatatgtctacgtgggcgctggatgttaacctaggccctggtatcagaaaaaccttcagtaaaacgccataactcacttaatattgatccaattgacgcgattcaatttgcatttcaatgctctatcaaatcatgtctcacaccccgatcgcaattatgaagatatcaagtccaaattttgtcctcaagagagttgcaaatttcaactacagctaaccaaaataggtcccacagacgtgactcaagctccgtaaattgacaaccatcctccaaagttaatttcaccattagatcatcatcaaaagttaatatcttaaagggcttttttcataaatgtacaacaaaaataaaataattacaaaaaatgtgcaaaaaaatattatttgaaaaatttaaacattttgaaaacttattacataaaaccatacattttaatcattaaataatataa

SEQ ID NO: 139235 - DNA, 623 bp, Cannabis sativa
  modified_base (61)..(81): a, c, t, g, unknown or other
agtattatctcaactagtgatgggaccatggcctacataatcgagcttccaataagtagannnnnnnnnnnnnnnnnnnnntccctaacttattaattcttccttccgccactataaattcaaaattaaattgcactctcaattatatagaacgctctatatgtaccaatatatagatacattatgattatctattgttacaatcctaatagtcaaagatccactatagatgatctacatcgaaaaggaacaaatttaccgttctaccgttaaatgtattttatccttaaaacacttagttacctataagtgatatttcagtaaactaatataattactaaaatgaggcctcaatcatttatttctattttgccaagctcgaaggaaattatcgttttacttctaaatacttatagaagctataaatttcatatctatgatcagcgctcccactcaatttaactaccatgctcataagatgtaaatatctgtcagaaccatttgttggcttccacgaacaacttgaagaacataaataatacagctaagctaaacctaacaatatcaggatcaagatccataaacctaagatcaaccagtgattttgacttagaaatatataa

SEQ ID NO: 139236 - DNA, 634 bp, Cannabis sativa
ttaatttttaaaaatgtagacaatatttttttatatttttaacagtttgcagatatcatggaaaaaatacgtcatgtatagctgcccaaataatacactttactgcacaaatatagtttcaaataaatcaaataaatgtacttgattatcataagtagattttatttattaaattaattatttacactatatcttaccatcttaataaaaaataacaattttgtcgacattatcatatacaagttatccacgtacagaaaaatgaataattcaattatatgcagatccagatagattgaaaagtgcaaaatacaaatattacactgttgtctcgcaaaagaaaattaaaactcaaccattaagagtattcttattttttttttacaacttttagacatgtgttatctttacctatcaacaatttagagattaaattttaatatcttttttatttaactcaaatttaaattgtgtatgctttatttttcgaacattgattttttgtttatttttggattaacttatgaacaaattacagttagattatcaagatttcttaaacgttcatatattgtattcagtatttacttttaattattaacaatattatttacattaattgaatacacatatt

SEQ ID NO: 139237 - DNA, 534 bp, Cannabis sativa
agtcgtgtgctttgagtgaagttcactggtgatgggtcgaatggaggtttggtgcgcagtggctggtgcgagcttggcgtgttgtcgtattgttggttcgagcttgaagtcgaactggtgcgagatttgggtggaaagtgcgactggaactaggtgcgggcagtgtgatggtgtggttcgaaaggcttggagctgggcgatggggtggttcaaaggttgggttcacgggttggtttctggtgggttggtgggttgtggctcagtcaagtgggcgaagtggtgctgatggtgcgatgtgatggtgaggtcgtggtgcagttcgaagtttcgaacttggaagtggctcggctgggtcgagtgactggaggctaggctcgggcagtgatggtgcgggttgggtgaaggaaaaagatgatcctggctggttcagctgtgcaagagaaatgaagaagatgatcttgaatgaggtagggttgagggtgggctgaccaaagtattgggctggtcaaactagctggggcccagttgaccaaa

SEQ ID NO: 139238 - DNA, 717 bp, Cannabis sativa
  modified_base (41)..(51): a, c, t, g, unknown or other
tttttaatttttttaaaaatatgtgtggattggattggatnnnnnnnnnnnacatgtcaatcaacatccaatccgtacaattgcggattttgaattcgcactttgcggattggattggatagtacgtattggattgaatcagttattttatgaacactcccagatctagtatttatttagagcatcaaagataataaaacacatacctcccataccatccatgagagttattatccttcaatgtcttcaaggagtatcaccaccaagatccttgagcaaaaaaactagagagagcacttgtggagctaacccttttacctttcaccacataaaaccatctcatccctttaccacacataacgcatatatatactatacatgctattgcccttataaccctaaggggttattaaccaattggacttatatgaggtcttttatggtgtactataaattaatgggccaactatagtattaagggtgctctcatgtgtctctaacacataattaagttgtcaactatatcccattatagttattagcaacattaggcacatagttaattattgtgtattatggaattaaacctataattgtattattagtccattattataatttcaactaggaatgtcaatggggcgggtcggatctgatccgactctgatccgacctgatccagatcatatacggatctgccccgccccgccccgcccc

SEQ ID NO: 139239 - DNA, 943 bp, Cannabis sativa
gacggttatagaaaccgacaggaatactttaaacgactatttaaaaacgtcgggaaaacccatttttatagtagtgtgggtacctcttagggccccaacccgtgttcaaatttgcacattatatacacttctaatgaagtatttctatcccacgtgggactcaatatactcacacacttcacttctcatacaaagattttgtaaaattttactaaagatccaacaatcccccacttgaaattttttaaaaatattttctcgagcagtagtctaagtaataagattgagcatagacaaaggtatctatcgatttaaacctttgcgtagtgaatactacttagaatatactagagtgactcgccttgaactctatctctaacgatgtaccacacacaacttttctaaggtgtagtccaaaagcacgtgctttaatagttgtgaatgtctatcccagtatatatagtgaacactcgaaaaatttgtctgaaattttataggaagcggccccagtcccacattcacgtaggtgagtctatcaagagtactcttgtagctcggtacaccactccacagagagtatagatctcattaagaatttctattatctcaacgttctatcgcttcaacaattcatgctgcacatttcttttaaaataacatgatctcattcttatcacatcataacttgttattacccattgaacatattttttgggatctctaatctataggtcgggttactattatgagtgactcgtcattctaagccaatagtccaattcctttcgagattttaaggactttctctctagcttatcttttcatcaaaggatcgactaaattttcatcagtgcgtacatgatctattcttactgctccaatagagaggaactctctaatagtagaacctctatccaagaatacacttgggaccaagaaaata

SEQ ID NO: 139240 - DNA, 723 bp, Cannabis sativa
ttcctcccaagataaaatattttaatggaagattgatcattcttaaattccgacaaatttagcattagcaaaaaggggaatgaaaattaatccgcattgccatagatgtaactctagagttaaagagagttttttcatgcactatgacattgcaagtcaacttaggcagcatggaaatttggaagatttattggtgcacttaaaagagaagggcatgaggatgcgattaaggaagatgtggcatagagatgtgtttgatttcttcctggtgccatcttggcatatgtggtttgtaaggtataacacagtacatggtggaaagaatcttaatgcaactactatattactaaatatagagacaaaaatgtggggaagaagagggttttgtatgaaagatctgtattaggatttataaaacactccaaaaatatatatcacaaagctaaacatatttctaaaagtactttaatcataaatctatagaacttttgctaaattaaagaagataaagatgataaaagataagcgaaagcactaacctgaagtcattgttggagattgcagagaaggtgatcttccaagaatacactatttttctaaagtattttctctgatggggaaagagtgtttggcaggcccgtctcaaggtgttgagaggcctagggcgaaatttgaaacggggctttttttacaaaaaaaaaataaaataaatattatataatt

SEQ ID NO: 139241 - DNA, 586 bp, Cannabis sativa
agaccaagacccacactcgtgaacaaaaaccgaaacatgaattagaacgggaccaggatctttgaatgggaccgggacctggacccagacccagcctcgaacgctacctgagactgaaactcggacctaaaccttgcctcatacccaaatcatgacccaaacccagactcggatccaaactcaatccaaacccgtatcccacgacttgaaactggaatcgaaactagaagcggatcaggacccaagaacaagacatgactaggacattaacctagacccaaaactgtaaccggaccaagacctagactcggtcaaagacccaccctgggattcggtccaaaatctaaatccaaacccgaaccgggactcgggacccgaacccagacctgaattcagaccagaacattgaacatgactcgggacccagaactggagcctagtctcggtcctagacctagacccaaacctaaacccttacctaggacatgaattggaacaagactaggacccgtgattgggatgcagatcttgtccaatgattagagaaccggggcttggacaggacccatagtcgatgtcttgatta

SEQ ID NO: 139242 - DNA, 662 bp, Cannabis sativa
ggattggatcgtgcggattggatttgatcgaatactttgtgaacacccctaattattaatgtataagtcttatttaacttatataaggcttagggtttaatattatgttattattaatgtagaagcattatttaacttatatacttatttttgaatctctataaaaaaaatgcactgtacgtatattatttatttatttatttatttgaatcaacaaaaactgtacgtatattattttatttccaataatatatatatttagaagttataagaaataaaatattaaacaattgataaatctatagagaatactaaagaaatctaaaaaaaaaaaaaaatcaaacatgaataattgataagcactcgcttataaaattaaattattgttatcaccatatctcacttatagtcgtcgctatatttaaaatttatgtcattaccgtatctcattcgtagtttttttttaaaaaaaaaaatatatatattattatatgtgtagtaatttttttaacaataattttgttatagtataaatatatatgtttatgcttttaatttttgtagtcactaattaataaattataatttaaatggtgttagatattaattaacaaattataaatttaaatgtatggtatggtatcgtcaactaacatttttta

SEQ ID NO: 139243 - DNA, 518 bp, Cannabis sativa
cgagtttgcactcttcctcgtgcgccatggaagaacagataagcatcagacaaagaatgatagcaatgaaagagcacactttaatggaggctctgataccatatcagtttggaatttattagaggaaaaacataaagaaagagtagaggaatgaatcaaagacaaaatctcattatcatcattgaacagtacacgagtataaccttttatatcagctgaggttagttacaatcacaactaactctaactaacaacaatcacaactcatactcttacaactaactaactcctaactctaattaatctaaccaattacagacttgatacatttagcttcagattttttcttaagaaaaaaaaaaacgaagctatctattttttatgagttttggcttgtagatcaatgaaaattaatttagtttattgtggaggcttgaactcccaacaagaaccaacacaacaccaagaataacacacaatgatcaagaacacattcaacataaaaccagcaacataaa

SEQ ID NO: 139244 - DNA, 632 bp, Cannabis sativa
aaagtatttaaattataatgcttaatatttgtactaaattatttgattagcatcaaagatattcaaatttatatgtttatagatcctaactaactaaattatttctagaattattttattattaactataaaaaaattacaaaaatacagatctacagtatttttaatatttttaaggactaattttcttatttttctttataaaactatgcacaattgttttatggttgttctcacattgttactacaatactcttgaataccaaaatattaaggaagtgcatcgatacaccaaagaattttcctacgatattactactattagtcaacctataaattttttagaaaattttatataatttataacgctaaaaataaagtataaatattttgtatatatttatgatataagcatattaatttttgtatatatataattataatataatatttttattaaataggatatgaattatttcacaaaaaaattaatttcaaaatatttttatttttgcaagatttactatttcacagatagtatatcataaaactaaataaggaatatttacagcaaaaagtacctaaagtattaggtttgtagtacttaagtatataccaaaattattttttta

SEQ ID NO: 139245 - DNA, 551 bp, Cannabis sativa
aacaaatgtgtaatttcagtttcttcacagtttttctggtctgtttttcgtcacattctgtttagatcgttacatgtcttcttttccagtggaattcgccggaattaatggtggtctttccctcgatttggtttcatttcggttgtgttgcttctttgaacgatcgaggactgttgttcttcatcgttctgttttgtgcggttgaaggtttagaggaagtggtatttttgtaaatatttatttgtgggctgtataaatgtttaaagaactggcctataatattttttgtaattttttttttcttttttgtattttcttgtttttttccctaaaaattatttgatttttttgaataatgattaaatttcattaaactaaatcatccaaaaccaagaatgcaaaaataaaaggtaaggagtccctactaaaaatacggtcagcctcaataagagaagatcgcgaccttattagccgtccgcttagcaaaattaaaagaaacaacatcaaaatcagcaaccaaagtcatacaatcataaagaatatggccataa

SEQ ID NO: 139246 - DNA, 589 bp, Cannabis sativa
aacaagagttaaggcttcgaagcttggagccttatacttgaatgtgtttgtaaattggtgtttttcatccaatatagcttggcatgcaggtggtaagattgttatcgcttggaatcctaatagataaactgttgacatccttaaatgcactagtcaactaaggcatttaaggttgacaacaactaaaagatttaatagtcttttgactgtggtttatgcatcaaacaatagatatgaaagaagagacctatggaaggatttatgtgagctgaaaagaaatgagcattggttgttaatgggggattttaatgatattcttgctaaagaggagagaatagggcatcgggttaaagctcatccggacacagagttcttgcaatgtgtcaatacttatacttgtcaaatggaagatgtcaaagcatgtgggaatttctttacttggtcaaacaagcaacatggggatgatagaatcttttcaaagatagatcgaattatggccaacgagatatccccagaaacaatagtaaaaggttaaaagtttctaaccagatatctgctattgagtgggagccatctgagaagtaatcaa

SEQ ID NO: 139247 - DNA, 576 bp, Cannabis sativa
ataatatacaatatatatatacactacatatattatatataagaaatatagaagaagatacatagattacacaatattatataacatatacatacactaaatataattttttgaatccacattgatttactttgtttgagtctaaaattgatcttccaatttatggctcatttcacaagtttggatccacttttgatccatttgttcttgcatgagaagacaattctcataagtgtaactctcatagttcacttttttatctcataaaatgaaataattatcactttaaattctgaaaaaaatataacttctcacaagttacaatttcttttctcaaaatcaatattggaaaaggaattccaaatattcactttattcacaatatagatgataataatcttcacatcaatagcaataaataatattatattactatcaacattattatcatactatatataattcatatatttatataatatgtattttactaattaacatctcatatgtaaatacacaatatatcaatattaaattcacaaatacatatgttacatatctcatatatatataaca

SEQ ID NO: 139248 - DNA, 508 bp, Cannabis sativa
gtttttttacatacaaatttaaaaattttttgaacatacatagttgtcagctctatagatattcaaaaaaaattaaaaatttaagtagcaataagaattagtcataacataaaattaaaaaagaatatattacaatatttatttttggacacaaaaattaactaaaaaattagagaattactaaaaagtacaattggtgtctattaccctcctcgatatcataccaatattagtgtaattaagtatgatgtctcatattaattaagaaaataacttttaaaaaatatcactaactaacaatactcaaaacataaaaatacaaggttaacaatagttaactagccgcaatagggtggtggaaaacctgtgccttgaaagtgaattaagataacatgtgaaaaattggtgtcctataacatattaaactaatcatatgctaactcaactaattacttttcttaaatattattaaccatgtaaacagttttttttccttaaaatattcaaa

SEQ ID NO: 139249 - DNA, 616 bp, Cannabis sativa
ttaaaaggtgtctttagaaatttttggggtttaaataaaatttctcttttgatcaattaaaatgaacattcgtatatagtttattattttatttatattttaaaagaaatatatatattttattactatgtcatttatttttgttatgctaattatgtacactatccgcataaaatttaggaattttatcataaatatacgtaaaatacaaaataattacgaaaataacttaacaaatctcaattacaataatatcttgccacatcattaaaaaataccttaattctaaaataatatgcctgaaactaaacaatcccgaaattctttttttttttcctgcatttcaaaagtaacattttgattgcttatgctagctgttgataataaaccaacaagtaactttttcataaaaaaatatcattttttatattatataatttgagatacattttggttacctttcaaacttacatgtatacattttaataataaactaattatttaggttataatattaatacatttgagtaactttcaagtttattttcaaaaataatgatttatcattcaataaactaccattttaataaactatattttaaaaaatatatatcat

SEQ ID NO: 139250 - DNA, 1347 bp, Cannabis sativa
agggttggaaggctaagacgttgtccaaagcaggccgagcgaccctgataaaatcagtgggtctatctatgcctatgtacgctatgcaaaccaccaaactctctaatcgtatggtcaatcggattgatggtttagttagggatttttggtggggtttcgaaaaaggaaatcatgggattcacctaaaagcgtgggacaagctctgcctcccaaaatctctgggaggtctgggttttcggaaaacgagagaaatgaaccatgcttttctagctaaatggggatggaatatcctaactgaaagccaatcgttgtgttgtaaagttctagcatccaagtacttaaaaggaaaagacctgctaaattacaagtgtaaaaactctgactcttggttctggaagagtgttgtgaaggccaattcaattctgagaagaggtgcttataagatcgtgaataatggtgagggtacaaatgtttgggaggatccctggattcctcattgtaaaggcttttgcccaaaaccaagaaggggaaatcattctaacctctctcaggtagctgatttgatgctatccaatggacactgggacatcaataaactgaaggagagttttgaccaggaaactgttgctgctattttaaaagggggccacccttcagggcagggcgttgacagatggatatggactctgaatagtaatgggctattctcgtccaaatcggcttatctagttcaagctttagatagagccccccagtgcgaggtggctccgaacctctggaatcgtatgtggaatagcaaagttctggaacgtcacaaggtcttatggtggtgcatcctgtctaatgctttacccataagatccttgattaataaaagattccatattgaggatactagctgcactctgtgtggtaccggggaagaattcatggagcacctgttcctttcctgtgatgtgacttttcacttatggcgatcttctccttggggtatctatcctgtttgtaatacaggcatccgagtttgggattgggtcaagttcatttgggatctaaagcgtagaggggttcaagttgaggatgttttcctttatgcttcgatacttgtggatacaatttggagggtccggaatgaaaaagtccataataactgcccagtggatatgaaaaaatgtgttgataatatttgtatttcttatgttgatctgcatgcttctcttttccctagccctgcttctcatcccaaggatgcttggtcccctcccccccaggattggatcaagctgaattgcgatgtaaaagtgggttttgactagggctgtacaaaaattttcgtaaaccgcccaa

SEQ ID NO: 139251 - DNA, 1057 bp, Cannabis sativa
ttgttagtaaatctagatcctggtaaaatatttcaacagaagccagaatgaaaagggcgaccaatcttgagagaaaggagatactagtgctaaatcgtatcattggattttgtattcaaatatagttatccttaataagatggacccgtagactatgaagatttaatttcaaaactacattaaaaccttcctgttatttactatgtattagataattaattgctatataatcaattttgcagtttatttattacacaaaggctaatattttaattaacgaaaatttacgttaacagttatgatgaacttatggagaacaaaatactatatgttcacttatcagaaatcaaaaaatagaaaattttggagatcattaagaattctgattctgatcttataaagattttagtagtgagatttttgtcacatatagctacaaaattaggaatagtattgaaaactattaaagatatatgttgtgacaataaatcaatcaagttgcattttagtaacaacatgagccttacaaggtcaaaggcacattggctttgagctaattgttattaaaatgaaatttagattaataaggtatctatagaacatataagaacaaactgtatgtttttggatccggatcattaaggatataccacttaaggcttttcaggagcttgttgttcatatatggatgtggtattatttaagattgtgctagtttagtgggagtttgtatttgagatgttctatcaagttggcacatatttatggtttaattttgcaaagaaagtatggacttaagttttgagtactctaaatgttttctttctattgagatttaagtataagtttagagaaaattaataaaggattaatctcaattaaggaggaccagttgaagataggcatgctaacatcatattttcatgtaatttctatgctacactacatccatgattgatctatgtcatttggttatattgatatatatgaatattgatgggtttagctatgctaaatgtggcgaaagctgctctgatcctatgttagtataatcaat

SEQ ID NO: 139252 - DNA, 641 bp, Cannabis sativa
cttcgcagggtttgcctcaattccccgctgattaaccataaacccgaggaatttccctaaatcgtccccaaagacacacttaagaggattgagccgcattttgtaccgtcgcaatatctcgaacatcgcttgtaaatggttgacatggtctttttcatgttgatattttacaagcatatcgtcaacatacacttccatggtgtccccaatcagatctgcgaacatcttatttaccagcctctgatacgtcgcacctgcgtttatgaaaccaaaaggcattaccttgtaacaatacaaacctcgatttgtaatgaacgaggtatgttcctgatctggttcatacatcgagatttgattatatcccgagtatgcatctataaaactgagaagttcatgaccagcttgggtagcttctgtcgaacacctcccacttcggggtcaatgttcaatcggtgacccatgacctgcggagatatttcgaccatgtctaaatgtttccaggcaaaaacatccaggttttgcttcaaaaaactgactagcttttctcgctgttgaaatgttagtttagaaccaattttcaaaacttagctattatctataggatcaataggtacctcatagtgtcttccgcgacctgggcg

SEQ ID NO: 139253 - DNA, 934 bp, Cannabis sativa
tcgtgaggccttcagcatctaccttaggaaggttatgttttcgattgtcattcttcaccacccactgtttctttgaaggagcagcagcttttttacattctccagcagagtgaccaatcccagagcagtgggaacatgtaatcggcttccattcatattcgacactcactgaagtattaagaccatgttcattttcgaattctatcatgttcgggagttgttggtccatttgcacttcgattagcactctagcatagctcagcctctccctatctttagtgacagcatcctccataagaggcttaccaatttgcccaacaatcataaagagagacctttggccccaatatttcaattcaagatcctcaagttgtacccaaattgggacacacttgacatcctctttcttgaaattagtattagggtcccaaggtttcaaaattacaggtctgcgattaaagaacacataacccccattcatgacctgatctctgaattcaagagaggtaaatcgaataataaaaaatccatgagataaagctttcactcgatcaaccttatcatgccatatcctttttgcaaatccttcaagaatgtgcaatggtggatttactccaagaacatagcacacattgaaggattccaaaacaaaatctcctcttcaatatcatctagagtgattttcactttcccagtatcctgctccatatctttgaaagaagtttccaggtttcgcatcacagatttagaacgtaaaataggaggaattgagttcttaccttgtcgtatttcactgttacattgattgttggccatgagaaagtggataaaatcgttccgagcgtcactcctaacctcatcctgcctttgaatcacctttaatgaagtattgggagacagaggtgttggaaatatttattttaccaggatctta

SEQ ID NO: 139254 - DNA, 867 bp, Cannabis sativa
gtggaagattgtgaagaattccaataatagaagaagatcaaggtttaggtcttgatcatactttgtgacaaaaaggatcaagggttagagatctaaacggaaggaggcattatattctgctgccaccaatataaggttttctataaacttcatatatgtttatttcattgttttaggaaattcatatttagaatgttaaattatagctctataatcaacatacatgttaataaatctagatctcggtaaaataagttccaacaacaacttatatcaataagctgcttgaaagattctcaatagagaattctaagaaaggacagtttgttggggttttttccctaaataaaatctatttcaatataattagatttactaattaataaaagatcagaaatcattttttgttgcatggttcacatgatttctttcatgattatatgtttaatgtataatttctataaaatctagaacatatagttattcatcattatagtgctgtcaacatagtggaatataatcatgattatatgtttcaaagtttaggtcccataatttttcaataaactagactaggctgacatgataatcagcgatagagcttacttacaccttggataagtgttatgtcctttcacaagcattggcaaagtattctaggattagatgtatggagtatatatacatcgaactggatcaatatttaacttggataagatatcataaacttaccgttatatctatctaagtcagtaccggttagttgatctttggtcaatagatcttcatccggatatgtttaggtttgatctgaattgtataatttatgttcttagagttgttcgtgaaagctaaccaatggttcag

SEQ ID NO: 139255 - DNA, 650 bp, Cannabis sativa
gataaacgatatatagtaacagatatataataaagcaataataagacacaagaattttatagaggttcagccccgagcagttctgtaatagcctaatcctcgtcaatttataaaccaattctatcgaaacaatttcttaatcttgtgcttactaggaattcttgtaaacgcttgtttggggtcgatttattaatgactctttgtaagacaaatgaagacacgatctgaaattatttgaaactataaagccatcatattttgccttattttataaaaataccattttaaatgcataatttgaaaagataaaagaatacttgaaatacaataaagagatttagaaatcaaaatgcaatagaaaaagattcttcatttgtaaaacaaaatatgataagtaaatgtttttaaataatacattttcactgtgtttagatttatcaactgcttaaataaaacaaggcaccatcaacattctagatcgtttgcccgtccgtagccgctcacagtatacatatcagaactcactctgttcactatacgtacttccatgtctattacctgtaggaggaaagtaaggggttgaggtaaaaactcagtaagaaaatatttatcatacaataccatataatatcatgttgggttttatgccc

SEQ ID NO: 139256 - DNA, 761 bp, Cannabis sativa
aattgatattcctaatgaagttacattttcttttttttttttaatgaagttaaatattacttttcttaatttctttcaaaaaaaaaataaataataatagttttcataatttctattataactttaaaaatgcgaaaattatattcctttttgaggagtgctaccgtcactactacaattttaccttttagtgacattatttagcgacacgtacaaaagtgcgggttactaaatagttatgacttatgtttagtgacatgagtaattagactctaaatgttaggtgttagtctctcgtaatgcacgtcactaaaaatacgaagtatcactaaaaagtaaaatccattgtttttatttttattaaatgaaaaatactgactatagagacgcatcacgagggattgggaaagcgtgtagtgaccagtcaggcgcgttactaataccacataattatcatatgattttagtgacgcgcaaagtatgtcaggacacactttctaatcagtcatagcatgactctatataaactaatacaataaatatgtattttatttttttatgtaggatatcaaatttttttatttattttctaatcaaatgcatcagatttttttattaaataaataatttaataataataagataacatatataacaaagtaagaaacattaaacctaaccacttctctttctctctcaccctctctttgtacctcattctttctctcctctgagtctcaactttttttttttttctaaat

SEQ ID NO: 139257 - DNA, 870 bp, Cannabis sativa
taaaataaattccaacactaagaaactattgtttcacttttaataaatatagaagctatagatgtctataattatgattaacactcccactcaattgcactatcgagttcccaagatgtaagtattgagctggttctatgataagctagtaacaaacaagtcaaagaacacatgcaatgcatttaagctagagctcaaccatctcaggattgagatcaaatgatctataatcaactaagtgatattaactttaaaaatatataatgataagtttatgatatctttttcactgtcaatatcagtctagtctgatatatagatgatacatccaattttagtttactttactaatatcttggaaaagacattcctctcagctaagtataagtaaaccttatcactgattatcatgttagtgtaaattcagtgcactgataaattgtgagactaaataatttgaaacatataatcacaattactttccactgtgatgacttttatttagggcataaaatctctacaaacttccacttgcactaataaaaaactaaagtgcatttcaatttaatttcatataattgatgtcttgatcaaatgtattattttacataaactatgtaataggatttgatagtttgtattcggtatcaacctacgccataattacattctccttagtcacaaaatgcatgaatttatgggttcctcacctttatattttactcctcgtagggtaattaattttagatcaacataaatcgaaaaaattttccaattttattttattttattttaatgttaatttcaaaaatgtatttttttttatacattggatttcaaatttaatcaaatatatatttatagaaaatt

SEQ ID NO: 139258 - DNA, 940 bp, Cannabis sativa
  modified_base (66)..(92): a, c, t, g, unknown or other
atgaaataaatcatgtgaaccaggcaacattaaatgttatttatgatctatattaataagtaaatnnnnnnnnnnnnnnnnnnnnnnnnnnnagggcataaaacccaacaccaatgctctggttgcaccccttggtgctccttggggaaaggtcctgctgcctgaaccggattgagatgaggcaaccggttcttgatccattcgtaaagatgtcccaatcggatcaagttttcgatttcgtccttgaggtttttgcattcattggtgttatgtccaatgtcgttgtgatactcacaccttttgttgggatccctccgggagctatccctatacaaaggaggcggtatccggtagtgcgtattttgcctagtagcgaaatacacacgctcctgggagtctgttagctccgtgtactaggtgtactggggagtgtacccccttttctgccgcttatcctctgtctggttgctgccttttgaggacctcttgcttcgagagccttaagagggacctgctaagcttgcggttagagcgaagtgagacaggacttgtccacttatcccagaaggattcccaaaatgagaagatgcaggggctaaggcctgaccctgactatatcctggggtagcagaaaattgtatgtcgctcatcggtggagcagctgcttgtaaagttcccgggagctgagcttcgggtacataccccgctatcccgatagggtagtatcccccataggccactatttgggcctcttttaggttgatttatttttggactcttttcaggaaatcttgaaggttggaggctccttcttgttgtaacttgttccaaaacagagtccctgtacagatccatgcttgaagaagagcaagctgttgtccgtcatcaactttcttggtctttgaggcttcttccttaaacctctttatgaaattcttca

SEQ ID NO: 139259 - DNA, 1192 bp, Cannabis sativa
tcatacataacatactacttgttcatcttgtaaatgaaatgtaaggcatcatgataattgatttcattttctacatcgaaaagttgtttcctccacagaaagtcttcctccttcgaagcatcaagaaaagctgtagctaaatcatgttgaacttgtatcatgaaatcagcatactcggatattcccttatacggccgagttgtatagcctacgaagctcattcttaaaatcactctttcaagttgagtttgcatgagtcaactcttgatatcttcacgcaaagcatgtaattctccagtcaggaattgtgttttgttttttgaaatagaaaactgattaacaatcctaacggtggctttgtcatgcatgatattatgcttcatctgcaactctaattttctattgttgatcatcatctctttctctataagtaaacattataatggttggatttgggtgacctaatgacacatgtcaatcatatttataccatggaaatatttagattaggcatgtgtattttgaaatgattacattgagtaaaacgagataacccttagaaatcaacatagaaaattttgtgttaccattccaataatataattaatgctactttttttacccatgtaaatttcttgagccttgtgtaagtctgtgaagataacaatgacacgtttaattaaataattattttcagtgtcctttgtagattattttattgtatttataaatgaagctagttccccataaaatatcagtgcccagtaccctataaaatataagtttctttatttacacatcactccaaccaaactcttgactttatctaacatttgttcttttaaatattttatttaataattttaatactaagtattttactttatagtatatctctacacatattatactaaaataaaaattatttaataaaacagtaaaccattaaaataataaaaatattataaaattaatataaaaattataaatataagatctccctattcttttagctattctatagtaaaaaggggacatcaatggagttgaaaatatagagttgcttagatatattaagagctaagaaacacactcccccagtaaaggtttgagttgctaacaaaaaacataattttttttttggtaaatcgtatataagtacaaaataataatatggtaagatcaagttatt

SEQ ID NO: 139260 - DNA, 520 bp, Cannabis sativa
ttctaggtcgaatactcccacttgtcgtttctctgaaaattctcttttgtattaatcaaataatatattttggtgttgcgaaaattcactcgacaacagtgactaagtaattaaccgttgcagttggaaaaaaaaatagccgtccattgcagtcggaaaaaaaattgctgttgcagaaattagccgttaccaagatatatatagctcatttgttcatgtaaaagaaaagaaaaagagagatctattagtttttcaaagagagaaaaataagagagaaatttaaggtgtaaaagatcaaactttttgggtgaactccgagatcaaagttctgttgtttttcttactttcattaaggtttgtattctctcatctcactcttacttttctcatatttgtatttgtgtgtgtttgtgttcttatttttcggtttggattttttgccttgagttagggagagttttctgggttcggttttaaggttttagaacttgatttgttttttctgggcttattattttgg

SEQ ID NO: 139261 - DNA, 621 bp, Cannabis sativa
accctggcagcgagctaaagctcttctcatgtctttttgaggttgaaaacataacgctccatctgaaaatcatagttcttggtgccaagatggactttagtagccaacatcatttgaatgtcagctttcttatgagagagctgatgtgacggagcagtggagcccaatgaaagatgtctggagttgattggtgaacgtaccaggagtatcccttcccatagcaagatggatgtctcgctaatctctattcatgtcttcaggttgttacacttagttagtataatgtatattatacgctaagtgttctaacagccaacacatctcgccatcacttctctacgtatcgcgaggtagatgtctcgctacgtattatggatgtcctccttacaactgtgtcctttgacgcaaaatggtttttcctcaatacgtgaatcaatagttcatatattcttgtctcgctaaagactgtgcaatctacgagttataaacataccgtattgactttgcatttaatgagttattccatttagtattctttaatataattgccaatatatttgttgatttgcattctccaaggttgacacatgtcatcctttgaagtaccagctaaatttttgg

SEQ ID NO: 139262 - DNA, 993 bp, Cannabis sativa
  modified_base (27)..(40): a, c, t, g, unknown or other
  modified_base (698)..(700): a, c, t, g, unknown or other
aggatgttaatgaaacatacatggtannnnnnnnnnnnnntggtaaaatatttccaacacagtccaccccaaccacttcttaatcttcttcaaacaaatttagctatacaggtaggagaagaaaagatggctaatatcttcaacataattgtcacaaattaaactatttggagactcaataactctaaactggaaccatctttggcaagtcttcaatctaataagtttagctaaccataacataaaagaatacttgagaatattcaacttgttccacacaagtttaggccaaaaaagatgggttgaatcagtggtctcaaccaaattataatggagacacttttagcgatggatatattcacagataagttatagcctctatatcataaaattatgtcatgtatatatatattttgaaaaattagtgaattttttttactcaaatcaacgatttatacaccaaataaactatcaaagaggtaccatataataactcaaagtctcaaaccaatctttgtcacttatatacttatttttctttcaaaatcaggaaacctattacaaacctcccctttaattctcctaactattgtatttatagtatacactttggtgtcgtttggtaatatttttatattttctaattttctaatcacaaaatgaaagtaaaatttttgtttttaaaaattttgtttttnnnaaacaaaaatgcgttctataaccacttttgtttttcaatgttaaaaacagaaaataaaagtgtgttctataaagttcatttttattttcattttttgatattatttatgtcgggtctaggtctgaggtcagattcgggttcaggttagaggccgggttcaacgccagggccgtaggggattttggtccaggtctgatcgaagtctaaaatattgattaagaaaaaaaattgtttaaaaaatattgaaagtgattttttttttgtttttaaaatttcaattctcaattaaaaaa

SEQ ID NO: 139263 - DNA, 666 bp, Cannabis sativa
accatgtaccacatgcactcagtatggttttctactagtataggtagggtatggaccgcaccttgagtactgttaagtgttgtaccacagacaccgtgtaccttcccgtacaagtgcttgtaacaccacgctgtactttcagacatcatacactttaccaatgcactctgtatcaaaaccatgcaagtgttggtagtgtatgaatcacaacatataagcatgcatatacactaaacatatacatacattcgcatatccatattacacattatatacagttcctaccttctttcctgattcaagtgtgctggccgagctgagcgaaaagtgtcgtgctagatggatgccctaatcacataacgaaactgggtaattcacatgatcgaagacctaatccgggaagcccgaatctaaaactctaggttctgctatattcaataaagatcacactaaatcaggaaacagggaaacaccaaactacgacactggaatgaacgagaattgagaaaatggcttgttcgaggatcctgccaaaatcgggtagcaagttttataggttgctgtgaaaatttatattgatttataattgcgcaagtgtacacaatcacaaacaagtaatacaatgataagtaatcaaagttcgtctccacagggaatttttactaa

SEQ ID NO: 139264 - DNA, 520 bp, Cannabis sativa
caagtcatttttctgctccaaaaaacgatgttttcacccatgataaacgacatgtcgtttgcccgacagaggcaaaacgacaagtcgttttttgtcaccccggtcacccaacaaacttcccatgggtccgcgggtctgcaactcggatcggcgcgacccgtttcgtgacccgatcggttggagcattcctggccaccaaaaccgacggcgtttgaggggttttgttctattttcaaccctctatcaatttctaacatccatttcatccatttttacaaaaacatttattcataaaatacaaaaaatccgaaaatggctttcaccattaatgaatacctccataacaatgaaaccaaaaagccataaaaaaaatatatataaacctatttaaattgtaaatttcatatttcatatttacatttcatcaaacatataaatccgaaaaaagcaaaaaatgtaataaaatttcagatttgaaaataaaatgggttagttcaaaaatggagttctaaaatcaaat

SEQ ID NO: 139265 - DNA, 1398 bp, Cannabis sativa
  modified_base (1129)..(1138): a, c, t, g, unknown or other
aaaactttgggtacttatgctactatttaccctaatatttatttattttttttaaataaactctgttatttaaatgttttaaaataatatcatttatactagcttattatttatttttttaataagtttttttgacagatagatgagtattacataatttaaaaaaaaatatatgtaatttaattaataaatttaacaacttataatgtcatcattcacaaaccacaataactaaaataattccatcatttatttatttatttacaaattgataggcattaataattattaacggtgattgcagtgtcactctcccataatgtcgcattaggtcttgaaaaatcatacaatatttgtattcaaacttattcaaatttgaatagcaagatttatcaataagataaaaaaattcaattatatgtgttataaatttaaatttgtgtatagtttaaaatataaggtatcatgtaaatattttttaaaaaacagtatatcaatttgtattttgataaaacacaaaatattacatcaatgtattctttttttctattaagaggatattacacttactatgagattttaaaattcttaagataaatatgacacatttaagtttgaccaaattatatgattattttttttaaatttttaggtctttttatggtatttgatatgccatatatatgtaaattagattttcaaatctcatatttaatatttgtatttgtttcagtagttttatttgtcactgatgccgaaaaagtttccggagtttgctacttgtgccggaaaaatcaccggagtagcgctcggtgccaaaaaagttgtcggagttgctgtcgacgctagaaaatttgtcggaattagcattatcgccgaaaaaatcattgaaaaaattaccaagaaactggtttcttgaagaagaaaccagtaaccattcttcaagaaaccagtttcttgatgaagaaaccactttcttggtgatttttccggtgacaatggcaattctgacgacttttctgacattggcagctactctggcgacttttctggcaccgaacgcaaacttcgaaaaagtcatcagaatattggcataatcgccggtaaaattaccgaaaaaatcaccaannnnnnnnnntcttcatcaagaaactagtttctttattaagaaaacaagtttcttggtgattttttctgtgatttttctggcggcaatgctaatttcgacaatttttttggtgttggcgacaactccggtgacttttccggtaccggcagctactccgacgattttgtcggtgcctgcagcaaactccggtgactttttcaacacgagtgacaactccggcgatcattgtagtttcatttatttatttttttaaaaaaataataaatatg

SEQ ID NO: 139266 - DNA, 610 bp, Cannabis sativa
ctcatgtatctcttgttatatcttctattttttagttggggctctatctttcaacaaatatacttatgcttaaactatatatcatgatatcatcttactgttaagaatgaataattttctttagcatttatgtaaactctgcaaggcatcaatgatgaaataattatatagaaaatgtttaaataagagacacaactttgtggtgttccacacaaaatcaaactactaaacaaataacattttagtctctacacttccacagccaaaccagagatgtgtttgtttggaactgaacttccttcactcattcctaatagaaaccagacttttctcatatgaacaaaccgaattataagttaactttaattttctatctacatcaaaaacaacatttttgaacttttgagtacgaatgttgaaagaagccaagtgttttatgccccagctattatcttcagagactggcattagaatctcatcattcttcaaaaatggtagtaactcatcaaaatactgttttagtggtcgaatcagctcatatttggtccaacaacctgctacgtctttatccatggtgaagacaaaaaggaagctcttatcatgatatggg

SEQ ID NO: 139267 - DNA, 503 bp, Cannabis sativa
atatatatatatagattatttgattattaattaagaatattctaaagtaatgtaatgcacttttaaagaacttaaactaagaaattcaatgcaagtaattaaccaaaaaatgaaaattaatcataagatagagaatatttaaaatcagaaaaacagaaaataatatcaagacagaagctttattcgatcaagagtgttatagtgagatttttctcacctagaaactcgagaccagaatcctattagaaagacatgtgtactcactttcctcgaggaaagctgagatgccgatgagagacctctcaggtataaacctcgtctgaaccgcgagatgatgcgaaccaagtctaatcgcattcatatggctcacgttatgtaggaccaaggaacgtttctaaactcgcatgcatcaggatatatgcgagtatcaccgtgatcctcctgcgaaaacatagagatcaattctccatattacgagttggtcccattgacccaactaccct

SEQ ID NO: 139268 - DNA, 740 bp, Cannabis sativa
aggagatgggcgtcgtcgtcagcgagtaggggagaagatgctgtcgtctccgtcttcgtcaaatggctgggcagcgaatcaccgtcgtcgtccactctctgggcagtgggcagtgggcaggcggcttcaaagagtgaatacgagagagagagagagagagaggtctgacttagggttttattttttaaaaatgttttttatatatctaaatataacagagagggtctgatttaggttttttttttctaatgttttttatatatgtaataaaataaatataatatatatatatatagagaaagagcgtttgcccactaaatattctgagacagttattttattgtgattttttttcatttgtcttcttgatcaaccttcagtaaccaccatcttcctccctaaattcatcttttttcattgttctagtaatccttttctactatatcacatgggttcatttgaatattccatgaattacatacttctccactttgatggagaaaattttagatttgtgtcaacagtgctaaaagtagaagttgttgaaaataaagatgtaccaccatacgtgcccctgttccagtcccttgaaagtcgcctatggttcaagatgctattgggtgtgtaatagcagcgatgtcgaggccaatctctgattgttttcatccaattaaaatggatctagaggagaaacgatctacattatttcaagagcctggatctagaggagaaacgatcta

SEQ ID NO: 139269 - DNA, 611 bp, Cannabis sativa
ttaaataccaatttctatgcaatagtgggtttactaaagtaacttatattcagactaggatatataaatctcaacttatatgcaaactttttacttttgtaataaattcaaacatataaaaaagtattaagtaaagaaactctaaatgttatccataggtactctaaacatagatactctcgtcctatatcaaaatttatcaatatttcactatggtataatcaatactcacatctcaaattttgtatcgaaatcataaacaattaattgatggccaagataattaaaagaaattaagaaataaataaaatagatgcacatagaaaattgaaggaagaattaagtcatattaaaactataataagatgtcaaacaatctttattaataccctaaataaaattctagctactcatgttcattataaacgattaacacaaattaaataagaacataagaagaaagtaaaagaaaagaaatcgtcaaaaaaatattgttggaaagtcttttaggtcgcttctgctctctaattggttgcctcaaaagtgctaaaaaagatcacttaaatagctccagaaaagataaaaccctaattttcgcagcttaaaacagg

SEQ ID NO: 139270 - DNA, 959 bp, Cannabis sativa
aaaaatttgtgttgtcattatattatattattaattttatacaatgatttagcctacgaaaatttaaaactattgtaaaaatcgcgcgaagcgcggattagttccctagtataattataaaacccaccttcaattaaaaaaggaaatacaaaagaaaaagaaagtaattgtcaatttgtccattaaaaaaggacacaataatattaataatggtataaaacatattaaataggattgctacgttattcttaattataataaaatgcaatttacgtttgttgatgtaaatttccttttaatttaaggcatgtttacttagggaatagaatggatggtataatattgattcccatataattatttattaaattttaaaaaaagaaaaattagtaggacccatacaaattagggagaaaacaaagagaaatgttcttcccatttttatagggaatacctttgcctttcctaacttaatttattttaattttaattttattaattaaaaataagaataaataaatatgccctttaaaaatctataaacagaaaatattccaattacctttcctagttatgtaaataaaatgattctaattttcttttcggggagttttgtaaacagcataataaaatattatttctgattattttttatattagatcgattcatttcgctcattgattattctgattctaattacagtttagtaaacacaccattaggtatctagctgttaagtgttaagtaagttgccacgtggcaatccctaattggttcaggttatgcatttttttttttaaaatacatataccaataaaaaatgacacgtggataataacttgacatttaatggctaggtatctacagagttccaaaaatataataaaaaccgatccaatccaatccaatctaatccaaaatctaatccaattaaaaaccgatccaatccaattacatt

SEQ ID NO: 139271 - DNA, 901 bp, Cannabis sativa
ttaacagtcaaaatgtggttgttgaaatgaaatagtttaaataaaggataatgcatttgataaaaatatagtcgttacaattagataagaacaatacataggaattataattttaaaataatacataacaattagataaaaatacggaattacaaatttaaaatattagtcttaatatgagctaccaaatttttatgatcttttttttgctcaggagtcatatttgatgtgcccaagaatagataatccatgtattttgccattaattttttttcttgtaccgccactaatttctccaacacatttgctttctgttgattaatgtcataaaatgtagcaagttgctcatcttgctttccctttccctttctctttgttgccttttggccaatagggcgctcttcacgaactttatgatcactgatgtctacattggatgatgaagtatatgcccctgatcttgacaccttcgctcgcttaacaccttctgattggtacattacattccatttcggctcatcttttaataatctccaacagtctacaagctgaaattttaaattgttattttcagacttgtacatctcatgtgcattcttaataatttggtcatcaaaccaaccgatgtgatgtgcttgttgtactcgcttgtaacacccattgaaacgtgtcaccttttgattcatcttgttgcaatggtctttgcattgctttccagttcttcgttgatcatctttgtagtgggtgttgaagtaatttgcgatccgacccaaaaaatttacaaaaatttggtcagttcccacgacaccatccttagatgtatcaacattgctttccagttcttcgttgatcatctttgtagtgggtgttgaagtaatttgcgatccgaccccaaaaattt

SEQ ID NO: 139272 - DNA, 1644 bp, Cannabis sativa
  modified_base (143)..(143): a, c, t, g, unknown or other
  modified_base (1053)..(1058): a, c, t, g, unknown or other
  modified_base (1613)..(1616): a, c, t, g, unknown or other
attgttcaaaaagcaagcattatggatagtgaaatcacataaaccatgacaagggaaaatcgcagagtttctaaacttagggtttcctacatatcttctacagaaaagtcaaaggtgcattcaaaaagtaaatgtgcaaagtnaacataaaggaaatcgagaacttagtcaaggatcagatgtctggaatcaggttatgccaagccaaacgggcagttctgatgaagacacttcagtaaactcgaagccaaaaacctctcttttttctctgaacttacttagcaaggaaggatggtgaaaatgagtttgtgtacaaatggtcactggtatttataggcaagcaacgaaaaggggtaatcatttcaaaagatcctcagacgcctcggttcccctttaaaagcgaatatgggaaatcaaaagtaatcaagtgtagccgtcaaccgttgtgagagaaaatcatattttgaaatatttattgtcagagcatttattagtcaaaaacaaaacggacgcccaatcagcctcacattgagtcgcgaatagacgcacttgatacatgtcacccattcaaatgcaaacacagctcggatgaagtctacactcaacttcagaagtctcgtgcagacttagggggcaaatgttataccaatttttgcagtcttacgtggtatcacatgatggtgacacgtggagtcgactctgagtatctgcttgtaggatataatccgaagaggatacctcatatgcatgctcaaggaaaagcaatcagcaatccgcccagcgcgaccaacacttagcgaattcagctttcgcattgtgagtcatcagagaaatccctataaattagggatcagattacagagatattgcaagctgtccaaatcccacgatcagtgtattttgtattcactatgtaatctttctgcttatatccattgtaacgagaagggaaatacttcccctccaagctcatagccctataaatagtgatgcatattcacttggcaaagggtcgaaagattttactggagagatattatctaagaattcatnnnnnnagatattgttgtaagagctataaggaaaggaacctttctccttgttcttgagttaatacaaataacgaggattaggctattaccgaacttctcggggctgaacctttataaaattcatgtgcctttatattgctttattatatttcgatcgttacaaactacttgtcgcttactaaattagactcactgtcgttggataaaagcgaggtcaatagaaactgattaatcttgaaccctccattagtactgattgttttatgttactgcaagtgggagtttgttgggttttgtgtcctaaataaatttctattttgttatcctaatttttgcactctgacgtggcatcacattatggtgacacgtggaatcgactctggatacctgctcacaaaaaaaatgggctcaatatggcatctaacacatttgctcgaacaaagtcctctagaccaagccgtgagcatttcgcgcagaacgccagcacttaccgaattcggcttttgcatcgtgagtcatcaaagaaatccctataactttgggatcagattacagagatannnnaagctgtccaaatcccacgattagtgta

SEQ ID NO: 139273 - DNA, 635 bp, Cannabis sativa
ataaatctacaaattgatattttattattattttattaatttttctataaaaaaaaaaaagtataaatctacaaattaatattttactattattttaatttttcataaatgtataaaatatttcaaaaaaaagttagaaaataaaaaataaattccaaaaaaaaatattaaaacttaaatcaaatataattaattgtaaatttcgtttatacacatgcataaaatatcgatcaatatatatatatatataaatctatatatatatataaaaagcagagacataaagcggtgacatggtactctaaaagttctttaaaactatttttcttttatctctttaattttctcacttttttaatttttaattcatataaaattgctctaaaactatttttctcttttctccttaactccttaattctctaactttttttaaattttaattctataaaaaaaaaaatacaaaaataactccataaaactcaaattatagtaataataatacaatatacaactttaacatttttgggttttatttaaaaaaaaatactataatgataatataatataaaataataactctaatgtgtacgtttttgacttttttaaaacaaacataataataataataataa

SEQ ID NO: 139274 - DNA, 646 bp, Cannabis sativa
ttcttcaattacatattaatttctctattattttatgttaaattttttgtttttcaatcttaaaagtttaggggttttattcctcattaacttctctttcttttgatatattttttgcataaaattgttgagtaaattaagagaatttcaaaattaaacttttagggttggtgtgttttaatgatgaaattatatttgaattttttgattataattataattgattgaaattgattatcaatgaatgatttttcattgttttataatgtggatacatattttatttcgaattaagtcaaaaaatcaagaaattttatgaattttttttttgggtttgaaattttcggattactcattaaatctacttctttttagtcatttttacaccaatttacaccgagcagtatattagaaattgattcccgatcaaaacccctcaatttcccgaagtttccgtcgattttttggccgattttcacgacagacccgaactggacgaaccgggttgcgtgacccgttttcagacccggctagaggaaggaggagactcccagccgcaaagcccactctcaacagtggcgcatgcggctacgtccgaagtcgtttttcgacgttttttttccagcgtgcttagaatttaatttct

SEQ ID NO: 139275 - DNA, 820 bp, Cannabis sativa
  modified_base (376)..(376): a, c, t, g, unknown or other
gagtatgtcacgcgtctccaactggcgatgtacctcaaaaacggctgggtgtatcccagtgactcaaggggcatgcgttcccgagcatgaccgtaaagttactgggacacccccatcgtttcgagcaaatctgccagccaaagaatgcgcttatcagaacattggcgcatgtcacaaatggctgggcgtatcgctgtacttcaaggaacatataatcgcatatatgaacattagaatactgtgacacgcccaccatttgaaagacttagccaatgttcccacaacaaaatatacagagtacaaaatcctaaagttttaagcaacaactagaaatgataaagtctctgtgaaacctaggatgaacggacatgcgagnatttgaagtgttcatccgaatacccgcatgtattcaaaagataaagttgcgattattcaaacattcttcctaaagtccacggttatacaaatttcaggtcattttctctaagattacccagttccataccacaaaaacatggtcctatatacatttcctacaaacatgcattcctaaaaaccctcaaaataccaaaacacagaaaaaagtgttttttctccaaacagaaaacaaaaatgcaatgaaactcgaaactaacctttagttttgatatgttgctcctgtgaatgctctcgattactcctgaggttgaggaaatgttggaaggaaaagtagaaatctgggtaaagagagaaaatctctttgaagtctctgtgaaggagggaagagggaagttaagaaaatgagggaaaatgaggaattttgattcgaatcaaagggttt

SEQ ID NO: 139276 - DNA, 713 bp, Cannabis sativa
tacgttttttcattgcagcatgcttaatgttggtgttcgtgttgacaatgaatcgatcaatcaatccttttattccatcagtgttaaaaaaggaggtgatatggatggaaattaagatatgtctagtaaagattggtttggaaaagaatgaagatggtgggtttggtttgtctatatagaattgtggggtagtaggtttgtgttgttagctttttagattatgttacaggtcccaaagattaaggaaggaatataatgtatgttattgtagtatattttttttagttgtatatgatgatatgaagagacaaaagtgaagacaaaacagtgagatgtggtttgtctatcactattattgttgttcttgtttgtaatgtatgaatgaagagtatgcacgttaatgtgatagagggagtggtggaacttgactattgtgaaattaaatatattatgagtgaaatttatttttgttgaatagtctggtgcttggatttgataatttataatgaatatctattatcaattccacaacttcttgtttctattgttaaattagatttagtgccactaattaacttttgctactaaattagtttttggctaaaataggttgctaggcacaatttgcctgaaccactaacaagtagctttaaataaattataaattatttatttataaaaaataaaacttataaaattgattttgtgaattt

SEQ ID NO: 139277 - DNA, 528 bp, Cannabis sativa
tgtagactaagctttgccatttgcagccgagagagtgtattttttgaatttgctgcatttgcttctttcaatttacctcaaaagccttgataagagctatatttctttttctccttaatcatttttaatattttattagaatataaatttacaaaatgatattttactattattttaataaattttccataacaatatctatcgtaaattaatttttttaaaaaaataacaataaatataaactaaattaataatattaaattaaataattattaaattatttatatatatatacgtattcgtaactatatatatgtgtgaagatgttttttttctttgcaaaatatagaaagagtatttttttttttcgtatagaaggaatatattatcaatcaaacattgtgaattgaatcaaatatgtgtgagattatgtacaggtgtgagattatgaatcagtttttttcataatgcattatttttatatcctgatcatataaagttgatgtcatcattgtagttcctattgat

SEQ ID NO: 139278 - DNA, 1118 bp, Cannabis sativa
tgttagtaaatctaggtcctggtaaaatatattccaacacttttccatgcctctcttgaggtgtgtcaccaaagcccaaattgaattgctaatgatagaagtgcattaaggcttttgcaacaaccatgctgggggcaaagcctatccaaaagatactttgacaagggtacttttggccaacaacgatcaaagactcaatggactatgtcagaaaatgtgacaagtgctacatattttggaaaatcccaagagctctgccaaaaaagctcatgatgatgcaatgtccttggcccttcgcagtgtgggggatagaactaattggtcatcttctaaagagaaaaggaggggtattatttgttgtcatcacagtagactacttcacaaaatggatagaattggaacccctaacaacaatcacctctaagaaggtccttgacattgttgtcaagaacatcattgccaatttggacttccccagaagattgtgttagacgacggcacgcagtttgatagtgacatgttcactgatttctgcaataggcatgtcatcatagagagcttctctgctgtggcccatcctcaagcaaatgggtaggtagaagctatcaaaaaagccctcaaggacaccctaaagaaatgccttgaggaagctaaagtcaactggcctaaattgcacccggaggtcctattgtcgtataggactaccaagaagacgaccacttgggaaactccatctgctctagcttatggctacgaggtggtattttcttttgagctagtgtcaccgtctcacaagagaacaacctatgaccagcaactaaacaacaccctgctggcagagtccgttgatgaagtagaagaaagaagaatacaagtcaacctaaagcttcaagcccaccagcaaaatgtagcaaggctcttcaataaacaagtcaagggtaggaagtttttcataggagacctggtgctgcaaagagtgttcttgagcactaaagacttagcaccaagggtgtttggacctaagtgggaaagtgttggattatattttactaggatctagatttactaacatgtatgttatttaacatcctaaatatgaaaccttacagtgggtgcag

SEQ ID NO: 139279 - DNA, 697 bp, Cannabis sativa
aaaatccaaaatggatgatactcgaactctcatacagacaaccaagaaaggaagcactcctatgatcgaatatctcagacaaaagaagagctgggccgattctcttgcccttgctggagaaccatatcctgaagcccaactggtaaccaatgttctatctggacttgatattaattatctgaccattgttctgcaaattgaagctcgaacaaaaactagctggcaagaacttcaagaattgcttcttagctttgaaagcaaagtggagaggctgcaaggaagttcatctcaaggcaaaaatcacaccaacttcactgaccctcatgctaactatgcccatcgtccaacacaaggaagcagaggcagaggtaacaacaatggtggaggcagacattttaatagaggaaatggaggcagatctcgtggtcgaggaagagctaacaattccaaaccgacatgtcaagtatgtggaaaatatggacactccgctgtggtttgctacaatcggtttgatgacagttatatgggatccgatccacactcctcaaaccagaacaaaactgggcaaaataacaacaatccctcagccttcattgctacaccagaagttcttgatagtgaagcttggtttgctgacagtggtgccagcaaccatatcactgctgacccatccgtgatacctcagaagcaagagtat

SEQ ID NO: 139280 - DNA, 605 bp, Cannabis sativa
  modified_base (31)..(41): a, c, t, g, unknown or other
  modified_base (105)..(105): a, c, t, g, unknown or other
attatgtactcatgaaataaatcatgtgaannnnnnnnnnntaaatgttatttctgatctatattaataagtaaatctaattatatagaaatgagttttatttanggcataaaacccaacaccaacatgctgagcccgctggcaaagggacctcttcatgtccagacaaacaacctatgcctaacaacgaaggtctggtccaagatgcgggaagctcatcatcaccatcacatggtgtacgacgaactaccaatgtccatgaggtgttcatggaaaacgaggtattgtgctagagtttagatgaaacactcagattcaacagcgagtggcaagagaggtatggagcccaggaggccacaaggccacaaagaagaggaatgtgcgggcgtcttggtacagcaagaaggggacgaccccgtgggagtcgttcaacacgttaccctctcgaaggtcaagagaggtctaggtcaacaacaacccaagtttgtgatcctaatctgaatttcatagcacaacgaccttgtcgtgagaacgacaaccatggcgggaggagcgagcgtgttgggttttatgccctaaataaaactcatttcagtataatcaga

SEQ ID NO: 139281 - DNA, 695 bp, Cannabis sativa
taaaagtgagagatttttctaaatagatagaaaaattaagcataaaaactcaatattttctaattttacccattcatgagtaatactcattaaaagtgcacccatatatataaatacttataataattagctatacataattaaataaaacaaaaataaaaaaaactgaaaaaatttacgaagtgatgtataattaaataaaaatttaaaattataattaaagtgaataaaaatatattcatattaataagattaatgttaacttatctatttttcatgatattaaaaaaatcattgataaaaaaataaattctaattgagcaaaaaaaaatatatatatatatagtacaaaagtaaagatcattcataaaaattaaaaaataaagaaaagaatagaatagaaaaaaaaattattgttaccgatgacacaattaaggcagattaaagtataaagtctctataactgacacgtggtttctgaaattgtaaaaattgaccgaaggagtgggaaagggatatgcattatgtgatctccttagttctacataaaataaataaacaaataataaaaaaaaaatcacaaaggacaaaaatatattttttttttgtggacatcaattcatctattgatgttatgtatatatatatatatatatatgggtattacctaatacccatgaatgtgtaaaattaga

SEQ ID NO: 139282 - DNA, 933 bp, Cannabis sativa
accccgggaaagccaatgttgtggcagatgcactgagtagaagaagtcccaggcagattttcactattgttatgatagctcctcaactggcctcagataaggttaatgtgggaatttaatatgtagttggaaagttgcataacttgacactccaatttgattttttagagagaatcagaaaggcacagttggaagattccgagctagtcaagattcgagatgaggtgatggttggttggcctattgacttttcaatctcgaataatgaaatgttactgtataaagctcgagtttgtgttcctaattgatgaactcaagaaagaaatttttgacgaagcccacactacatcttattcgctgcatctgggaaccaccaagatgtaccatgaccttaaaccctacttttgatggtatgggatgaacagagatgtggtagattacgtttccaagtacttaacctgctagcaaatcaaagctgaacatcaaaggtcggtatagttattgcaacccttaacccttcctgagtggaagtgggaggacgttgcaatggattttgtggttcgtttgcttagaaccataggaatgtatgattcagtatgggtcatagtagtcagattcacagagtcagcttattttctgcttgtgaaaattacctatacaatggatcagtatgctgaactttatgtaaaagagatagttcgtcttcatggtgctcctaaatctgttgtttcaaacaaagatcaaaagtttacatcaaaattttgggtgagtcttcaaagggctatgggtacaaagctaaatccatcctcagactgatgggcaatcagagagaaccactcagatactagaatatttgtggcaagcctgtgtgatggactttgagggtttatggagtaagtacttacctttaattgaattctcctacaacaacag

SEQ ID NO: 139283 - DNA, 1284 bp, Cannabis sativa
agccacctcctccactgcacaaaactcatgtcgatccacctcctccactgcataaaacccacgccgatccacctcctccaccgcaccactcgaccgtcgtaaccaccgcactgcttgacctccgtgaccaccacaaaaactgaccacaacgaaaacccacgctgatccacctcctccaccacgaacccatctcgagcgaaccatcaggcccgatgtaggcccgatgctcatgggaatgggttggggaagacgaagacccaatggggtccgatgcttgtgttggattttctcattaggtccgatggcacctgatgctgggtatgatgggacccgatagtgttgagtgatttttcaaaaaaaattgtgttgggtccgatggttccgatggtgggtccgattgagcccgatgcctatgtgttgttctcttttttttggtgtattaagtccgatgggcccgacggtgggggcggtcggctgcgtggacggtgggggtggttgagtgtgggcggtcggtgtgggcagcttgtgtggacgggtgtggggcggtctccgtctgtgtccggtgtgcgtgcggttgagggtatgcgagacagagagagaaagagagaaagagaggggagtcatatttgaatgagagggtaatgtgagaattaagtaaatgttgtcctattttaccaatatagggtattttaggtctaagggaaaaaatttctcttaatgtaaggaaaaaaaaaatctaattttcctttatatcatttctcaaatatcattaataataataaaaaaaaaaatatcagtacaaataaagaaaggcaatttggtttggttgtaattattagtgagaattttaaatgtgattaaatcagaaaattataaacggtttgtattaactaaaccatagatgcaaaatttatttggtttgatatgaaatagtttggtttggaatagttgaaatggttggaatttaaaaggtttttgtttgtaatttgttttgggaaattaaaagttagcaagaaatatctttgcacgcaaattacatgtgcttgagtatagaaattttttaagtaattcatatcatttcatgcaataagacaaacacatattgatttaatataatataaatatatgtacacacaaatgaagctattagtaaacaatagaaatttaaatgaatagtgatttatttatttttttggtttagcctaataaaatgttttgtactttctttttttttttttttgaaaataaagtgatagattaatcggaaaattagacctcacggtc

SEQ ID NO: 139284 - DNA, 765 bp, Cannabis sativa
tgaaagaaagaggatgaattaatttacactaaacaacaatgtcctaagaacgacttgaaaagaaaaagtaattgagaaaatctcatatgcaagtgtagtagggagtttgatgtatgctcaggtttgcactcgatctgacattgctttcatagtctcttgggcgatatctatctaatcctggacatgatcattgggttgaagccaagaaactcatgagatatttgcaaagaacaaagaattttatgcttctgtataagcatgtcgataatctttgagttgttggttattcatattttggtggttgtgtagatgatttaaagtcaacttctgactatttttttactttggctggtgcaactatttcctgtgttaagcaaattttatcatctactatatatgcagagtttgtcatatgatatggagcatctttgcaagctttgtggttgaagaatttgattttaaagatacgactagttgattctatttcctctcctatactaatctattatgataattatactaattttttgacatagtataatactgttattttcttttcaaagaataatgagattagtagtgcttcggaatatatggaaataaagcaccttgttgttagagacttggtcaaaaatgagacattatgatatatagaatattataagactaagtcgatgttacaagatcctctaaccaaaggattaagtgtcgtgttgtttaacaaacatgttgttgatatgtacattttgtaatcttttgttcctt

SEQ ID NO: 139285 - DNA, 783 bp, Cannabis sativa
  modified_base (27)..(29): a, c, t, g, unknown or other
actaatcagattgtaaagagttttatnnngggcataaaacccaacacttactacctggcggataattagttatctccaaaaggtgggttaggtctatgccaatcaaaattgaggatagggagttgagtgctgatttggtggaattgggttgagcgaattttgacatcatacttgcaatggatttcttgtccaagtactcagttagtattgattgtaaatagaagatggtgattttccaacctaagggtgtggaatcgtttgtatttgtgggatcagttcagggatcccagattctagtgatctctgtgttaaaaggtagagatttgttacaagaagggtgcttagggtttctgcagtggtattagatacgacacggcctgagacaatttggctagaggatatcagggttgttcaagaatttttagatgtttcctgatgaacttttgggtttaccaccatagcaagaaatagattttattatcaatttagcacctggagtagaaccagtttctaaggtaccatacagaatgggtccaactgaacttaaagaattgaaaattcagcttcactaatgcttgacctcgggtttccatgacttagtgtgtcaccttatggagctcccgtgttatttgttaagattaaagtgttgggttttgtgccctaaataaaacccatttcaatattatgatatttactaattaataaggataaaaaatcacattttatgttgcatggttcacataatttatttcatgttcatattctattaagtccagaacatat

SEQ ID NO: 139286 - DNA, 626 bp, Cannabis sativa
  modified_base (243)..(247): a, c, t, g, unknown or other
gtaatgtcagtaaggggaccgacggtggcaaccctgatcacaaacggaaggctgaggctttcggagtattaggggtaatagaaagttctgaggaaacagaggtggccgacagggccgtgggtcctcatttcaatcatatcccgagtgtcgtaaatgcaagaaacaccatccggtgagtgtcggaccaagacatgtttccagtgtggcatggtgggccactttatcagagattatcctcaggcnnnnnaagaggagcctaagaagaatactatactgaacctggcgcgactttttaccatgactcaggcagacgctgatgctagtctgtcagttgtgacaggtcagttgtctattaatgattgtttatatactgtgttgtttgatttgggagctactcactcctatgtgtcgtgtagagttattgaaagtttccataagccatgtgatatatgcttcggggtttagtaccctgttaccctcgagagaccttattgtatccactaggtggattcgctctttgtcgttcgggattgacggttgtgaattgaccgccaatctaattgaattgcaactgtctaattttgacataaccctgggaatggattttctgtctaagtatggggcaa

SEQ ID NO: 139287 - DNA, 948 bp, Cannabis sativa
actaatcttacctcaattccaaattcaggtgtgccggtgaacctgactggaataactgctcggttaattataggctcctaaatcacatcgataacaacacgaataagtgactcgctaaatcacacccgagacttaggtttaaaaccaaaaccctatctactgcaactcaacatggcgataccctaaactaggagggaatcaaccaactagaaacttgaaacaaacgcaaaacgacaagctgaatttttagaatttcctgctgcaaaatctgggtaaccggttagttagccggttttacccagaaaaaccaaaaagcttcaaactctaatcaaattgtttccaaacccaaccaaaatttccagacctgcataatacaccccaacaaacattttccaagtgatagaacaactacccatgctcagaatcaaatttcaccattaaggtccaagtttgagttctaaaactcaaaacttgtttaaatgtactaacagccctcaaatcatgctcaaaataacatttctaaacatatttaaactccagaaaactaactcaaacaataacagccactacagaacacaaaactctaattcatgcgaaataccattttcttaacattcaagaaaataagaataggagtttaagagattatacattggcttgagattactacaaccagttgagaatcaaaggaaaaagatgaagaacaccaaccctagctgccctaggattttcgagagagagagagttcaaagagaaaagctttcttttcaattttttttttcttattttttggaaaatgagtgaaataaaaaaaaaaaaaaagaatggttttatcaaatcattctcagccaaaacattaataaaaatttaactaattaaattcacataaagacaaaagcttatgtgtaatatcccagaaaataaataatatttaaatggacatatttt

SEQ ID NO: 139288 - DNA, 609 bp, Cannabis sativa
atttaattactcttgtttgataatgaattataaaagaaactgaaatgttgtttttgattttgaatatattatctgatgatggtaaaaaattgtgggttctacataataaaatgaacatcttcaaaaataaatagagagatgatgccaattttgaacttgaagaattaacaatatagctgttattctttaattttaaaattgtaatgaaaagagataaaaataaatatataaaaaaaatatttgagtttaaaatttagttattattcttacaaaaaaaaaaaaagttacatgtaagcagaaaaatatatattttttagatattaacatgagatttttttttaaaaaaaaataagttattatagtattactttttaaaccaaaaccaaaataaatagttatgttggtatagcttttttttttaaaaaaaaaatagtccgagagaataaaaagcaataaaagaagaaaaaaaaaaataaaaaagtagctgattttcacgtaattgaaaaaaagaaaaccaaaaaaaaaagcttagacggaaaaagaattggaatgtagatatatattattttatattaagtatgaaagttaaaagggatgtattgatgcacc

SEQ ID NO: 139289 - DNA, 529 bp, Cannabis sativa
attcttaaagtacgagtgcaaaggaaacaacgtcccttgctgggcatgagcacccgaccaggcgcacattcccttttcagggtttgtggcccgattattgtgagcggcaatgtaacagtccaattcgcccaggtagccatcctggtcgagaacccgcaggcgcacctcagtaaccttgaacggagagctcacccacctggcacccaaggtaccttgccttctatgaggaactgcggttgtaagttcctcactgacgtagtccacgccctcaaccaggacgtcgccattagcatcgactagctccccagcctcattgtatcccccatagtttgggggtgcaacctcttcctcttcctccacctcggagggactgctaggatggatatcgtcctgctctttaatctcctggacctcagcgtccccttcgtgatcctgttcggtgttgggaaaagtggcgtgccgagccacttaagggtcagatgcgtcaaccgtacgcattgtctttttggtacgagccatcattctatgg

SEQ ID NO: 139290 - DNA, 666 bp, Cannabis sativa
tcttgcaagaacttcattaactgcaacaattccacaattacataaccgatcggcggtacacccacgtcctttgttaatgggggaatcttcaaatactggaaatacagttaatcatgcatctcgggttataccaacaacaactacaaccactattgtccctgaagcctctcatcccttttcccctgctttccttaatcaatcatcgctcataacaccctctcatgagaaagaccaaaccaaatttgacaaattacttccctccatttccactatatcttcgcaaccaatccctgtatcctccacaaccgtaacacatctttctgatgtgtatacaccagatgtcggtacttctccttcttccatacatttcacttcacctctactggattccattcatgctacttatcctccacttactgccactaacaatatctcatctcattttaagcctgccataactatgaccatgccattttcccataaattttcgtccaattcccattcatcaacaccaccatctactgtattaccatcttcaccaggcccatttgttgatatggaacaagagagcattcatcccaaccgccaatttaaaagacaatatgacccaatttgattgcgccaaacactcaaaagatgccgtggaaaccaagtggctgatacctc

SEQ ID NO: 139291 - DNA, 549 bp, Cannabis sativa
gagtaacacgtaggtttacgtcacgtaaacataaacaagcatgtgagcccaacatataggtctgtgacacacagaaagatttaaacggcattactatttatattatatgatgagcatattattgatatattttatactgtcttgctgggcttggctcacggatgctctactgtgcaggaaagggtaaagatgtgtttgatcagccatgagtgtaggagctggacgaggaatatacatgttcgggccattttagaccaagcagtttggggtctaccaatgatgtattttgagactctgttttgccgcttaggtcggctagaggaaacgaacttttaatagtgttttgtaaatacttttgggatcccaacttttgtaacttttaaattataaggtttaaattattacaagttatttgcattccgtttattaaaaagtttaatttttgcgtttattttactagtagtcccgattaggggattaggatttcataagtatattgggtagcgtgcctaattatttagggcattacaaaatggtatcagagccttg

SEQ ID NO: 139292 - DNA, 797 bp, Cannabis sativa
agggcataaaacccaacacacttcacatatctgctcgaaataaatatgccgaacagagcatcgcaaatttttgcacgaacgaagccttcctggccggacagtggacggtccgaagagcgtgccaacacttagcaacttcagcactcgcatcatgaatcacagaaggaatccctataattctgggattatattacagagatatggcaagctatccagatcccttaatcagtgtattatgtatttaatgtgtaatcttaccaattatagacattgtaaacagaagggaaactttttccacaaggcttgtagccctataaatagtgatctattctcactgggcatgggtcgaaaaaacttacctaagagtatactcagtgatattattgtaagagctctaagaaaggaattactgcattctttatttttaagtcaatacaaatcaaggggagtaggctagtactaaactgctcggggccgaacctctataaagagtctgtgtctttatttatttcactatgttacatctatattatactacgtgtcgcttacaattaagactcgttgtcgttggtcaaaagcgaggtcaacatatagcattagacgtaggtttaattagaaaaaatttaaaatacttattacatgtgtgtgttattctcttagttattattatttatatatgagtattaatgatagatatttatttgttgcttaatatttaggggaaaaaaatagaaaaatacaaaaaaggaaaaaaaattacaaatatactatgggccggcccattaaacatttataca

SEQ ID NO: 139293 - DNA, 1009 bp, Cannabis sativa
  modified_base (492)..(503): a, c, t, g, unknown or other
cgtgcacaaacaccaacactataacaaatatcaggacggctagcagtgagataaagcaaattgtctatcatacttcggcacaaagtttgatctacctttaatccttgttcatctttggttagtttcaatgttgcgctcatgggagtattggtatgtttggcattctcaagacaaaactttttcaccaagttctttgcatacttactttgagagacaaacgtaccctcatcagattgcttcacttggagaccgagaaaataggtgagttcacctaccatgctcatttcaaactcctgttgcatttgagaaacaaaaacatgcacttcagagttaaaagtagaaccaaatacaatatcatcaacatatatctgagcaacaataacatcaatattaatgtttttaatgaaaaatgttttatcaacatttccccttctgtaatcatgagaaagcgaaaaatccagttacacgctcataccaagcacgtggtgcttnnnnnnnnnnnnacaaagctttgtctaatctataaacatgattaggaaaatgaggatcctcaaaccctttgggctgttcgacatacacttcttccttcaaaaaaccatttaggaatgaaaatttaacatccatttgaaacaatttaataccaagaatgcaagctatgaaaagaagtaacctgatagattccaatcttgctactggagcaaaaacttcatcaaagtcaataccctcaacctgagtgtatccttgggcaactaaccttgccttgtttcgaatgattgtccccaactcatcactcctatttttgaaaatccactttgttccagtgatatttacaaatggtagtcttggaatcattgtccaaacattgtttcgaacaaactgatgtagctcatcctgtatggcaagaaaccaatcttcatccattaaggtttcttttactgattttggttctaaagaagaaacaaaacataagaattgaattatattagcatattttcttcttgtaaccatg

SEQ ID NO: 139294 - DNA, 528 bp, Cannabis sativa
tttcccattgtccattgctctttacgagaactggtatagattccatgtcctgtcatttttcacaatatttcatttacgtgacatttttttcatattaaaaaacactaaaataacactacaaaacagtaatttgttgttgatttagcaattttttctctttgctagaatttatgatttttttcctggtatttctatgattacggtgttgatttgtccgtccccaaccatgaaggagatgtgtcgtttgtgttttggaactgtttacagtataaaagtaaatatattgggcttgggcagtataaaagaaataaaaacgggattggacagtaaaaatgtaaagtttgtcgtgttccagtatttttgaaaatatttggtaagaaagcagtgttttaataagtttcccttacaatatgatagctcatataatcttgatttttatcaaacccaaaactatcatagttttatttttctcttcaaaccaattagtcaaagcctcattcttcatcatggttgctcctctcaaccctt

SEQ ID NO: 139295 - DNA, 594 bp, Cannabis sativa
aaaaaaaaaaaatatatggagaagaagataaggatgggatagtgtaattttagtgccaaaatataatatggtgtgatgagatttagtgccaaaatattttttgaatttgtgcagaggttttttttaggctcattccaattttctgaatttgttttatggttgtgttcactgttcatactcattttctgggttttagttgactattcaagagagagtgtaaaagaaaaagagagaacaaaaaaaaaaaaaacaggttggtaagatgaagatttgatctgtttaatgattttaaattcttgtattatgatatggttattaatggaaaaatgagatggagattgaaggagatgaagtcgagaggaaagagagagatggttgacgagaaaaaggaaaatatatgtttattttttaatttttaaatattttttttgaattttcaaaaattgttagaaaaaaataaacattaaatgacatggacctatcaggggctgtcacgtaggtactgatttggtagttagcggagaggtatctacggaatatccaggagtgtaacagaaggtatttttaccgccaaaaataggacttaggtattta

SEQ ID NO: 139296 - DNA, 813 bp, Cannabis sativa
  modified_base (404)..(421): a, c, t, g, unknown or other
  modified_base (669)..(670): a, c, t, g, unknown or other
  modified_base (742)..(749): a, c, t, g, unknown or other
gaagcccaaagttccacaagcaggagagccaaccataactttcaacaatgaagacgctgtcaagattagatttccgcacaaagacccgctggtcatggaagtcataatagcaaataaaatggtggccagaaccatgattgataatggagcttctgttggaattttatgccctaaataaaatgctttacaatctatctgatttgtcaacaataaaagattagaaatcatttatgcttacatgttgtattcatgtttatggtttaatttatatatatatacacaaaatctattaattctagaacatatagtcattcgcaattacagtgatgtcaacacagtggaatgtgattgtggttatatgtttcgaaagacaaagtccatgtttcatcagtgcattggatttnnnnnnnnnnnnnnnnnngcgatgaagtgtacttacactttatataagtgttatgttctttccagaacatttgcatagtatacatgtctcgaatgtatggagtatacattggactggaccgagattgatcttagtaaagatattataatgcttaccgttatatctttccaagtaaatatcactagttgatcttagatcaaaagatcttagtcttgatatgcttaggttcaatctcaggagtactattcatgttctttgatttgttnnttaagcctactttcaggtcagggtgatgcgtccatattagaaacataaaagtatgattgagtgggagcgctnnnnnnnnatatggaatctatagcttctacagttatttagaagtaaagtgatgatttccttcgaccttagct

SEQ ID NO: 139297 - DNA, 1183 bp, Cannabis sativa
aaaaaacaaacaaagtataccgaccaggtccaatcaaaagattaaaaagaggaaaatttcgcgtgatttaggttcataacccagaatttcaaaacctcaaattaaggattaatcttcactaaaccgcgaatcggcaaagtgaggaccgaatatcgtgaaagtaaagttagaataccacaacaatcaaattttcaattgcaagctaagtttcacatttctaaacctagattccctacagttttcctagaacaagttcaagattattgaattttctacaatggaaacccagaaaatttgagattcaaacgttaaagaagaaaaagatgaggaacttactcactgttcgaagctttgaggttgctcggatgacgctcatcgacactttctggaaattcctcgaaggatttgagagagaaagatgttcttgctctgaaatcactaaacaaaaaaaatgctaaaagtggtttattagcactttttgccctatttataagcaaattagtgaagggatataatcattttaaaatttaaacgcctaattttcccccaaaagtaaacgttaagaaatcaagtaatcaagtacctggagaagggcaaccgtcaaaagcatgcaatttcctgaaagggctcgaggtactaattaatcagcattaatgggttgaatattgaagagacctttggtcagaaccacaccggatcaccaacaggcgcatcaacacgtgccacccgttcagacacgaattcaaactaagtgaagtctacgcgcgactttggaagtcccgtgcagacttggggggcaaatgttatcccatttttcgcaccatgacgtggcaatgtgtactagtgacgcgtgtctacaattctctacatttggctggagagatatttcgaacaaacctcaaccatacatctgtacgaatcaaagtttggctgaccgagcagggcaagggcaaatgatccggacaataaacgaagtcatttctccaagcagtgtatcaagacttaactacttcaattttgatatcgtgaagctcaagcacacaagcaatccctacaatcatgagatcatatcaaacggatatggcaagctgtctgaatccctcatttcatgtattctaaatatgtaatgtatgttcttaccaattatagatattgcaaacaaaaggaaaaccttccttcatgc

SEQ ID NO: 139298 - DNA, 1670 bp, Cannabis sativa
atgacatgaatgaaacattgacgaggacctttacattggaagaagttgaacgagcagtttttagtatgcctgcggataaaagccctggtccatatggaatgagtgccttgttttattaagaacactgggatattgttggccctctagtttttaaagcagtgttagattgtatatcaggggtggcagatatgcatagtaataatgattcgctaattacgcttattcctaaagttcaacaacctgaatcgattagtgaatttagatcgattagtttatgtaatgtgttatataaaataatctctaaagttctgataaatagactcaaaaatctgctaccactgctaattaatgagaaccaaagtgcttttgtcccaggaagactcataacagatagtctccttattgcctctgagtgccttcataatttaaaagcaagaaaagtcggaaggcgaagctacgtagcaatgaagttagatatgagcaaagcctatgatagagtggaatggaagtttattgagaaaatgatgttaaaaatgggttttaagaccgaatgggtaaaaataattttaaaatgtgtttcatctgttcgttattcctttcaaattaatgattctattcatggtaaagtgatgccaacgagaggattaagacaaggggatccactttctccctatcttttcttaatatgtgcggaaggactctcctcgctaattaagcaagcaaaatcaaagaaagaaatttttgggctgaaagttgcaagagaggcccctagtataagccatctattctttgtcgatgatagtctactcttcttagatgcaaatgagggttctttgcatacaattcaacaaatttttacattgtttcgcgatgctcaggacaggtaatgtttggtttaatatgttataagttctttgtaccaaagtaggtgatatatttttactaaaataacctacaatctttgggatgattaatcttattttttgccttgacttaagtgttgttatttgattcagattataaattttaaaaatctattctgtatttttcgtcaaatactctgaggaaacgcggaaactttttgcaaaagcattaaatatgagaataacacaggctatagaaaagtatttgggccttcccatgataggagggaaaaataaaaatgcaatattcagaccaattaaggataaaatatggaaaaagctaaatgaatatcatgccaaacttttctcacaagggggcaaagagattctagtgaaagcggtagtccaagcaatgcctacttatcaaatggcatgttttaaaatcccagaaggcattggggaagagatagaaagattaatagcaagatattggtgggtctcagttgataattagcaaaaagttcactagagggcttggcataagatttgtaaatcaaagactgatggtggtttaggttttagacgatttagcgagtataatcaagctcttttggccaaacaaacatggcacatcttaataaacccatcatcaattctggcacaagtaatgaaagcaagatattttagagtatctaacatcttaaaggccgacaagggttcctatccatcatcaacgtggcaaggaatcttatggggaagagatctattattaaaagggctacgacgaagtattggcaatggtatgaa

SEQ ID NO: 139299 - DNA, 1340 bp, Cannabis sativa
  modified_base (252)..(252): a, c, t, g, unknown or other
  modified_base (563)..(574): a, c, t, g, unknown or other
  modified_base (689)..(693): a, c, t, g, unknown or other
ttatttgttaattaagtgactttaataagcctaattaataaatatgttaaatgacaattttatttgataattaaatttaattattaaataaatatttttagcatttaagcggttgaattggaaaatatggcatttgtgaaagaataggataaatagttgaaaaatagcaaaattacaagtggtggacccacatcctatggtcgaccacttaaggtctcttttaccaattatttatcaattttttaatgccanataattcaaacctaaacctagaaagaattctataaatagatagtgatagactcaaaactgacagttgatgacagcctaagttacactagccttcagtcaaattttgagccttctctttctctctctatttcgaatccttctttctctctttctcttcaatatttattcccttataatgatagagtacatgcgcacacatagcacctaggtactcaatcatagtgtataagactgtgaagaatccaataaaatgaaggagaatcgggctcaaatcttcgtgatactctgctacggaaaggatacaagggttnnnnnnnnnnnnggaatgagtcatttaattccgctgaaaccaatgtaaggtttcttgaactttatatgtgtttaaattccattttttagaaattcatatttagaatgttaaacaacatacatggtannnnntctagatcctggtaaaataatccctaacaaaaacaatattatcgtagttagagcggggaccatgggcctatgtaactaagatctcaataagtagatccaaaatttaccaagtaaatttgctaacttattaattcctactgactccactataaattatgaattacactcatgattacatagagcgctctatatactaaatatagatacgctataaattatctattgtttcaatgcaaataataaaaaatcctctataaatgatctacatcaagtagggataaatttactattctaccctttaatttattttattcataaaacacttagcatacttgtaaatgatattttagtaaattaatataattactaaaatgagctctctatcattaatctcattaagccaagctcgaaggaaatcattgtttcacttctaatagttatagaagatatagattctatatctatatttagtgctaccacgcaattgtactaccatgttctcaagatataagtattgggccaatccatttggccagctttaacaaaacaagtcaaagaacacaaataatacatttaagccagaacctaaccatctcaggattaagatctatattaacctgagataaactaagtgatattgacttaga

SEQ ID NO: 139300 - DNA, 1438 bp, Cannabis sativa
gtctccaatgaaggggattagatgatttgggcaaaagggcaagttatgccataggtttatagagcctttagaaatcctcaagaaagttggattggtagcttactgtctagcctccaccccagtactttcagaagtccataacgtatttcatgtttctatgttacagaaatacgtttcggatcccactcatgtgctgagttatgaaaacttagagcttcagccagacttatcatacgaagagcaactagttcagattttagacaaaaaagataaagtccttcgaaacaagaccatagctgtaatgaccactttagtaaattggattagtaaaggcaattagcactaatttctattatttttataattatttacgaattgaattatttgtggacccaaatattagaaatgggcatttgagttataatttctcgattccgaagattttattaaactctaggggtattatttgacttgtatatgaattatgtcatttttgtaatttttgcttggcgacaatgaaaaatgcgatggatgactagtttgatcacatgggtaagtttagaaccatatttcttagcgggaaatttattggagaaaataaaataccggggttaagcggggttatggaatttgactattttacccctagttttaaaaatggctaagtaattggtttaagggcaatttagtaaaatgtcaatgggggataggtggctgcctaggttagtgacacctagctttatttttttgcaagattaattaagtaatcttttatcatttgaggaaaaatcaaggaaaaggaaaattaaagaaaaacctaaaaataaagaactttctctctttctctctttcggctgaagcaaaccatgggggattcatcttcaagctggtgttttctgagtattaagcaaggtttttgtgaacctaaagcaaaggtaaaaccctagaacccatgaatttgtattttggagctttttctttagtttgagtttgtgattttgttatttagtggttgttagggttagaaatgtttagggttcaaatttttaggttcatttgagttgaatttagttcctagcagcttgtgttgatgtttgaattaggttttgtgcaagtttgagctttgagttcaaagctttgatctctaatggcataaattgatttagtatgtttttcaatgaaatactagttggattatgttgtgtatgcattgtttaggtgttctggaaagtatggttgcatttggtggaggattgagcaagaaatggaaagtttggggtgaactggtgcaaactggctagccgattttaccagtacctctaaaatcggctagctggttatggcagggtccccgaatgcttcattttctcaattctcgtccatttcagtgccgtagttgggtgtttctctatttcctgagttagtgtaatccctagag

SEQ ID NO: 139301 - DNA, 778 bp, Cannabis sativa
gtcaacagttgtattggatcttctacggtcatgaaactttcaatgaatttcatgatgtagtatccacactatttgccatcgcgttgtttaggagagataggagttatctactggataggtcgatcaggttgtcctatcatttggttatatatggttaacgatctacacaaaaagtaatgttaattagcatatataaatttataaataaataatatgcttacacattgggatgtttgatatagaacttacttgaatatgatgaagttcagatcatccgatatgaagccgttgcctaaatctaagtacgccaccgtatgcgtacttggctatatgattacaagcatccagtaaaatatcttactggacaaacaaatatctgtaaaactgtttatatatacatataataaattttatgacgagttataaatactgaaattatttgttttaaatctacatataccgattattatatggagaaataagccatttgtctaaattagtcaccctagtcattcgagtgacgagtgcttgacaacgattactatcagcccctgcatcggtggaaatcacactcggattctaaaattcatatactcaatttagcccaccaatgtccaacaatctttcattcatctacccgttaaaaagtcataattagtaaccgtcggtgttaaaagagcattatcaagtttattattaagagttagaaatcatacttgcaccaaattcctattggtttggctcccaagtattccatggtgcacaattcctgaatgtc

SEQ ID NO: 139302 - DNA, 743 bp, Cannabis sativa
ttggttactttcaccattttaccacattttctcagagctttcacagagagaaaaaatttcagacaccatagattacctgcttcttttccttcgtcgttgccagtcttcccttcaccggcgatcaacaccaacccccagtcttcaaacttcatgtaatttctcaggacactttacactcgcttactgttcgtttgtattgcatgtttggaatttctggggaatgattttgcctgagtttgctgtacaatgcataaattctctcttttttgcgctttggttgtttatttttacttcgttttcttttaggaatcacctttttctatcgtaataacgcctttagggcttagattggttcgtgctttctcagctttgtcttctttccctttttctctttctttttgcaatgtcactgcctttgggatttctgcacccgatgcttgccagggaaagtctcttggggtttccttatttggcaagcatcaggagggggcctctttccagcggttaggggacccccattccctttttaaacattagggtttagtttggggcctaactgctggattttcttaattttttttttcagaaccaacattctgcttctacgtccgggtattaaaccctaggctattaaaccactcatgttaggttaataaccctaaccccagttactaaactttcatgtatatcattcacaatgtaagcgccactgcacatactctacgtgctaatcactgtcttac

SEQ ID NO: 139303 - DNA, 517 bp, Cannabis sativa
acaatgaccgtagcctgagggactacttacttcctaacttgacaggggcccgatcctgcataaggccacctgctgttgacgccaacccttttgaaatcaagccagccgtactgcagatggtccaatcttcagtccagtttgggggactaccgccagaagacccaaacatgcacctcgccaacttcgaggaactgcgccagacattcaaggtgaacagagttagcgatgatgccatcagactaaggctattcccattctcactacgggaacgagctaaaagttggtttatctctttaccaactcattctatcaacacttgggaggaattggccctaaaattcctatccaagttcttccctcctgcaaagattgccaagctgagagcggatatcaacaacttcacctagcagcacagtgaatctctttatgaagcatgggagagattcaaggacttactgagaaagtgccctaatcatgggattgagaagtggctgcaagtgcacaacttttacaatgg

SEQ ID NO: 139304 - DNA, 1962 bp, Cannabis sativa
gggcataaaacccaacacattatgctgttaattacatctttgtcactccatttggttttagcgattttgatttaaattttctgggtaatttttaaggtttaggcagggtaaaaatttaggtttatcatatttgtaagtctctagtttaataaatttcatctaggaattgggattgttcttttttgtagaaatgtcccaatctggttttgaagtttattctccagagttcttagaaacagaatatcctaaggaattggccctcccatacaaacccagaattttcaaatctcggtccaaatttgagataaatgatgcaaaaattagggaccatttaataaaaactaatcaggaagaagttgctaatcgctataggcgtttcctacaagaaataactaagggtaaatgtcgctacttacgagatgcagcctggcctgaaccttcatatttatattctatccatttggctaaacccttgtttttacctagagtcacaatttctttttcacctagtgacttggactttgaaattatgtcttccaagccccataagtcaaagactccccaagatcctaatgtcacttttgaggccgagatcatagagtcaagagtaagggccataggggactatgttggtggtgttttaaggacttgtggcattgaccaaaagtgcgggtgtcgtattagatccgttgcacctggtgaatttagttgttatccaccagagcgacttacccgcgaggaatgcaggggccagtggtgaaaccagtgacaaagctagtactagtagctcggctgagataggtgtttggagcctcgagcatatcagggctagagcaattctccctctgagagagtactttaaagagttcatcaaccatcttggaatagcttcattccaattggtttcaatttcctacaatttccttgcaagtttaaaggttctgtataagattttaggatgggagtgtcccactccccaggaaattgtttacctttattttgttaagacagttcctgcgaggaaacgttgtgcagggggtttctactatcttgggactcacacaaatgatcgtaggatcattgggggattaccaaacaagactgcttttaaggaggattttttctagacaagtggcatttccccaatcaacacaaccactttttgcataatacgtaagtaaatatttatctaacacttggttttgaattacgccatgtttataatcttggcctcgctgacttatctcattaattctattaattaatagtagtctcaaaaagaccaactccaactcctgagatggtcgagcagcgtaaacttttgctgggtcttccgttcgaactgcgatcgactgagtttcttgtgagcgaagccaatctcaagtttgttggccttctcactgcaaacgagtatacttgtgattacacgtttcccaagtatacatcgtgggagaaggttccagtcctaggtgacgaggaaagttaagattatgtggcggctcaggtgcattatctccagaatgcaacccctcgagaagctgaagaagatgcatcccgaggtaatcaatgtggatggtctcctactgttcttagggaaacatgcacttcgttagtaacttttaacaatagccaatataacttttacatttggaaccccttccttatagattgtattacccataggtttgataattggtatccacctttccatgttcaacttagttgcaccagttcatactatgggatttccgagcagtataggactaacttggatagagcgagccatctagattcagattgggatttagatttaattaacccctatgacatatccatgatcacaggatctagaaagtttagtgaatactatagtcctccctcttcatcatctaatgattatggtaacttcccttaagtgggaatttatttcccattttaccctttatctattttttaaataag

SEQ ID NO: 139305 - DNA, 504 bp, Cannabis sativa
  modified_base (306)..(309): a, c, t, g, unknown or other
  modified_base (467)..(475): a, c, t, g, unknown or other
cattaaatttgtaactgtacaggtgaaacgcatgaaatggtgtatttgtcgacagaatatcgatactatgtcgatgatatgtcgacaacatgcatatttaatgaaaccacatactattttgtcgatactagtcgacgttatgtcgatagcttatcgatgatacacgtgtctgacatgcaacgtggcagttgggaacgtaggtaaaatttattaacattaaatgtgtaaccgtaaaaaatgaaacaaatgcaatgtgtatttgtcgagtgaatatcgatacaatgtcgatagcttgtcgatagttgnnnngattaattaccattgtacacgtgtctgacatgcaaattgcattggggagtctttgtcgatattatgtcgatggtgtgtcgattatatatcgatgaggactgccaacctcttttttggtaattttatcgacataattgttggaatttatttaccaggannnnnnnnntactcacaagtatgttgattaagatccta

SEQ ID NO: 139306 - DNA, 883 bp, Cannabis sativa
taagaaagttttgtacagctgggaaatcatttttgtggctgtctctagggttgttatgttctataaataggacctagagagcaaccaaatgatttatctattttagtctcatatttttatatttatctttgtgagaagagtgttttatttgtaaaaccctagagtgttttatttgtaaaaccctagagtgttctatttgtaaaaccctagagtgttcaactagatttttgttttcttgttataatctcacactattcatagaataggttgaagagaagctttgaacaagcgtaggtctttgggagaaaacttttctaagtctcattttacgaggaagagcatacatcttcaagagaagatttgtttaagccttactttgggagaaagtaagcacacatcaatagctgaagggagtacactacttggtctggtttagagatcagattagcaaggtggattacaaagggttgcaacaaatcattagagggagtctaaatttgtttaagtcaattgcttttgtaatatttgatactttactatattgatttcattctatgggtgtgaccccgtggactaggagtgtttgaaagaatactgataccacgtacaattctcttgtatcaaattttaaattctgcactgttatttttttttctttattgttattaaaaaaattattaacatttgcaaaaatatgatttttcaacaattgtacttcaggtttaattcttaatttcatgcattaatttctcatttgggaagctatctgttggataaattctcatactaactatctcataaaataagttacaaggaaaaataaaataagatcttttacaagcctcaacagaccattataactcatagagttgtcggttctgtt

SEQ ID NO: 139307 - DNA, 517 bp, Cannabis sativa
atcctttttctaacattattcttcccggtgctgttatacacaacaccccaatctgtgattatccttcagaataaaccaatgctactgatctgccataggaacatacagagacagaaaccaatgactccaccacacatactgaatcacatatcacagacaacacagctgacaatacaaccagtttgaggtctacccgagtcactaaacctccctcttatctcagagactttgagtgttactcagcaattcaggataaatcttcaacaccacacaatctttctaattttatttcatattccaacatatctgatccttacaaagctttcatttttgcagtagccacaatgagggaacctcaaacatatcaagaagccattcaatttgaacaatgggtccatgctatgaaccatgaactaaaagccctcatagggaacaaaacatggagtgttgtgcctttaccaccaaaaaaacgtgccattggatgtagatgggtatacaaaatcaaatttaatagtga

SEQ ID NO: 139308 - DNA, 650 bp, Cannabis sativa
  modified_base (59)..(78): a, c, t, g, unknown or other
taaggtttctgaaatttatatgtgtttatttacattattttagagattcatatttaggnnnnnnnnnnnnnnnnnnnntagtaaatctagatcctggtataacatattccaacaataatattatcaaattaatgaagaataaatctattctatataaagtgtggctatgtaacagaattcttagtttaacgattctttttgggtttctacgttaactttaacagaatatcctattaattaacaaaatatttttttattaattttataaattaataaaattacgtaaattttattataaagaaattttaatttaaatttaaaatacttaaaatattattatattttaaatttattggtttaactttaaattagaataaaaaaattatgtaaatattttatataaaaaatttaaatttaaaattttataaatatttttaattttattattatttattttatattttaaattgaaatagttgtaataagaaattgattgctttctgttttagatatggtaagccgatttacacaccatatttttcgtaaagtttatgaataaaaaacctacatataaacatactcaactttggttatgtgtgttttggttaacaatatagtaaattacaatatatgcattattggatacttta

SEQ ID NO: 139309 - DNA, 820 bp, Cannabis sativa
tgtacctaattggttttcatcacatctgtcaatcttattatagagaagagactataataattattatagaaaaactatgtgaggtgaggattgaagaggaagatagagttgattgatgatagggaagcaaatataatacatcccttgccactcttttctctttttaatctcgtgaccaaccaacccatttcatttcatgataatacaaagtttctctattcaaaatattttggatttattattattttatcattattattttgagtatgattcattgcatgcttctttctatggtcacaaaaaataacaaaataaaaataataataataataaacattttctaatgtatatgtgtatatattatgttattgctgacttgtatattgcatttgtcttttctcatggtgcattgatatcacatattttgatttattaaaattgctaattaattataaagtctcataagtacaatattaggaacaaaaatgacatatttgtttttacattatatattggaatatgtaaaaacaatgaatctcaaattaaataattgtaattgattgaaaatagtgacatgcaactcaatagaatttgtcaatatattttgaatatatataaaggctaattaagatatttgtcctctaaactttgacatgtaccaaatcatgatccctgaacttttaattaaggtcgtaaaaaatgcccatgaactattaagattattagatttaaaagactttttttccaatttcagtaaaaaagtctaatataggtgaaaattcaagggtcatgattcagtacatgtcaaagttcgagaggt

SEQ ID NO: 139310 - DNA, 1153 bp, Cannabis sativa
agataaaaagagaagtatttaaacagctggagtcccagactcttggttcaggtcttctgggctggtaggagctggaggatctgttgtctgaacggaaggcacatcaacattctggctagacgtagaagtagaagtagtcgcatcaggttcaccataagccacttgggaagcacagtactcgagatagatgtctttggcctcgcctaggtaatcaaaatttgcctgagggttagccttccaaaagtcataaaaaatctcgagaccggctgtctctaaggtatgaactttctcttccatcctagtcacctccgacttgtacttctcgacctcagctataagctcctcctccttagtcttcttctcttcttccaaccgacggaagacagttcgaagaactcccctttcctcctgaaggctattcacttctgccgacaaggtgccgatggtagcttcaagtttgtgggaagccttgaggtccttagtcaactcgattattttcctctcagcactaaaaagagtcttgttgacttcacccagctccattcagatagctctgagttccaccctggcgtcatcagcatccttccggaccaactccaccttcgccctcatggtgttggaaatggcagcgttcttggaggcagtagacttagctcaggaatttgtgtaagccaacttcagaccaacatacacagagaaaaaactttagagtctgagccaagtaaagaaggattaaaggaaactgtcaagaaagactcaccttggtaaatttcctcaggactcctcccatcagtagctccagggaagattcgtggtcagcaccggtcagctgatcactcacctcaggaaccaaccggttcatgtagtgagtgagcatctccttgcctctcttggcctctggatgcactggaaaaggtggggtaggagcccgcatctgctcagatccactcttagccagctcggatctgcccttcgactgttcaggtagtccgagcttcctcctcaagaatctttggacttagcagcttttggagcagaaggctccgcgatagttagctcctcagaaagatccataacctctttggccggtgccttttccttggatggggtcacctcaccgcccctagatttcttggtcagaggagatgagctt

SEQ ID NO: 139311 - DNA, 627 bp, Cannabis sativa
caactataaactcatcatgtgttatagtagagagagctatatttgtttatatatatgctagctaaaagagttgagagctaatttgacaaaagaaagacacaaatacttttgagtttccttctcaggtggctctagatttgtaaagatatacaagtatatgcatatatatatatatattcttataatgatgcaaatcctatatatttatttatcaatgtatgctctactctctatatattcttatatttcttcttatgcatttgattactttggtgtgttgtgtgaggagaatgaaagacaataagtttgttcacaacatagtaaagtgatgatatgacccatttagcacatcattcttcaggtgacattctaattttatgccattagcataattttagttttaatttatgtatatatctatttatatatatttataattctgttgttagggtagatgatgtggcgtttcctcttcttaattttctataatctttttgttagagctggtgggttgacactttaatattttttcattctaatttatatatttgctttatttttttaatttttcaattttaatttttctactctaacatttcttcacaatttcatgcacaaccaaaaaaa

SEQ ID NO: 139312 - DNA, 574 bp, Cannabis sativa
ttttttcaaattttttattttttgaaatatatcttattaattaaaattataagattagaaatatgttagttttaacattttatgttattagatatttttttataaaaagtaattttggcaaaaataacatgaaattttgaaactttggttagtttaggtttgaatagaaattttatggtttctaaccttatttttttaaaacttattttattttatttttaataaaattggaaatattctaaccataaaatatcttcttttccaaattatttattttataatattaatttattaaattataagactaaaaatataatattaggaatatctattttttttaaaaaaaaaaatcatgatattatattatatggatgacgtttcaatggttacatttttattgtaaccatcatggttacatttttttaagccattggattactattgaataactgtgattcatttagaaattaaattaaaataaataataaataacttgtaacttggaagtaaccttataatttatttactattaattaattttttttacaatttattactatataaggatctttta

SEQ ID NO: 139313 - DNA, 615 bp, Cannabis sativa
ataagcaataaatagtattaattaaagctatattaataagtaattacttgttatttgtttgaggcccatttatgcttaaattgttcatatgatttccactcattgcttctgatattctttcagctactggccccccaccaaccgtacctatacataattaataattaataacaaaagaacactactttagtaatttaatttaattaatgtaatatatataagaaataataagtatgtatgttttacataataattaaaacaaaacatgaatgagaatgatatggttaattaatattaattacttactaattttggttgggctactaacttgtccatgtagattcttactgagtctatacttctgcccagagaaaaaaaatagatacaaatcaataataataataatatatgcatgtaatagaaaaatatatattggaatgtatattagtttatttatctaattaacatagtgaaaatctcaaaatttatgtgtccaatatttctcccctaattagataatttattaaagttaaatacataaataaataatattaattattttgaattttataacatgacacctaataatcaacattttttttattttttattttt

SEQ ID NO: 139314 - DNA, 1029 bp, Cannabis sativa
  modified_base (159)..(164): a, c, t, g, unknown or other
  modified_base (490)..(497): a, c, t, g, unknown or other
ctatgacttcaagtatgtacgtgtccagatattgcgtacattgttgggatgttagacagatatttaagcaaccctggtatggaccattggatatcagccaagagggttatgaagtatttttagagaacaaaagattacatgctcacatacaggaagtcnnnnnntttggaggtcgtagggtattctgattctgattttgctggaggccaagatagcacaaggtctacatcaggctacactttcctgttagctggaggagctatatcctgaaaaagtgtcaaacagacacttataacttcgtccactatggcagcacccaaggtctttcatatgggtgtagtattgcttgaggatatcatgatttagtggattttctttgctttatgtttgtttcagacatttacgtatttggttattttttgatcagaaataaagttttcagttcattcactttgttttgttatatttaagtctgacctcactttggttnnnnnnnnaccagttggaaataggcatgttcggttcacattgcatgtaattttcatgctacacatccatgattgatctatgtcatttggctatatttgtatatatgaccattgatgggtttagccatcattgatatgacgaaacaactttgatcctatatgagtatagttgatggacgagattgttgtaaatatctttatataataacaaattttgagctcataaggtaacatatgttacccaagtgggaagttgttggatcaaaatcctattgtgagcacatatgtataatgtatatgctattataaagtgtgatataaaattaagtgaccaattatgttatgagtatcaaaaggtattatattgtcatgaaaataatgtgtagataccataagttaatttataatttgttgaggggccaaattatgaatacctaaaactcattttaagatgagtatataaataggtagtggtccccaagaaacactagagtttatgtattctctcattccccatcagagaaaatactttagaaatagt

SEQ ID NO: 139315 - DNA, 532 bp, Cannabis sativa
ctccatatgtttcttttattttttgcatgaaccaattccaggagttgtcattttcagaatccacaattacgaatgcaagtggaaatatatgccgatttgcattttgtgtatttgcagttaatagagtacctccatgttggtttgtcaagaatgtaccatctgtgactattattggagtgcaatgttgccaacctttgattgtagctcctatagcgaagtaaagatacttgaatttaccgtcttcatcagtaacaagatctgtgattgttcctgttacataagtaattttttagtttatttatcattgaatatttttgtatactgttttcaatatattttgatggtttatgttaaattattaagttttttctatattaaataattcagtatactatcaagttttttgctttatgatatgcaagagtatagatggaatacctggattggatatttgcatcatgtataagatttgtaacgccccgatttcccgagacgtcacactggcaagtccgtttaaaactatttataataa

SEQ ID NO: 139316 - DNA, 552 bp, Cannabis sativa
aaggtgtttaacaatccgaaggtaattatttttctcaaattttattttttgtttattgtttgttatattttttttttgattttttaaattgtatctttaatattatcttctcagtttattgttaaagattttgttgctttgtatggtgagaagtctcaaagtctcttcgagaatttttaagtttgatccccaatacattcctaagaggattgatgattttttgtattctgatgaggttaatgataaggtgaagatattgaaaaccagtttcttatgttaaaattattttattttgtatttttttaattctaattttatcattatttatttacatatatttttttgtctaatatttagttcccaatgaaaaattggctagatttgcgtagaagtgaattctatcaaagagtgtcaaaacaaattatagacggaatttttagtttgaggcttaagtttttcggtgagtgttaggttataattagcctatgtctcaggcctttaaagttagcattatctcgtctattgctgtcttttggagcagttttacgcttg

SEQ ID NO: 139317 - DNA, 528 bp, Cannabis sativa
taaagcaacgaccaggcgagccactctaagcatacatcagcagattcatgacagaagcgaccaaggtgtcgcgggtaaccgaggatggaatgtcatccgcgatactggggggcattgaagtccttggtgaattatcgatcctaacatctggccagttcaacaaagatgaagattgctggataaagaacgagcagtagccttgaaagatgaagttgaaaaactgcacaacaacaacttcatcattgaagctttttacccggcttgggtcgcgaaccccgtactcgtgcctaagcccctaagtcgaacaagaaatggtgagtctgcattgatttcacagacctcaacaaagcatgtcctaaagactattttccacttccaagaatcgaccagctcgtcgatgcaacagccgggtacaaaatgttaagcttcatgcatgcttattcaggctacaatcagatcaaaatgcatctgccaaaccaagaacatacaagttttcgaacaaacatgggtctctactgctacaaagtc

SEQ ID NO: 139318 - DNA, 885 bp, Cannabis sativa
  modified_base (845)..(859): a, c, t, g, unknown or other
ttctatcttgctatatatatatatatttctacaacactttctttaactagtggaattgtctcatttcacagtatttcctttttctagtctaaaacctggacaatatggttttcccatataataaatttgtctgaactttaagatcttcacagctcaaaatatgggtagagtctcatatatattttctcagcatggagacatgaaacacattatctactcatgacaacacaggagttaaggctagctaataggctacctggcctacatactccagtgaacaggtatctaatatttctcttataccacacttattaaggtacctaaccagtggtacatttgcttatcacttttagacaaacactttgtcagggaaagagattattctaagataatataacctttatcaaatatacccatgacatgtttctaatattccattgatcttctcaggttacccacatttcaactatttttcctttaatctccatggttctcaataaccttctttatttcttaacatcatagccaaagatatcaatattggaaactcacaagattagattatttgttcgtatgaattccatacacttattaattgtataagttatctatactgatagacaacatattaactcggtatctccaaccattactattcagtcgaaatcataagattccacaatacctaattcataattatgtctttccattccttatatgggacctcctaagttgacctactgacttagcttaataataagttaagtattcatttctgatagatattcaattagagtacaggttagataaattaacaataaactcaagatcaatttgtatataannnnnnnnnnnnnnntaatatataataattaggtatgtgta

SEQ ID NO: 139319 - DNA, 745 bp, Cannabis sativa
ggcataaaacccaacaaaaccctagtaccattatcttgagtttttaaagctttgaaatcggtttgtgtatgtgatttttgaagttaggggatgttagggttaggttggttgcaattcaaattctaaggttaatttgagttgattttaagttctgtatgctggtttggttgtgttgggatgaattttctcaagtttgagctttgaaccttaagctttagtctttaatgacatattgtgattcagggtgtttttttgggaattattagttggaatatattgtgtataccttaattaggtactctggaaggtttggttgcatttggtggagttttgagcaaaatatgggattttttggttagctggtataaatcggctagccggttttaccagtatctgtaaaaccggttagccagtttttgcagggttccccgaatgtcccattttctcaattctcgtccatttcagtgccttagttgggtgttttcctatttcctgatttagtgtaatccctagagagtataacagaacctatagttgtgggttcgagtttcccggattagggttttgatcatgtgatttacccggtttcattaaactttgccaatgcctttgaaaggatataacacttatccaaggtgtaagtgtacctatcgttgaatatcatgctagtctaaatcaagtgaaccgacaaatcagggaattaaactcttgaacatataaccatgattatattccactgtgctga

SEQ ID NO: 139320 - DNA, 643 bp, Cannabis sativa
agcaaccctgcaggcctttggtgtttagctttcacctgctgacaagttaaacacttggcaacatactctgcgatatcattcttcattccaggccaccagaacatgaccttaagatcttgatacatctttgttgtcctcggattaacagaataatgagtcgtgtgagactcattcaaaatttccctcttaatatcatcatccataggaacacagacacagttcataaaccgtaacattccaatactatccattgtaaaatcactagtctacccagctaaaatcctatctcgggatttcactaagtccagatcttgcaattgtgcttctttaatctgttctagaagagtagattgcatggtaatgttagctaactgccccacaaaaaactcaatagctcgggtcatttcctctgccagttgcttggagatctgtttcattatattcatctggttcttacctttcctactcagggcatcagctataacactggccttctcaaggtgataaaaaatttcacagtcataatcctttaccaactcaatccaacgcctttatctcatgttcaggtttttctgggtagagaagtattttagacttttatgatcggtgtatatctcacatttctcgccatataagtaatttt

SEQ ID NO: 139321 - DNA, 534 bp, Cannabis sativa
  modified_base (73)..(89): a, c, t, g, unknown or other
  modified_base (170)..(190): a, c, t, g, unknown or other
  modified_base (295)..(297): a, c, t, g, unknown or other
gcatcagaatggactgatattgaagttggattagatataataaacttatagtaatatctattcaattcaatannnnnnnnnnnnnnnnngatcaaatgatctcaatcctgagagggttaggttctagttcaattgtatttttggtgttctttaatctattcgttaaagtnnnnnnnnnnnnnnnnnnnnnacatatagattaaggacatggtagtccaattgagttggagcgcaaatcatagatacgaaatctatagcttctatccagacatagaagtgaaacgataatttcctnnnagcttggctaaatagagataaatgatagggcgctcattttagtgattatattagttcactgaaatatcatttataggtttctaattgtgttaaggataaaatacattgaagggtgtaattgtaattttgtccctacaccatgtaaatcatctataaagtatcattgattattaggattataacaatggataactcatagcgtatctatatcgtgcaacatatagagcattctatata

SEQ ID NO: 139322 - DNA, 510 bp, Cannabis sativa
  modified_base (81)..(86): a, c, t, g, unknown or other
tttttttggataccacacagggattcaattcatcttcttctgccaaccttggatcaatattctcacggaccatcagcaccnnnnnntgggctgcgacattataacaatgccttgcctctccctggttgccccttacggttcccactccggcctcctgagtggggaatttcaggcacaagtgtcagatggacgtatttacaccaaaatcaaccaaggttggtcggccaaggattgcgttgtatgtagttggccagtataccaccacaaatgtgcaatacttaaaagtactctgaggtgtattcaggcacagggtgacttgcaatctcacttttcccattgggataagcgtgattccattaaattttgtgagttgggaaacgctaggtgataaatctcagtccgtgaggcctatggctatgaatgcttctttgaataataagttcacggaactcccattatcgattaatattctagccacaattttgttggcaatgggagtctctatgacta

SEQ ID NO: 139323 - DNA, 523 bp, Cannabis sativa
aaaaaaatattttaattttaatttcttaaaataatatataagattcctgtactcaaccaaacagtataattcaattaacaggaatatgattacatattaccctacacaggcaaacacagtatacacatttctctataatcatattctctttaataatattccctataattaaattattttgaacacctcataccaaacgcccccttaaagtttttatttttattttaagtactcattttaatttttttttttataaaatatggtcctggataattttttagtgacctggcaccttaaaaatgtaaatggaacactactttagagattttcccaacaaaataataaagttgaatgttttttttgcaagtaaattaatagttggagagcttttgttataaattactttcttttttttcataacaaatattgagtatgcagtgtcacgttttttgttattttatttatatcttaaaatatctttatatattaaaagtgtctatctaacggcatttcttggtttaac

SEQ ID NO: 139324 - DNA, 1562 bp, Cannabis sativa
  modified_base (324)..(329): a, c, t, g, unknown or other
atgaaaaaatgcaacttgttctggtaccaaggtattggaatggagaacatttaagaaaatactaccaatagaagtactaggtcggatgaccatatcaagaacgaaacaaaagaacatttgctgttaagtgaatggccttctgggcggatcacacccaaaggtttggataaaattttcaagtactgaggtcggatgaccaccattaaaagtacgatttttaatttctacaatttgttaagctaaagatcagatcagatcagtataatagctttgatgtaagttactacggtaatagacatatttccgatcaataaatgaataaannnnnntatttcaaaattcaaattgagtcgaatctatagcatgttattaatttaccatcaagtgcgtacaaaaggtttggtcgagcccaaattcccgaacagacaaaaaagcacacttgcaaaaagtataaaaactaactaagagtcatgagtctgctcggtcacttgggggctcctatacctgtacaaagcatttggtaaaaaataaaacaaacacaattgcacgatgattataaacagataatgaaattcattaaagataacaaaagcatgcaaacccaggattaaaggctgcccggtcagctagttgtctgaaaattaaaaattaattctaagtttaaagacctcttggtcggtcactttgccttaaaaaaaggccttatggccgaacagatagaaaatagatagaaaaaaaaagcattcaaacaactggagtcccaggctctttgtacgggtcaactgggtcagctggagctgaaggatcatttgtctgagccgggggcacttcaacactttggtcagttgaggaggtggaagtggtcgccttgaattccccataggccgcctgagcagtgcagtacttgagaaacatgtcttttgaatcgcccaagtaatcaaagtttgccttgggattggccttccaaaagtcatagaaaatctcaacaccagttgtctctagggcattcactttctctccgagcctctccacttcagatttctgctgcctgacctttgacttatacttctcaaactcgcctctaagctcctcctccttgttcttcttctcttcttccaacctacgaaaaagagtctggagaacctccctttcttcttgaaggctggtcacttccttagataaggaggcaatatcggcttcaagctattaggtggatggcatggcttgtagatccttggtcagtttggccaccttgttctcagcagcaagaagcttcttattgacctctcccagctccatccgaacaaccccaagttgaaccctggcttcctcggcgtccttctttgccaagtccacttctgttcgcattgtgttggaaatggcaacattctttgaggcagccgacttagctcaagaataagcgtaagccatcttcaaactggtctatacagagagaaaacatcagaatttgaactaattggagaaggacaaaaaggaaactgtcaggaaagacttaccctcgaaagctccttcaggactcctcccatcaccagctccagaga

SEQ ID NO: 139325 - DNA, 597 bp, Cannabis sativa
  modified_base (204)..(204): a, c, t, g, unknown or other
tagaatgagataaaaatagaaataatggataaaaaatgacatccatgtcatcaggtagtaggttaaaataaaaaatattaaatttaaaaatttaataatagttataaatatcaaccattcgatgatcgaatggctaataatagaatactcattcataggtaatactcattaaaagtatacccatatatatgggtgcactcttantgggtattacccatgaatgggtaatattagaaaaaaatgagtttttatgataaattttttatttaattagaaaaaaaaattatttttacgttatatggactaaggttgttccatcagctaaaaaaaaataattaagaaaatgtttttcggcaaaaaaatgataaaagaagttgagtttgacttaaatatttttcatataaatatatttttgatatagtgtaaaaataagtattttttgatattttctttaattaaatagctaaatcaagcatagaaagtccaatttcttttttactattcgctatcgcactaaaatttaatgatttaatagttttaaaattaatatttatagttaaatttgtttagtaaccatcaatgggtaatacccattaa

SEQ ID NO: 139326 - DNA, 801 bp, Cannabis sativa
  modified_base (56)..(56): a, c, t, g, unknown or other
  modified_base (762)..(765): a, c, t, g, unknown or other
aattttccaaaatcccccttagtgccattttatgacttttagtgtgggaggggcanaatggtcattttgccccatttgtcttttgtcttttgtgagtttggatcttagtttataatcagatttttattattattagctgattttaattcaagtaaaaccattctttttattttatttcattcattttacaaaattagaaaaaaaaaaaaaaaaaaaaaaagcctttctctcttacaactctctctttctctctctcaaaaaatcctagggcagctagggttctttgttttcttcttcaaattgctgtaatttccagcaagttcttagtgattctaagccaaggtaagctctagcactttcctctctagttttcttgaatttaaagaaatggaatttttgcatgaattgatagttttgctgctgtagttgctgtagttatttgttattattttcagaggtttaattatggttcattatgttgatttaagtaggttttggtagttttttgaaagtttaatcaagttttgagtttaagaactcaaacttagagctttaatggtgaaattcaaatctgagctttgattgttgttttgttgcttgaaatatgtttattggggtataatatgcaggtctggaaagtttggttgggtttggaaactatttggttaggggtttgaatttttgttggttgtcttggtaaaactgattacccggattttgcagcagggagaaaactggttttttcagcttgtcgtttcgtgnnnnttttaggtttctagttggttgattccctgctagttt

SEQ ID NO: 139327 - DNA, 556 bp, Cannabis sativa
tgcttatctactaaagcggtcattacatatcaagttgctaatcaacaactagctgctacgtccagtatcccactgtgcgacatagaagaaattcctgctgggcatactgcccagactcataatggtgaaccgtccaatccctagtcacaggtcccacttgtgggccaagcggtagatggccaaaccaaatctaaccattctttaggtggagttatacctaataactccatcctgacagttatggccaacaaactggccaaaccaaatcaatcactgaggcaacttggtgcttcagttttcaataaattgggtacagcccatgatctcaggaatgatttgaacagaagaagaggtctggacaaacaatacgttcaaccggccgttcagccaggtgtccacatccaagatccaactctaagagatcctgacgtgacacagatcggcgaagagattgaaccggttcatccatctgtgcaagcacaattggatgaactaaaaaatatgttccaaggcctagccggccaaaaactcactgatctcgagctagaccgagcac

SEQ ID NO: 139328 - DNA, 956 bp, Cannabis sativa
taaagtattaaatctgtaatattccatttttagttgtcaaattgaaaattgcatacttgtactttctgcgtacattttgtctagatattgtaaaatcacaggtagttttatggaagaatattagatattttggttgaaagagttcacttacatctgcaattacttagttcattttatcatactccctttgtattgattcttcattaatataagtttgtatttttatttagtttgttttccctttatgattcttcataatataagtttgtatttttatttagtttgttttatcatactcccttatatattgattcttcatgaatataagtttgtattttcattttttgggtgttgaaaaacatgcctatcagccagcttcaattgtgttgaaattaatttttattttctctcaacttgttactgtatttcttatgtttttagttgtatatatatatatatatatattatactagacaaagtgcaatgcacgtatacttagtcatatacttaatttgaaaaagttcaataaaaatacaaaaagttttaaaaatagtaaattagttgcaaaatatttacaaaataagttaaaagcaattatattttgaaaatgttttaaaaaaaaacttgtttccaattctaaaaattaagaagaagtatactctaaaactttaaaaattaaagaaagacgactggaaagtcttgcttaagagaaaaaaaaaacaatgtctataatttatcataatatcaaaaatataggccacatttcataagggaaatttcattttttgccctaataaaataccaaatatcaaaatttagaccctccactaatttgtacaaatcaattccattgattacatgaattttctattttaccctttttttaaaaaaaaataaaagaaaaattgttaaaaactaaaaaaacttccctctctcttcctctctctcttccctct

SEQ ID NO: 139329 - DNA, 1121 bp, Cannabis sativa
  modified_base (878)..(884): a, c, t, g, unknown or other
tgaaatgagttttatttagtgcataaaacccaacagcccttgcctatgctaaaagcacccttagcacctaggggtaatttggtcaaaactaatactttgaatagtcttgacatttccaatgtctatctatattgcagcgctagaactaaaatactaaactataagaaaatgttattctatcggccaaacgtcgcgttctaatgttgttgggcataaaatataaaaaatattaaattttatatatagcataaataacactccaagaattcaaagatatcaccataaattcataaataataattaaaagtctaattccaaattaaatcctaattatctgctaattcttatattaaaattaagctgtgtttacaattatccccccatcaaaagaattttgtcctcaaaatctaacatggacaactctagatattgagccctcatatcggactccaactcctaggtggcttcctccaccttattgtttctccagaacaccttaaaccaaagctattatctcttatcgaaggactttatcttttctgtccaaaatctagactagtggttcttcgtctgatgaatctgactgaagttctaggttttcatatgtaatatcccgataagcctaatggtaaataattaggatttatatttatattattggttaattaggtaataagtgggattatgatcctacaaatatattttagcataaaatttatatttttgctataagtgagtaaataagtgtaatttataaattacagagatttatatagtatgtgtgaatgtaatatgagcgatatgtagaataaaaatattttcaggttcggtgaccctgaacgcccgataagtagataaataagcgtaatttgttaatnnnnnnnatttatttgaaatacgtagatataatatgagttatctatgaaataaaaatattttcaggttcgccaactctagagaccccattggaggccaaaaatgtcacaacgattttagttagaaatattaacgggattattgcgataaattgattttagaaatactgagatattttacggtactcggagttgactaaataccctaaaaatataaatttcttaatggctaagaaataataagat

SEQ ID NO: 139330 - DNA, 658 bp, Cannabis sativa
aagattgcacaataattgaaaaagcactgtagcgtgcctttgctttagggcgttacatgtttagtcattgtgatttattgaattaaagttttcatattttgatttagggttccatagaatttgaactaggtgaattttccataaaatcaagactaaaaaaaaaagaagagggtgaaaaataatatattgataaaaagaatgtaagtacatataacaatcccctcttttgaactacatttgtacaaaacaatcttaaggacatgtcaaaatgtcattagataaagaaaaaaaaaaagttcaccatggattcctcatatatgtattctatataaagtgtggctatgtaaaagaacttttggtttaatggtgttttttaattttctacgttaactttaatagagtatgttattacttaacagaatatgctattatttaacagaatattctttattaattttatagtattattattatatatatttaaaaaaaaaattatataaatatttttctttaattttctcatcttttaaatttttttattagttttatatagatatattatttttaacaaatatcaaaaaataataaataaatcaaattacctaaactatcacctttttttttcaaattttcttattatttttaaaataaacaaata

SEQ ID NO: 139331 - DNA, 963 bp, Cannabis sativa
  modified_base (910)..(914): a, c, t, g, unknown or other
tttttttttttttttatactgtagacatcaaatatcaagaacaatgactccatcttctatacccacacacagaactaccacagcaacacgaacacactctaaaaataaccattaattccagcgagattgagcaaaaacagtgaaatcaacattaaaaaaataatcagggcaaaaaactgtaaaataaccctaaaacaaataaaaaaaacaaaaaaattgatcaaaaaaccttcttcttcacaaccttaacaccatatgcaatagcggctttatttacaagctcaaccctaaaaaatcagaattaaaaaaaaaacactaaaacaaacctaaaccaacacaaaacaaatgtaaaataatgaaacagaaataaccacttagaaaaatataaaagaaccacacacctcaaaactcttttgtgagtgagctcgtcaacgtatttataggagaatcaaagtaaaaaaaaaactacaaaaataaccatagagaaagaagaaaaaatgtacttatagcctccatcttccacacctacggaccacatcaacatgacaacaccttgaaaataaccattaattccagaaataaatcgatgataaaacaaccgtaaaacaacactaaaacaaataaaaaaaataagagaaaaaaggactaaaaaaactaatcatcttctgcacaacctcaacaccagatgtaatagatgctatatttgcaagcccagttctgaaaaatcataataaaaaaacccacactcttatttttttcttcaaaaacgtgacttaaaatttcaaaaactaaagaaaaaaatgaaaacaagatgaagaagaagaactagacaacaaataaaataaaaactgttggggattattttaccaggatctagatttacttccatgtatgttgtttaacatcctannnnngaatttctaaaacaataaaatttaaacacataaagttcaagaaacctta

SEQ ID NO: 139332 - DNA, 500 bp, Cannabis sativa
  modified_base (289)..(290): a, c, t, g, unknown or other
aataaattcccataattgtattattattaataataataaaatctcatacataaaccctaattatttaataattcaaggtattaatcatatgcggtctttacaaagacagagactgcatgcagcctcaattggccgaggatactcggcatgtgcaccccttcagacagggctgtgtccgagaattctcggtcagctccttgtctgaacgtgggtcctgtccgagcgattcctagctccgcgtgcgcatacgtgtgcaaccaaaaatagatattttcattcaaattcaaannatcataactaattcataaaaattcgcaattaggttctgtaaaagcctaaatttattaatttttcgtctactttctagtaaaaatatttccagaatgaaataaaaaatatttttataacatatactacgatttacaaagaatcatcatataagcacataaaccatcatgaaaccatccaaatcaatgcaaaacatcgttttaattcatatt

SEQ ID NO: 139333 - DNA, 560 bp, Cannabis sativa
  modified_base (35)..(47): a, c, t, g, unknown or other
  modified_base (74)..(76): a, c, t, g, unknown or other
taacagtatagataattatttaaatagctataaannnnnnnnnnnnnaaacgtgattaactgctaatttccaannnaaactaagcggtctttacagaaagtaccatccattaagaaatatagtagagagaggtgatgtgatgatcttgaagattacgtcagattatagccaggcagatccattcacaaagatgctactagcaaaatattttatgggtcacattagtaatatgggattaaggaagatgtccaatttgtatttaggaaaagtaggagattgtaagagtttattccctaaaaaagcctataaagatattttgtgattattaaataaagagttaaacatttgatatatgtatgaatgttatgttattaatgttattattgaataatttatattaaatcttagaatattttttattcatacatgatgttgtgccttgtagtcgtacaaagaactaaaataacttagctatgaataaacagtcaataacatattaaagtttgagaatctttaatcaacggttgctagtacagttctctaatgcccgttctttggtg

SEQ ID NO: 139334 - DNA, 677 bp, Cannabis sativa
gggtttggattttgtatgaataattttcaattttctataagaagattcttgggtaagagtgtgagagttgaaacacttcgagagaactcaaaagagaatcagtctcgactgtaatgtacatgttcttgctcaatcaataaagaggatttcggtggtgctccagaactagagtagagtcatagatcacatcaatctatcaaacttgaaccaatatatatcctggtgttgatttctttattttctgtagttattgttttggatttttcatactttgttcgtccctatttttcttcgaatattgtttgtatttgttaaatcttgtcattgctaattgtttaattatttaaagtttagttgatttgattctgcactgttagtcataaacttcccacaatgatattttagacatacattaataatattttataacttggattccataataactgcctcattaaaatcttgctagaaaaactagtaggacaaaaactaggtcaaggaaaaaagagtgtcgtgtgaataattctccctcatttaggcattcgtggagatctaatcgacaaattcctatgatatatatcgtcttctcaaatgttgatgctataataactttgtgaataagtatgcatgattgacacttgattgaatatgttggacactaatatagtcattttctt

SEQ ID NO: 139335 - DNA, 573 bp, Cannabis sativa
tttttctttggttgtattctttttgtcaaaattaatagcagaaaagaaaatttgagggagtgagagtattcttttaatttatgaaatgatggcattttatggatgagggcattctttttaattggcggaatgagggcattccatggatgagggcatcctttttaattggcggaatgagggtattccatgaatgagggcgtcctttttaattaggagaatgagaatgagggcattccatggatgagggcatcctttttcatttacagaatgaggacattcaatgaatgagtagagaaaagaacaaatacaaagtaaaagagagagagggagagagaaagaggaatgcatgcatgaatgaattcttacccttgaagactttgaatacttggaagaacaacaatggcagtgacttttttatctctttctctctgttttctttctctattttttctttgccgaatgtgatactctcttcctcccccttattttgtctgatttttcttcttttttataaactctaatttttttaccttatgtgaaaagtgataagagtgagaagtgggaagttagaga

SEQ ID NO: 139336 - DNA, 984 bp, Cannabis sativa
aggtgtatcaggtgacgatcaagcaaatgtcagtgatccagatagaggaactgaagttaatagtgccatgaccaaaggaccccaacaagccaaactctataaaaatggaccgccctcctgggttcagaaagctcatcctcaggcaacagtcataggagatccaaatgacaccatggtcacaagacgaaaaactgcagaacctgttagcatttgcctgctacctattacaaattgagcccaaaagtgtcaaagatgccctattggatgagttcttgttggctgcaatgcaggatgaaatgggaaactttaaaagacatggtgtctggataatggtccctcagcctgatggtgcaaatgttataggaacaaaatggctctttaaaaacaagtcagatgaatttgggacagtgactcgaaataaagctagacttgtggctcaaggatacagtcaggtagagagaatcgactttgatgagaccttttgcacaagtcgccagattagagtctataagactgatactcatcattgcatgcttcatgaagatcaaactcttccaaatggatgtcaagagtacttttctcaatggggtaattcaagaggaagtctatgtcaaacaaccgtaggtatttgaagacccacaccatccccaccatgtgtacaagctcaataaagccccacatggactgaaataggctccacgtgcttggtatgatcgactcacctcatttcttatttcccatggcttcatcaaaggtactgcagatagcactctattcattaaacatgttgaaaaaggaatttttgttgcccaaatatatgttgatgacatcatttttggctcaacttgtgaaagtggagtacatacatttgtcaccttattgactagtgaatttgaaatgagtttgataggtaaccttaatttctttctaggacaacaaataaaacaactagatctggcacattcatatcacagtccaaatatg

SEQ ID NO: 139337 - DNA, 781 bp, Cannabis sativa
  modified_base (712)..(724): a, c, t, g, unknown or other
aaagacagtattttcaataaataaaatgttaaaattctgaacagttgtatttttgtaatttttgttgtttttatgtatttttgaaataattatatctaatatttttgtaaaattgatgttatatgtatatttatttaaaatatttttatattcggttatttttatatgaaaaataacttttgtagtatattaaaaaaatgataatacaaaaattattaaaaaaatagaacaaaaaaattctaatattatatttaatatatactttatatatatttttttactatgcaaaaaaataaaaaaaaaattattgaaagatatttttttaatttttttttaaaataaaattatgtcacttttatcattaatactttttttaaaaaaaaaaatactgatcccaatataaaatgaagaaaagaacgagaaaatagaaaaaaaaaaaattttgtcaaatttgacatccagcgtaaaaatctatttattttatgtacagagtaaacttattttaatcaatagtaataactacatataagatacgataatgatagcgactttgaatgtagtggcgactacaagtgagatacggtgatgacatcggctttgaatgacaatagttttaaaatcatatgatgagttttctatagatttatcaattgattttttgtagatatctaatttgtgtgagaattgtccaactcctttttttttttttttnnnnnnnnnnnnnaaaaaaaaaattttgaaaattttttttttttttttttcctgcgatttgagagaggga

SEQ ID NO: 139338 - DNA, 595 bp, Cannabis sativa
  modified_base (34)..(42): a, c, t, g, unknown or other
agagtgttgctatgactctgcatgagtccgagcnnnnnnnnnagattttgcaattcagttgcatctccgatggtcgtctgggcattggttccagacagaacagtcgagttatgagtgccctagctgtgtgcgaaactattattcccagtctcttgcacaccgggcatagtttcagtaataggagctgtttccaccattcaccacgttcccgtctgtccaggattgacagtaggtggaacccttgaactccctgggtcatgcaatgttggatccagcgtctgtgaattttgtaggtgagacaggcctctacgagtttgcaccatcgtgttgagtgtcgaaaagagcgatttgtgattctcctctcaatgaaagaaacaaaatgttgacttcgcttttagccaacgacaatgagtcttttacaagcgataaacgatatgtcgtagtgaatatatgataaaagcgataataagacacaggaattttatagaggtgcagccttgagcagttcggtaatagcctaatcctcgttatataattcttatagctcttacaaccgtatctctgaatatataattcttagataataatatagtct

SEQ ID NO: 139339 - DNA, 647 bp, Cannabis sativa
  modified_base (175)..(178): a, c, t, g, unknown or other
tgttttttttttattttattttacacgagctgactactctattcaactgatgttatctttgactctcgcctaccgggacgctgtatttcattatgctggaaatcttggaaaataaaaatgtgttagagttttagtatttttgcaaacatatctgattacttgttattttctgaannnntgtatgaatttattgaaccaaaacttacttctgtttattgatatttgtagtgccaaaatttacatcccacatcccaacactcatctagaattttcctttaggaatgaacttgaaagtgtgaataagcctactgtcagtgtaatacttcacacttgctcatgatgaacatgaaactccagaaagcagctaagctgggaattgttcactctgaagagcaaagagttcatagctccaacaatcctactatttcaagctcagttgagaagattagagaaagtgatttcacttcctcaaattatacttcacaacaaattgaaccagcattaaaaacaattcgaaaacgattaagcagtgatgctttagttttcgaatcatgtgttttaaagaacgataaatccatctggattcttgattctggatctacaaaccatgtcagttgttcattgcaattgcttgaaaaatggaatta

SEQ ID NO: 139340 - DNA, 530 bp, Cannabis sativa
aaaacttcaaaaatataaataaatgataaaatagtggcaattatttggagaatcacctcccaaaaacttaaaaatttagagcaaaagtttctaaagctcactgagctaacacatgagctgtaaaatttagatctcttttaagccaaagaaaaacacatcacaattaacaaaatccaaactaaaaaataattgaaaacactcagttagaaaccttcctataaacacacgcttggacaagtgacaaggcatcacgaaaatccaattagaaagaaccaaaatttaggcttgatatatgaaaaatcaaatgaaaaaatgatttcaagaatcttctaagtaaaaaaggaaaaaaaacaattaaaaaaacaattgacttgtaataaaataataagaaacgatcattcaaaatggtgtcgtggtgtagttggttatcacgtcagtctaacacactgaaggtctccggttcgaacccgggcgacgccatttattcttttttatttttgctcactttctaatctgttacggtggtcgtc

SEQ ID NO: 139341 - DNA, 805 bp, Cannabis sativa
tataaaattatttaatttcaaaaattatatatttagcagtataatttacttaatttattgccaatgaattttgtgaattaaatttccactaaacaacttctatagttatttcgaaaaaaaatataaaaaaaataaaaaaagcaataaagatgtgtacgatgtgaaacctcatgattctttttgttaatatgttagtttgtagattaattaaagtttataaaaataagaaagaaaaaaataaaaaggagtgtgtaaattaaaactaaaaatgtgggcaactaaattaaacctaacaagaaaaaagggcattaattatgtggcaacgatatatttaacgttaaaataaaatagttaaatgaccaagttatttttgatattaagatctaatttaaagtttctaatataattatcccaaagaaaaatacataaataactatgcccgtaaaccaactaagctatgccgttaattgaagtactcatatcataaataagtacatattcaaagaacctcgagaaccggtagaaaatcaaatcatgataaggttaaggatgtatacctcagaaaagaaatatcaaaatgggtcccataattatgacgaatggcccatatggaaaataaaagcatttgacttggtataaaataagaacacatgagctctccatttccttagagaaatgttaaaaacttaaaagcaccaagttgccttatgtaattaaatatatgtctccaataattttttttttaaaaaggagaattttattaatcaacttgaaaaactatcatcccttacaattgaaagtaaat

SEQ ID NO: 139342 - DNA, 564 bp, Cannabis sativa
tggttagattttgaatattgaataaagagcatttcttgattatgctctcaataaaagcaccaaaatgttgacctcgcttttagccaacaaaaacgagtctgatttactaagcgataagtgatttatagcaatcgatatataataaggcaacataaagacacaagaattttatagaggttcagccccgagtagtttggtaatagcctaatcttcgttacttgtattgacttaagaacaaggagaaaggttccttttcttatagctcttacaatagtatctcagaatatgtattcttagataatatctttagggtatagtctcgactaaattgtttgcgaccttttgcccaatgaacatgcatcactatttatagggcagtgaacttagagaggaagtctttcccctctcgttacaatggatataagcagaaagattgcacgatccatacagtatatactcgtcatggaataaatgcagaatacattgatcgtgggataaatacatattacacttgttatcccaatttcggcactctgacgtggcatcgcatgaatggtgacacgt

SEQ ID NO: 139343 - DNA, 726 bp, Cannabis sativa
  modified_base (148)..(152): a, c, t, g, unknown or other
  modified_base (296)..(297): a, c, t, g, unknown or other
  modified_base (446)..(470): a, c, t, g, unknown or other
ttgaaatagatatttaggttagttgaaacctaatttttcaaatttataagtttaattttaaaattaattttttaatttaaatttaaattttttattccgaacaaaaaattatttactattttttttttaaataaataaattaattaannnnnttaaaattaaataaatcctatatctaactatccaactagttacatgtttgtgtgttttatatattgttaaattattaaatttttttatatataaaacctattattgtttgatctaaattgccatggttaacttgttgatagatnnaatgatctgattttaaccaatagttcaattgacgataggtcaaataaataatttgtaacaggtaaattttgcaatgttctttcatctatgtaaacctagtaacatgataggatccatccaaaattgtgtgtctgtgtgagcctatatgnnnnnnnnnnnnnnnnnnnnnnnnnggtagcccatttaatttttttttaattaaaatggactaggttgctaaataaaatgatcacttatgatagttttttttaggcccaattagtatttgggcctattcaattaatatcagctgttcatttaaggtttaattcctctcctttggaccttgtgtgagagttatggggccatagacgtgggtacgacatactgaacccatccctacctcacatgaacaaccccaattacgaagacccatttgcctcatttgaa

SEQ ID NO: 139344 - DNA, 797 bp, Cannabis sativa
aataacctctcgtgataagactcgtctgtcgtctgcccaatgtccttgtgatacttgtaaaatttggtcgcatccctcttgtgtctcgcatgcctcacgagctcaggtttacgaaatgcgaccctatgctcatgtgagagatagatgttttcttgagtttcattaagctcggtataaacggtgtcgattggcatgtacttgtcgtgattctttttctttttcttatccttggctaactccttagagttatctttcctctttgaactagaggctcctggattatcagccttggtcgagacaatgcttgttgagacagtgctgggtctgtttcccgagctagtatttaacaatttcatctcttttcttacttcctcttttcgaacaaacacttgagccctttcatttaaatcagtgatgttttttactgggcgaccctgtaggtcatcccatagctcgaattcatcagtggagagatcagtagtgttccctgcctgaagagcagtaagctaggtactatcgtccaggtttttcaccctcgcaaaagctgtgctaaaatgacttaagtaggccttaagcgtctcgcccggttgctgctttatgttagtgagtgaggacgcttcgggtcgcctatcccttgtggcctggaactattttttgaagtccttagacaaccgtttccaagaggtgattgaatgatgagtaaatttgttgaactagaatctccctactccaactagcgaagtggggaacaaagtacagcgtagattgttcgtaacattgctggctcgcatgatagt

SEQ ID NO: 139345 - DNA, 955 bp, Cannabis sativa
attaattttttatttttttcataaataatctttcttaatcaattacatcatcactattctattagcaaagaaaataaatataaagaaaaattaaataattaaatataaaataaataaaataaaaaaaaataaaaaggttaacatttagaaaaccctaaacactcaaactttttatcttttttctttctttgccgtctgaagactcaagctctctgctagcaattcgtgcaacagcttcccatcgacgacggcatgagtccaagcttagcggacgaagaactctactccaccgtcggactctcttaggaccttgacccattatgcatgactaggaaagtgatttaggtatttgttttggattgattgtgcatttcaagtcatccctgtaattttatcctagatacttttttgagccttaacctgttctacacattttgagcctagaaaagataaaccctgaatatccaaaaaattaaccctatttgtaccataagtagatctttagtttgggaaaatttagatgagaaatttgttgtgtgagtggaaaaaaagtgtgaaaattgagagaatgaaaaaaaaaaatctgacaactagtgtcaaaatctagaaaaaaaaaatatataaagttgttggaatcttgttgaaaaaaaaaattctctcatgtaattatatatatatatatataaaaaaaaaaggtattgagattgtgtgtgaaagaaaatatttttattggggtgacatgattggagaagcttatggtataggcaagcctaaatgaccatttcaactactcttacctaagcttaacactacaagcctagaaagacctttttaattattggttgtgcattggtttatatagtggagaatagtaagtattgcaagcatatggaattttgggttagtggaatgatgattgtaattggcatgcatattgcattctatggtttcatga

SEQ ID NO: 139346 - DNA, 554 bp, Cannabis sativa
  modified_base (137)..(145): a, c, t, g, unknown or other
  modified_base (524)..(526): a, c, t, g, unknown or other
aagtggttaaattaaaaaaatggcctttttgtgaaaataagatagatagttgaaaaaatagcaaaattgcaaagtggggcccctatccatggccgaccagttaagggctaatttaccatttattttttcaatatttnnnnnnnnnataattctaacctaaccctagttggatttctataaataggtagtgatggtctcaaagaaaaagatgatgaaaacactttcctttagtcaaaaatttgagccatcttctctaccaatttcgaatccttctctctatttttctcttttcaaatctgaactataatgatagagtaagttctcacacacatcaagttgtactcaattatagtgtttaaggctatgaagaatccaaactcaagagaaggagaatcgagctcagattttggtgatactctgcaatagaaaggatacaagtgttagagctcggagtggaaggagttatttaattctgctgcaaccactgtaagatttctcttaccttttatgtgtttattttatannnttttagaagttcatgtttatgatgttaa

SEQ ID NO: 139347 - DNA, 990 bp, Cannabis sativa
  modified_base (911)..(927): a, c, t, g, unknown or other
ttaataattcaaaacagcaaaccgcaccgcaccgcgtggtttgggaaaaattcaaaccgcaaccgcaccgtgaagaatttcaaactgcattttttcacggtgcgggcggtttgagcggtttgatgtacacccctaggtagaagtctttagcgattcgcagttagtggtcaatcaggtattagcagaataccaaacgcatggagaaaaaatggtcgcttacgtagcaattgtcagaaaactactccatgagttcacagaatacaaagtggaaagaatcccacgaaaaaagaacactcacgcggactttttagctaagttagccttgaatagcgaaatagagaaactgggggtggtacccgtagaacacctcgcggaaccaagcattaaaatcaaagaaacggtagctgcaaatgagcaaggaccgagttggatggtttccatcatcaaatacataacgaaaggagagttgccccaggaaagggttgtatccaggagattacagtatcaggcacatcgatatgtaatgatggataatatcctttaccggagagggctcagcatgccgtacttaaggtgtgtgtcggaccctgaagctagatgaatcatgcaggaggtccatgaagggttctgtggagatcacatcggaggtccgactctctcaaagaaaatacaaagacaatgatatttttggccaacaatgaagaaagattgtgtagactatgtcctaaagtgtgattcgtgccaaagattagcaaacataccgagagccccgcccaacgaaaattactctaatgactagcccctggccctttgcggtgtggggaaagtatctcattgggtccttaccaactggaaagggaggggtaaagtatgccatagtagacatagactactgttggaatttattttannnnnnnnnnnnnnnnnctcacaagtatgtttattaacatactaaatatgaactttctaaaacgatgaattaaacacata

SEQ ID NO: 139348 - DNA, 971 bp, Cannabis sativa
gatagtattgcactatcaaatttgtggtaattagtatggattgatcaggtacgcatatacttaattattatatattgttattgtcttctatattatatacacatagatattgagtttattgttaatttatctaacattcatagcccaaggttttgttaaatgtacagaatctataggaagtgagattgtctgtacatggttgtggtgcaatctgtgatagtgtttggttcttgttaaatgtagtcccaacaacttttctactttattcttgaaaatatatcaataaaacctaacatcatcttttttatctcaattttttacattacatcatacacttctttattattattattattattattaatattatttttacattatttaaatatatatcttatttataaaaataaatataataattatttatcgagatttttaaaaatcgaattaataaaaaattaagctaaaaaagatgattttgaaataaataaggaagatttttatgtggttggggcattaacgagatttagtccacgagttaatattattaaatttggctatagagtattttaaaagtgtgtttttgccaaatttttgtagaatttttagccaaagtttataatccttattgtaaaggggtaaaaccttatttatgggctggaatcgagtttttgggtaaatctagacccattagggtttgtatgaggaaataagctcatcgttggggtaaaatacattataatattaattttgggccgggtaggtgaggcccaatatgcgatgtaaccattgttcgtacgaaatattaggggtgttcaacaaaatttataaattgtccaacccgaataaacagcccaaaccaaatcgaataaattgacaaaaaatataacctgaaataatacaataaaaattcaaacttcccaatgaatatattgggtggtttaacctgaataaatcgaattaaactgatt

SEQ ID NO: 139349 - DNA, 546 bp, Cannabis sativa
tatatatgggatatgattttgtccgtgatgtactttcacggaatgtattccgtggtatattaaatgggtctcaggtacattaaatgagtgtccgaatacgtttttactttttaaccctaattatctctagatcaatctcagccatcaaatcaaataatttcctcatctgacggctgctgtacattacgaattacaatctgtgaaagtataataacgaaaaaaatcatatccctacatatctatatgtaaactaaactgatgctatgattaaattttatatataataagtttcttcttcacatcattcttattttactattttctccttttattcagatgcttagtcacggtctatattatattttacgaattattatttatttttgtttgtttcactttctcaaatcagaaagagaaagcctccacactaaatgcaagtacctcatcaacacctgttatcattaaatatttattcattaggtattagttttttatttacaaaatgattattatttaattcgcagttatcttttttttttttttttt

SEQ ID NO: 139350 - DNA, 1021 bp, Cannabis sativa
tagttttactattgttattttaggaagtttatgtcaactatttgtttcgtataatgcaactttttgtttatttatttaaaactgtttccggcatgcttttgattttttccttttaataatttcttctaacttttttattttttttttaatccaacctaaaatctcaaatttaaatctacccaatttatttctttaaaaattgtaattaaaatgccactgtaatagcttacaagttttcaaaacttgttactgttattaactcagacttattgtaacaacacaaaaatagaaataaattgtgcagaatttaaaacttgacttaagcaaatcatttagtgaagtatcaaatattaaaaagtaattgacttaaacaaatttagactctctttaatgatttgttgcaatcctttataatacactttgccaatctgatttttgaacaccaccaatagcgaactcctttcagcttttgatgagtgtgtgcttacttcctcccgaagtaagtcttagacaagtcttctcccgaagacttcttctcttgttcaatgaagctctttacactacaagtaaagagagtagtaggggcgacttttgtcacccctaaagaccccgaatattgaatattgcccttaaaaatgtattaggggcgacatatcacccctaacatgtcgctcctaatacttcgtccctaatactccttattaggggtgacactttttgtcgcctctaaaagttagcattaggagcaacaatgtcgtccttactagacttcataataaaataaataaataagttaaaagcaataaaatagaatcaatattattttatcataatattacattattagaattaacaatttaacaaacaaacaaataaaacaattaatgaatagtaaactcaacaatgataaaaacttagggtaattaatttcaattgaatctattttatttgatttaacataatttaattcttaaagtctaattttcatgtgatagctgatttactaaagatacttatattc

SEQ ID NO: 139351 - DNA, 545 bp, Cannabis sativa
ttatgtgatgaatgtatgtgttgtacaaattttttccatgaaaaatattttttctatttctgaaattgttttatttggattccttgtgcaaaattaagaaattttggtttttacggaactcaattccgataaaaattgaaaaagatatgaaagtttgaaatttggagttgaatgggtgtcgaagcttggtgcaaacacgcacgggaggcttaggacaaccccatccgtgcgcgtccttcagaaaattttttgtctgaatcctcggtcaggctcggacaccagcgcttaggaccctgcaatcccgcccatgagcaccctgaaaatgctgagtttcctcgtctgcccttccttcgtgcgtgtgcgtctagctcatttgcagcctcctggggctgcagctgcagcctgtcctgggcacaacgattttttcacccactaaatccgatttttgtggtatttttacccaatttcgaatttttccaatttcaaaccaccaaatcaaaaataaaatatttttttttttattttttgatagattattattaatc

SEQ ID NO: 139352 - DNA, 1040 bp, Cannabis sativa
  modified_base (790)..(790): a, c, t, g, unknown or other
agaagaagaagaagaagaatggttcacttgtgagcattcatggtctttttagtcttattagcaagaagaagaaagaggatgagaagacgagaagaagaacaaaaagaaagaggaggagttcttctctgtaaaaaaagaaagttagggttattttttattttatgaggttttaattaattttgtttaattttatattaattttttaaatgagttaagtataaaataaaagtaataaaaaaaaggaaaggttattttacaaatttcaatttgtcaaaaggctattttgacaaattttacaataatggagttgtacttttgaaattgagattttttttaaaaaaaaattgggttagaaaaaattaaaaggcattatcaaaactaaaaagatacaaatttttcaaccaaaaaaaaaacaaaaattcaaatgggcccttttttattttgggccctgtgcaattaaagaggatgtacaacatttaagccgggcttgatgtatatctattctatataaaatgtggttatgtaacaaaattcttggtttaacgatattttttgagtttttacattaactttaacagaatatcctattgcttaacagaatattctttattaattttataatattattatatatatttaaaaataaaaatgatataaatattttatataaaaaaaaattaattttaatttaaaatacttaaaatattataaatatttttaatcatatttttaaatttattggtttaaatttattgtagatatgttatataaaaaaattaaatttaaaatnttataaatatttttaattttattattatttattttatattttaaattgaaatagttgtaataaggagttgattatgccttgttttagttatgttaaaccgattcacacaccatatttttcgtaaagtttggaaataaaaaacctttatatcaaatttacgaatccctcttatacagtaaattacaatatatgcattatcaaatacgctacctaattaaaaaaaattaaaatttaaaaaatacgtatatat

SEQ ID NO: 139353 - DNA, 535 bp, Cannabis sativa
tcctaagatctaaacagaaagtaacacagaatttacaagcttcctcaacacagaatttacaagcttcctctgcattggaaacgcattccaaccgagtagtgcttgggttcccttgaatcaggtaatgtaacatccactataaaatcaattcaattacaaattccagttctgattcttcaaatcaaacaatgtaatctaaattgacttttatacattattacgtaacacttgaacacactcaagttttgagatctaaactcatttagatctcagtacacaagaacacttagcattcacacagctgaaccaccttcagcacagtaatctgaactctctttagatcaggcagattcaatctccatcttcaacctcaggaagaccgcaggaatttctatctgcaaaaatacgaaacaaacaaaggaatatgttgccctagcagagcaagaatcaagaagatgattctaaccgaagagagttagttagcaaaacagacacaacagaatatatatcttgaagataataaaaactgactaac

SEQ ID NO: 139354 - DNA, 1217 bp, Cannabis sativa
aaaaaatgcaactcgttctggtaccaaggcattggaatggagaacatttaagaagatactaccaatagaagtaccaggttggatggccatatcaagtacgaaatacaagaacatttaattttaagtgaatggccttctgggcggaccacgcccaaaggttcagataaaatcttcaagtactcaggtcagatgaccactagtgaaagtatgattttcaatttctccaatttgttttatttcatgttaagctaaagatcagatcagatcagtataatagctttgatgtaagttactacggtaacagacatattaccgatcaataaatgaataaagatgtttatttcaaaattcaaaattgagtcgaatctattagcatgtttttaatttaccatcaactacgtacaaaaggcttggtcgaacccaaaactccagacagacaaagagcatatacttttaaaaagcaaccaagagtcataagtctgctcggacaattggggggcacctatacctgtacaaagcattcagtaaaaataaaataaacacaattgcatgatgattataaacaaagaatgaaattcattaaaataactaaagcatgcaaacccaggattaaaggctgcccggtcagctagttgtctgaaaaatgaaaaataaattccaagtttaaagaccgcttggtaggtcactttgtcttaaaaaaaggtcttatggctgaacagataaaaaaagatataaaaagaaagaattcaaacgtctggagtctcaggctctttgtacgcgtcgactgggtcagctggagctggaggatcatttatctgagcgggaggcacttcaacattttgactagctggagaggtggaagtggtcgcctcagattccccataggccccctgagcagtgcagtatttgagaaacatgtctttggtatcgcccaagtattcaaaattcgcttggggattggccttccagaagtcatagaaaatcttgagaccagctgtctctaaggcattcactttccctccgagcctctccattttggatctctgctgctcggcctctgacttatacttctcaacctcagctctaagctcctcctccttggtcttcttctcttcttccaacctatggaaaacagcccggagaacctccatttcttcttgaaggctggtcacttccttagataaggaggcaatggcggcttcaagctgatcggtggc

SEQ ID NO: 139355 - DNA, 1056 bp, Cannabis sativa
tataattttattcacttttcttgctgagtctctgtgactcacgggtgctttatgatgcaggtaaggggaaaacaaaggttgagcagccatgagtttgaggttgtagcagcaatgtacatattagccgcagtggctcagcccagtgaataggatgcctcgttttgatagtattttgggatcgcaaagttcatgttgtaaagcactaataaactagtttgttatattttgaaaacagggggtccccgtagttctcattacttatcttttactataaagaagtttatatatgcttgattttaattatgaaaaatttaattacctacacttttggtataattatatagtattcaaataataattttataaaaacacacatgtggcatccctggttgactgggcgttacaacatggtatcagagcgccaaggtttttagatcctgaagacttgtttgatatgtacatcgggtgcgaagactcgttcactcatggttcagtaagcttttaattaatagatattttgttaattatctcattgcctaattacatgaattgtgttaatattggaaatgtgttggaaggattattataaacggaaatacttatcagtactgttattacctagaatgtgaccgcaggtgtatagattatgcacccgaggcagacaggtagaggtagtggtgagctagcttggctcgtggttgttggtgagggcgagaaccatccaccaccaccaaactgggaagagttatatgcggcgatgcaagagactatccgacagcagggtgaacaaattagagaattgagggagcaacgagctcagcctactcgaaaccctaatcttgatcctctgacacctctgttagtgcctcctgatgcaaggaatcgtttagaaccgttgtatgagcagttcaagaagcagaacccgctagtgtttgagggtggtgctgatccactcaaggcggagcaatggatgagtaggataatatccatttttgattttatctgggttgaggataatgactgggtcaggtgtactatctgttggaaatattttac

SEQ ID NO: 139356 - DNA, 701 bp, Cannabis sativa
gacccagactaagacctaggacccggacctggacctacgcctcgaaacccagacccagatcagaactcgagactcaaacccgaacctggaccaagactcgaacccatatcaggacccagaccgatatcgaaacctgaacccaaactcgaacaaggagtttaaccccaatcggctcttagactcggaccgggacctaaaacttggacccagatgagggacctggactcgagaaacgggcatcagaactgggaccgagaccctagacccaatcccagacccggaccctgaccttggactcggaatgggacctggtacccaaagtggaactagactgggacccggggcttggacctaactcatagtcagtgtttggatttgggacccatacccggactcaaacccagacccagactcggacctagaaccaaacctaattccagactcgtaccccagacctaggtccaagttcgagtctaggtttgagtccgggaactagaatttgaataggacccagacccaaacctggaccgggacacggactcgaataaaaactcagatcaggactcgggacacaaacccgaacccagacgcggacttggacccagacccggacccaggacccgtaacgggattggagactagacctggacccagtaccaagacctagattgggggcccaaactctaaattagaaccaaaat

SEQ ID NO: 139357 - DNA, 1486 bp, Cannabis sativa
  modified_base (1426)..(1444): a, c, t, g, unknown or other
gttcttcgtcgtgaccaagtcccccacgaaacattggcatgctggaggaataactaggtaggggcagtgctgagaagaggagggatcctgacccactccgtgagaagctccgggcgatccacggcttggaagccggaagagaagaaaaagcggtggcgatattcctttacattcttttgaaaattaaaagggatcgggccctcgttagaaggatgggcccggagagtgaaaaaatagtctttaaacttgtcctcctttttgggaacagacacaagtttataaaaatataagatttcagccgggctaggtgaagcccagcctctggctacataaaaaataaaaaggcctgagagcaggcggtaagcttggggaataagttggtaaggcgcgaggccaacaaatacaaggaaattaataaagaaatcctgagggggaagcatggctccggacatgagatgggtttggctccaagctccgaaacccccataattgtggttgggcgtctcttcgtcccgaggtaaacgatggaaaaccccagacgcgggcggtttaatcccagcaaccatcacgatcttctccaattggtgagcacagatcagggtggagtggagttcatccgcctcccagccgttagaacggcatgtgtagttctcctgggccaccgggcctttaataacctcctccagggtggccagagcagccgcccccttcttagaagatttggttcctgacacaagggtagacatatttggttctgaaaaaagaaagaatcttccagttagacctcaaacaaaaccctaatgttaaaaaagggaatgggggtcccctaaccgctggaaagaggccctctccggatgtttgccgaaaatggaaacccaaaggactttccttagcaaacatcgggtgcaaaaatcccaaaggcaccgaaagtggacgaaaaatgaaaaacgcagaatgtgggagcaaaaatcgccccatgccctaaacagtctttcgaacagaagggtcgattctaaagaaaaatggaggaaaataacaaaaacacatataaagaagattatacacattacacaacagactcagtcaaagctatttcccaaaaatccagcactcaaccaagaagttctatcctaacatgcaaatagacgataaaaagcatgaagtgtctagagaacttacatgaaagttgagagctgggggtcggcgtcagtcgacgatacagggtggactggcaacggcgaaggaagaccaagaagaaatctatggtgtctgaaattttttctctcaaatggactcttgtgaaaaaatggcaaagtagtgaaagtaacctaatgaaggaaaacgctggcatttataggccagaatgttggaaatattttaccaggatctaaatttactaacaagcatgtttcattaacatcctaannnnnnnnnnnnnnnnnnnaaataaacacatataaagtttaggcaaccttacattgggtgc

SEQ ID NO: 139358 - DNA, 532 bp, Cannabis sativa
  modified_base (28)..(44): a, c, t, g, unknown or other
atctaggatgttaataaacatacttgtnnnnnnnnnnnnnnnnntggtaaaataatatccaacaagctggacggcctaacattacattaaaggctgaaggaacatctaattctaaaaattatgccataatagtcatgctcgtcggagcttgtccaacagtgaggggtagacgaatttgtcctagaggtgcgactccttggccagagaaaccatagacaggcaggagacatggggctaaatccttgagctggtgtcccatcttttcataagaaatgtttaacaagatattagaagaggctccattatcaatcatggttctggccaccatcttgtttgctatctggacctccacgaccaacgggtcattgtgcagaaatctgattttgacagcatcttcgtcgttgaaggttatgttaggccttcctgcccgtgggattttgggtctcctttcttctacggccaggataacttcttcttgctcgttctgtgctgttcgggcatacctttcccgagctttgcccgaatatccagc

SEQ ID NO: 139359 - DNA, 2002 bp, Cannabis sativa
ttttttggcacatatatgttatatatagtagttagatatagattaatttaaaaattgtacatatacatacattaatttacaagctataaattacatatgaagaagatatttatccatttacttatatcaatatttcgttgtatatataatccaaaaattaaacaaggtgatgtggtagattatatgatttgttttgcttaatttttttcactcaatttttctaatttaattatatttttattcaatttttgtagaaaaaaattgtaataatggctcactatcataattatcataagtcatttataatatatatttacatataataaatatttaatgaaaacccaatatttaatgtacgaaccttttatattcatcatcatattataaaactgtaacaagttattaacaattaactaatattaaatatagtaataatggtatacccaactaaaatgaaagcttctaattctttatcagttagatttttatttataaagcaatagcactattctatttcttttatcatttattatatattaattataatctataaatatatatctatatctatatatataaatatagaaaagcacaaacaaatttatgtgtcattttataactttttatttattttttttttttattttttgaggctttcatacattgtccaagaaaaaaaataaacatacacaagttacatattaattatgagtgtcttttcattttcataattcccatttcaataccattttattattatgattataattataacattctttttgtattcccatcactaataacattaatttgtattagtttatgaggtattttataatttttttcattccatttttcttattttttgagactttcatattttgtccaagaaaaatatacacatacacaatgtctttttaatttataactcccatttcaataccattttattattataattataatattctttttgtattcccatcactaataatattaatttgtattactatacaatatataatatcctcaatttaaatctaaataagtatataagatttcacaaataaatgacttcacttgtgagttagtaatgagaatggagctttcaatttacttaatggttggtctaagagaagatcatatagcaaaattctcattcatggtatttttgttttggacattgaaagtaaagcatctatcatgctcactatctcatctttatttttttatttttttttttgagtattttttttttttaaatttacaaaattattagtgcttcttggaactttaaaattattaaatttaaattattttatatgttgtaggtatgttgattgtcttcatttatatatatatggaattttttgttttaaattttgattctaagtgaatacactactaacgttcttaaagcaagttatctagaccattctataatataaatacacacatgataaggctttgactcacaaaacaatcaagaaagaacgaaaagaacataattattattttataaagaagcgggatgaaacttcacaagagaaaaaaactcatagattataacaaaatgagatggcaatatatgcttattcaccaacattgattaagattcagggcaacaacattgaagtgcaactatattgtcatgttatgttatatattacaatacaaagtaaattcttatataatattgtgtattattgtgttaagatttcttttaaaatcatcactgtcaccattttgtgctacgatattagacatgtatatatatatataaatatattttcaaatgaggtattaattttatatgacctctttcactttatttttcaaattgctttgaaaaacatgtgtatatatatatcagtatttcttatacttatttatgctattttagattatgatcattcataaaaaaatactttaatttatagattaggtataatatataaatttcccgtaacaaaatttatgtattattaacaattaaatacaa

SEQ ID NO: 139360 - DNA, 517 bp, Cannabis sativa
ataattgaatatatagtgagggctaattgtgtaattcaattagtgaaagcccaaaaagctattctcacttttatataggttatagatatatatatatatatatatatataaatattaggactgaacacgggtcgggttttcaggttttcgggtggtcgggttcgggttttcagatttcgggtgtttgaaatgtgtaatcgaacctgattttcgggtggtcgggtatggcgggtttcgggtcggatttggcgggtttaatgtgatcgggttcgagttttattaggctaagtctgaataattcatttttaggcccaaataaaactacttgattttcaaaaatataccatctttttttttttttttattttttaacatttttgggctttattgaattaatttatagttttttaagtatgagtgtacttttacagggtattatccttgaatgggtcgtgttaaaaaattttgaatttttatgcttaatgtttctatctaatttaaaaaaaaatatatatat

SEQ ID NO: 139361 - DNA, 695 bp, Cannabis sativa
aaaaccgttgataagaagctgacctgtaaccactgaagggctggcggcagcatcagcctgagtgatagcaaatacacgtgctggagcaggcttaacttttggcttaagttcctctttcttcaattggggacaatctttcttgaggtgccccactgatccacactgaaagcaagctctccgattacaagtcctgggatgatgtttcttgcagcacgggcactcggcatgggaaagttcttttctcttgctcaaaagtggaatcatcactctctcttccagggctagaaatagggagagtagtggtcccaccagcatcagtagtctctcgagtttcttgcaagaatatgataccatttcagcataagttgtggtatcatttgttgtgataactagatcgtgcttaatcttgacattcaaccctgccaagtacttctttttttactgaagtctgttggtacaatcccgaaggctaacttagccaagcgatcaaacttggttgtgtattcagtcactaacatattctcgccttgtaccaattccataaactctttccgctttgcactacggaccgcctcattgtaatacttggcattaaacacgtcccgaaattcctcccaggtcattctagtaacatccttggtgagggataccatctcccaccacaccaaggcatcttcctgaaattggaatgtggc

SEQ ID NO: 139362 - DNA, 682 bp, Cannabis sativa
attaagatgattcttcttcttaccatcctttccagaagccatctcccttggatttggtttcaactctgttttggggttgcccaacagcagcagaggcgtccatggtggggtaaccagccggtggtggagccacatatgggccttgtccgggggaataagatgaaactgcccaattaataatcacacaaattaacaacaatatcattaataaccatatttggagaatataaaatggataatatgaagaattatttgaagtacctgatggctgagcagaactcatatttggagattgatgaagatgacggtcttgagaagaagaagacagcagggggtgggggaggagccgtcgcataatggtggagactgtgagctttggctggtgaagaaagtagggaagagctgcggcgcgaggcgatcgaaccgattagcttggctacggcttggcgagcctagtttttattttatctgattgggtttgggcttcgaattgaagaggaggcaaagttatcgtaatagcaaaattaggctttaacttgctgctatttcctcttcgttttttttagaagagaagtagaagaagaagggggcggcaggctgggcaatgtgtgtgtgtgtgtgtgtgagagagagagagaggggtgtgtgtggagagagaaaaatagtgagttgtgaaaagaga

SEQ ID NO: 139363 - DNA, 1234 bp, Cannabis sativa
  modified_base (1001)..(1001): a, c, t, g, unknown or other
atatttagagttatctaaattagtaattttaattgaatcaaattttaattaaataaatagattaatataaatattagatgaaaatacactttaaataatgatctttattataagaatacttgatctccattgttggttctacatagctcttgttttagtgagattcatccccaatagatggacattcattagcaatttaactccgtagaatctcaaaagataagtattattgtaagtgtttttattcttagtaacgtccatccgaatagtggctgctaagagtaggacttacaaggtatgaaacaatggtagaagctcataacataagaatgaccttgactctcgactaaaatgaagttcggattttcttttcgattgaatacaatgttactagaatggtatccattttaattgagctgactctgctcaattcaatgatttatatcattgactctcgcccaatacgaagcactgtattagtttgttggaaaccttgaaaattatctaggattgtttgttttgtattttcacttgtcattcctacttgctaagcgcttaataatttctgaatgtgtataattttttattaaaccttacttgatttctatttattgatatttgtagtacccaatatgactatgaacaaccccatggtgtcactattgactgacaacaagctctcaggcgctaactttgtcaaatggaaagagaacattaatattgctctcataggtgaaaatgtcatgtttgtgttgactgaagaggctcctgagcagccagatgagaatgtgaccaaggcaatcaaggaaaggttcgagcgttggtagaattctaacaacaaagctcgatactttatgctgtctagcatggtcgacacattgaaaataaggtttatgaatactctcacggctacagaaattatgaactagttgactgaactgttcggaatggcatcagatcaagcttgatttgaggcgaccaaaatttttatcaatgcacgnatgaaacctcatcagaacgtgcatgatcaccagctcaagatggcaagttactgccaggaagctaagaatcatggagctattatagatcaggaaactcaagtgagtttaatcttaaatagtttgactccagctattatgtccttcgcctcaaactatgtcatgaacaagttgacttttgacttccacgagttaatcaacaaccttcagacatttgagaatttgattggaggtcc

SEQ ID NO: 139364 - DNA, 509 bp, Cannabis sativa
atccaagcatacattgtatctcgtggctcacttcatcactctctctaagtttcaaaaccaatatcactaatccatcactctcaaagaataataattctaaaccctttactcatcctaggccgaagctcaccatcaccaacatctccaagttcttaccttcaacaaaattttcttccttttctcattgttgtgtttctcttcaaaacagtatagccatagtcccatagctacacgatagcaccatcactacatcaccaccatccccatatacatatacacatctccttcatcatatcgacatcagtatcaccactatttttacattcaagttttagtgctcaactagatctcattggaagctaattaaggtatagcattatatgatttggattgtagattcatggttaaggttttgtatatatactattataatatgttctaattaataagtatgaaatttaggtttttcataagacaactgttgattctcaaggatcactctcgcaatc

SEQ ID NO: 139365 - DNA, 1267 bp, Cannabis sativa
  modified_base (26)..(39): a, c, t, g, unknown or other
tgtaaaaaaatattctttgaacgtannnnnnnnnnnnnnttacaaaaaatggtgccttatgtaattattcctaaattaaaaagtacttttttttatgtctattaattaaaaatactttcatattatattttattaaaatatacctacttttacgagtaatttgcctaataataccccctactctctacttaaatttagtatataatttacattaacttaagaggtctaacgtggacatcatctacaaaaatgagtaccttaaaaaatatgaaaaatgaaggtaaaaattaaaacaaataaaataaaataggtatacaatgtaatttcttcaaaatcaagccaaagagttttgaaatttatttccattatgatttgtttttgtagtatttggtatcaataatcagagtagcattgaagtggagagctctaacaaagagttattctggccttgaaaaaaaatgaggcactattgagtgagttttgtaagattttacaagacatttttactcttaaagttaatgttaagtgagtatttttaactattgtaatcgctttgttgcttatagtttagctaaacttactcatttggctaaggtttggtgggcgagattaccaaatgttgtttgagtcttttagacttgtttctttggtagacactttttaatgagaatttcattttcgtaaataataataataatgaatttttgtaatactatatttttatttgattttaaatagagaaaattacagtttttaaacttaataaaaccaacctccacatactcaggattaaaactctaatgacacgtttactatagagtacttaaaatcgaaataaagtaatgtagaaatgtcatgcaataaatgaaaaataatcgaaattaatatttgtaatatgttgtttactaaaattgcttggaaatagaatgatagtgatttatattgtttactttatcagaataagtaaccggaatgcttaaattgactaaattatcattttgagttataaattatagtagatggtagttattttgtaaaacatattttaaagaataaaattgtcattatgaatttaatattaaaaaataaaataaaagtaataaaatctattaccttaatgacattctttaaaaaattagtagaaaaagttctctcttttctaactttaataaattaaatgaataaatattattagaatatttctaattaaggaaataaaataatattattgattctgataaataaatattttatattcattgaatct

SEQ ID NO: 139366 - DNA, 585 bp, Cannabis sativa
tactcaagataaactatatgtatttttcttgtatttagttaaatatagaattataactaatcagattcttctgatgcttaattagttaatatttcattaaatattcctatttaagttgtaaatttgctatttataactaatttttacaatcaacttgaatttgaatatttttgaaattcaaaattaagttgaggaattctaggaataagttattgaaatattcttagaatattgttttaagttggaagtttgttaatttttgatcaacttaaaatagaatatttttcaaattaggtggttagtaacttaatttgttatttaattttaaattttgtttgaaaataattcaagttgaaaattagttattttataaaaacttgaattagataattttaaaattttattttattatattttaattaatttatttatttttcgaattttatatatttatgtatatttttagaaaattaaatattgaaaagtaaattaaagttggaaaataattttcaattaattttggaccaactttaaatttataatcttcattattaataaaatataattaaaataaatgattaaata

SEQ ID NO: 139367 - DNA, 1095 bp, Cannabis sativa
  modified_base (350)..(359): a, c, t, g, unknown or other
cttcttttatttaattcttttgtaggaaattaaatcctcttttctttttttttttaaaatagtaatcagcccaaaattaaataaatcaaatcaccttcccatgcaaaatgaccaatatacgcttctccaaaaaaactaaactaaacacaccataggagcaatttggtaattttagttaatccgccaaaccaatattctaaaattctaaactaaactggaatacttccaaaataatccatcctttaatgcttttaacgcagattttcattaactaaatttgagcgtcacagtaatgatttcacacagaagaagtaaaagcaatgaaaataaagaatatgaacacagggttnnnnnnnnnnttttgcagttaaaattctgcatagcccacgagtcaatcttattcagatttttgagtatttttcaaaggctctttcatatgagttttttcgtcccccccatcttgatcttgtctgccactatttataattacatagtggccactaaattacaaaacttgactgtaatcgttataacaattattttctcaaatcatgggatttgatcaaaaatcatgctaagtaaatgaggtttttatttataattcacacagctatgagtatcccgcttttattgggtcgagatgaacgcacatttaaggatatacggtaagcctaatctcatggggatgcttcgctaggaatggtgtcgagttaactttgatggtgagttgtgacatgtcatatgacttcccaaaattaatattattttaactccgataactatattttgtggtgtcgagataatcttcctcgcatgcatgccatcttatagcgagatagacgcctcgctatctgttatcttgattcaccatacttttcatacttagtttgtataccatgaaatatatgctaagtgtttttatcgttatcatttctctttcacgcagcgaggttgaggcctcatcatgcacaattgcactcacatgctttctcgtctatacataagttagcagttcgtacgtttctatctcccagaaggttattcagccagccgagctataaacatactctacaaattatgtttctaacgagttgt

SEQ ID NO: 139368 - DNA, 527 bp, Cannabis sativa
atttacagtggctaaaatctaacttttaccagtgcatttacgcgttggaaaaattcgtttttgccaatgctttttattttgtgctggcaaaagtataatgccaacgttgatttgccaactccttttgccaacacatcagaagtaaattccattttaccagcgcaataccaaacttttaccagcacaaaaatgcgctggcaaaagtgagatttcttgtagtgtgtgagttagaataggatgaaatgaaataaaataaaatttaaataaaatattgataaaaaaaaaattattaaagcattggaatgatctttccttccaattcaaaaccaaaatagtagaaagactattctgttggaattaaatctaatactttaaaatataactaaataaaaaaaaaattatttcctttccattcatttcattccaaccaaacgctacctaaatctttgtttaaatcattttattcaataaacaactaataataaaaacaaaatcttaaattttacattttaaaaaattaaaaataa

SEQ ID NO: 139369 - DNA, 1026 bp, Cannabis sativa
  modified_base (671)..(671): a, c, t, g, unknown or other
taaaatatttccaacaactagccttagagccatggtaatgatttactttcatgaaatgtggatttataacggtgaatattgtttgtatgttgatttggatgtgttcatgttagtttatgtgattatttgatgattgaatgtgatttacgaaatttttccataaaaatatattatgttgattccttgtgaaaaactaagcaacttttgtttttatggaactcaattcccatgaaaaacgaagaagttatgaaggtttgaaaaatcaaatgcatatggtgtcgagcatggtgctcgcacgcaccagatgcttcggacaaggtgcgatgtgcacacggacaggggacaaaaccctgtttgaagcgtcggacacgtgcgcccaggaccctgcacctccacccacacggatcctgcacctgccaaggtttctcggccaaggatcatgcaaatccttcattccgcacacgtgtgaggccatttgcagcctgtgatggctgcacgtacagccttgctccaatccaacacccaatttttaagtttggtgggattttccccaaattttgaatttttgcaattttcaaaccctaaaattaaaataaaattttatttttaaaatatttaaacttattaagaatatttatttttaatggattattattaatttttgatatttngaggtttaaatttaaaaattgattattttatttttaaattatgtttagattttaaaaatttgttaatttctttaaatatattttatttaattataagatcagatattttaatattagcaatattttaaattaaaagatatctttatctttttcttaatttgaaatattatattaaaattatcttatataataaattaaagaattaataaattttaaattaatcaagatatttttatagatattctaaccataatattttcaaatttaaaaatttgttattttgttaaatgtttaattgtttataaattataagttagaaaaatgatatttgttagctcggatgaagtctacacgc

SEQ ID NO: 139370 - DNA, 509 bp, Cannabis sativa
atttcatttatagaaatataatcacaaaactgaaattttgtttatgttatcatctctttttgcgtgcatatgtgtgctgttgctttcagtatttaaagatgagaatcttgagcataacgacttgtcgcgagcttatgatcctatataatttacatgaatttagttattcgatttgatttgattcgatccaatgttggattagatagcttccaactgttaactgtaattagttttttactgaattagattatatccattcaatttattttagttactttacttgttaaattaatttaataaaaaataactatataaaaatataatttaaaacttaataatacaacctacataataaatattaatttaatctaacttaattatcataatcttataataaaattgaaaaaataaaatttattcaatacttaataacaattttattaacgtttaaaaaaatgagaattaatattttagatttaagatttttttttttaatctcacgtgttaaa

SEQ ID NO: 139371 - DNA, 801 bp, Cannabis sativa
cacaatagcaatgggggtgtccctcaaacgaatttttgcatgacgggaaatccctctcgaacccgtaggagtcctctccagaaccagctaccatgtgttttttttttaacaaaccaaattatggttttagtgaggcttcaaaaggagtgtttccctcgtcctaatggtggaaatagtgtgtagtagtatttttggaagaagggaagtcagttttctgtataaatataggcttctgaaaatgaatttaggggggaaaccgaatttttttgaaaacgttagaaagtatattaaaattggggagcatatttcgtgctgcctttaaatattttccttcaaagtcttttgttcactatacttatatacaacaagtattgtcaatcacaagcagtccaatcaaattaaaataatattttatgtcaactctatgaaaacttaaaagtacaacacataaacatgtgtccccacatgaataaacacacacacaaccggtttagtttggtgtaatggaattgaatgaactttattatattttatgttatgttcaaatacacatgtgggcacaaattaataaacacactatacaatagtttttctctattcattgagtttgtaatttgtatgtttatttcttttaatcatatgccaacaggtatgttaactataataattctttaggattatagtaacgaaattaaaacaacttttttgatatgctacaaatgtagattacgggagtcactattctcgtaaagaactcactgaacccattcgagctagggttctactgagtgacactcaacc

SEQ ID NO: 139372 - DNA, 1242 bp, Cannabis sativa
attttgattatctaaaggataaatatcaaacatggttgccaataactatgaaaacaggaaatgtttatgatcctacaactaataccattcttatgtctaatgccgagtgggatgagtacattaaggttatttctctatatcactattttataatttagatatttaagttgcacatattaaaatgcattgtcttttggtactggatataggctcacccaaaggcaaaaccattgaaaagtgctcctttaccctttccggatctctgtaaagcgctctttgatggtactactgcaactggattttatggttggagtcctagttgtacgatttctcgacctatgaactcatctacatctcctaatattgagacggatgcttatgctgaagaaaatgcacctagtaaccaaaatgatgaagctgataacacttctccatctcaatattcaactcctttaggaggacaaaagaagaaaagaaagctttcatctcaacatgatattgatgataagatgtctgttgcattggagttgttaattaaaaagaatagtggtcctgaagttgaggattgcatggaaaaattggatggacttggatgggaggagcctttgtatagtgcaactattggcatactttgtgaaggcgatagctatagaaaagcatggatgaacatgaaagacgtcaacataatggagaattgggttaaggccatgggaaaaaaattgggatatttttgatttagttaattaagatataattatatatgcttagataacttttatttgttacatcatgtcatgaacatatttttcttttgtgtatcgaactttattgatctattatagttatctatgaatgtttcattttaaaccctagtattgtccttctaaagtggctataatttttttaacagatttaatatggaatttgaggatcaacttttactcttaatgattttctattggtatgtacgtcgtaaacgcaactatttatctagagttaaagataatacatcaactctatctggtgcaagatacactttggagttgttatatggctcaaatcgacaatgcatagagttgatgtggatgtctcgtgatgcatttgttcatttgtgcaatcatttaagacagagagaatagattaaagatagtaagcatgtatcagttgaagaaaagatagcaatgtttttaactatcatagcacataatgagcgatttgttgtcatgaagcgaagatttcaac

SEQ ID NO: 139373 - DNA, 1529 bp, Cannabis sativa
gaaggcttttcagctttaatcaagagttatgaggctaacagaattatacaaggttgtcgtgtggctaatggggcactttctattacgcatatgctctttgctgatgacagttatcttttctgtcaagccacatctgatgctgctgggagcatgaatagacttctccatacttttgagcttccttctggacaacgtgtcaatgctaccaagtcttccatcttttttagtcccaatacagagactttggttaaggagcaaatcacttctactcttggaatggccgaagctactgttggctctttttatctggggcttccaaatatcattgggaggaaaaaaacagtgatccttggctttctcaagaacaagattgttaaccgaatcaacagttgggatggtaaatttctttctcgtgctgggaaagaaattttgcttaaaactgtcatccaatcccttccaacgtatgctatgagtgttttcctcattcctttgggtatttgccaagacattgagaaactcatggcaagcttttgatggagaacaaaaagttcaaatggacaaggtatcatatggatgtcttgggatcgcatggccgcacctaaagattatggaggtatgggttttcgacatctccatgatttcaatcttgccatgttagctaagcaaggttggagacttctttgttcatcatcttctcttgctagtcaggtgtacaaagctaaatactaccctcgcactgattttctaaatgatgaattgggtaacaatcctagttttgtctggcgtagcatttggagtgcacaacatttggttcggctaggggctagaatcactattggtaccgggctttcaacgcatatcctcaagcaacttggcttcctgatcccgtcaacccctatgtctctactataggaccgggtcttgatgagtatatggttagctctctctttgatgtttctactcgaagctgggatgtctcccttgtcagggatatgtttaacacacgggatgcggatctaattcttggaattccacttagctctgcagctactgaagattgttggtcttggactggggatagaacaggcagctacactgttaagtctgcttatgctatgttgcaactacagaagaattctcggtctggagaaaacaattcgggattctggcacaaactttggcaccttaaaataccgcctaaagtgacaaatttcatgtggagagcagtttctgatgctcttccaacttgcctccaactggttactaagtgtgtaagtatctctccaacttgtcctgtttgccttcaacatgtcgagacatcttctcatattctcttcaactgcctgcttgctttaagttgctggcacaaggttgatctgatccctcttgctgattcgtaaggcactattggtcactggcttgatagtgcgtttaataactatgatgatgatgttatttgccgtgttgttatgatttgttgggctctttggaaagcaagaaacacattagtttgggacaaaaaagtttct

SEQ ID NO: 139374 - DNA, 1018 bp, Cannabis sativa
atttcctcgatatttgtgttattatatttgtcgatgacctccttgtgtactctcagtcagaagaggagcatgagaaacatatccaaatgtttctgcagcgacttcgggaacataagttatacgccaaattcaagaagtgcgaattttggctatctcaggtgtcctttcttgggcacattgttagcaaggatgggatcaaggtggatccagaaaagatagaatccgtcagggattggccaagaccaaaaatagtgacagaagttagaagcttcttgggtctagctggatataatcgtcggtttgtggaagggttctctaaaatttcaacacccttaaccgagcttactaaaaagaatcagtgttttgtatggatcgacaagtgttaggctagcttccaagagctgaagtagatattaattacagctccaatgttagccctacactcaaatatttctttactcagaaagatttgaatatgagacagagactttggttagagttggttaaagattatgattgtgagattctttaccatcccgggaaggccaatgtagtggatgatgccctgagcaggaagggtcccgggtaggtagctagtatggttcagatttcatctcagttagcggaggacatggtcagatctagcattgagtttgttgtaggtaagcttcataacttgacgttgcaatctgatctgttagaacgaattaaagccgctcagttaactgatctagagttagtaaagatcagagaagaggtatcagctggtcaagctaaggattttacagtgtaagacagtgggatgctgttgttcaaaactagggtttgtgttcctaatagtgtggaagttagaaatgaaattcttgaagaggctcataccactccatattccctacatcctcgcaccactaagatgtatctagatcttaaaccttacttctggtggagcagaatgaagaagaatgtggtagaatttgtatcgagatacctaacctgtcagcagattaaggctgaacat

SEQ ID NO: 139375 - DNA, 651 bp, Cannabis sativa
tttactgaaggaagagttaatactggagtggtaatcaaacgctgctttaactcctgaaaacttttctcacatcgatcagtcctaagaaacttcaaattcttttaggtcagttctattaggggtgttgtagtcttcgagaaacccttaaagaaccaacgataataaccagctaaacccaaaaagcttctaacttcaatagccaatttttggtgttatccaatctcgaacagcttcgaatttggccggatcaaccatgatcccatctttgtccacaatgtgccctaggaaagagacacgtggtaaccagaactcgcacttcttgaacttagcgtacaacatgtgatcccgtaaccgttgtaatactgatctgagaagtaaatcatgttcctcttttgactcagaataaatcagaatatcatcaataaatactatcacacatttgtccagataatctttgaatacccaattcatatgatccataaatgtcgctggggcattggtgagtctgaatgacatcaccagaaactcataatgttcatatttagtacagaacgcagtctttgggatatcttcttctcgaattctcaattgatggtaacctgagcaaaggtcgatctttgaaaagactgtcttacccttcagttgatcaaa

SEQ ID NO: 139376 - DNA, 701 bp, Cannabis sativa
  modified_base (203)..(215): a, c, t, g, unknown or other
aggatgtcctctccttccacaggattaggttgtaaccctcggttgtttgggttattaggctgactgagctggttgtatccctggccctatattttcacatactacttaaaatggcctcgagcgatgagactctctatctcatctttcaattggcaacattcttcggtcatatgcccaatatctttatgaaatttacaatattnnnnnnnnnnnnntttgctcctcgaattcctcataggctcgggtttgccaaaggctaccttctgctcatgtgcgaggtaaatactttcccgagtttcattaagctcggtataaatagtatacaatgtcacgtatttttcatgcttcttttgtttctttctatccttcgagggttccctaattccgtcctttcattttggactagaagcccccgagttatcaattctcgtggaagcaatctctgttgaaacattgctaggtttacctcctgagcttgttttcaacaagttcatttcctttcgggcttcttcctttcagaaaaatacctgagccctctcgttgaactcagtgatgcttcttaccggacatccttgtaaatcatcccacaactcacccccggctgttaatggattagtggagatccccgcctgaagagttgtaagttgtgtgctgtcatccaagtttctaaccctagcggtagccgtgctaaaatgacttaa

SEQ ID NO: 139377 - DNA, 707 bp, Cannabis sativa
cgacgctcttccgttattctcgatgtagacctatagaatttgatgaacgtctccttagatttaagatgcctcctacccgatggggtgatcatgccaagggctttgttttttcaaacctaggtcattttttaggccggtcccggatggggtctgggcctcccacacctatccttctggatcattcagcctatctgtcttccagctggtttctcccctcagacaactttcttggggatgacgaagctagtattgtagtgcaggattttgctagggctgaattagatttcctaggtagtattagttttactactttgtccttgtgcgcataatttctcatgatcattctgacacttgtttgtttgtttcttgaaacagctaagccaatggacgagcttttggcgacccttgcctagacttacagtcctgaacccgccttccctcaggcacctgacctgacggtaaccccgaggaggtgttcgtcgagcgttcccttaggccaaattgtcttgatcgatgaggacggggaggctgaagaggaagaagagggcgagattctggcccctctagatcggaagcgcaagggaaagatggtggaggtttagtctaccaagaagccgagaagggtcgatactccggctcctagctctgactcggggatcccacctgaggcgaaggaatatactgtgcctcccagcatagtcctgact

SEQ ID NO: 139378 - DNA, 523 bp, Cannabis sativa
ctgaagccattgttggagattgcagagaaggttttgatcttccaagaataaactattttctaaagtattttctctaatgggaaggagagaatacattggagaccactacctatttatagagtcatcttagaataattcttggatatttataatttggcccctcaacaaattataaattaacttatggtatctacacattatttccatgacaatttaatacctttttgatacacgtaacataattggtcacttaatcttgtatcacactttataatagcatacacattatacatatgtgcccacataggatttttaatccaacatgctatgttgtagcatcaatgctattcattatttttttaataaaaaattgaagctaaaaagttattatagttaaaaattaacatatatcttaaactagggaatggatccgcgcttcgcgcggttttaataatttttttttgaaattatatattttaaaatttatttcttaattatcaataaaattaaatctaatactttt

SEQ ID NO: 139379 - DNA, 1135 bp, Cannabis sativa
ttttgttatcagagccgccaggtttgtctactgaagcttgccaagacatgtacaatcttcatcagagaaagctcggctcacggttcagtaagcctgtacatttttagtattatatatgattattaaagcatgttaggaagcatattagattatgcttatttatttttaaatgtgttgccttaaaatccataagagcggtattaagttttatgattgctgtctaacctgcctaacttatgggtttgcatgctaagtcctattaaatggatgcccaacgaaatacaagaagtcagggtaatatggttgagaccgaaggcggtcagggaaatcaaattccccggaatccccgtggtcccgactgaggatgtagtagaattcaaggtggtcatcctgtaaatccaccacaagctcctccggattgggagcagaggttaacgaagatgtaagatcaatttcgccaacaagaagaagaaattctgagattaatgcagcagggtcctcctaccatgcctccacaacaagctcaggccgttgtagctccagcggtgccagcagaacaacctgttgctggcaactgtatggagccgttatatgagaggttctgtaagcaagcacctccagtgtttttgggaggtccagatgtgatgaaggctaagcaatggctcattgtgatcgagcgaatttcgaactttctgggggtagttggaaatgatcgggtgacttgcgccacaattcagttctaggaggatgccctagtgtggtgggaattggtgtccctcacctgggatgtcactgtaatgacttgggaagagtttcgagagttattcaatgccaaatattacaatgaagcagttcgcagtgctaagcagaaagagttcactgagttggtgtagactgagggtatgtcagttattgagtatactacaaagtttaaccgtttggccaagcttgcctcgggtatcgtgcctacagatttctgtaagaaagaaaaatacctggccggtttgaatgtgaaaattagacacgatctggtgattactaccaatgaagcaaaatcatatgcggagatggttgagaaggccttgcgagctgagggtgtgtaaaatttcttcaggagccccgagtgactccgagt

SEQ ID NO: 139380 - DNA, 925 bp, Cannabis sativa
tcattgttatttgatagataaaattataaaacataacataatgaaatatggtcattttgtaaatactatacatacttgcaaaaatataagaaaactttgataagagaatattcaaattgaattagattcaaaaaaattacctgtagaatctctgcaacattaggatgacaatctggaccgctaaaaacagtattactagatttcaattcatttgtgcactcgtgaaaattccttcgggaaaaagtgtttttactttcattcaaaaagacaagatcttcgctgctttctttagcattctctttttctccacaagttctcttctctgcaccaccattctccgctaaccataatacaagtttctcaatatttttgaaacttgtcttcaactcgagaagatctgtaaaatattgcatgaacacatcaacttgttttctcacggcagctatttcatcttttaatccacaattctcgtttgttatttcagtaattttttctctgatttcagcattttctttcttaatttcgacattttcttctctaatctcaacatttaatgctttaagagaagcactctctttcattaaatcctgcaaacatataagaggcaaaacacaaaatcttttataaatttgtaaatagtatgaaaagactaaaaaataataatatatgaaataagaaaataaaaataatacctttaacaaaatggtgtgttcatctttattcatttttagactagaagaatgatgatttacttcaatctctttttgcaaatttgtccttctatcattcattcttggactagaagagtcgtgatttaatccaatttgctcagcggttgtacttctattatcatccacaggagccaaaggaacacaagtaatctatgatcaaagatataagaataaatttttcaatgactaaaaat

SEQ ID NO: 139381 - DNA, 1321 bp, Cannabis sativa
catataagctcaaaagcatctctgctcttgcagtgcatcatgtgacgacaagcaagaactgcactagtctgagactcattcatattggaagatagactcttcactaacttcacctcacatctgcaacaattctcctcaggacaggtaaatgaattgaaacagattgaagcatggttaatggaaacacattctagttaaaaagcttacccatgaacgattacttagaacatatttaagcaaatcaagattgcatgacatatgcaatgccttccaaactgttagaccctgcgattagtatggtgggctagcatatattaaatagaagggtatttgagtctttgtttagagggtagtgtttaggagaaaatacaatagtatatataggtgagtaagataatagagagggggtaatgtattgagtaaatttctatttgcaccaaaggggcctaagggctcccttactttgtaattgggtttctcatacattcaatatacatttcctattgttttgctactgttctattcctattattgctgctgtttgtgctatttgctactgtttcattgtgtacttgagtttggagttctcgggacttatcacaaacccttttgttggtggtcaaattccccaggaaaacaaaaaacaatgaattcttcatctgcatatctagttcaaattcctttgaagacttggctttgaaattagtagtagagttatagctattatcattcccgttctcatcctccgtggtggagctactaccagccccgtcctcatcctcaatcctcagtgactgataaagaagtttgcaacttctacacaaaaaccaaatgaatggtaaaagctcaatgagcttgtttttaagagttttatagtcaacactcacaaattatagtaagtgagatttggaagcataagaaattttgaaatgtaccaataatatatacacataagaaatgatttgcttacatagcaggaaaaagaataggaggactaaattcaaactacatagacaaacaaaacaaattagtttagttatataaacgacatttgtacctattaatctcataatctcatacttgcatcaaaagtaagcaattactagaaatggattttcccctatttcataatctaatccatgcgtctagaattctgtcatcacaattaagaatacacacattagaatttcaagaaaatttaaatgggaaattttcgtatatatacgtaatttacaatctattaacataaatgacgttaattaatctaatgcaatcctaataacgtgacacgtcatcacccctaccgtaaatccaaaataaa

SEQ ID NO: 139382 - DNA, 579 bp, Cannabis sativa
caaattttgtccccttttattaaaaaagttaattttaaaaattataatattctgatttttaaaataattataatattttattaattaaaaaataataaaaattattacaaaattagataaaaatattaaattaatttaaaaatattaattttgacttcaaaaaatatttttaaactttattttagttatcaatacgcatcttaaaaaattaaaccaaaattattgagaatcttaaataatttaaataaactaagatcttttgaaaaaaaaatgaaacttatttatatttataaactcatatcttaaaaaataaagaaaactaattgaaaattcaataaaaatataaaattattttgaaaaaaaattataaattaaactaaaaaaatattattgctgactgttttattcatagctaagtggtcttagttctttatacagctacaagccgcaacctcatatatgaataaggactttttagatttttacatataaattattcaatgataaatataaataatttaatattcaagcatatatcaaactattcaactctttatttaataattagaaatatcttta

SEQ ID NO: 139383 - DNA, 592 bp, Cannabis sativa
aacgtctagctgagcgacgataaaccagcgctattgggaggcaacccaatcttttaatttaattttactttattttttcttttgaattctttttagaagacatttacaagtgttttgtagctttttaatttgtagcattttggatcgatttgcatttgttagttttaaagtaaaaccgtgaaaatcgtgaaaaaaaaaatgcaaatgaaggccatagctacagtagtcgcgacgggagtaatccctgtcgcgactggaccttctacgtgaaaaaaaagggggctggctacagtagtcgcgactaacacatagcccgtcgcgactactgaacatcacgaaaatttcaaaacccactgcctattctagtcgcgacgggacacatagcccgtcgcgactggaccacgttttcagccaataaaaaccccaatttcacccaatttcaccatttcacctaaatttcaaccccaacccgattttccccttttctcagcctttacaacctcattccaccattaatcctcaaatttcttctcattctcttcaaatcttccatccaaaacaccaaaaacacaaatttctctcataaatcttc

SEQ ID NO: 139384 - DNA, 838 bp, Cannabis sativa
taattaatatttatagctttgtttgataatatatcatactatttattgtttatatttcatgtgcctttaatttaataattaactacaaaaaatttgagtattaccggtagggacacccgccggtaataatagagcaggccgccgggactaattaataccggcagaattcgccggtaataatctggcggtattaattggtcgctataagtcactattagcgacgaaaagggtcttccgccggtaataatattaataccggtggattaatagcggtggagtctgccggtattaatatctgtacttttacacgcagatacattaataccggcggaccacaatcagtgttccaccggtattaatatttataaatattaaaaaaacaaaattttaaatattttataattaaattaattataattatatatataataattatttcataaatatattattaattagaaataaaatattaatattaagaaattaagcattaatattaatttgtccattacaaaataaactatattatcttaaataaaattaagaaattgtctttaaataaactttaaaacataaaaattaacataattaaaaaaaacctaactatcattgttcaaatcagtatatttaaaaattcatctgtattcgagctaagtcttgaaccatcaagattatcacgggattgagccggcggggcaggataataaggttgtccagtctgcggtgtaggtaagatctccacaaattgtcgagtatgcgggcgaaccagaataggttgttgctgttgttgctgactatgtgcactgaaaatctgaccatacataggctgttgtggaga

SEQ ID NO: 139385 - DNA, 966 bp, Cannabis sativa
caacaatggtacttcaagttaacaccaggaaggttcaactcttagaaagccttctcctcggagtttcatgcacaattctcttcttctccccaactcccactgcatttagaagaccttgtcgaagtaaagaaaagactaaaagagtctcttcaagcttatataagcagattcatgactgaggccacaaaagtggcacgattgaccgaagaagggaaggtagctgctatacttgggggcatcgagattcttggagaactatggaaagacatcaagaaaagtggtcttatggactctatgagtgatttcctcgaccgagcagatggtttcatcaagctcgaagaaaccattcaacgagcatatgtcgaacctagaccaagccaaccacaggctccttcagatggaacgtccatccaaaacccccaataccctagtagttcaaatccaggcagtaaaagatctaataacaacgacagacaaggcaatgggaaaaagggaaagttcgcacgcaaagctgaacaaacccctagagagaatccttccaagttcactgctttctctgttctaagtgacgacctagagaccatctacatgaccactcagccagtagttccgtacaagaaacctgctcccatgaaaaaggacataagtaaacgggacatgtccaaattttaccgttttcatggagattttggccatgacactaatgaatgcaacaatctgaagctggaaattgaattcctgatacgaaaaaataacctagatgggcaaaaatatgtcaaggccgaccagaatcaaagggctgcccaaacagtgaataattaagacccgttactgccaccaacggtggacaggcatttacaatcgagggcccacatatagctggagattccggcaaagctcgggaaaggtatgcccaaaccttacaacatgaacaaaaagaagtggttctagccgtagaggaaagga

SEQ ID NO: 139386 - DNA, 1610 bp, Cannabis sativa
agagatgatattgtatttgaaatgtggggcatataaaacattagtcaatataatgttgttttgtagaacaacagatccactttgattcacagtaacactatcattgtttggaagaattaatttggttggtgttgtcttacatatacattgaaacattttaatatcagaacatatgtgtctagttgctcccgtgtccactatccaggaattcaaaaaaggagaaatagaatggtgtgacagaatgatacctgtattacctgctgaagtactaggatcattaccattcataccattagtttgagaggcgagtaagttgagtagttgctggtactgagccgaggaaagctgagggagaatcgcatgattttctgatgcagcagagttgttttcttccccagtttgcacctggtttgcagcagcctccttagatctgtttgttttgcttgttaaatcccgcccggggggggatatccatggattttatagcatttttcaatggtatggccgtgtatattgcagtgagtacagtatggacgatttcttttaggaggatgggattttctggattgattatcatccttttggttccctcttttgtccccttggaaggcaaatgccatggcagagttattgctgttgttgtttgaggtagttcccctttgatgttcttcttgagtaactagatgaaatacacgatttatttcaggcaaagggtccatgagaaggatgctacctctaacttgcgagaaagaatccgagagtcccatcaagaatgacatgatgtactccatgtggtagtggtcttgaattctcttgactcctccacaagtgcatccattacaagtgcatgatggcctgtaattggttagttcttcccatatagttttaagcttagtaaagtatatgctaatggtatgattttcttgcttaagattcatgagatcttttctcaaattgtatatatgaggaccatttttctgatggaaacgggtctttagatcattccaaatacccgatgcacattcatcataaagaatacttgaagagatttccttggaaaccgaattcaagatccaagaaatcacaatgttattattacgataccaagcattgtaaagattttgatcagaaatagagggtttaggaatagaaccgtcgaggaatccgattttgttcttgacagaaattgcgagctgcattgccctgctccatgagacatagttgtcttgtccagtaagtggttgagacaccaaagcattccctgggttgtcaccatggtgaagaaagaaagggttggctggatcctccaatggattcttgatggaagtgattcgaagaccttgattagctcgatttgagggatttccaagatctgcgacttcagaaggaacactggtttgagtttcgtctgtagccattgagtggaatcaatgtacagagaaggaagaagatcggagaagatgaccgtgaaatacacagcgatgccggagaaaggaaacacgacagctgggaggatcggacgggaaagcctatctttcccgctctgataccatattgagaaaactgagatgaatgttttgacagagaagagagaattcttaaattgatca

SEQ ID NO: 139387 - DNA, 2374 bp, Cannabis sativa
  modified_base (757)..(765): a, c, t, g, unknown or other
  modified_base (1227)..(1230): a, c, t, g, unknown or other
  modified_base (2183)..(2184): a, c, t, g, unknown or other
ttcattcaaatttcaaaaaataaccccaataattatacccaaaaaattaaacaatctttacgattaacccattcatcacccatacaggcaaacacaataaaagcttctctctcaatttcacatattttcatatttctttctcatcggttgcaattctgttattttacaagagtgtccaagctaaaggtcagaatataattactttttcttttcatttcaagcaaagatcactccttatataggacaatatgctctgacaataggggtgttcgaggaacaaatgcaacatatattataactttattattattgtttccaatatatttttactaacaatatactagtatatatataaaggagaattataaggcgatgatgtgtcatttaatatcacttcaaatagctttatctattctctccttaattctctcttttattaattttttattagatttataaatatttatttattttcttatatttttttttatcattttattattaataattattttaattaatatttttttaagtttttttctataaaaacgtgactttcttttatataaaaaaatctacatatatttattttcttatatttttatcattttacattaattaataatttttttaagtttttttttttaatttataatttttatcatttcaaatctatatcatcattcatcacacgtttatagccatatttttaattaatttttttaatctaccccaagtcatcatatatatatatatnnnnnnnnntatatataaatatatatatcattaaccaaaaattaagtcatatctttttttcttcattatattaatcttttattactatgtgtcttctttcaatctctaactgccacattttttattttttattttttatacacttcatgattgttattattcattctctttttcttagatagcatcaaataatcttttttatattcataaataataacataatttgtaagtacatgttcaatttcataatcaaatattatatagcaatctccaggggcggagtcagaactaaagagttgggggggccaatatcagacagtgcaatatacaataaatttaaatttcgatgattttaataccttttaaggatgtgtgtcaattataaaaaatactgcatttttaaattttataaatattttatacaatattttttttttaaaaaaaattaatcaaatcattaaattaaaaatnnnntacgagtgttacgctaaaatttgacggagtttattaatttaattatcaaaattaataataatatgttatttctttaggaaaaaatacttatattgactttaagaataatataattagttaattttactactatttattaaataatttactaaatatctttttaaaaattaaaacaaattaattaagtctaataaaatagtaatataataatttactatttattaaatatatataattgtaagacctccattaatatataaaataaaactatatatattttcttaataataaaattatatttaaataagtaaatattaattttttagttcttttatacatgaaaaattatgtattaatatctttttatatgtgattatatatatatgtttagtaaagcaaattttttaaaattcagggggccacagcccctataggggtatatgtggctccgcccctggcaatctctctctctcctatcgagtcctagcatagtctatagcagaaaaaactttcgacaaagaattaaatgaattggaacaattatcttagttttataaaattttcatgtttttaatttcactacttttttcttttatttaacacactggttgtatctttaaattttctttgaatgatatatttgaagtattatatcaatgatatatttcatatgattttttaattgttattctaactaaatattaattctaaattttttaatttctgttattattaatttttaatttgtttcctaataaattataaaaaataaaatgttattatgttagatttatgcagtgtagtgatattttgatttttgttcttttaatatgttattaaataatactaactaaaaaatagagaaagaaagataaaatagatgggagttgattaaattaatatataaataaaattaaaaaaaaataagagaatctatatatctatatatatanntatataaaggagaagtatgagacaatgatgtagcggtctaaaatctctttaaaactatttttctttcttctccttaattctctcaattttttaatataattaatactttactattattctaataattttttttataaaaatatctatctttttttttttttgaacaagaagaagatctttattcaaacag

SEQ ID NO: 139388 - DNA, 992 bp, Cannabis sativa
ggtattcgtaccaaggatcttctactgagtgatctgctacagttggagagtctcaagaaattagggattcgtgtggatcgaaattttgacagattcctacacaagccccaaactctcacattcactcgtcttcagtctttacaaatgaataatcgttttggcaccaagatagatattgttcctttgatattaagctgtcctcacatttataagcttagagtagagttgcctataataagattaccagaagtcaaccaattctccccaaatctcatcaagttgaagttgactgggctgttacttgaggatgatccaatgccaacattagaaaagctaccaaaattaagagtccttgagattggtgttgatagctttagaggggatgagatggtgtgctcaagaggaggtttccctcgacttgaatctctgaggcttattagtctagaaaacttgaaagagtggaaagtggaggagagtgcattgcctacacttgcctatttgcgtatttattgttgtaggaaattgaggagagttccagatggagtaagaaacattgttacactcaatgagatggtcatagattatatgcctaagaaattcaaagaaaggatggaggaaggaggagacgatttccacaaagtcaaccacgtgccatcacgtgtattcatggaatgtgatacaggtacatatctatcttttgttgttaattccattcttttatttatctgtactaaaaaattccccaagggttattttgctcttttatcattttagtttatataactatttatatataattttattattttcttttatgtttttgtagtgaattgaaaaacaagtatcttttttttaaaaaaaaaaattatatatatatactaattaaattgtataccctataaacagttaagcaatcaaaaattgatgtgtaatttttaatggggttttttcattagtgtacaacaaaaacaattatattacaaaaaatgtgc

SEQ ID NO: 139389 - DNA, 513 bp, Cannabis sativa
aattccttatctaaaggaagagttagcactgaagcggtaatcaagcgctgctttaaccccagaaaacgtttctcacaccgatcagtccaaacaaactttaaattctttcgagtcagttccgttaagggtacaacaatctttgaaaaaccctcaacgaaccgacggtaataccgaactaaacccagaaaacttctaacctcaatagctggatttggtgttggcgaatctcgaacagcttcaattttgacttgatccaccatgatcccatctttatctactatgtgccccaagaaagagagacgagataacaagaattcacacttttgaacttagcataaagcttatgatcccgcaatcgttacaaaatcgctctaagatgcaactcatgctcttcttcttattctgaatataccaagatgttatcgataaacacgatcacacatctatccaggtaatccttgaatacccgattcataagatccatgaatatcgtcggggcattggtgagtccaa

SEQ ID NO: 139390 - DNA, 574 bp, Cannabis sativa
  modified_base (470)..(473): a, c, t, g, unknown or other
tgttaatcaaacataattggtagtaaatctagatcctggtaaaatatttccaacacgaggtaccaaagaaagcgacccgtatcaatcgtgaaggtgcttagcgtataatgaacaaactaagtgtaaaagtcacatcgtctcaagagcaagtaagtgaggtgaccatctcgctataggaagactttttatagcttcatccagctaacggtaacgaggcttacaaccctggcgagtcaaaatggttctttgtaaataagaaccgcgatcgacgccagacatacattatcgaccttggaaagaagaatggccccatctcgttattaggatcattgtaaccaagtttctgtcgagacatctccagatacaacaattaaagacgtgtttaatacacgattattttgacccagtaaaagtgagaaaatcagagctatacgatttttaaataataaaccgcatttacactacgtgannnntaatcaaatcccacgattttagggataattgctataaacatattccagttaactttgtaaataattgtccactatgtaataataaatagtgacaaacaaga

SEQ ID NO: 139391 - DNA, 597 bp, Cannabis sativa
gtgactataccgcgccaacttgttggaacacacctgaaaaaggacacaccagatatactatataataatatagttcataagcacataaataaattaaattcacagttttacccttctttgcttaaaattactaaaatgccccgagctcaccaacggggtctgaacatgtcattgctcaaattaattcgcatataataaattatataataatataattctactgtaatactcaattaactagttaggattttgctaatccatttcattaatcacagggtattacaattaccccctccttatagaaatttcgtcccaaaatttacctaaataactttgaatatttctgttgcatatacgtctcgagttgccaggttgccgcttctactttactgttcctccataacactttcaccagtgcaatcgtcttgtttctcaagactttctcccttctgtcaagtatttgcactggttcttcctcatatgataaatttgactgtagttctgatgcttcataactcaggatatgggacgaatctgagacatgctttcgaagcattgaaacatggaacacatcatgtacagctgccagcgctgggg

SEQ ID NO: 139392 - DNA, 2722 bp, Cannabis sativa
  modified_base (1663)..(1665): a, c, t, g, unknown or other
ggggaagccgatgaactcaagaaacaccgtctgcacatagcttgaaaaagaccgtctacacggagctcggaaagagaccgactacacatagcttgagaaagatcgggtacatgtagagagccttgatctctgtacagacctcattcccctcatcatcagaagatcccatttcctgaagctgagatcttttcaccagccttaggaaattcctcgatacaagaaagacgttggcgcaaaagtcttctggcacaggtttgggccttgggtttgctggactctctgatagaaaccacgccaactttcttcccacatccacctaaaaccatgccaattttcctctggaattcctcatcatcttgaggagtacatttgagatcgttcacaagatctataccctcagggatcacttgtgaggatcggccatggcaggctacagggtttccctagtttggattggtcgaaagctcctcagtcttagaatccatcgtttccagcttcaagtgaggcttgaagtctgtaggaacaaatggaaatgggttggtgtgtctgggtaagatgagtttggaaagatgaacttctgaactcaaaagggacattctagcaggaaagagatgatccattctgaaaatggaccgcaccaaaaagccagaggtttgtgaaaaatgacaagcttgagccaccgttttatagacaaagttcagtgacaagaaagctaaagattgggaaatctgatgggtggtgaaaatgattttggtgaaaatgcgctctgtaattataatgaagagaaaatttatcatgatcctcgaaaccgtacaagcaccagaatcaaaggatgcgttttttctaaaaaatgatttttgtgaaaatgcgctctgtaattataaaaaagctctttttactaaaaaagagctttttaagggacaattgttatacccaaaatttggctgccacctccacgttggacacgtgtcaggataaagggaatgtgaaacaatgcaattgctcttatggaataactcattaattacataagagtcagagtatatttgtaacctgctgactgtaacgtcttaggcaaggaatcaatttacaaactggcacttggtatattaacaagaaaggatatgtcgctaaatgtgaatagcgaggcaccgaagagagtgacacatatcaaatataaaaattatttgcttgcaatgaacaaactaagtgtaaaagtcggattggctcaaagaacaagtaagcgagattaccatctcgctatgggaagacttcctatagcctcatctagctaataggagcgaggcttacaaccctagcgagtcagaagacttctttgtaaataaccgtgatcgacacaagacgtatattgccaaccccagcaggaagaatggcccctactcgctattgggatcactacaatcaagtttctgtcgagacatttacagttttaacagttaaagacgtgtttaatgaacgatagttttgatccagtaaaagcaggaaaatcacagttatacgatttgcaaatcataaaccgcatttacactacttgatatgtaatcaaatatcacgattttaaggatgattgctgcaaaattattttgaccaactttgtaattgaatgtccactatgtaattataaatagtgacaaagaacatnnnaaaagggatgaaaaaactcatatgaaagaggcctagaaaaatactctgaaatctgaataagattgacttatgaactatgcagaattttatctgcaatatcacgtaaaaatcttgtgttcatattatttacttttctatagccttcatttgttctttaagaaatcatcactgtgaggctcaaatttagttaacaaaaatttgcgttaacactaggcattctggttatttcctggtcatgtggccatgataccaactctagggatttatcccgtataacgatagagtcgtctctcgagcatttgctttgtcacagaatattcgtagtgtttactaacaatatctcaggaaaagtacttacatgaggcaccttattagtctcggaagtacatctgagtgttgagtagctcattgatcttcaccctccaaattagctcattaatcttcaccctccaaatctcataatctttactttcatagtagagcttttggtatcttcccctatgtatgattgtaggtccctttctctttgcagggttacagggtggtctagattcattagacttgtaaagagaatccgacagaggagatcgatttcctatattgttcaaatttctttgagtagaattacggctggtcctatcagctacatgtggtggacctctctgtttgcaatctcgagttttagtcagtttcgacgttcactcgtagctcatttcccttacaggtgattgctcttatcatcggaggacccatagatccacgttcctaagttttagtcatttcagatgctccctcgtagttcacttccttttggggaatcccaatgcctgctacattattagcagtggcatggctaccaagtgtggtagtgtgggtttgcgtgttcatggatgattaattgcttgaacttatgaaattttttcgaaacaaagtttctagaaaccaattcaaactatacttggggaactcaaattgtgactttcaatgaaagcaccaaaatgttgacttttaaaactggccaacacaatctcgatagattagcaagatgaatattgag

SEQ ID NO: 139393 - DNA, 539 bp, Cannabis sativa
  modified_base (219)..(223): a, c, t, g, unknown or other
tgttgcaaggccttccaaaaccttgatgtaaatcgaggatctctatcagaaacaatgcttgaaggcactccatgtagtcgagctatattgtgtacataaaatgagcggacttagtcaaacgatcaacaatcacccaaacaacgtcatgcttcaaaggtgtcaaaggcaatccagtaacaaagtccgttgtaatcttgtcccacttccattctggtatannnnnaggttgaagtaaacctgagggtctctgatgctcagcctttacttgctgacgtactatacacttagctaaaaagttgaccacatctcttttcataccttcccaccaatactgtctctttaaatcttggtacatctttgtacttccacaatgtacaacaaatttagatatatgggcctcaatcaaaatggtctccctaggatcagggataattgcaactactagtctccccatatggtatagatacccttcaccattaactgtccagccgtctagttgctcaccatcctagaatcggttccaaataagtcttagcttt

SEQ ID NO: 139394 - DNA, 1310 bp, Cannabis sativa
  modified_base (365)..(369): a, c, t, g, unknown or other
  modified_base (834)..(842): a, c, t, g, unknown or other
tttaattaatttttgatcaacttacattagaatatttttcttagatattaaattagaattaagaattaagttgattttattcaagaaacttaattatttgttaacaaaatttaatacatataattaaatagaaaattaaatgtttaagtagattttttgtctatgcacttaaatattaattatttttcagaatatttaattagatagaaaattatatttaagttgaaaattttaatttcagaacaacttaaattaaaataattttctaaatatatttaattttattttattaatcattttaccaacaatttcaaaattgcaatttttaatgtagataactttgaatttttttttttgaaaaatannnnnaagttgaaaattaattattttaaattaattttggatcaacttaaatcaagtaaatttttcattaatgatttatgaaaataaatagactaaaatatattatattttaattagaaaataagtaattagttagtgaaagatctagatagttattttctgtttacttgaaatatttttctagtgatatctaattaaatagaaaattaacaattaagttgattttattcaagatacgtaaatatttgatatttttcgtagaaattttattaaatatgaaaattaatttgtgttgaaaattaattttggaccagcataaattagaataatttttcaggatttattttattttattttaggccaattttcaaaatgtacttattttaaatacattggatttcgaattttgcattatatatttatggaaaatcaaatttgagtatttttgaaatatttattgagaattattannnnnnnnnaaaataattttatttattttcaaatctatcgaagtattattttataaatatgaaattaaaatttatatttagagttttctaaattcgtaattttaattaattaaataaatatatatgtaaaattaatagattaaaataaatattagatgaaaatacactttaattaatgagctttattataaggatattcgatcttcattcttggttctacatagttcttgtgctagtgaataatcatccctaagggatgaacgtattggaatatattttaccagtatctagatttactaccaagtatgtttttaacatcctaatatgaattctaaaacgatgaaaataaacacataaaaggtatgagaaagtttacagtaattgcatcggaattaaatgactccttctgctcagatctctaaaccttgtatcctttctgtcacagagtataatcaagatctgagcccaaaactcctt

SEQ ID NO: 139395 - DNA, 1301 bp, Cannabis sativa
atcactacaatcaagtttctgtcgagacatatccagattcaacagttaaagacgtgtttaatacacaatagttttgacccagtaaaagtgggtaaataacagttatacaatttgcaaatcataaaccgcatttacactacttgatatgtaataaaatcccacgatttttgggattattgcagcaaaattatttcaatgaactttgtaattgaatgtccactatgtaattataaatagtgacagaatataaaaaaatgggtggaaaaaactcatatgaaagaggccctgaaaaatactctgaaacctgaataagattgacttgtggattatgcagaattttatctgcaaaaccaagtcaaaatcttgtgttcatattctttacttttctatagcttttctttgttctttaagaaatcatcactatgaggctcaaattttgttaacaaaaatctacgttaacactaggcattgtggttatttcttggtcatgtggccatgataccaactctagggatttatcccgtatgacgatagagtcgtctctcgagcatttgctttgtcacagaatattcgtagtgtttgttatctagatctcaagaaaagtacctaactgaagcacattattcatctcggaagtacatttgagtgttgagtagctcattgatcttcaccctccaaattagatcattaatctttaccctccaaatctcataatcttcactttcacagtagagcttttggtatcttcccctttgtctgattgtagaattacggttggtcctattagctacatgtggtggacatctatgtttgaaatctcgagttttattctgtttggacgctcactcgtacctcatttcccttacaggtgattgctcttatcagcggaggacccataaatccaccttcctaagttttagtcatttaagatgctcgctcgtagttcacttacctttggggaatcccaatgccttctacattatgagcagtggcatggctaccaagtgtggtagtgtggctttgcttgttcatggatgaatacttgtttgaacttatgaaatgtttttgaaacaaagtttttagcaaagaattcaaactgtagttagggaactcaaattgtgactttcaatgaaagaaaaaaaatgttgactttgaaaagtggccaacaccatctcactagattagcaaatgaatattcagtttaagtaaaaaaattagagagacacagacaatttatagtagttcacttcccatgtcgcgatggtaatggagctacctctactttgagtttttatttctca

SEQ ID NO: 139396 - DNA, 1094 bp, Cannabis sativa
  modified_base (192)..(193): a, c, t, g, unknown or other
tttgtaaggcaatatgtttagttttgtaagtggcttgttttttgattttgtaaggccaatgtgactaatttttttgtatggccaatgtggctagttttttggttgtgtaaggtcagtatggctagtttcggttttgtaaggctagtatggctagtttttagttttgtatggctagttttaattttgtaaggnnagtatgactaattttagttttgtatggctaacatggatagtttttagttttgtaaagttattatatggctaatgttatttagtaaggtcagtttggtctaataataacacatcaaatgtagtgtattcaccgttagcaatggagatgaaaatagataagttctagtatttacttcagagaattctatgtgactatttatataaaatttcatattttaatttattttattttatttgtaagggaaatttcatattttattaaacatttatcatgtattaatttttctcttttttttctttgtaggtgttctattagtggggcagaagtgacaactctcagttttgatgtttttctgatattaaggttttattgtctagttctcctgggtatctctacatgcccttaggttaaacaatgaatggtttagacagaagaaaatcctcttcgggttgcgtaattttattacttttgttattttaacctgtatcggtttcccttaaaaaaaataataaaattttatagacaggttaatagaataagttatttaaaaagtgattagctgctaacattaatattgtgctaatataatataatatttttcggttttaaaaattaaaagtgcttattgcttttaaactatttcatttgcaggttcttttttcagttttccaggcagaagcagttgcgttactagtagatttgcgttgagctcaagatgtgggacttcccgtggagagggttttttttgattcactttctttagtctcaactttggagggtcagacaatacatttgcatgatctgggggttttcttttctgatattaaagttttattgtctaattttcctagggcatctctctctcatgtacaacaactttattgttgaggttcatagattg

SEQ ID NO: 139397 - DNA, 591 bp, Cannabis sativa
  modified_base (138)..(157): a, c, t, g, unknown or other
ttttacctataagtaaaagtaaaagttttagttttaagacctattaacttaaataagttaatatgttatgggtcatgcagatcgaataaataaaccaattgatcacattattgcataaattaataataataataatannnnnnnnnnnnnnnnnnnnaataataataataataatgaagttttactgttttattcttcatcatccccattaactttacatccgtaactacaaagctatatatatatatatggctaattaaaaaaaaaaattccccaaattttaacatgtactaaattatgccgctaaatttttaaattcgttaaaaatatcccttgaactattgaaattgttaaatataagaacttttatctaattttagtaaataaaagttaagtggtatgattttatatatatcaaaattcaagaggtatgatttggtagatatcaaagtctggaaagtaagctttagagcataaccaattactgaaatagtaaaattgaatgaaattagacaaaagtcgttaaatctaacaatctcaatagttcatgagtaatttttaacggctaaaaaagttcaaaaaatataattt

SEQ ID NO: 139398 - DNA, 1150 bp, Cannabis sativa
  modified_base (448)..(455): a, c, t, g, unknown or other
tttttctgtgtgaaatcactattgtgaggctgaaatttagtcaatgaaaatctacgttaacagtttcgtgctttcattaagagcctctgtgaaacaactcagaaaaggcctcctgacctaaaagtaatggatgacaccgaagatgataatcgttaagaagaaatcagtcatcaccctgaaaaagacccattgactcctcagggatctattgagtcctcacatgaatagaccgcaagccccaggaaaacccagtattggggtgccccacttgatggaccttgggtaaacaacaatcggccacttcctaaccaggttgaacaggatggtgcctactaatgacctcgcttttagccaacgacaatgagtctaagttagtaagcaacaagtagtttataacgattggtatataatagagcaatatatggacacaagaattttatagaggttnnnnnnnnagcagttcggtaatagcctaatcatcgttatttgcattaactcaagaacaaggagaaaggttcctttccttatagctcttacaaaaatatttcgaccctttgcccagtgaacatgaatcactatttatagggctatgagcttggaggagaagtatttcccttctcgtcacaatgtatataagtagaaagattgcatagtaaatgtggcatacactgatcgtaggatttggacaacttgccatatctttgcaatctgatccccaagttatagggatttccttgataactcacgatgcgaaagctgaattcgctaagtgttggttgcgctatggggattgctgatcgcttggctttgagcatgaatatgaggtatcctgttcggactatatcttgcgagcagatactcggagtcaattccacgtgtcaccatcatgtgatgccacgttagagtgcaaaaattgggataagatttgcccccgaaggctgtacgggacttccaaagttgcgtctagacttcatccaagctgtctttgcgttggaatgggtgacacatgtcaagcgcgtctgttcacgactcgatgtgaggctgaatgggcggtccttcaattttcgactaataaatgctctgacaattaatatttcaaaatctaattttctctcaccacagttgacagctacacttgattacttttgat

SEQ ID NO: 139399 - DNA, 1019 bp, Cannabis sativa
  modified_base (945)..(951): a, c, t, g, unknown or other
ccagacccctccgcggctggcacttcccaactccagctcagtcaacagctgatctctctactcaatcaacaaatccaaggcgccccttccaccagtgaaaatctccccgtggtttctaacatcttcggtaatgacaatttttttcctctttttttatggattgtagatagtggcgctactcatcacatatatcactctcttcattgctttacatctttaaataaaaataatgttgctaacttggtcactttacctaatggtcatcaaattcatatcaacaaatcaggaactgttaaaatttctgaccaacttgtcttaacgaatgtcttgtatattcctgaatttaaattcaatttatttttagttaatgcttatcttgaacattgtgctaataaactcaccttcacttttgatcaatgtttgattcaggatccctccctgaattctacgattgggacaactaagaaagttggacaactgtttttctttgaacaggatcatccttttcttacaacggatatttctatttttgcaaacaatacatgtaatttgaaggacctctggcatttttgccttggacatatttctatgaacatttctactatcttaaataatcgtttacaattttgtgaaaaacttttcaattttatgtgttccatatgtcattttgccaaacaaaagcaacttccatttccatctaacaataattttgctagttctgcttttgatttaatacatcttgatgtatcgggtccttttcatgttactagtattgaaggttaccgatatttcttaactattgtcgatgatttttctcgctatacttgggtatacatgctcacttctaaatctgatgtttctttcattattcctacatttttttctctcattgccacccaatttccagtcaacattaaggctgttcgttgtgacaatgctaaagannnnnnnctaacagccttctacgccaccaagggaatctcaatcaataatttttgcgttggtcgtcctcaataaaa

SEQ ID NO: 139400 - DNA, 749 bp, Cannabis sativa
gttatcgtttctcttccacgcagcgaggttgaggcctcgtcatgcacatgtgcacccacatggtttctcattaacacataaattagcagttcatacgtatccgtctcgtagaaggctattcagccgaccgagttataaacatagcctgcaaattatatttctaatgagtcgttccatgctaagtgtactttttgtttgcgtgtttgagtacttcattcttcccaactcgacacgtgtcttcttctaatgtgcttaccgaattttgagtataacaattgccccttaaaaagttctttttaatgattacaaagggtatttctgtcatgttcctcttttttgtaaagacgcatatcctctgattatggcggttgtgcggtttcgaggtacatcaaaattaaatgaccatcttttccacttccgctttgaatcatgtccataggatcaaatctttctcttatttaacaaaaccactatcatgggtataaaataagaaaaaaggaaccacctttacaccatttcagaaagtttgagaaaaaacccttaaacttcttcgtcaaggatcaccattaaattcgtccaaagacttgcatgccatccttgtccttgacctttttcctgcgagtttcctctgacttcatcttctcaaagcgatcctcgtttcgtttgaaggtttgcagacagaattaccaggcattgccccaagccctaacttcaaacggtaagttgctttcttctttctcatgtttgtt

SEQ ID NO: 139401 - DNA, 769 bp, Cannabis sativa
caagacctagacccgaatcgagacccaaacctagatcccaactcatacctagactcagtgccgaacctagacccaaactcagaccaaaacatggaaccagactcaggacacaaaattggggacgggacctagaaccgcaccccagtctcggtcccgaacccaaactcggacataggacccaggacctgaaccggaactagaccgggacaggtcacctggaccagatcagggactcaaaccaggacccaaacttgaacccagaccaggacccaaacgcggaccctgactcagaccccggagacggaactggaacctgaacaagaactgcaaaaccaggacccctgaataacactaggactgtgaccaggacccggacccaaacctagaaccgaactctgacctagccccaaacccaaagcgagaccaaaactcgagctcaaacacggtcgtgtacccacgctcggagctagagctggaccttgacctaggccttggacccgatccaagactcaaactcggacctcgatagggattcggatacgaacctagactcgaacccagacccagacccaggtcgggatcgaaactcggaacctagatccatattgagaccctgacccagacccagacctggacctgcacctaagaccaaaactcagaccaggacccgagcccagacccaaactcggacctagactcaaactaggacttagaccccaaccaggcccggacccaactcgaactcagacactgaatcaaaatcaaaact

SEQ ID NO: 139402 - DNA, 507 bp, Cannabis sativa
gagtggcaaaatgtgttttgacacatgtaaattttataggttagggctagaaaaattagcgttgcaacttaaattgcaacaaaaaatcgtatagaaatccttattgtaattagcgctgtaactactttagaaacccaaaccgtaaatttgaaaaaaaaagttaaaaaaacagtaataacaaatatgttagtaaaaataatagaaaaatgttaaaagacatattagtggtacttagcactctctaaaatattatatcactattggtgcatttaagtattgagttttatacaatttaatgttataacttttatgcaatattgctagctaattgtaagacactattaatgtctaataaccatgctaagaccatctccaatgggagatgtaaaaattgtgctatatttggtacaattagtaatttggtggtaaatttacactaaattttagttttgtgctgtaatgcacaattgcaaaattttgatgtaaaatttaatagggcctttttca

SEQ ID NO: 139403 - DNA, 566 bp, Cannabis sativa
aaaaatgatgaaaaatgacgatttacggtaagcttttcgaaaattgccaagaaaactagaaccttaccgaaaatgagttttatgcaacgaaattaaaaaaaaaaattccagtagtttgatgatataaaatgtgaggtgtacaaacttatggaatcgaaaaatgttgaaaaatgagaaattttggcgaaaaacactcttttaggcctaaaaacctataaaatcaacaagttgagcgccaaaaatttgtgtcatgtgtatttcagttagaacaaacctataggcacactaaatacattcaatttcacattttcaaacatatagacacagaagataatcaaatatgcaaaaattcacatgttcacttgtttgaaatcaagtccaaaatttaccaaaagttcacataatgacctataattttgagtttttaacaagtatatggtcaagtatcaagaaaaattttcatccatgcatattaatctcattaatatcatatttggaacgaatatgcataaataaataagtaaagagatatgaatttttcatagctagcaaaccttatatttcat

SEQ ID NO: 139404 - DNA, 651 bp, Cannabis sativa
ataataataataataaacttaaaaatatttatatattatatttaattcattttttaaaattgatatataaattatatattaaagataaacttagttgaaacgtattagatattgtttttcaagtttttatttgtttatatattaatttataattcaaatattttttatgattattttataatattagccaattaattttgtagtattgcatttgtttagctgatataaaacatgctagaatatatatattttattataaaaataaaataaaataagttttcttataaatgaatattacaaaaaagtgatgatttagatctttatttataatatacagaataaaatattacattttaaattacatcatttaatcaataaaaaaatattacaaaagtaggatcgaacccgcgcgaagtgcggcatagtcccctagttgtttaatataataaaatcataatattagaaaacacatgtgagaaataattaggaatgtggggaatttccctaaccactctcacttactattctattagcatgtggtaaatgattgtgtgaaaaaaaaaaacaaaactttacatgtaacgccctaaagttaaggcacgctacagtgctttttcaattaatgtgcaatctttgctaatcaaagaaatt

SEQ ID NO: 139405 - DNA, 578 bp, Cannabis sativa
attacttatttagtgtaatgcttggttcacatgtttatttcatgatcatatgtttgatatataaattctattaaatccttatcatattgttattcatgattattatgctgtctacatagtggaaaataatcaagattacgcgattaaactaattagtcccatgatttatcagtacactagatttacattgatacgataatcaacaatttagtttacttacacttgtatagtggaatgtcttttgcaaggcattagtaaagtaagtttgtattagatgtatggttatacattgaactagaccgatattcacagtggaaaagatatcataaacttactgaaatatattttctaagtaaatagcacttagttgatcttagatcactgatctcaatcatgagatgattaggttctagtttaagtgtattacatgtgttctttgactcgttcgttaaagctaactaattggattggctcaacgcttacatcttaggaacacagtagtgtaattgagtgggagcgataatcatagatatggaatctatagctttcataaatacatagaagtgaaacgatagttt

SEQ ID NO: 139406 - DNA, 585 bp, Cannabis sativa
atttgtagtgtaatgaacaaattattgaatcaagatcttctgttgaaaaattatattttatagtgtattaaacaaatttcattgtgccacattaattaattcgagcattttaagaaaaaaaaattgtatatatagatggttaattttttagtaaatgaaaaattaattaacctgtcaaatttaaattagtttaatacagtataacacacaactttttaactggagatcttgattaatcttctttttgtggctatagattattagtcatgatgattaaattatcaaaattatgaagttgaaatatataagaataaaaagcttaattattatataataatgatctagtatatattacttttaggagatgagaacaagtaagggggcttccgagacaagaagtgcaaaggtgttagtccttcttcactgtccgtactcttcaccacacgatttgcaaatttatcgtcattttctaccatcgatagtgctaaatctgaaaaaaaatatatatatatatataaatataaaaaattcaactttttcaattgtattaactaaaacaagttaatttataagaattttatggac

SEQ ID NO: 139407 - DNA, 593 bp, Cannabis sativa
  modified_base (238)..(245): a, c, t, g, unknown or other
aaaaaaaaaaaaaaacttctcaaatatattttcccttctgaattctactgctcagctcacccatacccaaatttggttgaaatccattgcttaagacaataaaagtagctcatagttatagttatggttctgaataaatatccagtagatgaaatacttctttcaaacaacaatattaattatttagtgctctttagatgagatgttattttccataaatattattattattattatnnnnnnnnttattattattattatatttctagaagcgattcaccctcacggaactttgttatttagcatattgcaatgagtaaatagcggcataaatacctaaaattttaagtttgtaaattgtataatctcaatgtttatcttaagcggcataaatagcaaatgtttgtaaaactgtaatttttctctaatttcgtcaatacaaactctgttattttcttgaacaggctacatataaatatatagaacttctctttgaaaatattttattcaaaaataacctttaatttgctataaaaaaaaatcaagttccaatttgagcaagttataaataagaataacctttaaattgtaat

SEQ ID NO: 139408 - DNA, 647 bp, Cannabis sativa
agaaactcgagaccagactcctgtgtggaggaaacgtgtactcaatttccctaaggaaagttgaggtgtcaataagagacttctcgagtttaagcctcgtctgagctaaactcagcgagatgatgcgaacatgaccaaagtctaatcgcatttgtgacgctcgcattatatgggaccaaggaacggattcaactttcatataccacgatatatgcgagtatcctctcaaacctcctgagaaaacatggataacgattctctataaagcgagctggtctcgatgacccaacaacctcaataaactaatatagacttgcatgtctaggttccatcagctcgttatacgatgtccataagcgcgattatgcaagaacgtagacatctcagacttaattaaatgttaggtgtatcctaagcccgcgagcttacaccagaatatgaacagccaactcacacatgagaagtcgcatacattgctgtatttagtgtatagaaactgttcttcatttattaatgtttacgttttagcttaattattgtaaatcaatgtatgaacagattggcaatgaatacaatccttgtaaataatcggacacttgctttgtatataaaggagtgatccaccgtgaaatgaacacctacgaaat

SEQ ID NO: 139409 - DNA, 570 bp, Cannabis sativa
tccaaacaccgactacgggttcggtccaagccccaggtctagatctggatcctgatctcgggtctcggtcaggttccatttcatgtgtcgagtcacgtgttggttcctagatttaagtctgggtttggggtcgggtcttgggtccctgtcctagtttcgttgcccaagtccgtatctcaattcttggtctatgtcccggattgggtcccattctaggtttaagcatgggtcctagtcgaggttcaggtttgagtctcgatctgggtttttatttgggtttgggttcgggtctgtgtcttagtcctgctcctcgtcctagtcctagtcaagttccagttccaattgcgtttcggagttcgagtttgggttcgagttcgggtcggggttcgagttctagttcgagtttgtgtttgggtccaggtcttggtctaggtccgaatcagtctctgggtgtgggttgggaccctgggtctaggtcaaggttctggtccgagtcctaggttttgatctcaatctgagtctgaggttagttctgggtctaagtcatgggttctgatcctggtctgggtt

SEQ ID NO: 139410 - DNA, 798 bp, Cannabis sativa
tatatatatttatatgatatgtatccgaataacaaacaagtgaaagatacgtgactttataaagaacaaattaaggttaaaaaatacaattatttttcactctctctctctctaaacctcatgctgctctctctttctcctcacttaatctcacgccactttatgtagtgttgtgtgtgagtttgtgtttttcactatctcatcacagtatctcatgagttgagaatatactgtgattaccaaaattatattcatccaattgaacctaatagctcactctattcctgagtgttgaggtgttgacttaaaagattgtggtgtaaactcttccaacaagttattccattggatgttcattaaatttatacaaaaagatagcagggaaacattgataggctacaagaggtattatttccttttcatgtagtttagatttaatctatatattattatgagtaaatccttggagattgtggttcatattggatttaaatcaatttttatattaaaaccacttctgatttcatctttgatatggaccataaaaactaacagagcatcccataatttttgtagcaatggtttcagtcattgatccgtagagccaacatgtaatgaccgcataattaaatcatgggaattaacacataattaaggagtagattattagattgtgattatatgttcttaatagaaaattagggcttattattagaaataggccttaggaaaataatttctcaattacagagatatatttaaattctaagtgtattatttatgttatatatatatata

SEQ ID NO: 139411 - DNA, 1581 bp, Cannabis sativa
  modified_base (539)..(542): a, c, t, g, unknown or other
tgacataaagtatgtaatcaagttcagtgtagtattcaccagtttcgtaacgaaatcaaaaactgatatcgaaatagggttctacttagttgtgctgatgtacactcatagtattgacactatcactataggtgtttaagggtcccgtgacacaaagtctgtaatcaagttaggtgtagtgtatcagagtcacccactaacggatactgaactagggttctacttagtggtactgatgtaaactctttaggtgtacagtctgttataaagttaggagtaatgtatcggagtcacccttttcgtaacgaaatcactaaccgatactgaaacagggttctacttagtggtgccgatggaaaatcgcagtaatgacactatcactgtagatgtttaggggtctcgtgacacaaagtatttaataaagttaggtgtagtgtataggagttactagtttcgtaacgaaataagtaaccgataccgaaatagggttctacttagtggtgtcgatgtacactcgcagtagtgacactatcacagtnnnngtttaggtgtcccgtgacacaaagtatgtaatcaagttaggtgtagggtattggagtcaccagttttgtaaaaaaatcactaaacgatatcgaaatagagttctactcagtggtgtcgatgtacactcgcagtagtgaaactatcactataggtgtttaggggtcccgtgacacaaagtctgtaatcaagttaggtgtagtgtaacaaagtcactcactaaccgataccgaactacggttctacttagtggtaccgatgtacactcgttaggtgtacagtctataataaagttaggtgtagtggatcggactcaccaatttcgtaacgaaatcacaaaccgatactgaaatagggttctacttagtggtgccgacgtacacttgcagtagtgacactatcactgtagatgtttaggggtcccgtgacacaaagtatttaatcaagttaggtgtagtgtatcggagttactagtttcgtaacgaaataaaataacaaaaaccgaaatagggttctacttagtggtgtcgatgtacactcgcagtagtgacactattattgttgatgttttgtgtcccgtgacataaagtatgtaatcaagttaggtgtagggtattggagtcaccaatttcgtaacaaaatcactaaccgatatcgaaatagagttctacttagtggtgtcaatgtatcactataggtgtttaggggtcctgtgacacaaagtctgtaatcaagttagggttagtgtaacagagtcacctactaaccgataccgaactagggttctacttagtggtaccgatgtacactcgttaggtgaacagtctgtaatatagttaggtgtagtgtatcggagtcaccaatttcgtaacgcaatcactaaccgatactgaaataggtttctactcagtggtgttgatgtacactagcagtagtgacactatcactgttaatgtttaggtgtcccgtttcacaaagtatgtaataaagttaggtgtaggtattggagtcaccagattcgtattgaaatcactaactgat

SEQ ID NO: 139412 - DNA, 1027 bp, Cannabis sativa
tatctctacttcggcttttgatttttatgagatggattacagaaaaatggctaagtgtggatgctctaatttctaaagagagaaactacagagaagttctctgaccttatagttactttttttgaatatgaaaaataagctagtggaactcttcttctataggtaaatgagatcttattaaatgtgaaaaaaccaaaataaaaaataaaaaatacatttagaatatttttgattgtagataatgatctaacggtaaaaactaacttctaaggttgattgtcaatttttggagtttgagtcgcaatgacaggatccgctctgggtaagctgaaggttaaattcataactccataaaatttggattcgatagctttagaattgcgattgaactgtgagacataacttgataaagtattgaattaaattcaaaatgcgagttgaatcacgtcaatcaaaataaatgagtgagttatggccattttacaaaaggttgttctcgacacaacacccaggttcacatcccagtgcccaggttgacaagtgatgtcaacttggacaatgggtcagtgggaaaacgagtgggaaaacgtaccggggatgtatttggggatgtattttttttgtatttttttgagtatttttttgatgcctaagtgatattttgacatcatttactccatttctgtgatctggcgatactggtcaccagttctcgaagatgttgatgttctgtagaaataggagactcgaaactacctggtttccgagtaaatcaccttgtcagaaaagtgaaaatgtgaagagaattttactgttatgacttcatggctctcaattattatgaaaaactagacacatggtcaaaacagaatcagaatcgaataagcaaaatccagcacaccaggccatttgtcaacctgggcgatgcgtgcttattttagagcttccggaatgtttttccacttcataggttcttgaacttgaagacgaggtctcctacccagtttttgaccattttggagagaat

SEQ ID NO: 139413 - DNA, 674 bp, Cannabis sativa
  modified_base (606)..(622): a, c, t, g, unknown or other
cataatgaatacaaacaagtaacacacaataattcaaaccgattacaattaaaaaataaagaggaaatcagttcctaacattgaaacataaattaaaacaaaactagttccacaaaatccatcataacacataatacctcataaaaccgattataatttttcttaaaaggtgaggatcaatttgaaaaaaatactgaggcataaatatgaaaagaaccgactccataacaaaataaataaacacaaataataacacgcaataactaaaaatataatataaaaacaccggttatatttatcaactagttaaaaatttgaaaaaaaaaaaaaaaactagtttcataaagcaactaagataaaagctcacacacaaaaattagtcaaataaaacaaatcaataaaaaattggttccttgaattaactaaataaaaaatcagttccctaaataactaaattaaaaactagtttctaaaataaataattcaagaattattttttgaattgattaaataaaaaaccagatgagataaattattaatacattcatattgggcacaagtcatgatatttcccgtaaaggtcttagtgttggaaattattttacnnnnnnnnnnnnnnnnntcataagtatgttgattaacaccctaaatatgaacttcctaaaacgatgaaa

SEQ ID NO: 139414 - DNA, 892 bp, Cannabis sativa
agtaaataattgataataggtgtcatccatgtttgcgagctatctatcatctcgacgtcttcagtttcacgtatacttggctcgctcagtatctctaccggaaccagattcagttcatccaggtcattctacgaggcttatttcgctaaggcgtcagtgttggagttttgtctctcggaatttgttcgattttaaagtcatcgaatctttccaaggtcttccaaaccttctctaaatacttcgccatttttaagcctttggcctggtcttccccgaggacctggttcacgatcaattgcgaatcactatgaaaaatgagatttttaactttcaatgcctctgctatctttaagtcagtgattaaggcttcatattcagcctcgttattggatgcgtcaaattggaatcttagagcatagtgaaacttaaagccttccggcgatattaatattacccatgcacccgaaccttgctcgttggatgtgccatccacgtataacctccacgttccctcgcctcgctgatcaggtggaatttcttctagagttataccttctatcaagaagtcagccaaagcttggcccttaatggatgttcaaggatggtatgttatgtcgaactgccccagttcaatcgaccattttatcaatcttccaaaagcatatggttttgataaaacttgtctcaagggctgatcgattaacactattatggggtgagcctagaagtatggccttaacttacgagacgcatggactaggcacaacgcgagtttttctagtgtgggaaatctagattctacccctaataaccttttacttacgtagtaaataggttgttggtgcttgccctcttctcgcactatagtcgcactaatcgcatcttccgagat

SEQ ID NO: 139415 - DNA, 1113 bp, Cannabis sativa
agatcaagactaagctagtttgcagcatgtatgggcatgttttgtatttatcgggacactggtgttgtatgggacactgtaagtcaaatgcttcagagagcatatgccgatgggagatagcggatagggatgacttcaagtcttaagagtatgactgggtgttatcaagtttgtcgaaagttagcgagtcatcagaggatgcaaggttgattttggaagatggacatagttttgagagccgagacaagcaagagccaaagggcaaattcgtggttttgggtgactgttagatcattgaccacgtgaaagaagcttagaggagcacgtatgcagcgagttagtggtaccttttgcatgaatttgtgggtgtgtggtagcaccggagggccaatgtagagaacttcgcgaagaaatcttgtgtaagagtgcacttggtgctgcattgggtgcagttggcttgcgagcctcgtccaggtgggacgcaccaaattttatcctacgatgagggtgtcttgctcaatttccatcaggaggatggtgcacaatagagtttttgtgtgaagtttctagagggacttagcttcagtggaagcgtattctgtaggtgtcgttgggtacggttggtttgcgaacatcaccccaagcggtgcaccatactcagtccttgtcaaaaggagtatgcattggacaattggcgggtgagctactatcagaggatgtgttctctttaggatcagtgttgtaaggctacttggttgactggtgggacgttgtgagggactcagaggagttcatgttgggagaagtattctagtgtggaggcactactccatgggagattctaaatagcgatagtggcacaggttctttgattgagtccaagagtgggcgaggagatcgtcaccaagagggtggttctacggaggtagagggacaagtgtagacttaggattcaggagaagcttgaagtaagcttaggagtcgagatgaggaagatttgtctgcggttcctcgatgagggcatcgacatgttaaagtgggggagaatgtaacatgcgtgccaagatggcacgttacaaactaagtgatgcccataagttggccaagtggtgg

SEQ ID NO: 139416 - DNA, 648 bp, Cannabis sativa
ccaagctttgacttcaaaactcaaacttggctaaagctcacctacaagcactaaaacctgctcaatacaccataaacaaccatattataaccccagaaatcaaacccaagcactatgaacaaacacagcaaccaattcttcaattttccatagaaatcataatttttgagttaaaaagatccaaacttggttaaaccatctagcatgcatcaaatctacctaaatccaatcaatttcaacatataaaaccacagaaaataacatataactacagcagcaacaacagctcaaaaactaaacatgcaactatcatttctcttcaaaaattccaagaaacatagaagaaagatagaggaaccttaccaacaattagagatcactaaatctggttaaaattagcttgaattaccaaggaagaatgctaagcttgctgctcaaggaggggccgaaaatagagagagagtttgagagaaaaagttcttaatttctttccaattttccaatttgagtaaaatgaaaacataatagcctaagtcctttcttatttcagccaacaaacattaaataaatcacatttacaacaaataataagtccactaaaggacaaaacataattggggcaagatgaccattttgcccctccacact

SEQ ID NO: 139417 - DNA, 651 bp, Cannabis sativa
tcgtcactctcttattaacactggcatcatataatatgctcttcttaagatagtaaagtgccacattcagatgctgcacacaataaacaaaacaataaccagtaaaaaattgaaaaagcaaagaaattaatgaaaataaaaacagacagaaaaaaataaccagttaagtaccagatcagtcaattcttcaccacaagtctgtaaaatcacaaaccaagacttgtcatcaatctgaggtatactgaaatctaagggaggagtaatgtcgccagcagttttctcattgttcctgaaatcacaaagaaaaaaaaaacctaaatgaaaaaaaaaccagttaaaaaacaaatctcagcaactattaaaaacaaaactaataacataacaataaaaaacatacttcttcttcatcaacctagcaccttcaatccacttcacatatcccccgcaatcatcagggccggtgttcttcccaatctctttaacaaagggaaacaactccttagggtcaaaagctaattcactagatgcctccttatccttcttaatctgaatttttggttcagaagaatcaaactcgttgacaaacggagatctacaatgcaatccaggttttgattgtctcttaaaagcaacactagattgcaaaggcat

SEQ ID NO: 139418 - DNA, 592 bp, Cannabis sativa
  modified_base (541)..(566): a, c, t, g, unknown or other
ttatatatataggcaactaaaatggacctagggtctaccgaaatgggctttggatttcataaatatcaattcagatatagtccaactcttcaaaataccattgtcacatataatatttcaaattaaaacagaataatctataactataataaaagtggcacaactaatttacaaagtagcccttcaactattttgagaaagttagtatctttctcttttatcatatatattattaaagagttttctctaaataatatatttataaatatacataaaatataattttttttgacaaaataaaacaaatttattatgtgattgtttttttactataataatattattgataaataattattacttaaataaaaaaaaaatataacattatatcctcattctactaaatttataataaaacaacactataattaatttacagaatttctatgttccactccctaaaattaagttaactaaatactccttttgtaatttcaatattaagatagttttaatattattttttttggctaattagtannnnnnnnnnnnnnnnnnnnnnnnnnactaaattgtgccccctgaacttttt

SEQ ID NO: 139419 - DNA, 596 bp, Cannabis sativa
tataaaatatccatatcaacaacatgtttattaaacaacaagacacttaatcctttggttagaaaatctgcaaacatcgacttggtcttacaatattctatcacaaggtctctttttttgactaattaagtctctaagagtgagatactttattttcatatgtttggaagcattgctaatctcattatcacaatagattagtataggaaagaaaataaaatcaactagtcgtatctctaaaatcaaattctttagccataaagcttgcaaagatgtcccataacatgcgataaactcaacatatatagtagatgatgtgactaaagtctattcatactttttcaagaaatagttgtaccaaccaaagtaaaaatataatgagaagttgaccttaaatcatctacacaactattaaaatctggatatgaataattaatagtaggaagattgtcgacatacttatatatacacaagcatatgtaacgccccgatattttgccttattttacaaaaatactattttcatgcataatttgaaaagataaaaaaaataatttaaatacaacagtggattttaaagaaaatcaaaatgcaac

SEQ ID NO: 139420 - DNA, 1268 bp, Cannabis sativa
  modified_base (713)..(713): a, c, t, g, unknown or other
tggtaaaataattcccaacagagttctcctcgagcgtgttgtccgcgtactaggaccaacgtcgggtcgagttctctaggaacgtgtggtccatttgctgggaccaccctcgggttgtgccctcctagaacaagtgatccttctggactacgggttggtaggtcttctggagctcatgggctctttcccagaatgatgattggtttcctcatgaggggtgttaacattttctggattttcagccatgaaggaggttgtttttcttcaaaagaagggagggttttttttgagctttttcacaaaggctctcaatgaaagcaccaaactgttaacgcagtttttcgttaattaaatttgagcctcacggtaatgatttcacacagacaaaataaaagctatagaaaaataatatatgaacagaggatttttttacgtagttttgctgttaaaattctgcatagtcaacgagtcaatcttattcagatttctaattgtgttgtttttagggccttccctgcataagttttttccgtcctttttttgagcttgtctgccactatttataattacatagtggtctgtcaattacaaagctgactgtaatatatttacaacaattatccctaaaatcatgggatttagttacatatcacgcagtgtaaatgcaatttatgatttgaaaatcgtttagttgtgattttcccgcttttacngggtcaaaataatcgtgtattaaacacgtcttttattattgtatctgaagatgtctcgccagcaacttggttacagtgatctcaatagcgagttggggccattcttccttccgaggtcgacgatgtatgtctgatatcgatcgtggttcttatcctcaaagaattcttcgaggctcacttaaatgctatcttttggctcgccatgattgtaagcctcactgacgctaacgggacgaagttatatgcagtcttcccataccgagacggtcacctagcgtacttgttctcgagtcgatctaacttttacacttagtttgttcatcgcatgctaaggactttcacgatggatatctgtcgctttcatcttccaatggttttgtccttgatgtctcgctattcatatttagtgacatatagtttctcattaatatactaagtaaaagtttgtacattgattcctcgccttggaccttacagtcagcgggttacaaatatactctaatacttacgtaattaatgagttattccatgaaaagctattgcatcgattcacat

SEQ ID NO: 139421 - DNA, 885 bp, Cannabis sativa
gttaaaaattatattaatactcttttatatgagagaaatgagatggtgtgtttgaattctaagtgtgatcacctaaacattgtatcacagattctgatgtgctcgtttggatgagaagttttctatcaaaaaaagcacattgttagaaaatcccaaggcttgatgattcctaaagctatttcctagagagttctgcctgtttggtacgcatgactggattggattagacagatcaatttatccaatccagtgtttgagaatgttaaaagtttggataactaatccaactaatattatctgtctgagattatttatcccatctagcagggtgggataaataatcccatgcaggtgaggtttttttaattgttttttttttcattttgattttattaatatattttaaatttaataggaatttaaatcaaaaaattatcatacattaatttataaattttttatcaaaaacttattcattaaaattagtgaaaatttataattttaaattattatacataagtttttaaaatttaaaatattattaattaaataatagttagttaaattgattctaagagaaaaaatatcacaataaaattatatattatttttaaattactaaaaaatttatataaatatttaaaaaaaaatcatatttatattaaattaatgtttaacataaattttatataatttaagtatttttatttaattattttaattatttattaaataaaaaatataataaactatttattatatatttatgatatgtacttgattatttaggatatattattttatttattttataatttaattatttttatattttttgctgcgaactattcatttttattattttattattatatattttaattt

SEQ ID NO: 139422 - DNA, 643 bp, Cannabis sativa
ggggatttttttttggataatttacatgtatacacttactttacaattaaattacacatataacgttgctgattataaattaccgtgatttacctattaatttgatcatgagcttttttttttgtttaactttttttgtcgttgatttgactttactgtagcatacacatacctaactgttgcattcctattaatttttatttctttttcttttatcttttcagttttcacttgtctctttctctctctctctttctctccatttttatcaatttttctttcttttttaactttaaaaataattttttattacatcattaatttaaaaaatattatcattgccacctatttttttagtgtgatcattttaaaatgtagaaagtatatatttttcacctttttcaaaatcaaagtcactatttagttacttatcatatcaattatatacttattagttacattttactaatttataattataaaattaaattttttataaataagtaaccaattagtattatgttaatttatttattaaaatatcatcagtcaccaccaaaaactccgacattacaatattttttattgacatagtaaacaactgaaaatattttatttatcaataaaaaaatacatattaata

SEQ ID NO: 139423 - DNA, 593 bp, Cannabis sativa
acaccgactactggtctgttccaggcccggttactcgaatcccgattcaagatcttgatcactgtcacaggtcttggtctggttctagtttacctcccaggtcccattactgagtgttggttcgggatcgacactgaggtgcagttttaggtcccgaccctggttttgtgtccctagtctgtttccatgtttgggtctaagtataggttcgggttcaggtccggagtccaggtttgggttgggatctgggtctcactcccaatacgggtctaggtctgatctgaagttcgggtcctagtctggttacggttctggatctaggtcaaatttcagttatgattccaagtcctagttccagtcccggccaacttccggttttggctccaattttgggtcacaaggtacgggttcagtccacctttgggtttgagattgtgttcaggtccgggtgtgggttagcatccttgtcagggttcaggtctacggctgggtcctaaatccagacactaactacgggttttgtccaagcctagggtccatatctagatcccaatctcgggtcccagtctggtttcagttctggtgccgggtca

SEQ ID NO: 139424 - DNA, 621 bp, Cannabis sativa
  modified_base (458)..(462): a, c, t, g, unknown or other
atatcattgtaaactatataattagtaaatatatataaaaagtaaacaacatagttaccactgatcttgttgtgacagtttattttatccacaaacacgacttccaaaaaatttgtctcacttactccctaaaaatactttgtgttcttgtcaatatccgacttccgaccttagaagttcacatgagatagcaaaatggacagaagaacagcaaaagctttcacaaaactagtgttcccactccagtaaaaatattgttattagggaagaaaatcatcttaccctaaacacgattctcaggtttattaaaatatttcccactcatgtaaaaacataaaaaacaacataacaatataaaatattataaactatcttgtatacatattcaacaaatatattactatacctcaatttgtctaagtatacatcgtaaattgaattatacaatatacattatnnnnnacgatttacacaaaaaattaaatcaatataaacaatatatcttacagtataatatatattcacaaaattcgagtcagtctcataatgcaaataaatactcaaaaaactaacctaataaataacaaatcaaataacacttgcaatatacatatattctaa

SEQ ID NO: 139425 - DNA, 658 bp, Cannabis sativa
aatcgggtttcgggttcgggtgtgtataagcagtttatttttggtcgggttgtaactcgtaacccgaaatttttattttttatttttaaaaaaaaattaatattaatgatacttaattattcatattaaaaagaaagactattcattactaagtctaaaaactattggttagtttaagtattcattaatgaagttgttgtaaatttaatatgatttatttttttaaacagattccaaaaaaacaattaccaataatttattcttttgttggaagtacaccaaaattaattaatacatatataaagggtgaatttgaaaagagccaactacatatatatggctaatggctatgcatgagaatcatgagattaatatacacgtttggtcaatcgaagagccacggttgcagccgacaaaagacatcatacacgtacacataacattaatactaaaacataacttatatatacataaagtcaatcaaaaaattgaaacagtgccctttatgtgataataattattcttttggggaaagtaagcttaagactttgtacgtattattgcaataagtctgactcacctcacagctcacacgacttctcactctctcaatcaattcatacagtttcatttcatatattaatactgatatatatat

SEQ ID NO: 139426 - DNA, 570 bp, Cannabis sativa
taccattcattctcattccctttaagtaaacatgccattagaggattaaatgcaagttgagtgataattgagaaggtttagctgaaaaaaaaactctatataatatacatatttacgatctaacaaaatacccatattactgcaaatacgggtaactagttacttatattacagcaaccatataattaatgagctttgactttaatttccaagtaactagtaacccataactctaagtatgagtaataattcttcttgagaggctttactagttaatgtgagagaggtaacggttacccattttattatacaaaattacaaatgatcgtactagttacaaagagaggggtaacaagttacccatattacttcacaaatgagtaagtagttaccaaaaattgtgaaaaaaatacaaatctatataattgattgatcgtgtatgtatttaatttataagtctttactcatatctcagcaaacaaatacgagtaaccagttactgtgagaaaggtaaccaatgtctttgacatagtaacttgttgcgtatactttctatcaaaaaaaaaaaaa

SEQ ID NO: 139427 - DNA, 635 bp, Cannabis sativa
aacatatttgggttacaatgaattatttattattgactataacgtaatgtattacaaaaattaataattttattaagtaccttttgtttttctgagttccagtaagaaatgctagtaagaaatgcaatcactccacacctcttgagttacttcttccggaggtaacatgtcttccctctcctatccaagctcctcaatattttggatccatattttcttacaattggctcgccagtcatgcaaactttttgacatttcgtactcaccatagtctacaaacgcacgattgtcttgtgaaagcacaaattttgtttgcaaaatagttacacattcacattagtacattaattagaaatttaagaataatatacgaaattataaatttgaaaataaattatatcatacctcaagtctgtcccacaatgtgttgatgtcagctctggagacatcttcccatttgaatttattaatgggcacagacatgcaaaccacctatttgcatatgttgttgattttttttctatttggatcgactggggtgctcgttttttcatgcaattaaatgtgtagtttggcattcggtgttttggaaatctctatctcaatattttcgcctttgtatttacctcttaccc

SEQ ID NO: 139428 - DNA, 527 bp, Cannabis sativa
  modified_base (366)..(368): a, c, t, g, unknown or other
  modified_base (442)..(448): a, c, t, g, unknown or other
ttttaattattaaataaatagtattgacatttaaatggttgaatttgaaaatattgcatttttgagaaaataagataaatagttggaaaaatagcaaaattgaaaattgggggcccacatccatggccgaccacttttgctttattttaccatttattttatcattttttaaagccaaatattcctataaatagatagtgatggcctcaaattaaaagaggatgaatacacttgccttcagtcaaaattttgagccatcttttctatcttattcgaatccttcctctctctttctctcttcaatattttgaaccctatagtgatagagtaagtgcccacagacatcaagtggtactcaatcatagnnngtaagactgtgaagaatccaattcaatagaaggagaattgggctcagatcgtggtgatactctgctacagaaannnnnnnagggttagagatctgaccggaaggaatcatttattttcgttgcacccaatgtaaggtttctcaagatcggaagagcggt

SEQ ID NO: 139429 - DNA, 1457 bp, Cannabis sativa
  modified_base (1398)..(1419): a, c, t, g, unknown or other
aggataagagagaaagaccgtctacacatagcttggagaaagaccagctacacatagacgagaaagaccgtctgcacgtagagagcatagatactctggtttggattggttggaagctcctcagccttggaatccatcgtttccgactctaattgaggcttgaagtctttgggaacaaatggaaaatggttggtttatcttggtattatgagtttggaaggatgaacttctgaactcagaagggacattctagtaggaaaaagatgatccattctgaaaatggatctcaccaaaaagccagaggtttgtgaaaaatgacaagcttgagccgcctttttatacacaaagtccagtgacaagaaagctaagtattgagaaatccaacggttgggagaagggcagaatatgaacagaagattcataatgactctcgagaccgtacaaccaccagaatcaaaggatgcgttttatccaagaaaagattttgacgaaaatgccctctgtaattattaaaaagctctttttactaaaaaagaactttttaagaggcaattgttatacccgaaattcggctggaagacacgtgtcaagataaagggaatgtgatgccattgcttttaatggaataactcattagttacataagtatcagagtatatttgtaacccgctgactgtaaggtcttaggcaaggaatcaatgtacaaactggcacttagtatattagcgagaaaccatatgtcgctaaatgtgaatagcgaggcaccaaagaaaacgacacgtatcaatcgtgaaagtccttagcgttcaatgaacaaactaagtgtaaaagttagatcggctcaagaacaagtaagcgaggtgaccgtctcgttatgtgaagacttcatacaacttcatcccgttagcattggcgaggcttaaaatcttggcgagccagaagatagcattcaagtgagccttgaagaattctttgaggataagaaccgcgatcgaaaccagacatacatcgtcgaccttggaaggaagaatggtcccaactcgctattgagatcattggaaccaagcatctgtcgagacatctccagatacaacagctaaagacgtgtttaatacacgattgttttgacccagtaaaaatgggaaaatcacagctatatgattttcaaatcataaaccgaatttacactacatgatatgtaatcaaatcccacgattttatggataattgttgtaaacatattccggtcaactttgtaattaactgtccactatgtaattataaatagtgacaaacaagatcaaaaaaagggacaaaaagactcatacaagagagttcttaaaaaaaacaatcaaagatctgaataagattaaccgtggactatgcagaattttaacnnnnnnnnnnnnnnnnnnnnnntgtgttcatatttttatttctatagcttttatttttct

SEQ ID NO: 139430 - DNA, 606 bp, Cannabis sativa
  modified_base (27)..(40): a, c, t, g, unknown or other
  modified_base (109)..(109): a, c, t, g, unknown or other
  modified_base (261)..(272): a, c, t, g, unknown or other
tagatcatggtaaaacatattccaacnnnnnnnnnnnnnnccatggtaatgatttactttcattcaatatgaattaaagtgatattttgtgttgatttggatggcttcntgtggtttatgtgcttatgtgatgatagtttagaaattgcaatgtatattatagaaaaattgtttatttcgatctgaaattatttttactggaaagtagacaaaaaaataataaattttggcttttacaaaacctaatttggattttttatnnnnnnnnnnnnattttttgaatttgaatgaaaaaatctgaaaacgggttacacacacgcgcgcacgaggggatttctcggcatttccacgcggtttcagacagcttgaccgaggcaactcggacacgagctgtctgaagtcgtgtcacgccgagctccctcagtcaagtaggctgcatgcagccttgatgctcggccaatctcttgcttccgcgcgccggggtatgcattgcataccctcgtgcaccaattttattttcttcatatcttttgattcaaaaatcgtttttcattgaaacaaaagccaatttttggtagaattttatgtagaatctgaattttcaat

SEQ ID NO: 139431 - DNA, 516 bp, Cannabis sativa
  modified_base (321)..(321): a, c, t, g, unknown or other
ttgctatccatgcgaagggcataccatatttgcaattgcaaactaatgctcaatatgtgcctatgaatttcagaatggtgagaaagtaagaatcagcaaatggggtcattgttttcacaacaaatgcactcgtgacatgatcaagggaaagctcacccaatgccatatatgtagaatgtcattatttacttagacaattttcattttaatgaaacttaaaaagagtgtgtgtgtgtgtgtgttttttttttcataatcatttatgtatatgtgtaatattaattatatcaataaataattattattatttgtctcctaagnatttcattaattattgctatttttttttaaaattagtaatatgatgcatgtgtgattattgctatctcattaattattgctaaccatgcgaatggcataccatatttgcaaaccaatgctcaatatgtgcctatgaatttgagaatggtgagaaagtaagaatcaccaaatgtggtcattgttttcacaacaaat

SEQ ID NO: 139432 - DNA, 549 bp, Cannabis sativa
tactgtgacacatccaccatttgggagactcagttaatgttctcgcgattaaattcacagtacacaaaatcctaaagatctaggcgacgagtagaagtaagtgagtctcgcaaatatgcgactattcgaagtgttcgtccgaatacccgcgagtattcaaagcctgaaacgctgcctattcaagcatttcttatacagtatgcggttatgccaatttacaggtcattttttatgaaattacccagttttctgcctaaaaaacgtagcctcatatatatcccgtataaacaatttattcctaaactctctcatgcatattcaaacctagaaaacagtgttccctttcaaacagaaaacaaaatgtagcaaattttttgaaaactaacctttacttctggtaatctgttcccacgaattgccctcgatagcactggagattcgaaaaaaaaacccacaaagaaaagcgaaaatctgggcaatttatggaagtttttgatggtttctctgaaagagagggaaaaagggagttaagggagttaaggaaaatga

SEQ ID NO: 139433 - DNA, 859 bp, Cannabis sativa
ttcagcagataagatctcgatggtttcctcaaagcgatcagcagcctcgaggtcctttgttagcacggagatcttcttctcggcagcaaacagcttcttttcggcctcaccgaactcatgccagacaactccagtttccgtcctggcctcctcagcttccttcttggccaagtctgcctccgccctcaaggtgtcggacagagccgcactcttggaagtagcagatttagcacgggagtaagtgtaagccaacttcaaaccggcttgcacaaaggaaaaaggtcagcatatggagccaagtgtgaaaagttaaaagggaagtatcaaaaaagactaaccctggtgagctcctttaagactccgcccaccaacacatccagagatgagttgttatcagcaccagccagttgctcagtgacctcaggaaccagccggttcatgtagtgagccagtatctccttacccttcttggcctctggcagcacgggcaaaggaggagttggtgcctgcactcgctcagggaccctcttgaccagttcggacccagtcgttgctggcccagactccttagacttggaagatttgggagtagaaggatttgcagcagtcagctcctcgaaaaagtcaataacctctatagaaggtctcttctccgaagacccctctccgcccttaagcttcttcgccggaggggaggcgctagagcttccgcccatcctcttccttagagcatcaaggatctaaaacgcagaaaatacaagcagaaagtcaagaagctgaaaaagaagtaaaacgcagagtgactgcccgcccagaaaatcagaagtccatcatcacctgacatcgagtttatctcaga

SEQ ID NO: 139434 - DNA, 547 bp, Cannabis sativa
taatattattattagtaaaaagaatatagataataaataatagaaaaaaaataaataaaaatagaaagccacattttcatatcctctaacatgatttttattttgttacatatattggcatattcagttaaaaatattggcatataaaaagaatgtcacaataataataataataataaaatttgtcttttttttttcttttaagttaatatttgcttatgagaattctaatactacacacacataataatttgtaatttctctagctattagaattctactctattacttttttagtgtaataacttgtcttttaatataatttttctattaaaattctaacaatacacacacataataatttctctattaaaatgtcaattagaattttatatattctcttttaatcaattgatattattagtaaaaattaattaaataaaaaattacaaattagagaaaagaaagtattagttcgaaaaatgtctcctcacctctttgattatatatataaaaatataaatatattgtaatagatgtatatata

SEQ ID NO: 139435 - DNA, 1474 bp, Cannabis sativa
ttgatcttaagatttatttgatttctaatgttcctttcttggattaaactagtacttactcataactctcacttaacagcaggtgtctggtctaatgcataccagagcatacacaagacttctcacgtgcttaaggaattcttttcatgacttttatctttttctagaatagttgaaactattccttatataaataaaatctatctccaagagccaaaaaacttcctttagaattagccatttagaaaaatactcaagcatcttactaaattaagttgcttgcacttgagtaaataatttaccaagtataccacaaggcacatgtttagataatctcaaacctactgtactaggatcgagaaggttttttaagtccattgaatagacttattgttgaaatttcccttcttatccttgtaatagaaagcttttggttactccatatgaatgattttaaccatagttctcttggatttgcttcttagttccttattctgactatacattacttgtttaaactaacaatgaatttttatcacaagtgtctttcaagtcataatagggtaggttccttgaaaccctcccactacgacaaggtactgtgactttctatctaggaacattaatggtattgtcctcatcggttgtgtcaagataacagaggcagtgggaccgtcttatgtagaataagatgatagaacactttggaattaaaaatatctcctctactttgctatcttgtttttagatttagtcaggttcttagagaagtagtatttgttgaaacaaacatttttttttatcttaatgaccataggatgatccatccctaataactttagaatggctatcaaacatgcaaacttaagttaacagttctagtttttcttaagtttatgattaggacattcatgaacctagtaatggtgtatagtaagtatatgaccattccatcattatgaggtttttcccatcactagggtatttccctagaaggactcaggcagttgttagtaactaatcacagacctttcattttcatcaatatataatccaaatttctggggaggtaagtttggtacaatttgaagttcaatttaatgatatttaaacttcataaccaaatatttctccacccctatcagttcggaagatttttaaccacttaccttaatggttttcaccattgctagaaattcatgaattttctcaaacatttcaatttttttttattcaaggtataatctagagtgatcgttttaagaatttaacgataatttacatccacccctgaatgtacatggaaaatcacgcattgaatggagtccctatgtcacaatcacataaacaagtaaacaacttgttaaaaccctttttggggacctaaactcaaagctagaagtttccctatcgataaatagcatggcgataccctaaatattgaggaaacattaaaactgttgggttttatgcc

SEQ ID NO: 139436 - DNA, 1129 bp, Cannabis sativa
tatacgaggatcagcctttttaatgggacaattgtattaatcacaaaacaattacaactcaactatacaatccaattaattacaagagatatataaagcctccacccaatttattaattagttaattaccatttcaattcaaattttactccaacaataaatacgaattttatctaataataaaagtttgagtgcttgtactgtccactcccaataataaatgttatacattataatattaatttttcttatatatataagatgatgtgtgaatgagaattgctaaaatgtactattgatgcttagtacttttctcggtattatattgttattgttgtaattaagtatcgaatctcatagaacttaaaaatatagatattagggtatcatacctctcgagacacccttgatctatttgagccgaggtgatcatcttcctatatttgggttgaagtgatcaccttggcataacacttcctttactcatgttaattttctcacctcccctatttgtctttacagatgtatttttgtgactattggaacgatgacaaccatataaacgaagaaatctagctctcatttttctttggcgttggccttgagtaacacttcttttcattttgagctatgtacctccactatggagtttcaaacataagatggagactcatgacttccctagctatataagtttcgagttacctatctcatcccattagatattcgagttgagttgtttctgttaaatagagttagagcctcttactcaaagactcttttaaaagttggcctaaggtgtctttccagttttggcttttagcgacactcaagcgcttgtataagttccaacgcatataaagcgtcgataaaggtggcattcacaatatatttatgcactaggaaaacttttaactatgaaaatttatatttttttataattttattttttaagattttcaactacaatcaaacaatttattaactctaaaacattaaattatataataatatgaaaaatagaaaatttataactcaatagaatgaatatagataataagagataatcttattattatttttttggtgaatcaaaaaatttgtgttacctcaaaaaaattacaagcta

SEQ ID NO: 139437 - DNA, 705 bp, Cannabis sativa
ataaaagataattaataatgtactagattttagtctctttaattcttctataggaatacactaaatattgttatgaaataagtgttaggcgtgtaccgagttttgagtgtgtaaagcagtaaagtttttttatgctactatatgtaagataaaatagaagtcaaaatttttatacatatcaataggtacgtggcatttattagtttaatgataataatcatatttattatgctttatatattggtcatatataggaaggagagagaaataaggaataagttcatatttaaattaataataatattagaatcagttaagtttttaaattaaaatttgaaagttactatagtcactctgaaggaagagaaggttaaggatatatagttgtattcttccaattaacgtgtgggatgtgatttaatttaataaatatattagttaataatctatgaatatagtcggatagtgagatttgagataagtgggtcggtggatgatatttattttttaaagtttcaaatattttaattggatataaatgaaactagggcctataaataagagtatagccaaactttataggactggcgtatatacttgcttcaaaatataaatttaagaaaaagaagagtgaaaagaaggactcggtgggccggtggccatgtaaagacgagtcaattgcatctcacttaaggtttataggtg

SEQ ID NO: 139438 - DNA, 1359 bp, Cannabis sativa
gtgttttctaagattgatcttaagagtaagattgatcttaagagtgggcatcatcaaatacgtatgaaagaaggagatgagtggaaaactgcatttaaaaataaacatggacggtatgaatggttagtcatgccttttggattaactaatgcacctagcactttcatgcgattaatgaatcatattttgcgtgctatcattggaaaattcgttgttgtgtattttgacaatattctaatttatagtaagagtttgcatgatcatgcttcacatttacaatcagttttggatgtccttcgaaaacataaactatatactaaccttaataaatgaactttttgcaccgataagattgttttcctaggatttattgtgagtgctacaggtattgaggttgatgaagaaaagatcaaagccatctaagagtggccaatcccctaaactataggtcatattcaaagttttcatagccttgctagtttttacaggatgtttgtgaaggatttcagcaccatcacaacaccgcttacaaaagttatcaaaaatgatgtatttaaatggggtgaagcacaagaggaggcatatcaactgattaaacacaagcttactcacgctctagtactcgcttcacctaatttttctaacacatttaaaattgaatatgatgcttctggtataggtattagcactgttcttatgcaggaagagacaccccttgcatactttagcgaaaagcgaggtggggctgcacttaattaccccacatatgataaagagttgtatgcactaatacgcgctttagaaacatggcaacactatttgtggcccaaagaatttgtgattcacacagatcccgaatcccttaaacatttggaggggcaacacaagctcaataggagacatgcacgatgggttgagtacattgagacatttccatatgtcattcagtagaaacaaggtaagaagaatctgttgctgatgccctttctcacaggtatgccttaatctctactcttgatgttaagtaacttggttttgaacacattaaggaactttatcctgatgaccattattttggggagatttatggtgcttgtgaaaaatctagtgacggtaagttttataggcatgagggtttcttgtttagcgagcataggttgggtaaagaccgcttaactttaatttggaaattagtagataattagggttcaattgtgaaacttgcatattagttgtgaattatcagtttatgaagatttatttgaattcaaaatgcatgttatatgtcatatatggaatttcataattttgcatgttttgtgctcggcaatattgaaacgtggtgtttggctattagaa

SEQ ID NO: 139439 - DNA, 834 bp, Cannabis sativa
  modified_base (28)..(53): a, c, t, g, unknown or other
ctagaaaaatactaaaaagtctacctannnnnnnnnnnnnnnnnnnnnnnnnnaactaattacttattttctatttaaaataatatattttagtctatttattttaaatttaattaatatcaaggatcactcttcattctaaatttaatcacaactacgatggtgctacagactcgtaggggcatagttgatccggaaaatccacaggcagtggatcctgcactgcagaacctgggaaacacaagggttctgccagctgttaatcctggacagccatcatggacagccatcaagcgcgggtcacggtgcgggtcacggtgtgacgactcctgtggatgaaatcgcgcctagtgtgcaagagactgtgaataccagttcaacagccaaccaggacattcatagcacagccgttccacccgctaccaatgttcaaacaaccattggatgatgacactgagatccaaaacctccgtgcagctcttggactcatgtagggtcataccaacaccctacatcatgattaggagaaactccgcactgtggtaaatctcgcgttcgaagagcagaggcgcatgtttgccgaatggagggacaaagaaatggaagcgttaagggctcatcatgcggagattgacaattgtagtcggcaagccactgtgctgatacgaaaagcctatcaatctgtcgtgcagcagccctcaaatgtcattgccttgggtcaaacagacgaagatccagcgatgaatacctctcagactataaatggtcaaccgcaaaatctccaggcacaggttcttcctgtgggccaagtagatgttaggctaaaattagtct

SEQ ID NO: 139440 - DNA, 1035 bp, Cannabis sativa
  modified_base (954)..(999): a, c, t, g, unknown or other
tcttccaactgcctcctttatcaaatttttttatgtatcttatatttcgtatataaaatggctattacctgtggctctacttatctatctccattgtcaaaaaaagcttcaaaaataggtcataaattagttgctaacaaagctaaagagaaaggcccagttatcaatgaagaagactccgatttcgctctcctcgtggctaaaggtggtcgtcgtctagtgaagaagaagtcgaaggtgtctttgcctgaaaaaattccaactccgacagcaagaagggaaagaaggaagcaggggacgttcctaaggtttgtttctagttgcattttagttttgccctagctctgaattgcatttgtttttatttttggtttgttatattcttttgctttcattttagggtttagtttttgttgttatttttgtatttttattatttttattttatgggttttcatatatgttaatatttccaaacatgtaattagtttgtgttttgggtagtttgttctaattttggggtttttaatttatgtaaatctgttcacatttattattatttttttgtatttttatgtccatagttggtattaggcctaatttttaacaaatgtgtatggtttaatatttagttgtttgtttgtagtatcgcaataggtatattctcatttttgtttggaaatattttcttattttcctgttatcatttaaatttttaatttgttttcatgaatgagaatgtaaatttcctgtttctgatcattacaagtcaagtaatttttatttatgttgttgtattttagttgttgatgtattttattatagctgatttaactattttaatttatgttttattacatagtgattgcgttgcttttgttgctgtatttgctgatttctttatacatggaacatatgttccattggattttgtgttgagttttatgccctaannnnnnnnnnnnnnnnnnnnnnnnnnnnnnnnnnnnnnnnnnnnnnagaaataacatttaatgttgtatggttcacatgatt

SEQ ID NO: 139441 - DNA, 769 bp, Cannabis sativa
  modified_base (141)..(155): a, c, t, g, unknown or other
ctcattgtacgagtgttggtagggtttgtttcgtaccctgagtaccaccgagtgatataccacacacaccctgtactttcccgtacttgtgctggtatcactctaatgtactccttaccaatattcactataccaatgcannnnnnnnnnnnnnngtacaagtgttggtagtgtaacaagcatataagaatgcatatagacttaacatatagatacattcgcatattcatattacacattatacacagttcttactttctttccatattcaagtgagttggccgactttaatggaaagtcctatcctggatggatgccctaatcacatattacaatcgggtaaattacatgtctgaaaccctaattgaggaaacttgaatctataactcaaggctctgttatattcactagtgattacattaacctaggaaacaatgaaacacccaactaaggcactgaaatgggcaagaattgagaaaacgggttattcggggggcaaaccggttaaccagtttgtaccagcttccccaaaaaaatccaaatccttctcaaaactcaaccaaatgctgccaaaccttccagagtacctaaacaaggcatacacaacatattctaaccaataaaacccagaaaaactcactgaatcaaaacatgtcattaaagacctaagcttgagtttcaaagctcaaacttgtgaaatttcaacacaatacacccaaatcagtaacctgaatctagaattaacttaaaatgaacataaaaactgatc

SEQ ID NO: 139442 - DNA, 504 bp, Cannabis sativa
aacaaatttcatgaaaaaaaaaataatgtagtacaaaaaaataaatcaagttgttagtaaaaaaaattcgtaatacaaaaacatattggggagttgatatctttttgcatattgtaattaggtcattgttttgttatttttttgttgctttatagttatctttttgttgctttgtagttatctttttattattttatagttattttcatattgtttcttaagttgttttagaattatttttaagttattttttattttattttattgaaacatagtatttttgtaattttgaaactttaacacaatatttttgaaaatttgatacagtaaaaatataaaaatcacaaaaaattgagtatttttgtaagatcttttttttttcttgagcccaagttattctactctatacatttatagacgtgaaaattacatgaaatatgggatttcataaacaaagttagaaaaatatggcatttataagtttgccactcttctatagtattt

SEQ ID NO: 139443 - DNA, 771 bp, Cannabis sativa
tgttttctgtagctacaaaaaaaactgttttagtaccagtttttttattccgcatttaattaaataataaagctgagaattttaaaatatagaattacactatatcactatatatgataactaatgatccacttaattaatttataacataataattaacttatttataaaagtatatatcgatcattgtttgatttgttttggttgatttatattatgtacagagcaaactcttactagaatgatattagtgatgactacaagtgatatatggtaatggttcacttaattaatttataatagaatgattcacttatgtataaaggtgagtactattgtttgatttattttatatacagagcaaatctactaagaatgatattaataataactacaagtgagatacttggatgacatcaactttaaatgtaatagtgaccaagtgagttacagtgatgacaattctttttttttttagagttttttagagttctctacatagatttattatttttttaataaatataattttaaaattatacataaatatataataatatgttttaaattaattgatatgattatattattcaattaatatttatatatataatttaaaattatatctacaaataggcgcacgcaaagtgcgacctgttttctagtttgtatataatataaaacacaataataatatataataattaggtatgcgtacttgattactataaaaattaccacaatttgatagtgcaatacaatcaattaagt

SEQ ID NO: 139444 - DNA, 576 bp, Cannabis sativa
tatagtagttttatatagattgtctataaatttgaataatcttctgttttgaattgtaggcaatgaagttgaggacaaggaattaccaaaagagaagacatgatattctttattgatgacgattagatgttaatttattaaagtttgtagtcactatgacactatctagttgatttagtaggtaatttattagggtaaattttatagttttaagacttgaatttcggatgactgaaataagtcttgaatgactttgccttatgtttgaactttctatttttttttttaatttaattatgaacttgtgttcatatggagatttaaattttctaatttttataattgtgaaaattagtaagggttgtaacccaacccaaccaatgatgacttgggttggattgggttggattatacataaaacttaaaatgaatgggtaaaaatataacaggtcgatctcattgggttggcccactataatagccttaacccggccaactcaacccatacatagccctatttggcactacctaattttgtcccctaaaatatacgacttgttaaaaattcttcctaaa

SEQ ID NO: 139445 - DNA, 864 bp, Cannabis sativa
tgatcttatgagtccctattctgagattgaccaacctgttgtcaccaatactgatccatctccactggtttttcctactaacagttggcctcccagtcaacattctgttttgcatacaggtcagacttctgaacaacatgctactcctgctattgctcccagcacctctcaacctactggtgtttcccagaacagcccctggaactacagattcaaggcacagctaatgtttcagatattcctactaatcgggctcttcttggtgtgcatattcctgcatcagacaacactgttgtcacacctgctgttccaacaagcacatatgctattcaaacatgcacctcaggttctcatcagcacaatgctcatcctatgaagaccagatctaagtttggcattcacaagccaaaggccctcttagtcaccagggaaccatcatctcttcaagaagcccttagtcaacttgtttggaataaagccatgagtgatgaggttttggctttggtgagaaacaaaacttacactcttgtcagattaccaccatggagaaaggctattgggtgcaaatgggtgtacaagaagaaagaaaatccagatggtttcgtcctcaaacacaaggctcagcttgttgctaagggtttccatcaagagtatgggtttgatttcactgagaccttcagtccagttgtcaaactggttactattagggttgttttgaccttggccttgtcaaaaggttagcttatccgacaattagatgtcaataatgccttctgtaggaaatttaaattgtgtttttacaattatgccctacaccaacaaaacaacactaatcaatttccaaggtcaatttcgaccttttac

SEQ ID NO: 139446 - DNA, 869 bp, Cannabis sativa
  modified_base (255)..(277): a, c, t, g, unknown or other
  modified_base (490)..(508): a, c, t, g, unknown or other
aaaccataccttaagctttccctcttcaagatttagctatcctgctactatcggagcttagatcgctaagtttcagattgaaaatcgaaaaaaatggatgtagagggagaaagttttatcgaatgggaaagaacgaaaatttgttcgttcgttctgttatatatgttatatatgttaaacttaatatatatatatatatataatatacgtacgaaatgaaactgatacagataataatataataataatataatnnnnnnnnnnnnnnnnnnnnnnntagttatcttattattttttagccgctaaaaaattatatttttagggtatttggtctactccaagtactccaaagtattttggcatttttaaaattaatttatcataataatcccatcaataattctaattaaaaccaatatgacatttttagcctaatcgggtctccagggtcgccgaacctgaaaataattttatttcacaaataactcannnnnnnnnnnnnnnnnnnaaataaatctctgtaattaacaaattacgcttatatattcacttattgagtcttcagggtcaccaaacttgaaaatatttttattccatatatagctcatattacattcacacatgctctataaatctccgtaataaacaaattacgattatttactcacttatagtaaaatttaaagtttatgttgaaataaaatagtaggatcattatccaattattacctaattaaaccataatataaacataaaccataattatataccattagacttatcgagatattacaatgttattagattaacattcagtttttttagacgaataatataaattattggttaaattgattatttatgataat

SEQ ID NO: 139447 - DNA, 588 bp, Cannabis sativa
caccttcttttgataagctggcatccgtacttgagactcatcccggagctcgtcaatttgatccagtgcttcttgtaataaagctttatttgttaccggatcgtaagtcgttctcctatgggatgggaacaaggtttccaccggtaccatagcctcataatcgtatgccattgaaaatggcgagtgcccggttgtggttcttagagtggtccggtaggccaataacacttttggcaattcttcaggccagttgttcttgcaggctagcagcctcttcttttgggtgacctttaggattttattgacagcttctgcttgtccatttgtttgtggccttgccatcgcgaagaaacttttaatgaccccgtactggttgccgaagttggtgaattcttcacagtcaaattgctttccattgtctgagactatcttctgaggcaagccatatcgacacactatgtttttgatataagagtctaatgcttttttggcagttatggtcttcataggctcggcctctgtccactttgtaaagtattccatggctactatagcatactttacccctccctttcctgttggcaggga

SEQ ID NO: 139448 - DNA, 601 bp, Cannabis sativa
  modified_base (100)..(110): a, c, t, g, unknown or other
  modified_base (382)..(395): a, c, t, g, unknown or other
gtgagttgtgattatatacttcaaaagattatgtcctatgattcatcagtgtactaaatttatgttgatctaatagtcagcgataaagtttacttacacnnnnnnnnnnngttatgttctttctaggacattgacaaagcatgctagtatcggatgtatggattataaattagactgagatcgatattgatatttggtaaagatattataatctgactgttgtatcttcctaagtcaatatcagtggttgatctagataaaaagatctgaatacagctaggttcaatctcaagagtgttatctatgttcttagaattatttgttaaagcctaccaattagttcgagtaacacatacatcttgggaacatgatagtacaattnnnnnnnnnnnnnnattatagatatggaatctatagcttctatcacatagaagtgtatgatgattttcttcgagcttgacttaatagagataaatggaataacttttattttagtaattatattagtttactgaaatatcatttatagaaagctaagtattgtaaacaaacatgtcattagagatcaaagctttgaacccaaagctcaaacttgcataaa

SEQ ID NO: 139449 - DNA, 812 bp, Cannabis sativa
  modified_base (776)..(782): a, c, t, g, unknown or other
cttgtgagtagatctaagatccgggtaaaataatttccaacattcccctactggggtgtgtatacgcctcctccatatcagtgcaagaatacattgacggtgtctcggtggtaatccacttgtcctaggttgagccccaggatttgtctcgttagcacgagggatcttctggtcgctatttctgggtggccttgcattctcgtttctacgagaagactctggtaagtcatttttttcattcccttgggttgtgaatccccggggtctccgaggcacttcttgatgaggtgcctgattatttggttgttcatcttctgaaacatccatagtttccccaggttgctccccctaagtgttatgggggttctcctaagccatctcctgcctcttggttcttgaaccttgaggtctacctcgcaaccttctcactctatgattaggctagttttgtgcagcattttcttgagtagccctggctgtggctgcctctttctccaacttagcatttcgttggttagcctcagccagtcattgctggagttgccgattttttaattcaaccaatggtacgtacctagtgggatcataggcatcctcacttctaggtacgtaaccaacgtcaccattgatttcctcattcttagtttttgggttttgatcattgtcacgttggcttcttcttgaacgtgttgaacgcgttgttcttgaagtgggtggcctccgtgagcccattggctctcttttgggacgacgattgtaaagcccgcttagttaannnnnnnattagcagttgtttatgtttaattatgaaa

SEQ ID NO: 139450 - DNA, 851 bp, Cannabis sativa
gcgtactgggaccaacatcaggttgggtccttctggaacgagtggtccgagtgctaagaccaccctaaagtttggtcctcttggagcgggtggtccatggttttacataaaaacaataaagaacataaaatgaacacaaaggttttttacgtggttttacagttaaaactcggcatagtccatgagtcaatcttattagatttcagatggttttttagggccttttttcttatgaatatttcgtccccttttcagtataacttgcctctatttataattatatagtcagacagttaattatagagttgaatgtattcgttacaacaattctcccctgaaatcatggggtttgattacatatcacgtagtataaatgcggttattatttgaatattacacagctgtgattaatccgcttttactgggtcaaggtaatcgtgtattaaacacgttttaaatcataacgttttgggatgtgttgataggaactctgtaccaatgaccttgatagtgagctagagcttttcccctatctttccgaggttgatgatgtacgcctcgttgcttcttcgcttgaaggcataacacttcattttgataatcacagtttttaataacaaagagtacttcagcagtcatcattcgaatgttagcttcttctcgagagaactgattcgccaacactaataacctcacaaaaagaaatctgaagctgattggtgaaagtatcaggagcatgccttctaatagaaagataagcgcctcactattagttgtttgggttctcctaactgttatacttagtttgtatattatatgctaagtattttcacagtcattatgcatcgctt

SEQ ID NO: 139451 - DNA, 626 bp, Cannabis sativa
taattttaacttaaatttttaaaacagctattttttttattttgccaaacactttttaagcaatagctttctctaaaagcacttttaacttttctaaaaactaccccaaacgggacctaagtatgactctttgtattaatgttaactttctaaaaatttcgcatcttcagttttcattaaagaagaattgtagttggtatatataattttacaatggaaattttaattttttatgcttacatttggttaaaaaaaaatttctaaacaaataataactaatatttgtaggatatgacaacttttatgatattcctaaaataacctcccatttatatcaccctcatttacacaattggatcccatcggatcccacatcggacacaatcggacctcatatcggacccatcggaccacccatcggaccataggtgaccatcggaccaccatcggactagatctgctaccaatttttttttttatgtttttgtacatacaaaagtagcatcaggtgaccatcggacctccatcagaccccatcagactactaattttttttttttttttttatgtttttgctctaaaaaaaagtatgtgaaatttgagaggggtatttttgggttttagat

SEQ ID NO: 139452 - DNA, 770 bp, Cannabis sativa
  modified_base (253)..(253): a, c, t, g, unknown or other
tactcattcattatgtctatatagtcggttctattttagttataaccggtttgagttatttcgtgttatttgtttttattaattataacattgtttcaaaactagttctttataatactgttatagaaccggttctattttaattataactcgtttaagttattttgtgttatttatttttattcactatgttacagaaccggttatattttaattataaccggtttgcgttattttgtgttatttatttttnttcattatgttatagaaccggttttatttttattattatattcgagacacttccccacttttttttttttaaaaaaaattataactagttttataaggtattatgtgttatgaagtattttattctgaaactagttttgtttttaatttatatttcagtgttttgggagctgatttcttatttatttttaattgtaattggtttaaattattgcgttttacttgttagtattcattaggttataaccggttctattttagttataaccggtttcagttatttcgtgttatttgtttttattcattataacactattatagaattggtttattttatttttttttgaataaaaatcatatgatttaataattaataaaatcgttcaaaataattgaacgcacttcagaagaacagttctgcaactaaagcacacgacctgtagagaaacaagagtctcttgccaagcaatgagccaacttatttgcagatcattttacaaaacacaaatcaacaaaag

SEQ ID NO: 139453 - DNA, 565 bp, Cannabis sativa
attagatttgagctattgtgcggattgaattggatccaaaaaataaaatcggatcggatgcactatgaacaaaatagtgcggattgaattggatgaacacccctatcagaaattatgttggttttttagtttttttagtaatgttgagctagtgttatgaattgtgtgttaaattctaagtttgcctttttatttttattttaaagattgtcattctaatataactgtattttttggtttggtgttgtgatattttttcaagtttcctagctccggcgacaacttttaatattgggaagatattttttcaatgtgatggggtactgttttaatacgttatacttttattgtctaaatttttagggacagttttgttccatgtggttcgtgattagaatttgcagctcatggtttggcaaaacatatcctttggttagacgatgaactatcctcgttcgagaatgtgccactaccgattataaaagggaaatttgaaattatatgcatattagggattaaaattggtatcctaatctaaaactatacataatttgtaaaatgggat

SEQ ID NO: 139454 - DNA, 726 bp, Cannabis sativa
  modified_base (672)..(679): a, c, t, g, unknown or other
attttatttaaaaatatatattgatttaatatacatttaacacatgatattaaaaaactttagatctaaaatattaatttttatctttctaaacgataataaaatcgtcaatgcgtatggaataaatttaactttttagtgattttattatgagattatgagaattaagttggactaaactaatgtttattatgtaggttagattattaagttttaaattatgttttttttatacatatatttttttattttaatgaaatcaacttaaatagtagctaaaatagattgcatggatccaatcagatctaatagaaaaccactcaatacatttaatggttggaatcgatccaatccaatacatctatttgatcggattagatgactcgattggattagatcggatgacaaaatttaatatctaataaataattagattagatcaattggatctaaatttattagatgtgatccaataaacccctacaaaaatgatatatctaaagtcatacacatctatattttaatgaaaagtcatatatattttattcttttttttttctacttattcttgatcatgtctagaattactgtgaacgaaaaagatggagattaaagtaacttctttttcccttaaaaatggtgaaaaaatgaagggtaaatactattttggannnnnnnntttgcaaaagttattaattggatcatatgttttgttaaatgacaaaa

SEQ ID NO: 139455 - DNA, 720 bp, Cannabis sativa
  modified_base (199)..(212): a, c, t, g, unknown or other
  modified_base (362)..(367): a, c, t, g, unknown or other
agatgtgtcaaccaaacacgttgttttctttgtacgagccatcattatatggctgggtacaagatttgggggagaatgtccttccctagtagaaggtgggctagaacaaagatgaggatggtcctcgtgcaaaagttgaagcaagtcctggtcgatccgatgttcgctctaccaaaactcacctgggttcatctacaannnnnnnnnnnnnngatgagtgtttggtcggaatatcgaacgacaaacaagcaaatatgccgatgaggagtactcaacagattaaagaacaagaatgttcaaagaaaaatcaagactcaagaagttttaaattttctccagttagggcaaaaaatttcatgaannnnnnaataagcaagatgaaagacaagcattttagaattcagaaagcaagcattatggaatgtaaaatcgcatgaaatcatcacgaagaacaatcacaaagtttctaaacctagggtttcctaaatattttctacagcaaagtcgaaggtacattcgaaatgtaaacatgaaaaaataagtataaaggaaatcaaaaacttacttaagagtcagatatcagggttcgagcaacgtcaatccaacaagcagtttcgatgaaggcacttcagcaagcttgaaaccaagaacctctctttttgctctgaaatcacttagcaaagaaggatggtgaaaaagagtttatgtgctaatgccggt

SEQ ID NO: 139456 - DNA, 599 bp, Cannabis sativa
agatataaaagaagatcgttgaactgcatatattagttcttaacttcttccacccctatcagatcaaaagatctttttattatataaaaccttaataattgtttaataattaacaattattcataaacattgaatttaaattctatgtctttatgtggtattatctcttggcagagaataatataccatagatttttcatcaataataaaatacaaacacatgataaacatataaatataattagtattggcatactcaagataaagtaaacataaggctcaattcataataaaaatttatcaaagagaaaattttattaataatctcaaaaatatcataatgaattgtctgcaataatatgaaatagtgaataaaatctcaaactaataattgaaactaaattatttatagactaaaacaattaaatcaaaaattaaagaagatttcgagcttcatcttcacttggacaatctccacccttctgtcaaaccatccgactcaatttgttgggatagcaatccaagtttaagcagtggagctgaaataagaagaaaataaacatggttagtagttccagaattaataaccaaagaggata

SEQ ID NO: 139457 - DNA, 1260 bp, Cannabis sativa
ctaccccttcttttgtgtgaaccccttcgccaccaatctggctttgaaccttactggttcatcctcggtcctcccttccttgactttgaaaagccatttgtaagataccacactcttgccattcggtctatgtacaactctccaagtcttattctttatgagagagtacatttcctccttcattgctttcaaccaggccttgtaatttctgtctttaagtgcttcttcatatggtggaggctcatagatctcagcttcaagtttgcacatataggcataggcaatactctcatcccacacattataactgtacttttggttaggtttaggtacttttctggctctatctcttgtaagctgatatgtgaggtcttcctgattcctgttttcttcatcttgaactgcatgttccacctgatctggttccacctgatttgttgctacttgaggttccatttaaattggtcccacctgatctagatttggctccacttcagttgggtcggtttgagtgactctataatagatgtacctgcagggttagtttctgtggaacctgcatccagcagttagcccccaaaccaaaccctaaataaaaggagagaatgggggccccctaaccgctggaaggaggctccctctgaatgtctgccaaagatagggaatctagggattctcctaggcatagatcgggtgaaagtatccgaaaggcagtgaaaaaagaggaaacaaaaaaggaacaaaagtatgaaaatcacttcatactctcaacggtccctaagtgaagaaattttttgcaaaatccaaaagggaagcgacggtaagcatacaaagaactacgacacatgatggtcttcaccatgaccgttttaccatagaaatcaaatacaacttaaataaagacaatgccctaaatcttgccctaacatgcaaatgaataataaaagtaaagtgtacccagaaacttacacaatggtgatgagcaagaagttgatgtcgtccgacggtagaactgggactggcagcgacggaggaataacagcaagaaattgatgatttctggaattttttcaaaggggttatctgagtcgaaatggcagagtggcgatagtaactcaacaaaaggaaaatgctggcttttataagccagaaagggtgcaaggcaattgtgatcagacaccaccgtacggtgggaattggtatcgattcgcattctatgatccaatagatgggatgaaggggtgtaacaaggagaaaagg

SEQ ID NO: 139458 - DNA, 731 bp, Cannabis sativa
tttgacttgttattcttctttatccaactaagtgcttctttgacacttagaatttttgcaatttcgggtcagtaactaacagaagaaatagttgaaaacgccaccattactcgaccatcacaatcgcgtgctacaaaacctgtacctatctcactagtgtcttcaaaaaccgccccattgacattaatttttaactgaccagcagacggtttggactagtaatctcttatgtcagtgcgattagaagctagggacactgagcccagtcacttagagtgagcactcgtccattgtcgaagagtggtacgagccagccaaataacatcagcagcactacaacttctaccattccaaagcatatcattccgagccttccaaatcgcccaaccaaccatgacggcttcttccaccaaccccatattgcccactgccaacacttccataaaccagtcaaaaaattgtttgttgtggaatggccaacaccttccgcagatcagagccaacatgaatgaacaaacatggaaaattaactcatccccatagctgcacaacacacaatgtaactccaccaaaacctgtttactataaagttgagtacgcgtaggcaaacaacccgaaagagctttgccaaaaaaatgtaaaaccttaggaggggctttaatcttccacaacatctcccaaacatcatcctccatagaggagttccatctaccattgaccgactgtagatg

SEQ ID NO: 139459 - DNA, 508 bp, Cannabis sativa
acaaaaagctccagctccagggttattgttgctatgttccaagcgaggtgtcccagcacgatacactttgaggtgtatttaatccacgtacacgttgacccggtaaaagcagataaatcacagctgtgtgattttcaaataataatcgcattaattttacgtgggacgtaatcaaatcccataattttaggggattattgctgtaggatatcagtctgattgtaattaaatgcccttctatgtaactataaataggggcaggatacactgaaaaaaagacggaaaatccttgagagaaaaagccctagttttgtatcagaaatctaataagatagactcgtggactatgcagaattttaactacatgaaaaaccacgcaaaaaagctttgggttatttcttttccttttattattattatttattcgtaaacccatcacaaaataggctttaatttagttaacaaaaatctgcgttaacagttcggtactttcattgagagccttcgt

SEQ ID NO: 139460 - DNA, 556 bp, Cannabis sativa
  modified_base (26)..(52): a, c, t, g, unknown or other
ttaatttcattattttagagatattnnnnnnnnnnnnnnnnnnnnnnnnnnntgttagtaaatctaaatccttgtaaaatattcctaacatgattaacttcctccttgagacttcagcatcctcctcaaaattagtcctactggtactaaacaccattgttgtgagaaaagtaaataaatgagtttcccaaaggaaaaatagtcaaatttttaccgcaacactctcaatgaaagcatcaaactattgatgcgggttttcctcaactgatctaagatgatcgtaagaacaaagaggactgagatgacttaatttgactaaataaaatcataataaataaaatagacacaagggatttatagtagtttatccccatctcatgatggtaatggggctacgtctactttgatttttattaattggatctgacacaccaaaattatgttctcaagagtgtgtggaaaataacaatggatttctaggtgaaatttgtatcgagacttatgaacacaaggctcatgggagacactgttgggaatattttaccaagatctagat

SEQ ID NO: 139461 - DNA, 956 bp, Cannabis sativa
cgtaacgagatttggggtgaagggtaagctagccccgatgtacattggatcttttgaggttatcgaaaggattggggaggtcgcttaccgattaaactaccgagacagttaggacatgttcataatgtgttccatgtgtctatgttgaggaaatatactctagatctgtcacgtgttattgagtatgaggctatccctcttcaggaagatgtgacttatgaagaacaacgtgtcaaaatcttaacgagaaagctaaaagtattaaggaacagagagattctagtagtcaaggtcttatggaaaaaccacagagaagatgaggctacttaggagttagagtctgagatgtatataaagtatcctcacttgtttaattttcaacttcaggttgtactttaaaattttgggacgaaattttttctaggaggggagaatgtgaagactcggttttgactaagtcaaaagctatgtatataataataataaataaataaataataagaaaaaaatatatatatatgcatatatataaaaatcaaaataagatttataccacccattttgtcctcttcctcactcaatctctcatttctctctcttcaaaacacaaaaagaaacccacaagccaccatcgccaccaccactcttcggcaacccacctccgaccaccaaccaaccccatgccccggaccattcgaatccccaggtgccggtgacctcaagcccccaagcggggccgcttctttcactgccattagctctggatcgcaagtcaaagttttgcgattcaaactttgaacggattttccggtcacctccggtgtccgtttgacgagccgtcttcaccactagtgtaacgccctaactatcagggacgccacgtgtgtgcttttataaacttattattactaatctataaacttttggaaagggtgtggtttaattaaaacttttga

SEQ ID NO: 139462 - DNA, 688 bp, Cannabis sativa
gaaaccatttcctcatccatagctttaaaccacttctaagcattaggccctgtcattgcttctacataagtttgaggttctgaacttagtgattgtatagctgatatgaaggcataggctatgtcttcattccaaatattgaaactatacttaggattaggtttaggtgtcctcttttctctatctctagtcaattggtagtcatctagagcttcagtaggttgaataacctcattttcatctccatgttgctcttcagtctgtgtctcctccctattagagccttttgtatgttccacctgatcctgatcaggttcatttccaactggttccacctgatttgtatcaggttcttcttgatcatctagtctccaaataatagggtcaaactttattgtacctgcatggttagtttctactgtacctgcaaggttagttttaagtaaacaaggaaattcattctctttaaaaataacatccctgctaataatagttttaaaaccaccctctcctcttaaccagattctatagctcttaactcctccagggtagcctagaaaaacccctttaatggctctaggttcaagcttaccaatactttggtgcacgaaagcactacaaccaaatacccttagatttgaaagatcaggtggtttaccagaccacctttcctcaggtgttttgaatt

SEQ ID NO: 139463 - DNA, 1184 bp, Cannabis sativa
tttttgctatctcaggtgtcctttcttgggcacattgttagcaaagacaggatcaaggtggatacggggaagatagaatccgtcagggattagctgagaccaaatacagctacagaagttagaagtttcttgggtctggctggttattatcatcagttcgtagaagggttctctaaaatttcaacacccttaaccgagctcaccaaaaataattagcgttttgtgtggacggataagtgtaaaacaagctttcaggagctaaaatagaggttaatcacaggtctagtgttagccctaccttctaataaagaaaagtttgtggtttattgtgatgcatccagatagggtctggggtgtgtactgatgcagattgatcgggttattgcctatgcctctcgttagttgaaagaatatgaacagtggtacccgactcatgatctaaaacttgtcgcggtagtgtgtactttgaagatctggcggcattatctctacggagagagatatgaaatttatactgaccataagagcctcaaatatttctttactcaaaaagacttgaatatgagacagaggcattggttagagttgattaaggattacgactgtgaaatcctttaccatcttgggaaggtcaatgtagtggctgatgccctgagcaggaagggtcccgggcaagtaactagtatgattcagatttcacctcggttagtagaggacatggtcagatcaagcatcaagtttgttgtaggccaacttcataaattgacgctgcaatctgatctgtttgaacgaattaaagctgcccagttaactgatctagagttagtgaagatcagggaagaggtttcagctagtcaagtcagagattttacagtgttagatggtgggatgttgttgtttaagactagggtttgtgttctaagtagtgcgaaacttagaaaggagattcttgaagaggctcataccactccatactccttgcaccaccaaaatgtaccaagatcttaaaccctacttctgatggagcgggatgaagaagaatgtggtagaatttgtatctcgatgcttaacctgtcaacagatcaaattgaacattagaggccgacaggtttgttgcagcctttgacacttcctgagtgaaagtgggaggatatcaccatggactttgtggttggattacctag

SEQ ID NO: 139464 - DNA, 762 bp, Cannabis sativa
ataacaaatttttgaaagttgatagattatctggttattttcaaaaattatctagattactttaataaaaaatatatatatcatatttttaaataaatttcaaataatgtcattttataaattgagttaaataatcaaaatatataaaatatctgaccttaattttatatatgagataaaatagttaaatttttaaaataagataaccaattaagaaaaaattgtagatattatccattttcaggttcaaaatctactaagatttaaaattaattaaacaatttaattaattctaaactgataattagatttgaaatttgaaaaataaaaatctacatacaaaattatacaaaaaaaaaaatggaaattaattccatgaaaaatcatgaaaaaatgaaaaaaaatttacatgcggctcagatgatatgcatttcataccatctgtgcgcatgcatcagggtagctggtcgagttttgccacacaaggaggctgccagcatgatttgtgcacacggaatggggctgttcagacagccttaggtgtgttttcttaaacaagcattgtccaaacacgcatgctaaccgagtgacactcggtgtccgcgcatgtgtgtaggtgacccctcttcaatttttttttttaatttttcaaaacatcatagctaatttaaataaaattgaaattcagttctatactatccaaataaagtaacttcagattgtgaatccaattattttacgtaaaaattttgtaaacatcaa

SEQ ID NO: 139465 - DNA, 547 bp, Cannabis sativa
ttgatgaaaatgataatatccataatattaggttaatattgttatatatatataaaatagtaattttgtaagtttgtcaaaccttgagtaataattatattgccaataacaatcttaaaactatttcacttttttttttatctcaattttttatcattaatattattataaattactgagtattaatactcataaagaataataattgtcaaaattacaaaaaaataaaaatggcatataactaatactcatgtgcatatgtgcattacttacaattcatatgtatgtgcactacttattaaattattataggatagatcatacttttcaatttaaattaatgtgcaattatgttacttctataaattaagtaagtttacacatattataaattatattagtgaaaaatttgtagaaaattagaattaatttaaaaataaactacaaattaaaaaaattataacattagagcgtcatctcgctaaccctatatatataaatatatataaactatttaaagactaagaagcatatatatttataggga

SEQ ID NO: 139466 - DNA, 681 bp, Cannabis sativa
  modified_base (46)..(53): a, c, t, g, unknown or other
  modified_base (142)..(153): a, c, t, g, unknown or other
  modified_base (210)..(213): a, c, t, g, unknown or other
aacaagaaaactatataaaattaacatgaaaataacatttaaatannnnnnnnataataacaaaaaataacatacatataacaaaaaatcagcaacaaatcaacaaaataacaacataaaaaagaccgtattttttgtaaannnnnnnnnnnnaatcgtaaaaatgtttaaaattctataaaaccgtattttgtaattttttttattatnnnngtgtatttgtgaaattatcccttctaaatatgtattaaacttaaaaaaacataactgtaattaaatatcaattttaattgagaaaatttctttaagtgctaaaaatagatatttatcaaagaaaaaaacgataaaaatagagatagttcctattgttaggggaaaatggtgccgctactttagaattttgtttatctatggcggacccagaatttaaagtgagggggcgtaatttttttttttttgtaaaagcaaagagggcaaaaataaatttaaaaaataaataaataaaatataattagtgggatttgaacctttaccctccaacatatttataatctatcttagtcattacaccaagtttactattatatctataaatatcatcttttaatacaaatatatattgtaactaactaaaatacatacacattttctttctaattttttttaggagaggcgactgcc

SEQ ID NO: 139467 - DNA, 545 bp, Cannabis sativa
atcttagaataatctcttccctgatgagaatttttttaaaagtgataattaaatgtaccacaggttaggtaccttaataagtgtggtacaatagaaatattagatacatatttactgaggtaaataggctaggtatcctattagctagccttaactcctgcgatttccggagtatataatgtgtttcatgtctctatgctaagaaaatatgtatcagactggacccatattctaagctgtaatgatgttaaactttagacaaatttattacatggaaaaaacatcttgtctaagtttttggactagaaagaggaggtactatgaaatgagacaattccactagttaagaaagtgttatagaaaaaaaaatatagcagaataaaaacaacaatttgagagtaagaatcataaatacgggggtaatttcccgattagtttaaataaatttcgaggacgaagtttctatgaggaggggatggctgtaatatcccaataaatctaatggtagataattagggtttatatttatcttatgagttaatcag

SEQ ID NO: 139468 - DNA, 625 bp, Cannabis sativa
agggcaatccctgcaccggatagtagatctgtggccgacccatctacatgtaacttccaggttggttcgtcttcactgttgctcagctgaggttcttgtactggcttcaggttgttttttaaagtgctatcttctttgcccgtacactcaactacaaaatctgctaaggtttgccctttaattgttgttcggggttgaaacatgatttcgtactagcccaactccattgcctatttgtgtaattgtctagaagtgtcaggtttttataatacttggcgtaatggttggtcagtgtacacccaaacaggatgagcttgaaagtaaggccttagctttcttgttgctaagattaggcaataagtgagcttttctatcagtggatatcgtctttaagcttcaacgagtctcttactgatgtaatagactggatgctggatattgttctcttctctgatcagtatggcacttacagtgtgttcagtaacagccatatatatccctaattcttctccgtccagaggttttgatagtacaggggggttttgcaagttccctttttagctcttgaaaggcgttctcgcattcctccgtccattcaaattttttgtttcctcgtaggatgttg

SEQ ID NO: 139469 - DNA, 1651 bp, Cannabis sativa
ccctttttataaatggggttgaaaatttttataaatggggttgaaaaaactaaatggggttgaaaaaactgcctctaaaggctaacattgtagtagtgcacccatcatgattaacagtcactcaaacggtcatgactttacatattcttcattaattcagtcccagtattttcgtgccacatgtcgttactcttgcaagataatcatcgttaaaattttggtaaacagtaataaatatctttcattaacgtgccatttaccattaaagagctattcatatcacaatgatagtcattagtacattaacctgaattcttagtatacataaacttctatttgtgttcattgagttttttgattcactcattaaattaagtttcttagagaagatgattcttacaacttctattttgggagcttaataacatgaatggctgggaacatgttatacaatagtggagtttaaactttcctaatggattgaatattagttcccttatagtgttaattttggaaatgctaacagttagatccaaatctataataagctataaattaactgttcacattaaattaatggtacataaggaataaagagataattagaagggtaaaattatatttttatcaactataattatgaaataataattagaggataaactacttatattgattataacaatagacttaaagtaagaattctgtaaatataattttatattgtcagagagtgttatactatatttatagtggattaataatataattaataaaataaattattctattaatgagatcgataatagtcaagtttttattggagctttgaaatataggtccatgatctccgagtcacctatatacaacaatgtacaaggaaagattttatttgatgaataaattttgagtgagaattaatttctatgggaaataaattcctaagggaaaatagtaatttatgaaatttttgcttgattaattatgaaaattatgaattgtaaaattaatagtatttaactatttaattttatttgaaagaattatattaattacttacacataatattatttttaaataatattaaaaaaaaatatattattttaaggaaaataatatataattttaactcttatgaaataagagattaatgagaattaatcaattattatttattgataaaataaataaatcttattttatgtcaaaatagagaagtcaattttggaccttaaaatatggcccacacgtgtaagcccattccacatgtgtagggtgacatataaaagcatgtgattaatttagtttaattaatttattagttaaaataatttaaattaaagtaattaatatcttttaattattaattaaataaattattgaatcaaagataataattaaaatagaatatgtaattgatatttgctatttggttattagatatttatatttgaatttaaattataattcaaatcaaattagatattttgtttcattttaaataaaaggttatatggatagttttattacactatttataggatatatagaatcataaattagtagataattagaagacagaaaagttagggaaaaataggaattgattatttgttggaaattattttaccaggaccttagatctactca

SEQ ID NO: 139470 - DNA, 518 bp, Cannabis sativa
tccaacttttaatggaaaatcttatttttcgtacttaaaaattcctctattacaaaaaagaaacacctaattttctatagggaaatttgcggcataaatatccattttattcattttgttgctaataagtacccaatttttaaaaattacagcatttatactcaaaatttcactttttaaactgtgccgttagtacccacttaacagagttactataaggacacgtgtactgtcctaataattcctctttttttttcttccacctaattaattaagaaaatacataaaattaattcaataaaaataaacaataattgtttaaaacatatatgataaaaaaaaacataaatcaataaatctaatctgacctagccacccactcacacactcctccaccatcacaactttcttcttcctcatctcacataaatttttcaaacaaaaaaacccaaaaaaatatgaagccattaatcgttgagggtcgattagtccacgcacacaggtgtattctagccaca

SEQ ID NO: 139471 - DNA, 1168 bp, Cannabis sativa
  modified_base (1053)..(1081): a, c, t, g, unknown or other
tacctattagtaacctgctattacgggttaaagaaaaatgtaaccatatagttacaaaataaaaatgtaaccattgaatagtcacccatatatatatatacaaaaatatatatatatataaaaatatattttaatatatactcactcgatgtctcgttgttacatcgatagtcgattagctatacaattacaagccatgtgcattatgcgtataaacccattcattgtgtttcttttgccaaatctaaaacaatagttaaatgggatccctcaaaaccaaatcaatagtagtactagtgatagtaacaataattaatatattaaaagaataatgaagacataaaagtgatattgtatacatgggatgctcaattaggattatgaatgccaggaatgtaggttttttgtcgacatgtacccgtctctagttcatgctcatctctctttttctttcttttatatctgtaagatctacattctcaacaaatacaattagatgaggaaaaaacaatgcttggcccatccatggttccatcctcttgtcccctagtaactaataatgcatatattatagcaggtgtaactaaagcatccaattaagcatcttatatatcttcacctttctcattccctttgattgccctccctgagtgctaatgtggaaactgagtctaatggctacttttaatttgtggagcaattaattccaacccaataaaacgatttaagtctcaaatgttacattatatgtttctgttgacgtcgtaaagttgttaacactatattgctaaattagcgagatatataaataatatatctagatatataatttagagacaaatgaagcttataaaagttcactccttatgtcgcgatagtttttatttctcacgagaattacaagaaaattggctatgtctgaaagctcaaatatttagagagaaatgctctgaccttattggtgtttttcttaatgtgaaaaataagctagaggagcactctatttatagggaaggagatcctattgaaattattaagagttagtcccacatnnnnnnnnnnnnnnnnnnnnnnnnnnnnnataagatgaatgggctactccttccattaccaattgattttgagatagaacctcattcatcttatccccaaattctaacatggtatc

SEQ ID NO: 139472 - DNA, 516 bp, Cannabis sativa
  modified_base (461)..(484): a, c, t, g, unknown or other
taaccaatcacaatcattatccaatactaaagtttgtttagccaaaccatgagcagcttggttagcatctcgcctaacatgagatacacaaactgaagagaggtaggataattgatgtttaacatcatccaccaaaacttgaaaagatgaatagcctttgaattgatgattaagagctgaagccaacagtaaagaatctatctcaatgtactcaatagtgaaatgaattttcttgcctaaatgagactgtaaaataaagctttagcctcagcttcttctggtttaaaattgccaacaagagatttagcataagaagctaaaacctgtccctgagaatctcgtataatagcacctactcccaacttattgtttgaagcatcaattgctgcatccatattcatcttaattttgttggaagggggggctgttgggttttgtgctctaaataaaactcatttcannnnnnnnnnnnnnnnnnnnnnnnaaagatcagaaataacatttttatgttgcatg

SEQ ID NO: 139473 - DNA, 1249 bp, Cannabis sativa
tcaagcgtaaaactgctccaaaagacaccaatagacgagataatgctaactttaaagacccgaaacataggctaattataacctaacaatcacattctcttatatacaatgatgtcactgcatctaatgtctataagatagaaaacatatattaattattaaacattaattttatatgttatttattttctacttacattttattatagagcattgttacagtagaacctctatctaagaatactctattaaagaataacctctaatttattataaaaaaatcaagtctcaatttgggccagttataaataagaataacctctaagttgtaattagttatacaattttttaagtcccgtattaacaaagtatacctttatataagaataattatatcttaataaaatatatacatatattttgtaaatttatttatgtagaattaataattttatttcaaattgtattacatatataaatattttatttactcaaaaataattctattatgatatagtattaatgatagtttattgttattattgttacattgatattttttttttgtattttgattttttattttctagtgtaactctattttgttataacctcttaattagaatataattttcttggttctaagtatattcttggatagaggttctactgtattaggtattagtggtgcttatcactatctagatgtgtgagtcctatgattggttagtgatactctttaaaagttattaatcaaattatatgagacatgatacttaattgtgccaatagacacttaggaaaatactaaacatcaataactcttttggcattactctaattttttttttattaaaatgtatattatattaatataaaattattactaatatgtactttacatttttttttaaaataaataataattaagaaaatattataatatataatttttattttaaaaatcaaaagattatttgctataaaattagaaaaaaaaattaataatttaaatatatggaattgattagtatataaatatttttatttgtaaaatttttttttaattataaatacattaatgtatttttttaaaaaaaatgcagtagaaagaataatatatagaataaatcattaaacaaataataatgtatttatttagaaaaaaaattatttatagaaaaatacatttagaaattgtattattagagttatcctttttttttttttttttgtaaataactatttg

SEQ ID NO: 139474 - DNA, 1015 bp, Cannabis sativa
tataattgtagtatccttgtagtactaattaattaagtcggttagatgttatttttcttgccaaaaaaaaaaaaaaataagttattagtacgtaccaattaaaaagcatttaaaataatttttataaaatacatggtcgaaaattttgaaaattcatttaaataatttttttaatcacaatctattttgtataatttattttatcaaaattcatttcatttatctcatcactttctctctcattttctatcacattattttcactatattcacttaaataaaaactaaaacgtaaaaataaaagttataaacacatttttatttgaaaaatttacacaatacacttaacatcaaattatatatatatatattaaaattttataagttttacttttttactattttttcttgtttttttttttctagaaagaaacaatattttcacgttgttttcctgttaaaataatgtgaaaataacactccgtatttaaaaaagaaaattaaaatttgtaaaaatgtaaaaataattgtaaatctataaaactataaattttttgttatttttgagtgtttataaaataatccattttttaatttcgaaaaaaaaataataacatgttttttttcttagattcaaatgtttaaatttaaaaacaaaatatgaaaaaagaaaatattatacaagcaacaaaaataatccatttaagaattttttttttttcatcttctctagtctaacaatttatttattaaaaaagaacttcaaaaggatagcaacaaaaatttattaaaataataaaataaataaaataatttcttataataaaatgcattgtattagagtgaaactcaaaatcatacttgataattggtgaaaaaaaatttcttatactgtagggaaaaaatagtcaggccggacagtaaacaattcctatatatatatatactagatgaaagttacgtggcgagccacgtaaatattagttttatataagttctagtagtttttgtttaa

SEQ ID NO: 139475 - DNA, 735 bp, Cannabis sativa
gccgataattccaccaaggaaaagggaaggttgacattttccacttggcacatgatttacaaactgttgtttttaatttgctctaaaaatacgttatttaaacgccaaaatctatatatatttataattgtcttgcttggacagatgacatgtagtagtaagaaaataatattattttctctctataaaaacatcaattcgtgaatttttttcaaaaaaaagagttcgtaaaatcataaaaaaaaatgagattttagatattttgtataaatttcccaatttaaaatggaaaaattatgcaaatagctccaactcataagactatgtattagagttagtcccacattactaatgttgtgtgaaaataaattgtcatatataaaatgaatgtactactccttttgaaatgtaaccacattcatcttatcctaaattttaattgtcttcatttcaaaacttgtagagaaatgactcttttatactatttttttttttatttatattatcttttggcatataaaaaaattaatagtttttaaagattatggtatacctatattagttttgttaaaatattttttatttaaaagttatgtcaattttttaataattttttataagttgttgtggattgatagtatataaattttattgtacaatatatttctattttcttgtatggtattaaattagaaatttttacaccaaaaatacaaaatggaatttttattacat

SEQ ID NO: 139476 - DNA, 501 bp, Cannabis sativa
  modified_base (453)..(455): a, c, t, g, unknown or other
tttgaatatatcactatcccaagtgaattccccaacaacaaaatgattcctcaccttctcattaaccaagccagggtaaacaatagaaagtcttagattattacccatagggatccaaggatttttgaaaatataagcacttgcactatcaccaattcccttcctagccacttgatgaatcaaatcttgagtctcaaaaagacttcgccaaatgaaactcgaatttctcccaagtttagcattgagaaaatcattattctaaaaatagaaagccttataaatctgagaaaccaacgagtccggcttagtaataaatcttcattcttgttttactaacatggccaaattgaaatcttgaagagaccagaagtccaaacacccaacctctttactgcacgatatccttgttagttttgtgccctaaataaaatctatttcaatataattagattnnntaattaataaagattagaaattgcttttatgctgcatggttcacat

SEQ ID NO: 139477 - DNA, 1221 bp, Cannabis sativa
tgtcgtatactgacatcttggagacatgagaagtgagaattggtgaagatagtggcttggtgaaggcatcagcaagttgcagtgtagtggaaattgggattagtctgatggaccaattcgttatattatctcggatgaaatggcaatccagctctatgtgcttcgttctttcgtggaatgttggattgtttgctatatgtatggcagaatttttgtcgcaatagatgaatgcagggtgtggttgagggatgtggaagtcatctaggagatattacagccaagtgacttcacttgtggtagcagccaacgctcggtattcaatttcagctgaactttttgagatagtttgttatttcttcgtgcgccaagaaatgaggcaatctcgtaggaagatgcaaaaaccggttgtagatcgtcttgtgatggggcaagatgcccaatctgagtcggagaagccacagagatgcagcgaagagtttctggaatagagcagcccccgtccaggatttcctttgatgtatcttaggaggtgatgaactgcttgaagatggtacgacggttcgccatgaattggctgagagtgtttactgcataagtaatatcaggtttggacaaggtgaggtggagaagcttcccaacaagttgtcgatagtgagatggattgttcaaagtctctccttcttcgttgttaagttgttttttaggatctatgggcgttttgctgggtttgctgcctatgaaacctgaatcctcaagtaattggagagtgtattttctttggcaaagaaacagtccttccttagcacgggcaatttcaaaaccgaggaaatacttgagttctccaagagctttgagtttgaatttttgatgtagagatgtctgcagctggtgtagattggacacattaggtcctgtaataatgatatcgtctacgtacaccagaagagctatgaaagtgtcttcagatcctctagtaaataatgtataatcggcttgagattgcttgaatccttcttggagaagagcattggatagcttcttgtaccactgcctggaagattgcttcagaccatagatggatttgtgcaatttgcatactagatttgttcttgcattaagaaaagaaggcagggtcagaccttgtggtatttccatgtaaacttcctcgttaagatctccattaagaaaggcgttattaacatcgagttgtaaaatgtgcca

SEQ ID NO: 139478 - DNA, 1742 bp, Cannabis sativa
taaggacagttttttcactctccgggcccatcctactaatgagggcccggtcccttttaattttcaaaagaatgttaaggagtatcaccactacttcttcttttcttttggcttccaagccgtggatcgcccggagcttctcacggagtgggtcaagatccctcctctgcttcgcattgctgctacccagcttttcctctagcatgccaaggttttctccacttacgatagaaatggtcttaacgtgagggacttggtcacaacggagaactgttggaaggccaagctcatctcagggagtcaatcggtggacgacttcaacctctccaaggtcctttgcccaaacattcgtaccccagacgctgaaaaggtgcttcgggcggacattatagcctcggcggaggaccggtattagaagtatctcttcaggagagaacaggagttagcctatatcaaggctcaagccgccgccgggaggacccttcgactggaggcgggaaaagaacggacgccttctcgacctaagttgctggtcccagttcccaatactgcggctcttgatgccagcacatccggatctggtaagtctcccttaacggtctatcacgtcccttctgcccaagattattcccggtgtaggcctatagaatttgaggagcatctccttagatttaggatgccccccacccggtggggtgatcatgccaaggccttttatttttccaacttaggtcattttctaggctggtcccggatgggttctggacctcctgcacctattcccctggatcattaagcttatctgccttccagctggtttgtcccctcggacagctttcttggggatgatgaagccagtattgtagtgcaagactttgttagggctgagtcagatagtcagggtaggactagttttaccgctttgttttcgtgtgcatattttctcatggccattctgacacttagtttgtttgtctttttgaagcagcaaagccaatggaggatcttttggcgactcttgcccagacctactgccctaactctgctcttccttcggtgcctgaccagttggtgaccccgaaaaggtcttcttctagcgctcctctaggccatatcatcttgatcgactaggacagagaggtcgaggaggaggaggaagagggtgagatcctggcccccttggaccgaaagcgcaaaggcaaaatggtggaggcagagtcttccaaaatggctaagagggtgaacactccgaccgtcaactctgattcggggattctgcctgaagcagaagaatacattgtacctccaagtattatccttactcccgtccccgccgatgaggagaggcagcaactccgattcccaagcataactacgccacggccgagtacacaagggggaatgccaaggtggaagccctgaaaaaggtcttacaggaagctcaacaaaattccttacgcgaggaggcctttaggaacgcttgggacttgaacgtggaccctctgacggactggtccaaccgcttcgtcggtcctaccctttctccctttgcctccgagttgacgagcaactttgtctccaacgtgacccaacttccggccaaaagatacgcagcctgcgcttccacgaactccatctatcaaattcaagatatcagcgctgctatgaccgcggtaagtctctgttaatgtttttttttgggttttactctgtggcatttgatgttggaaattattttacca

SEQ ID NO: 139479 - DNA, 1015 bp, Cannabis sativa
  modified_base (921)..(929): a, c, t, g, unknown or other
tgatcgataataaaagttaaataaaataattaaaaaggaaaaaagattttcaaactcgtatacataactaaaatatatgttaaaaaaattggaatagtataaaattttcctctttgaaattaatttatacaaatattaataataaagaaaatgaaaaataaaatatcatcactgtattttattttaataaaaccgatcattcataacgtaattattcatttaccacctatagttgagatagttttataatcaaaatatcttcttcttcttcttgattgattagtcatttgtttaaaaattcaacacatattatatttttaagaagagatagatctcctccaaaactcctcactcacatcttttatgaatttaaagaaactcataacaaaatcatcctattaattttactttcaaatcaaaataatttttcatagaaactaaataatcatttcattataagtaatgagttgataatacataatgaataaaaattaaatatatataaataaactcgtgaataagattgcaaaatgtagactctctctatagtaatcattcctattatatacacatggaggatttacttcacaatatcaatttgataaataaaaatattatatatgagaataagaaatatggtatctatttatacattatgagttgataatacataatggataaaaattaaaatatattaatatatatatataagggtgcactcttaatgggtattacccattcatgggtaatattgtgaaattttaagtttttatactagtttttctatataattaaaaaaatcttttatttttacattatataagttagggttattcaataagttgaaaaaaattaagaaaaaaaaaatcgacaaaaaacaaagttgagtttaactgaagtattttgtatataaacatattnnnnnnnnngtgtaaaaagtgatatttttttttatatttttttttttaattaagtagctaaattaaacatataaattcaaatttctcttttatta

SEQ ID NO: 139480 - DNA, 506 bp, Cannabis sativa
  modified_base (38)..(40): a, c, t, g, unknown or other
ggtgttaatcaacatacatgtgagtagatctaagatcnnngtaaaataaattccaacagaagggacgtaacattcaagtccgcccagatatccgacctagtccaaggccttcatgcgtgcctcagtgttcttggacagggggctcacccatctagcacctaaggaaccttgcttcctatgaggaactacttcagtgagctcctcggtgacgtagtcttccccttcaaccaagacttggccctccgcagacaccggctccccagcctcattataccctccaaagttttgaggttcggccacttcatcctcctcagcctcggaaggactgccaggacgaacgttgtcctactcctaaatttcttgaacctcaatgtcccccttgtgatctccctccttcatgacaggcatatcttattcagcactcggtaatgtggcgagtgttgggttttatgccctaaataaaactcattttatataatcatatttactgattaataaagatcaga

SEQ ID NO: 139481 - DNA, 676 bp, Cannabis sativa
  modified_base (107)..(113): a, c, t, g, unknown or other
cgtaaaggcatatttccacaaatcactcaaagttcaagagaaaaatgggagccagagaagaagcgagagtaagaacccaagaggtgcattgaccacctgcctgatgnnnnnnnggcccccagggcacctgggggcaactgatgcatgaggtaacaaggtcattttcaaagcttctaacaaggaggctgaacatgaagctctgaatgctggcctcaagctagcacacgaagcgcgggctaaccacctagacatgcaccacgactctcaactagtcatagattatgtcctaggtgaatatacagctcaatacaagaagatgatggcctacctgagctattaagtcagctcaaaggctgtactaaaaggcaagcccccaaagatgacacaacagccaatgcactcgctcgactacacagttatgccttgacaaccaaggcagacttggtacctgctctgttcttcaaagaactaagcctctttcttttaaaaggaatagacatgctagacaaccaacatgttcatgcacctacaacagcatacctccaaagaaaaatcttgccagaaagcagagacctagggggaaggttgtagggtgtccaatcttgctcaacctaacacatagaagtggtatcccaacaccacctctacgaagcattaccaagaaagaagttgaata

SEQ ID NO: 139482 - DNA, 581 bp, Cannabis sativa
  modified_base (70)..(73): a, c, t, g, unknown or other
ttaactttttccaccactatcagatcaaaagatctttctattaaacaaattcttaataattgttttagannnnacaattattcataaacatagaattgagattctaaagctaaatatttacagttctcgcgagctaggaaagtactaaacgagcatcgaggcgtcttgataaaagtacttgaacctagaaaatagatatataatctaactattcataggagcaatcaaaaatatacaaagtgataaaatcattaatagtatattcaatttgcttaaggtggattataactgccattgcgaggcagaattaacaatttggaaataaatggtttggtagactactaactacttaaacaggaaaaggacgagtaatggaaaaacccaaaaagtaattttcatttgatcaaagtataattatttacattgtgaataaaaatgcaagcaaacgcaattacattaagttcgaatgaaagagtacaaggcatttaagatatgagaaaacccaagttggtttacaaacttgtctttgcaaaaatgccactaggggcaaaccattaagacattttcctaaacaaagaata

SEQ ID NO: 139483 - DNA, 592 bp, Cannabis sativa
agtagttctctttatataggccaagggacccaatatgcaagttgtcctttttgatagttaagttagttaaagactaactaactaatcgaatcttagttgttgggggatttaaggaataatactacaaattccaccttatttcctcaagccccaacaagctaaacatatcggtccaatggaggtggtaatgctttcatgtgtagctacttagcaactaaggttgagtaagtccaagcaatgcttgaacttactaacaggtagcaccttagtgccaatctcagcagggttctcttctaacttcactttctccaactcgattacttcttcttctatcttctcccttatccaaaacaatcgaacgtcaatgtgttttgtcttctcgtggtacactagattcttgcacaaataaatcgaggattggctgtcagaatatacccttgcctttccaactagaagcttcaactcctttagaatactttgcagccaaattgcttatttgaatgcctctgtggtcgccatgaattccgcctttgtagttgaaagtgatactacagattggagctgtgatttccaactaatacaatctccatta

SEQ ID NO: 139484 - DNA, 851 bp, Cannabis sativa
aaatcacaggtggtgcccactgtgataggccatgatctagacgaaattttgttctctagagttccccctccctccaccctggttaatggaaatcccaatccattgtttgctcaatggcaaaagaaagatcaattactgttgtcttggcttcgctcatctatgtccgaaggtgttcttgcatctgttgcaaatttctcctcttcttacaaggtgtggcaggccctagagcaacgcttcaacaaccaatctcgtgccaggcttcttcaacttaagaatcaattctctacaatccgcaaaggtaatctctcgattttggattatgctgacaaagttcagaatcttgcagattctttagctgttgctggctctaccgtcaatgatcaagacatcattttacaaatcttgaatggattgggaccggaatatgattccgtggtgtcaggcatcactgcgagaagtgaccttctctctatagaagaggttcatgctctcctactctctcatgaaagcaggttggaaaatcacagtgttgttactgaacttgcaatgaaaatgcaagcaaatttaacatatagtaacccaagatctaatgtctatcgcccacctcaaggcaacagaaccatgggtcgtggatatcccaaaccaggcaatcaagctacacggcctcaatgtcaagtttgtcttcgctttggccatacaacaccaacatgtcattatcgattcgataaaacatgggttactcccaaaccagggactgttcccccctgtgcctttgttgctgaacaagaatgggactatgatcctcaagctttctcgacttcgtttgtcccagattttggagatgatgatgg

SEQ ID NO: 139485 - DNA, 561 bp, Cannabis sativa
gtcttgggagggggaaagaacgggcgagttctcggtcaaaagtgcttataacatgctccaacaacaaaagcgcactgaagagatggttgcaaactcagacttatggcagcaactatggcaattgaaggttcccccaaaagtcaaaaaactttttgcggagagccattacaagtacattaccaacttgtgtccagctagtgatcaagcatgtcgatatttcagtcacttgccctgtttgtaatctataacctgaaatcagcagccatgtcctcatctcttgcccgtttgcatttgattgctggagccaatgtgcaactccagtagtttttgatcctggcggttctttcggcaattggttggagaccatcttcaagcaagttgaagttgatatgatttgtcttattgtcatgtatatctgggcaatctggaaggctaggaacacggttgtttagaaaaagaaacacttccctgttaatgacgtgcttacttctacacaagtagctcttgatcactggaataaagctcaggataaaatttcgttgtcatcaatctgtctggaaa

SEQ ID NO: 139486 - DNA, 502 bp, Cannabis sativa
taataacattttcaaaatgtaatcgtatatgttttaattacagtattattatgttatatatgaagatatattacatttttatgttgttataatttcttaataatagctatttttaatgttatcatttctgttatattatattcatttaataacatttttaaaatgtaatcatataatttttaattacattattattatgttacatattaagaaatattacattttaatatgttaatttctcaataataacactttgtccaaataatgaaataacaatctaatatattttgtatattatcaaaatatccaatacatgtattccaagtaaacaataacatgatcaaagctcatttaatttctaatgagtcagaaatctatttgtaacatttaacatttatggttgatatacataatattatatgagtctgaaatgcgcatttgcaggtgcagccaagtctttgcggcaaaaccaagtggcataaccctctcggcaagcaacaaa

SEQ ID NO: 139487 - DNA, 1121 bp, Cannabis sativa
tattttatattattttataacatcataaaatttatatgacgttcatattaataattataaatctttaatatttatagtatcatcaattcttaacaactaaatgagcattttttgattttagtaatttcttaaagatcataatataatgtcaaaatatcatttatatatatatattattattatttatatatcaaaatattataaagatttttatatcggatatatatgtaattgtagttatataaaaaaaaattagttaaaaacttaataacgtcctattcttcttttccagttaatgcatatacatgtaatttaataagttttaaagaaaacgtaaaagaaaattatattttagttaataaaatattaaaaaaaataagagaaccaataatgttatttttggttgataaaaaaattaaacaaatgagagaattaagaaaaaaatcaatagtgttatttttagcaaataaaattattttaaaaaaatgagagaataaaagagagaacaaataatgttatttagaaagattttaaaatgagagaattatttagagaaattttgaaatgtcatatcaccgcctcatatctctctattaatcaatactctatatgataattgataacatcatatatatatatatatataataaattaatcactttatacactaacagccagtttggcacagctgtgttgtgagaaaaaacagctgtagttgtactgtgagaaaaagcaactccagtagaactgtagaaaaaagctgagctgagtatttgataaattataaattttaaagtactgtgagttgttaagatctattataatgataataataatggtataatatagtttattataatcacaaatatgtaagatcttattttatatatgtaagatcttattttatataatatttatcttattttatataatattttattttttatatatttttaatttttggtcaaaatataaatttatattcatttgataaaaataatttatagtatttttacattatgttttatcaaatgtaaaaaaaatagaaactgatgtatataaaaaaattagattgatgttgtttattaatattaaataaaataaaaattatttttttaaaa

SEQ ID NO: 139488 - DNA, 717 bp, Cannabis sativa
aaaaaaaaaaaaaaaaaaactttcccccccccccgcctcaaaaggatataataaaattttatccctgcgttttttaaaaaaaacccgcctctaaatgtcaatttcgaacatagcgagtattttcacatactttagcttccatttttataaatgcggttggaaaaactgcctccaaaggctaacattgtagtagtgttgtggagactaatgagatttcatctatggtggtttttctttgtcaggtcaagtaataagtattgatggtggatttactgtgaatgccttcccaagctcaacttagtaaacactacaaacaaatttaacatatacataactattggagatgttttatttgcaaacatgtcagtttgttagtgataggggattaatttgtattcttgtatgttaaaggatgagcgtgtacgcccactttatttctggactctgtctttgactttttttcaatataaaatgttcattgttcactctctctattctcccttggtgttataaacttaaaatgttaactactacgaaaataagcttttgtgaccccatgactaaagatttttagggacctttccgtgtgaattattaacgtgggtgattctaaaggtaatatttagtgattttttaaaagggaaattatagtaaatggccccaaattataagagtatgctagtttatgtcctctttcaaaaaaatatagtaaatgac

SEQ ID NO: 139489 - DNA, 1453 bp, Cannabis sativa
aatctgattatattgaaatgagtgttatttagggcataaaacccaacagtttctccggccagagtgttgcacctctagggcaaattcgcctacccctcactgctgggcaagctctaaagagcatgactgtaatggcacaatttttgatattggatgttccattagcctttaatgtcatgttaggccaaccagccttatatgacctaaaggctgttacaacgatatttcattcgtgccttaagtttctaacgaagaatggggtcggatgcgtgggaggaaatcaacaaattgcacgggaaggttataaccttgccttgactaagggtaaaaaggaagtatcccttagtcagagttcgagaaagggaaaagacattcccaaatagggaaccgcccaaggcggggatgaagatgtggatccctgacttggggaaccaaccacaaatgttggtctagtggaagaactagaagaaatcagaattgacccgaatgttctgaccaggaagcttaaaattgggaaaggtttgctgctcgaagtaaaatcagcattgataaaatttctgagagcaaacctagacatttttggatggtcacatgaggacatggtcggaatcgatccttctataattttacacgtcttgaatattgatcctaatttccagcctattcaacaaaaaataaggttgttggacagagaacgagccctagcactaaaagaagaagtagaaaagttgcgcatcaacaatttcataattgaagctttctacccggcctgggtggctaatcccgtactagtacccaagccaaacaaaaaatggcaagtatgtattgacttcaccgacctcaacaaggcgtgcccaaaagactgctttccacttccaagaatatatcaacttgtggatgcaaccgcaggacacgagatattaagcttcttggacgcctattcggggtacaatcaaatcaagatgcattcacccgaccaagaacatacaagtttccgaatagatatgggtctgtacttttataaagtcatgccatttggtctcaagaatgctggagctacataccaaagattggtaaataaaatgttcaaagaccatatcggacgaaatatggaagtgtacgtggatgacatgctcgtcaaatccagtaaggttgggggcatatatatgacttggacgaatgcttcaaagtcctcatgaaatacaacatgaaactccatcccctaaagtgctcctttggagttagctcgggtaagtttctgggttttatcgtcaatgcccgaggaattgaagctaatctagagaaaattcaagccctcctggatatgaaatcaccaacaaaaagtaaggaagttgaaagcttaactggtcggattgtcgcgcttagtagatttgtttcaaagtcaacagacaagttgttatacccaaaatttggctggaggacacgtgtcaag

SEQ ID NO: 139490 - DNA, 596 bp, Cannabis sativa
tttcttggaagcaaagtggggtcatatctaatttaaaaaaagaagatctgaaactgtctgtaagaagaataatagaggcacccatgcgagaatattttagaatacctcagatggagctgtacaaaggtaggatggacctcagggcctacttgtctgaatacacctgattgatgcaattagcaaaagcaagtgaggatgcaaaatgcctctatttattgttaactttatcgaagtctgccgaagattggtggaagatattatctcccagatccatcagtaactggaaagatttacaaacaatgttcaaaaaataattcatagccacgaaagattatgacatggaggtcagttcattgactaataaaaaacaacaactgggagagagtatcaagaagtatatccaaaggatgatggatgcaccagccaaaagaaaggtcaatgatgacatgaagttgttggccttaactttacggatatctaccggatccttgttgtggggatatttgcaaagaaaaaggtctgatactttgtcaggtttcttgtccaaagctttcacaattggggtagttcatggagggggagctgggttcagtatg

SEQ ID NO: 139491 - DNA, 653 bp, Cannabis sativa
gtaacaattatccaagtttcatttgcttcaagagcaatgatttcagtagacatagcatgatcccattcagggattccatgtgcttgttcaaaactggtaggttcagtgagactagaaatggccagaaccaaagcacgaaagcgtggggacaacttggagtaatcaagcacctggtttatagaatgtgcagtggctggcattgagtcctgagaagcaacagagacactgttagaagacaaaaagcaatggtaatcgtttaagtaagaaggcttactgagttttctaacaggtcgagtatgcaaaggattaggagaaggattaacaggatgaacatgtctactgtcggacaaaggcagaatagattcagcatcttggctgagagaattatctggggaagactcagtaagaacagcagagggtggtgtagggtgagaaaagaaatgttcatactgaggtggtaaagttgcagcagcaacaaatgggaaaatagtttcatgaaactctacatccctggaatagaaaactttgtttgtgttcaaatcaagtaacctatatgctttcatcccagtagggtaccccaggaaaacacatgatgcagccctaggtgtgaatttggatctagcatgaggtaaggtagatgcataagctaaaca

SEQ ID NO: 139492 - DNA, 712 bp, Cannabis sativa
tcaataataatcatgagtttattaaagattcgaaatataggttcatggtccctagatcacttctatacaacaatgtataggggacggtttaatttgaggaataaattgagaacgagttagtttctatgagaaataattcttgaaagaaaattagtaattttgtatgaaatattatttagtataattatttaattatgttttgaataattaaaatgtattttaataaattgcttttatataattaaaactatatcttagttaaataaaatattattattgaataatattttgagagagaaacatattatattagtggaaaataatatttaattaatctagattaaatacgagattactaagaattaatcaattattttttattgaaaaataaataataaacttatttagcacaaaattaaaaaattaattttaaactttaaaatataacaaacaagtgtaggtgacatttaaagtccatgaaatttgttttggttattttattattaaataagattatgaaagtaaatatttaactaaatattttattgtataagatatttatgatcaaaagaattatttaaaaaaaaatgtaacttatttagttatagatattatcatatttaaaattcagttaaatagcggcataagtaccaaaagttttatgtttgtaagcggcataaactcaatttttatttttagtggcataagtacc

SEQ ID NO: 139493 - DNA, 740 bp, Cannabis sativa
  modified_base (313)..(315): a, c, t, g, unknown or other
  modified_base (693)..(710): a, c, t, g, unknown or other
ccaaatacttaaaaatattacaccacaaactgaaaataatataccactctttaatgtttttttttatttcttaatatatcatagcacgtacataataaagatataccatagtgcaaaatctgagaggcgagagaagaacagagctggacttgtcggtgccgagagagaagaaggaggtgagacttttggccttgacacgagagacgaagaagaggtagaaagctagggtaatttctccgatagtaacgcgatctacggtggtaatactcaaggggtggcggtcagactggtagaggcgagatggtcttggtgnnnagggagaagaaagagacgagttatctggacacaaggaaatgagaatagggtagaaagttagggtttattatccaaggttatatttgtaatttcatcattaaatttttaacttttttttttttttttgaaaaagcatcaaatttttaactgaatagacattttattattttttttatataaaaaatggacatttattaacttaattgttagatttaggaccattttgcatcttggcaaaaaaaagaaaaaaaaaagctaaaatgatatattgaatatatgtaattggttaagtacattatttaaatcttggtaagcgtaatgctatttttaaaaacacgtatatagatgaaaaaagaaaatttatatggtatactaacnnnnnnnnnnnnnnnnnnaaaatactgccaggcggtattttttacttt

SEQ ID NO: 139494 - DNA, 641 bp, Cannabis sativa
acttttttttaccagcgcagtaacgaactaaactatactatacttgtcttgtaaaagtgacatttcttgtagtgttacccgacttcgccggtgcctggatctcgtgataatcgtgacggttcaagacttggctctaatgtagatgattttatggaatttagtgatctgaacaatgataattagattttttaattaaaaaaaattatattttaaagttttttaagtacaattttataattttatttaagacaatagtagtgtgtattgttatagataaattaatattataaataattattattaatatttgatttcttaaatttaaatacataaattcattaataatatatttttaaaaataattattatatataatattataattatttttattatataaatattaaaaattgaaaatattttttttatataaaaaatattaatactaacagaatactttggtgggtacgctggtattattatgtcagcatgtaaaggatagaatttaatatcgacggaacctaccgctattaatctatcggtatcacactacaagaaaatgttacattaccggcggaattattaggggcggactaaatccgccgctaatagtagggtttattttttaaaaaaataaaata

SEQ ID NO: 139495 - DNA, 613 bp, Cannabis sativa
  modified_base (552)..(558): a, c, t, g, unknown or other
ggccgaaagagagagtgagattgagagaaaaatgtgatttttctttaacttagtttttccttgaaaatgagacaaatgtcctttgtttcaatcaaataaaaccaactaattaaactttaaaatcagattttaacattaactagaaaatcacaaaagacaaactaaggcttggaaaaatgacaattttgccctcccatactaatagccactaaaggtcacaaaggggtattttgggaaattctaaattcatgaccaatcccgacatttcccatgtctaactataccaccgcgctatataaaataccaagatgcaattctactgagccatacaccgcgttcccatgttgtcgggcaccaaaaatgtaaaaatacgaaatttctctatatgacatattaaatgcaaactgaattcaaataaatcatcataaacaattattttaatatcaataaataattttcataattaaaccctaattttctgctagtttccaaatttaaattaaacgatctttacaactatccccccattaaaaggatttcgtccccgaaatnnnnnnngaataactctggatattgagctctcatgtctgattctaactcccaggtgccttcc

SEQ ID NO: 139496 - DNA, 654 bp, Cannabis sativa
tttaagagtcctactaagaagagaatgaggattatccagaatacgccaagcttgtttagctaacatagcttggttaaaatgaacaagagagcgaaaacccaaccctccacagaattttgatttacacagggctttccaagatttccaatgaattttcctagactctccattagaaccccaccagaatctggccatcgcagtctcaatcccttacaaagcttaacaggaagtctgaaacaagccatcgcatgagcagggatagcttgtattacagcttttaaaagaacctccttaccagctctcgaaaaacatttagaagaccaagatctaaggaccgaggccactttatccttaagaaaagagaaagagtgaaactttgaacgagacaaacattgaggaagacctaaatacttagaaacgaaaggcttatcttctaaattaagagtgtgaaaaaacatagtacgaatttcctgaacagtattaggagagaaaagaatggaggatttagaaaaattaatggcttggcccgaggccctagaatagatattaaaaatttcttgaagcgcagaacaagactctctatcagcagaacaaaaaagaagactatcatcggcaaataataaatgagaaatcgagggcgcatgcctagaaata

SEQ ID NO: 139497 - DNA, 783 bp, Cannabis sativa
taatttttagttacaataactttttagcttcaattttttattaaaaaataatgaatagcagtgatgctacaacatagcatccatgcaaatttctaaaatagcattatcttctctcaaatggtatagcatcttaatgttttgccacgtaatatatccacctcaccaaacatcctctaaagttttaccattaaagatactcttaacctcacttcttcttctggactattctccattgatcatattctttttttaataataataataataataatctcttcaaaataataataataataaattataaatattaattggtccttattaataatatctaaagcatattagtgaaagttgcatggtttattaaatagaattattccttaaaaggtgttagtgcactccacatacttcttctattttattatttaaaatacattattaaaaccttatttttttcttttattttataacatacttttacattatatcatacattaacttcattaaaatatattactaaaaccccacttttttaaaatttaaatatattttatttattttaaatatattatttatatatacacatatttccatacaaaaataattattaaaacccaaaataattaataaaatatatttattagagaaataaatattattctataaatttagaacatgaatagtaaattttaagataaagaaagaatttagagcatctattgtaacatatttttagtacggttctttaaatttttcaaagcttctctactttttttttttttt

SEQ ID NO: 139498 - DNA, 887 bp, Cannabis sativa
aaacaagagcaaggtcgtgatagagacccagaaagagattgtttaaactggagcaagcaagaacgaaggcgtgatcatgacagagattgagaaagagatcttttaaaccagaacaagaggaataggggataggatgatgcacgaaaatagagaaaatggtgtggatgatagctcccaggaaagggtaaacgatgaagagaaggacgaatgaaatagtttataagaaggaaggcatataacagtgagttgtaatctgtagtgaacaatttaattttcatatatagtggacaattttggtgatacctggcattaacaatttaattttgatatgtagtgaataattttatttatttaagttgataaaaaaagatagaatcattagatattgcgtcctttatcgttgtgcagagaattttcaataatatttaaacatcttagcattgagtaacttgaggtccctgaccacaataatgtgttttctcatctttgcgaaaatttgtctttgagatttggctacaaggtatgacactgacactaaggacttgattttttttattagtctaaatgttcttttattgctactttgggcataatttgatgtaatttaggtgcgaattcttttttggattgaaaaggcgaacaatttgcgaatttcctggtattgatgtagtttggcatgctatgttgtatgtggtcctgtatgatcattctttagagtgttaagtgatactccattgtgtagccaccaatgattgtgactctactctcttttctataaatgtgttaagactatctaatttaccatttacttctatggagcccttggatacatatgccttaaggatgcaaaaaactacctatggaaaatctaaaggactgtggaagac

SEQ ID NO: 139499 - DNA, 596 bp, Cannabis sativa
atgaatcttaattcataaaaaaaagcatcagtaaaacataggactgaacatttcgagcgggtttgacctgaacccgagcaacccgcacgaacccgatcctatcaactcacaatttttttttaaaagaaaatgttcgggcgggccgggttcaactcggtaccctttgggtggggttcacagatttaagttttaagcaccaccgggtttcgggttgaccccgaacccgcctgccaacttgcttattaaatatattagaaaaggaaagggtaaaagaaacgggtttgggaatgatatggggtgtgtgtgtcagggattattatgaggcgcatgtttggggtgagttgtctgcttggtcgaccctggcattttttaattttttttttttaaatggaaaagggaatatttttttatactctctctacccaacaatccaaaagaaaatctattttcaaacttttgaacccaacctaacaatggattgaggtctatttttttgtatgagtttgaatttatgttctattttaaaaaaaaaataattagaattattattactaataaatacttaaatttttaagtcacccaacaactttcaagcc

SEQ ID NO: 139500 - DNA, 646 bp, Cannabis sativa
taattatatttaggtttaactaagatgttgaccctttacgtggcaacatctaataatttgttattttttttttattttttttttaaaaaaatacccaataatttctaataaaccaagaattctgttatacagccacattttatatagaatagataattgttaaaaaataaaagtatgagaattacttcatataccatttttttttttcaaatttatggtttgagttgctccgataatttttatgtgagctgttatatatatagattttagttgcgatttaagttgttgttgaagtattaaacttgatttaatatagttaattactataattttcttgttgctactaaagtttttagattatttatatatttactaaagtgtctagaattttcttgtttatttgagtacttttgaactttttagaattatttttcatttgtgttagtagtaggaattgtgtagaaaaatgtagaagctaatcatttaataatgtttctagattagtccataaagtcctataaatagatatgtaatcccgtcattttgtaccaagtcacaaatcacacaagttgagttataatatatagcctcttccattgaagtattctctccaaaattctttttatttttcaacaaagtggtacca

SEQ ID NO: 139501 - DNA, 1226 bp, Cannabis sativa
aggagaaatgatagtctccatgatgggttttattctgttagcgatagctttggaaacgattttatacagggttgagcataagctaatgggtctaaagtctttcagagaagaggcattggattttttagggataagcacaattaaggtcttgtttatggaggccatactagcattatggtttaagatatccaagagagcagcacataaatcaccccctaacgtgctccagttcttttgataaaaataggcattgaggccatcagagcccggggctttatccccagaaagttgaaacaaagccgtcttaatttcctcagaagtaaagggagcttcaagagaggcaaactgctgggcagttagcctggaattgacagcagaaaggatcatattgacagcatccctgctacttccttgagaatggaacagggtagagtaaaacctgcaaatttcagcttcaatagcagcagtgtttgaaattaccctaccatcatcaagagtgagcttcctaatgaaattagttttctttcgagaagaggctttgtgatggaagaattttgtatttttatccccagcccgaagccaatgaactttagatctttgcttccagaaaagctcttgtttatacaacaggctatcaagttgggattgcagattggaagtttcagctaattgctcaggagaagctggaaggagggaagagatactattaagttgtctatctatatccctaatcctaaacgacaaactattaaaggacctattccaggtctgaatatcctgaatacaagtattttgcttatgaagaaagctggacaagggagaaaagttagccccagaattaggagaggaccaagaactatttacagtggtgaaaaaggagggttcagtcagccagtgattctcgaaaaggaaccttttattcctaatcctacactcactactatcagttaagactaattttaaaactctatgatcagaaccataaaacccaaggtggtggaggattgcatgaggatactggtggaaccatttctcattggcaattccccaatcaaggcgctcaaaagtatcaccatgtttccaagtaaacttattaccaacaaaatgtataggagttaaagaatatttattaacaaaagcttgaaaattaatcgtagcataatgaggcaaagaggccctactacttctatcagcaatcaaaagataatcattgaaatcccctagaa

SEQ ID NO: 139502 - DNA, 578 bp, Cannabis sativa
gaatccatttacatactaataagttaaaaaaatataaaacataacctaatcaaaattatgaaaatggtgatgaaccactataggtgacatgcctcctgatcaatttatagcatgtagttttgatttttttaaagaatgttgtgctcaacttttataacagctcccataactctcaaactactcatttaagtatataaatgtccatttgcattcgtaatactaaaagttttaaggtggtcatttatattcaaatgagactgaaaatctataaatagagagcatattgttcacttgtaagatacttgttaaagtcattagtgtccttagaaccttgtgagattatgattagacaccaggctaatcatatgtatgaagattgataaatcttttaaaaaaaattagttttcttaagtgtccatatatatgaagattgataaagctcccatgctttctccacaaagcggtcgtgcacgagaagatgaattattatcgaaaaaaaagatggacaaaatccctaaatcgctaaaatggatggttgttgaattcctgaacctcaaagataaacgtgatataatcac

SEQ ID NO: 139503 - DNA, 576 bp, Cannabis sativa
tactcataaaatgttgtactaattcactaattctccatcatgatattcattaataaaaggcatatatccctaagtgacaagttgttatttgattgaaatgtctaggttttgattcgacttgacttgagaaaaaaatgattatatgtttaatgttatgttcttcactgtagtttgattgtttcattgagctttgtttttttccttttataatatattttaatgagtaggttgaactcaaatagttattaataatactaaaccaagctctggagttgtagcttttttgcaaatgccttcgtatgatctgtaaatacagaagtacattgtgattgcatgttgtgggattcacaattttataaggacaaatgcagaaaaagatatgtattttaatggagatgaagacaatcctgaagtacaagatactactatacaaagcacccacaaaactttgaatgatagtattgagtttagcatttcaagagatcaaattcgtgaaatggctaatgtccgtgatgaaattgctgatcatatatggagagcgaatcgatgatgaagataatgagtgaagcttattaa

SEQ ID NO: 139504 - DNA, 722 bp, Cannabis sativa
gataattagagctgaacttaggaatttatatttattgtatttatttccttaagttagtaaataaaaaaaaaaagagaagaaaaggaacataaatatgaagaaaagaaacctaatattataaaacctctcaagccctttctctctcctcttttcggccatggaagaacactagggcgaatatcaagttttcatctttatttagctcagttcttgtaggaaatccatacttgttgctatcttaatcttgaggtgaatttctcttctagtttttagtgaattcttgatggtttggattgattttggatggggaaacttgtgatttcagggctgtgtgattagcttaagttcagagctcatcgtagatttaatttaaggattgtttaggttgtaattgatgtgaatttatggctgtttgatttaaaatgggaagtttcagataagagcttatttttggttcaatcatggtgaaattggtattttattaaattattaagaatgaatgctttgaacatgctgtattcatgttatagaattgttctgtgaagtttgggaacaattggttaggattggagcaagttttgggactttgaagatctgaaatttttaagtttctggtgtggtgaaccggaattcgagatggtacagggctacaccaacaggaatttcggatggtcaattttcaggaatcgccaattttcgtattttagccataacttttcact

SEQ ID NO: 139505 - DNA, 707 bp, Cannabis sativa
ttagatactattcaatttatttacaaattattttataaacttattaaaatagttttataaaaataagtttataaacctattaaataagtattacttaatgtctaaatataaaaataagaaaaagaaatattttttagtaatttataaagttgtttgatacattaattttatttaaatttaaatattgtttatttatttatcaacaaaatatatataaaaaatactttttagtaacttataaagttgtttgatatatactaatttaaatattgtttacttggttaactaaatattaatggtcaactaaaaataaagaaagtaacatgttacttttgattttggtcatcttcttcgattatgataaaaaaatatatatttcccgcatattaaaatgatcacattaaagaataaattgcagtgatgcaatttttgagaccaaaaagttaaatgtgtagtaaaaatatctttttaaattaaaaaaataaaataaaaagatttttttttttaaaacttaatggttttttaataatattatttgttctattatatatgtgtggaaaaaaaaaataatttggtggcatcacaaaataagagtatgattatatatatatatatatatatttatatatatatgggtaaataccattttagaccctctgttttacaaaagttactaattggatcctatgttttgttaaatgacaaaa

SEQ ID NO: 139506 - DNA, 577 bp, Cannabis sativa
  modified_base (504)..(528): a, c, t, g, unknown or other
taagtgttgctcattctgcacgactcgttgagtattccattatggacatgccagcgaggcatcctgctcggcatgttgatccaaccaggtgctttaagttgatgccatgtgtcaccaatcttgtgatgccacgtcagagtgccaattttgggataacactatttatctcaataattggagtatcatattatgaagatgagaactattgacttctagtttcttttgtaagtgcggtaataacatttgtgtccggcaaataaacaataaattaacaaaattagcatatagttgatatgttatagtaaattaaaattaatataataataataataaaaaacttaaacaagatgtgaagatgtagctttattactatgatgtatagcttgcacctacatatataaataaatttcatttagtaagattaatatttaaaatgattgaagaaaaaaaaattagtagtttaactttagcctgaagtgaagatactgttggaaattattttannnnnnnnnnnnnnnnnnnnnnnnntatgttgattaacaccctaaatattaacttctaaaacgattatgaaata

SEQ ID NO: 139507 - DNA, 509 bp, Cannabis sativa
aattacacacctaatttttaatgttaacttaaaaatatgaagaaaaatacgtaaaaactaaatattaccttttatttaagtttaatacttcttaaaaatatcaattttacaagcgtaatgtaactaaatgtttgaagtaactaaaataacaaaattaccaagtaataaaatataaatatcattaaaataaatacattgaattactaaatgttataaattcaaccaaaaatatctactaaaaatataattaatatatattttattttattattactttttattatataaatcaatataaataattttttaatgtatataaatgtaattggattggatcggtacttaattatattttagaattgatattgaaaatttacatgatatactaacttttaccattttttttacaaaaatagacagtatattttacttttttactgtgttttttttataagtttcatattgcagtatactgtgttaaattttcactgttgttctactgttatttt

SEQ ID NO: 139508 - DNA, 529 bp, Cannabis sativa
tgtcattctaatactttaaaatattaccaaacaaatgaatggaatgaaaattattttatttccatttcattccattttattatctccaaccaaacaccacttaaagaataacaaatccattctaatgcccattcatgtaaatcaaacaccaccttaattgattcataatgtcacaaaataactttatatgtactactaagtactaagataatcaaatattgattcatggaaacatgcatgtgcgtaaaaatatattatcaggtgaaaacatctccaatatcggtgatacttggagagaatgcttggttatatataaggggaaatttacatagtatattgacttttgtcatttttttacaaaaattttgccacacggcagaatttacttttttattgtatatttttataagttttatactacagtatactatattttttttttgttttagtgttattttacggttgttttccataatttttttttaaggtgtgtggttcttttatgtttttctaactgagaatttaatat

SEQ ID NO: 139509 - DNA, 577 bp, Cannabis sativa
atcatattcctatatatatatatactagtattcttttggtgaattggttattcaattggattcaatatttctgttatttttttttttttgccaaaatcaaccgctgcaccttccttccagtcctcttcttgatcaaccactagcctgttagtcaaattgaccaagtcctcaatgccattggagttacccattccagccatcaatcccagcaaaacaaaaatttcaatctcggtcttcaaaacagaattctaaagacaagcaaattgcagggtccttcagaccatttttttttttatatattaaaacaggctttaaaacaatattttaataacttaagttaaaaaaaattgctaaaagaaccatatttaataacaaattgcaaaaaattaccttttcaaaaaattgcaaaattaattaatttaagttttaaaaataaaattaatttcaattaaatttttatccaaattttttataaagaaataaaatatcacattacaagtcatttattattattttttatttaatttctaaattaactatagtgatccctgtaagcaggggcggacccacatagagg

SEQ ID NO: 139510 - DNA, 1068 bp, Cannabis sativa
ccaacaagattgtggccaaaatcctaatcgacaacgggagttctgtgaatttgttattcaaagaagccttcacagcaataggcctcacggactgggatctttaaccaagcggttcccagacgacggggtttaatggaacaacacttattccaatgggaaaagtgagactcccagtcaccttgtgcccggacacaccccaaagaactttcaaatacttcacatttgtggtggtggactgcccaacagcttacaatgcaatcctcgatcagacgaccctggtggattttggtgcagtcacatcgattaggcacttgtgtctgaaattccttactcaggaggctgggataggaaccgtaagaggaaaccagggagaggccaggcagtgttacaacgttgctgcccaccttcccgtcctaatggtccatgaattattgagccgggaatggtagaagaagatgtgttggatccccgtgtgggatccaaaaaaattgtagaccccatggaggacgtcaaggaagtgtcagtgtgtgacctcgaccccaccaaggtcctccgactaagaaaaatcctagaactggaggaaaaagaagaaataataaagacagtaagggctgccacagatgtttttgcgtggtgtcaagaggacatgaccacataagcccccacgtcataacccacatcctcaatgtcaacccagacatgccaccggttcagcagaaaagattcccccttgactcggtaaaggcagaagccctagagaaagaagtggacaaattgctaaccagtggcatgatctggaacttatattacccagaatggttgaccaatccggtgccggtaccgaaaccaaacgggacagggcgagtttgtatagattttaccgatctaaacaaagcctgcccaaaggactgttttcctttgccaagaatcgaccagatggtggacgccagctccggattcaagctattgtccttcatggatgcatacgccggtttcaaccagatcaagatgcacatcggggataaagagtgcactagcttcaggaccgataagggggtatactgctac

SEQ ID NO: 139511 - DNA, 789 bp, Cannabis sativa
gccgagttggtgataccgagtaggaaaaaaagctcattcaactcaagcgtgaggcttagttgaagggaggcgacggggccaaacagtatgctcaagaatattcagagcaggagaagccaagcaagaagaagaagaaagctcccccgaccgaccaagcacatgtggaacatgccatcagaattagggaacctaattttcttgctcacccatttacccctatagagggaaaaggaaaattcgttctagtggagcaagaagactcttcagatgatgatgttccatctatacttattctggaaaatgcccctgcccgtgtgcaggggtactttaacttgtatttacttctcttatattatgcttttcacatatattatggctgcgtctaactatattgttatctgtgtagaaatgtctcagaagatgctctaggccttaaagaagagagtgggagacagctcgggcctgtctcctccgtctaagaagagggctccagttgatgaggtcattgacctttctgaggagcgacctgttgtggaccttccggctcagaaggtcttgaagtcaaagagtcccaaaagagggagctcagacgggtctgatcaaggtagaaccccttcaacaatcgtggcactgagcatagaggccaatagggtaaagacatgttccagtattacctgaaccgatcacttccgaaagtgagtgatcatctgaccggggcggacaatgagctatccttggagttggtcctaggaggagtcttgaatgaagctactgttggaatttatttta

SEQ ID NO: 139512 - DNA, 907 bp, Cannabis sativa
  modified_base (227)..(229): a, c, t, g, unknown or other
tagtacccttgtaatcaacaaccctagcgagttaagcaccgataccacacttacgcacttattgccttaaatcctaattcatatatttaccccatataaatattcgttaatcaaatagcatttaatgcatggcatcacataaaaaataaatactctagatgcttacataatgcctaaaatggaaagcggtaaatagatgatcacacaaacagtaaagtatttactcnnnatacttactgcaccatgagtcgagcttgtctctgtcaatgaatgtacatgttcggccggtctacatgaagttaaaaaccttggcgctctgataccaaattgtaatgccctaaataattaggcacgctacccaagatgcttatgaaacccttatctcataaacgggataactaatagaattagcgcataatttaaactttaaaaacaataggaatggaaaacaaacttgtaatattttaagctttataaactaaaagttacagaagttgggatcccaaaaacatttacaaaatgttattacaagtccttttccataagccggcctatgcggcaaaacagagtctcataaaacaacactagtagaccctaacctgcttggtttgatatggcccggacatgtacattcttagtccagctcctgcactcatggccgatcaacaacagtcttaacctttcctgcacagtagagcacccctgagccaagcccagcaaaacagtataaaatatatcaatgatatgctcatcatataatataaaaacagtattgttattctaatctatctgtgtgacatgcctgtttatgtttacgtgatgtaatcctacgtgttactctcacacgtctatttatgtctacgtggcatagacctacgtgttgctcacacatgtctaaatacaataa

SEQ ID NO: 139513 - DNA, 819 bp, Cannabis sativa
aatgcattcaaaggtttaatattcccaaattaccctattttaatagttaaactaattatatgtactattatatttatttaataaaaaaattgatttatctttaataaaaaaatataaaatttatttttttttaaagaaaacattgtaaacataatattgatatttgtgaaacatgtgaataaaaatcaaaattagaaccatgtaatagagaagttcaaacattcaaaattttcatcaactcaattttaagcattcaagtattccaaactaatcctaacacaaaaaaaatcaaaccaagtaatattgtaaacaatttcaaaatccccaaatcaatttaacatcaaacctacaaacaaaatttgacacccgaatctgaacccaacaacatttcaaattcgaaaacgtgatgggcgatcccaaaagaaaaaaaaaaacagctcgtctaaccaaaaaaacttagatctggaatttgtccagtagacaatcgtcttcgtctggtcatcaccatcctctaccttgctctcacgaccttgtcttcattgaagaagtagaagaatagaagaaaaaggggaaaaaacatgtttataattatttttatgatttaaaatatattttatattctgtaatgaatatataatttcaaaagatgtatcaatttttattaggggaccctttttattattagataaatataatagaatatcaaatgaaatattaaaaaggggtagtttaggaatattaaaactttaaatgcattaagggtactaaagtggatagtttttacacattaagggtattaattgatcattattcaaaata

SEQ ID NO: 139514 - DNA, 792 bp, Cannabis sativa
aaactaaatatatactaattttctcttagtttaacaactaaataacaattctaatttaatatgaaaaattattagaaatcaacaaattgtgttaacttaaaacacacacacacaaataaataatcttaataaattaaaacaaacttaaagtaactacaaatcacttgtacaataactcaaaaaagtatatacccaataaaaactaaatgtatacttatttagtataatttgatttgatatattattttagttatattttgggattattttataaatactaatacatgacaaaagaaagtttacatttacacaaatttatatttttttttttacaaaaatacaaaaaagttgttttttcgttgtttttatgtaaacttcataacaacttcataaacatttaccggtaaatatatataattttattttttttcttagttaaacaactaaataacaaccaacaaacatcttcataacaatttcactataatatgaaaattaaataggaatcaaaacaattccacatgttgcataaactctaaaaaataataaaaaaaatctatgtacaccgacttaaaaatatatttaccaataaaaaataaacatatactcattttttcttagttgaacaactaaataacaacccactttaaactaaaaattaattgggcatcaacatataacgtcaacttcaaaaataaataaatacaacacacaaataaagaaacatgaatatagtatattatttttttcttggttaaataacttaataacaacaaataaataattgtataa

SEQ ID NO: 139515 - DNA, 1152 bp, Cannabis sativa
acacacctgagtagcggcatggagaatcctcttctatacataactccctctacaatgatgtaccatcaacctttctcctcattttctaagcttcgtttctgttatctaagagctccacagtgttgaggtaggctgctattggcgtcatccagtttggcgatgtatcaatcatttcaacctcttctgtgccgatgatactatgtttttcaagaaattggatggggattagatttgctttatcatttatgttgctgcgcacaagtcaagctaatgcatcagtagttgtgttttcttctcttggaatttgcttgagagcatagcttttgaattgtgcgagaagatcatgtattttgctcaaatatgctatcatcgtctcccccgagcctcgtactctctagatacatgatttaccaccaagtgtgagtcactgcagatctcaatgtgttcgactttcatctcctaagaaattcttaagctggcgataagagcttcatattcagcttcattattggatgccttaaatacgaatatgaccgcagtgtgtaggtgtttcccccagatgtgacaagggtaattcctgcactggatagctgatccgtagctgacccgtccacatgtatcttccaagacgtcttgtcttcactgttgctcggcttaggtacttgtactggctttgggttactttctgaagtgctctcttctttacccgtacattcaaccacaaaatctgctaaggcctgacctttaatcgctgtttagggatgaaagataatttcatactggcccaactccactacccattaaagcaaccatccagaggcgttcggtttttgcaatacttggcgtaatggttggtgagtgtatacctaaacaagatgagccttaaagtaaggccttagctttctcgttgctaaataggcaataagtgagcttttctatcaatgggtaccggccttcagcttcgatgagtcttttgctgatgtagtagaacgggtgttggatattggtctcttctcttatcagtacgacacttccatcatgttccgtgacagccaagtatattcctaattcttctccgtccaaaggtttttaaagcacaagaggttttgctagttgtgtttttagctcttgaaaggctttttcgcattcctc

SEQ ID NO: 139516 - DNA, 1456 bp, Cannabis sativa
actcaacgctttgcaaagccttcctgcgggttcctgagactggaaccgggagtgcgaccttcgtcgatctctaaacgaatcccgggaaaggaaagcgacctattggagacaaagagcgaggatttcttggctcaaagatggggacaagtgctctaaactcttctttctgtcggctactattaaaggtaggagaaatgccattgaaagtttattaaccaaagacaatttttggatcactagtagggatcgtatcggcagagagtttattgatttttttaagggtattttctctggggcggacaacgggcactcctatgactgcagtggtttatttcaagagagaattacttcagaggtggcagagaatctacttgactgccctagtgctgacgagatcaaaagaaccctttttgccatgaataagcataaggcccctgggcctgatgggatgtcagttctgttcttcaagcattattgggattctgttagcgctgatttctgtgaggcggtgtcagatttttttctaactggtaatatgcataaaggcattaatgctaccaacattgttctaattccaaaggtccaaaacccgaagagaaccagccatttcagacccatctctctctgcaatgtcgtgtataaggttatttccaagatcctggcgaacagaataaaacctctgttaccttccttcatttgtcctacccaagctgcgtttgttcccggaagaaacattcatgacaacaacgtcattgttcaagaagttattcattcttttggtcggaagaaaggtaaggaaggtctttttgcaatcaagattgatcttgtcaaggcttatgatcggctaagctggcgttttgttgaccatgtgttggagtgctgtgggatccctgtcagattccgtaattgggtctcgcaatgcatatctaccactactttaaatatctgcctgaatgggggtcaagttggaaagattatcccttcgtgtggccttcgtcaaggtgaccccctctcgccctatctgttcatttgggcagcggaagtgctttcgaggctattacacgacgccttatctaaggggagcattcaaggcataaagctaagtaggggtggtccaatcctgtcccacatcttctttgcggatgatttaattctgatgggtagagccaatttgaatgaagttaggggattctggagttcccttgaaaatttctgtctgtggtccggttaacaggttaataaactaaaaacctctattttcttcagtaacaatacctcggcaaacatgaggaaagagataaaagaactgttggggattaattctcctgaagggtgcatcaagtatttaggcttgcccctgttccgctcgaaacaaaaggacgctgactttaacttcattcttgataatctcacttcaaagctgcagggatggaaggcaaaggttttgtcaaaggcg

SEQ ID NO: 139517 - DNA, 569 bp, Cannabis sativa
gaaccacacacgacccaaaaccccgaccccctcccaaaccaaaaccgagcacttctctctcaccgcctaccgcctacaccgtcgggccccttttttttatcattgttttttttttttgtgtgtgtgatatatgatttggagtattgataagtattgattttagggttataatgtataatgtatatgtttatgtgtgtaccgtgagttttgttagatttaggttcagatctgcgattcgggaaaattacagtttggggaagacaatggtctgatggggtccgatgggcaccccgatggggggtccgatgggcaccccgatgggggggtccgatgcttgcgtgctgggaaaaaaattttgtttgggtctgacgggttcgatggggacccgatgcatgtgcgtgctgggaaaaaaaatttgcgggtccgatgcatgtgctgaaatttttgtttggtccgacgagtccgatggggacccgattggggtccgatggatatcttattttagccctgggaagctcggcagtaaagagaagaagagaaaggggaggggggtaatgtaaatgggggta

SEQ ID NO: 139518 - DNA, 511 bp, Cannabis sativa
agggggccattagtagtgggtacgacatactgaacccaaccctcccccacacgaacaaccccaattgtgaaggccaattttcctttgttgacctcagttttggccaacgaaaagtagtataatatagatgtaatatagtgaaataaataaagacacagagtttttataaaggttcggccccaagcatttcggtaatagcctactccccttgatatgtactgacgtaagaacaaacaatgtagtgattcctctcttagagctcttaaaatgatatctttgagtatatactcttagataagtttttcgaccccttgcctagtgagaatggatcactattcatagggctataagctttgaggaaaaagttttccttctgttaacaatgtctataattggtaagattacatattaaatatagagtacactaattaagggatttggacagcttgccatatctctgtgatatgatcccagaattatagggattgcttttgtgattcatgatgcaagt

SEQ ID NO: 139519 - DNA, 987 bp, Cannabis sativa
  modified_base (127)..(146): a, c, t, g, unknown or other
  modified_base (745)..(750): a, c, t, g, unknown or other
aaagtaaattaattataataattttataattaaaactataaaatatctacttaaattaattttatgtgtataattaaaggcttaaaatatacgaatttgagacttaatcacaacccccaactagctnnnnnnnnnnnnnnnnnnnntcaagcgaacaaaaataatgtcaacaaaatattttttaggtcaaattttaaaaatgccacaaatattaaagcaaaatattagtaataagccaataagaactatacaaaattaccttgaataaatctagaattgtgagtgtgtgcaccaagcctgagccttcttaccgcaaatcataacacataaatgctttcgaaaaatgtaccaagtagaagtctcaactccattagtctcacagatgtttgaaaatatttattcacggctaaggatttcactcatggggttggaaattaaaaagtgagcactcgaaatagaaatggatagatcaatttaggacaaacatttgaataaacattgaaacaaagataggctataaaataatttagacaaaccaccataagagtaccacaaaccagcttttcgggatttttaaacgaaaatagataatcatttacatttactctaggagccataaaaaaataaaaaataaataataaaaaaataataatacactacaattttttttttgaacaagaggcaacatattagacaaatgaatagaaatgttgctctcgcaattttttttcttttctcttttttnnnnnnttttttttttctttttttgaacaagaggcaacatgttggatataatgatggaaatgttgctcttgtattttcttttttcacataaaaaaaataattacacaaaggctccctaataagatttgtctataaaaaattattccttaaagcaacatcctatcaaaccctagtaccatgtccaaaataatgataaccatgtctaagaatcaataaaaattcaaaagttattttctcaaatct

SEQ ID NO: 139520 - DNA, 589 bp, Cannabis sativa
  modified_base (432)..(438): a, c, t, g, unknown or other
gcgagctgtgggacgacttataaggtcgtctagtaagaaacatcactgagttcaacgaaagggctcaagtatttgttcgaaaagaagaagctgaaaggaaatgaatttattgaaaacaggctctggaagcaaacccaacaacgtttcaacaagtactgtgtcaacgagaatcgataactcgggggcttctggctcaaagagaaaggagcgtcaaaggataaaaagaaacagaaaaagaaaaataagtacgtcccagtgtatactatttataccgagcttattgaaactcgagagaatatttaccttgcacatgagcaaaaggttgccttcggcaagcccaagcccatgaggaatgcgaggagcaaaagagttcctaacaagtattgtaaattccataaggatattgggcacacgaccgacgaatgttgccannnnnnngatgagatagaaagtctcatcgcgcgaggccactttaaacaatacgtgaagaaacagggccatggatacaactagcccagtctgcccaataacctaaataaccaggggttacaacctattcctgttgaaggggaggacatcttggttattt

SEQ ID NO: 139521 - DNA, 687 bp, Cannabis sativa
atgccacgttagagtgcaaaaattgggataacattgtccccccaagtctgtacgggacttctgaagttgcatgtagacttcatccgagctacttctttctttggatggggacatgtgtcgagcgcatctattcgagactcgatgtgaggttgactgggcatcccttcgattttcggataataattctctgacaattaatgtttcaaaatccgattttctctcaccacggttggcggctgcacttgattatttttgattttcgatcttcgcttttaaggtgacaccaaggcgtctgaggttcttttgaaatgattacctctttcgtgacttgcccataaatatcaacaagctttggcacataaactcattttccccatctttcttttctaagtgagttcagagcgaaaagagaggtttttggctacagaagtgccttcatcgaaactgctcgttggtttgacgttgcttaaatcctaatatctgactcttgagtaagttcttgatttcctttatgcttattttttcatgtttacattttgaatacaccttcaagtttactgtagaaaatacataggaaacccaaggttcaaaaattctgcgattcttctttgtcatggtttcatgcgattttacagtccataatgctttctttctaaactgcacaatgcttgtctttcatcttgctta

SEQ ID NO: 139522 - DNA, 679 bp, Cannabis sativa
atcttcctgtttaagtagttagtgatctacaaaactttttaatttttgagcagttgttaattctgtctcgcaatagcaattacaatctgccttgacaggttgaccattttcgtcaactagggagactaagcgctctattcactgaaaaagttgtttccataatcacgtcgatggaactagtcgagcagatacagaaagaaaagaaagaagtagggcatgcgttgtggccagtcatcttgagttgtcttcttaggggggtagggctcttcaccaacctattatccttaaacaacgggtgttatgtcctaattcccgcagttatgcccgatagcacatggggagaatgattggagcaaactaaaatatactttaatgattttatcactttgtatattttaattttctcatatgaatttttatattatctatccattttttaggtttaagtacttttatgaaggcgtcgtgatacctcatttagtactttcctagctcgcgagaaccgttagtattcaattttgtacgcgagttataacttttgattttcctatctcgtcagataggttttaattcaaaaattatagctgtttgatccattcttcgtcaaaaggtttgatcaagatgttataacgattcgaccgctctctcgtcaaaaatatttggtcagggagttataaca

SEQ ID NO: 139523 - DNA, 1382 bp, Cannabis sativa
agacttttctcttaaaaagtctacccaagtaaaacgagaaaaatcatcaactcacacaaaaatatatcgcttaccattcagaatttcaacttgaattggagccataagatccatgtgaagtaattccaatactttcgaagtattgatatcagacacagttttgtgagtgattattaattgtttaccaagttgacatggttcacacttaccaacactttctttacccagattgggtagacctcgaacaatacctgtatttgacaatttttcttagatttttaaaattgatatgtccaagttttgcatgccacaaatctgtggtgttgttaatggctgaataacaagtgaacacaggggttaggatataacaattatcagtggatcgaaatccttgcaaaatacattgattatcatcattaagttcataacaatgatcacgatcaaatgagacaatatacccttagtcacaaatttgactaatgctaagtaaattagcccttagtccttccatctaactttttaatatgcgtaacccttcaaaattgagagttcctattccgacgaattttccagctaagccatcgccaaaagtgacttccccacactgcataggccggatgttagtcaaaaaatccttgtcaactgtcatatgtctagagaaaccactatcaaaataccacatttgagaagcagcacttttatcaaaaaaatcagctagacatttcttcttaatccatttttgtttcacacctttatgtttcttttgagatttttctaaattaccaaaataatttgttttatacatattttgcatggtaaaacatttaggtctgaatctgttgcatcaaacttcaaatttgcagcatcaggaaagttcgttggaacactagattttacaaattttgtggttccagaactttcgtgattccagaactttccataccatttgatccaatgccagcaaagcctcttggacctgcattttgagcttcttcaaaaatagaagattcgggattgagcatttggacatttttcttaaaattttcaagttccttctttaaaagagtgattttttcatctttaacacaaaaatccgtctcatattcttttatttttaactcaaaatattcaatttgatgagacagtttttaattcattttaatcaacactctatttttagaagtaacttgtatccacttttcatgcatgactttgtaagatttaacaagagactcctcagaaattttaaaatcatcagaatctgattcttcttgttcagtggtgctattcaaacataccagtctggctttcaccagtgaatcacaaaacacattagtcataacagaagttagagcaacattcttagaattttcttcatcact

SEQ ID NO: 139524 - DNA, 652 bp, Cannabis sativa
  modified_base (604)..(612): a, c, t, g, unknown or other
gcacttagtgcggattggatgttgtttgaccaaaaaagtgcgtattggatcggatgaataaccctactagcaaatgcacagacagtggatcctgcactgtagaatccaaggaatgcaatggctccacctgccacgaatcctgaacaaccatcaactgtaggtcaaggtgtgacaactcctctgagtggaatcgcgcctggtgtgcaggagactgcaaataccagttcaacaaccaatcagggcattcttaacaatgaagttccgtccacaacaaatgttcggacaaccattggagatgataccaagatctagaacctccatgaagctcttggaatcatgcaaggtcataccaacaccctgcatcatgatcaggaggaactccgtgctatggtgaatctcgcattcaaagagcaaaggcgtatgttcgctaaatggagggattaagaaacggaaacgttgagagctcaacaagcagccattgacgaacagacaaggcaggccaccatgctgatatgaaaagcctatcaggctacgaatcaacaacctacaactgtcattccgctgggtagtcaaaagaacaatgtgttggaatatattttaccannnnnnnnnatctactcacaagtattttgtttaaacaccctaaatatga

SEQ ID NO: 139525 - DNA, 1301 bp, Cannabis sativa
ttctctcttctatcaagtatctgcaccggttgttcctcatatgacaagtttggctgaagttccaatgcttcgtaacttagaatataggaagagtctgagacatacttccgaagcattgaaatgtggaacacatcatgtaaagctgccagcgctgggggaataaccaacttgtacgctacttgccctatcctctcaaggatttcaaaaggtccaacgagccttgggctaagctttcctttcttaccaaagcgtttaatacctttcatcggagatattcggagaaataccttgtccttgacctggaacagctaatcccagaaagctaatcctcgaacagcttcaattttggctagatccaccatgatcccatctttatccactatgtgccccagatatgagacacgagataaccagaattcacactttttgaatttagcgtaaagcttatgatctcgtaaccgttgcaaaaccgctctgagatgcaactcatgctcttcttctgacttagagtacaccaaaatgtcatcaataaatacgatcacacatctatccaggtaatctttgaacacccgattcataaggtccatgaatgtcgccggggcattggtgagtccaaaagacatcacaaggaattcataacgtccataccgagtacaaaatgcagtttttgggatatcttcctctcaaattctcagctgttgatagcttgagcgaagatcgatcttggaaaagaccgtcttcccttcaattgataaacatatcatcaattcgaggtaaaggatacttgtttttaatggtaagcttgtttagctctcggtaatcaatacacatttgcagggtcccatctttattcttcacaaaaaatactggagcaccccatggtgagtagctcggcctaatgaatcccagattcagtaattcttgcaattgtatcttcaattctttcaattccgctggagccattcgatactgtgctttaggtactggatccactcccggaaccaactcaatgacaaattcaatttcctgggtaggttgcaatcccaataaatcttctggaaagacatccaggaactcgcataccaatcttgtattctcaagctctgatgtcacaggttggctggtatctactgcagttactatgaatcccagaacacctttactcatcaggtccttaactttcaatagtgttatctttggtatgtgttacgaaaattatgatcactacgcaagtatacgcaatcaagtagtagctcatgcaagtgaggtcgaaccacagggaattggactaagtactacta

SEQ ID NO: 139526 - DNA, 790 bp, Cannabis sativa
  modified_base (27)..(40): a, c, t, g, unknown or other
aggatgttaatgaaacatacatggtannnnnnnnnnnnnntggtaaaatatttccaacatatacgtctacacagtcaacagtgtcgtatcataaacctcttacctttaaagagttagggaagagggacatgaacaaattctgtcgttaccataagaattatagttgtaacaccctaatctatagggacgccacatgtgtaattttataaactagtttaatactaatagattaattaattattaaaaatggtgataatattgaaagggaaatttgattttttatgcttacattaccttaaattttttttcctaaacttatacttaccaatatttttaatatatgacaactttattgttttccccaaaacacccttccccaatttcatcaactcatctatttccatcatcttccccgtaaacgtacatcggacccatcgagcccaaggcatcgaccccaagcacaagccaaagggtgcatcggaccctatatcgggccatcgggccaatcgggcaatcatctttaacctccagccaagcccccatcagacgggcatcgggcccgatctgaaaaatttcattttcgacagatctcttcctaatcttcctaaatctaaccctaactaacaaatttcacacaaaactgtaatatattattatatttcatggatttaagcaccaaaaattaaaagaaaaaattggaaaaaaaaattaccttaaacattttgggttttgggcgatcggcgtgggtgatgtgggttgagggggacggtcggccgtgggtcacgtaggc

SEQ ID NO: 139527 - DNA, 554 bp, Cannabis sativa
agaagaggaggaagtatgaaaagagctagacttgatcgagggcttgcatcaacggattggagaatcttattcccgcaagcagtcataaaccaccttggggcctctgaataggaccacaggccgttgttattggatactatgggaggggctagatgcactagacgtcaatttaaatatgaaaatatgtgggcgcgtgatcctcgatgcttttgggtagtaaaggaagcttggaaatttaggatgcatgacaatcctatgaataacttccacatgaagtggaaagccatgggtagcaagcttcagagatggaacaaatcgcagttcaagcactggtctcagcaaattgataaggcgaaatcccaacttcaagaggcagaaatgaagaacccaatcaatttggaggaaattaataaagctaaacaactcctgtcggaatctctacttcgggaagaaatccattggaaacaaaaatctagagtccaatggctaaaggagggggacatgtgttctaagttctttatggcttcgactatagtgcggcgtagaaggaatta

SEQ ID NO: 139528 - DNA, 1207 bp, Cannabis sativa
ggaggaagctcggacaggtctgaactaccgaagggttggtctgagctagtcagaagtgaacccgaataggtgtgggcccctactccacctttaccggtgcttcgagaggccaagacgggcaaagagatgcttgcccactatatgaaccggctgtttcatgaggttagtgagcaactggcttgtgctgacaatgactcttctttggagctgctgatgggtggagtcttgaaggaattcaccagggtaagtctttcttgacactttcctttaattttctttaatttgctaaaatgctaaagttttttctttgtgcaggccggtctgaagttggcctacacttactcttgggctaagtctgctgcttccaggaacacgactctgtccaacaccatgagggcggaggtggacttggccaagaagcatgctaacgacgctagggcagaacttggagctattcggatggagttgggtgaagccaacaagaagctctttacaacccagaagaagatagctgagctgactaaggatctcgaggtttctaatcgtcttgaagagaccatcgagaccttatctactaaagtgaacagtcttcaggatgagaggacttctcttcgggcaattcttcgacgggtggaggaggagaagaagtctaaggaggaggagctttcggccgaggtgacgaagctgaaagagaaggttaatgctctagagactgctggtcttgagctcttctttgacttttggaaggctaatcctcaggcaaactttaactacttgggtgatgctaaggacatgtacctcgagttctgcacttcccaagtaacctatggtgaacctgaggcggctacttctacctctggccaaactgctgatgtacctcccgttcaaacaacacatcctccagcttctactggctcagatgacccgaaccaagagcctgggactccagctgtttaaacacttctccttttatctttttattttttatatatcttattcggccgtaaggccttttctaagacatcatgaccggccaagcggtctttaaacttgtaattattttttattttttagacaataggctgaccgtgcagcttttaatcccgggacatgctttcgttatctttaatgaatttcattcactgtttataatcatcgtgcaattgtgattgttttatttttaccaaatgctttgtacaggtatagg

SEQ ID NO: 139529 - DNA, 1144 bp, Cannabis sativa
ccttcttcaatttaggtcagtcctgagatcatgagtggcacccaacctatcaaatactgaagtaccaggtggccttcctgtctgacttatttggctggcaggttggctagaaattttagtgtgtataactccacctaaaggacggttcagcaggatctggctgtctaccgcttggcccacaggctggacctgtggccatggattggacggctgaccattgtgagtttgtgtggtatgcctagttgcatacccttctgaactgcccaagggaatactagatgcagtagctggttgttgattggtgacttggtaggcccttcttattagtacgatggcatgcctcgtgcgatcatccatggctgcctgcctgctgagccctcagagtttccatctcccggtccctccattctataaattgatgtctttgttcgtcaaatgcaaggtttatggctacatggagatcctcctaatcatggtgcaaagcgttattatgaccttgcatgagcctaagggttgctcggaggttctagatttcagtgtcgtctccaactggcctttgagcattaatggtcaatgggacctcagtgttgggaatggattaatcggctgctgaactggtgtttccagtctcttgtatgcctggtcccagccagagggaaagtcactccatggcccacagtatgtggttgtgtattaactagctcgaggtttgtccctggtggtcctctcgtgtttccaggagtttacacgttgggatctgtcaccattgggtcgccctgatcagcaaggcctctacaagtttgtacaaccatcctatttgcctgtcaaaacttaagaaaaaaacttgtgttgttgctctcaacgaaagcaccaaaatgttgacctcgcttttacccaacgacaatgagtcaaataataagtgattggataatataattaaaagagagcaaaaacgataaagtaaaatgaacaccatactttaaagaggtttggctccgtgagtgtggtaatagcctactccccttatattgtattgacttaggagaaagaacgaagtgttcttcccctttgaaagctcttacaactgttctctgagtaattctcttagatcactattttctctctagaatctctctctaaagca

SEQ ID NO: 139530 - DNA, 837 bp, Cannabis sativa
tgtttatatcggatgcctcttgaaggtggtcttaagttatttgtctaaatttttaagataacttgatcttatataagttgccttgcttggagtgactcacatcttgactttgtatatctttggctagataattagcttgttgattagaagctcctccgcgtcgacgattgtcatagtgtaattcaaatcactctaaaaaaaaaaaaaacttatagactaatttttgaaagaaaaaaaataacgtatgcatatacatatataatcaattatatatcacactaacataattttaaaaactttatttctaaactaattaaatccctattacctcattctcattcataataaatatatatacaatacagttacataatttacacaaataatatatacacaataaatatacacacaatatataaaaacacatattcaataaaacacaaaatataaatatatatatattatatcaagttaataaatatttaccttataaacgcaatctgacgataaattgtgacaaaaatccggctacctagcacacacacaacataatattacgaaaatggaaaaattacaaaaaaaaaattacaaaaataaaaatgtaacaatgtacattaataaaatgaatagaaattatatatataccttaatagacgttgagattcaatgttttctctactaaaatcagtggccgaagttatacagccacatttttcttaatggagtagggtacagtgaaatagggggaaaaactaaacttttttagtgtaaatgattagatattgaaaatagaagatttttttaaaaaaaatagggtgaaatggtgaagaaatgaga

SEQ ID NO: 139531 - DNA, 910 bp, Cannabis sativa
tagatttagtctttgagtggctcgcggatttactggttcccatactttctggatcattagctcgatgagtactttctcctctttgagttgatcgtctattggttctttaccgcctcgtagtcacacttgcttcttcacgctctgttctttcctctcaagagtgatttatcgtctttcccccatcagagtctgtacgagtactcactctatgggtttgggaagaacgttggtgatttctagcaggtgaccttcgttctcccggttgagtccaaagaccttcctcattatcatgagggatttctcgttcatcagtttctggttctcccatatggctgttcattctgattttttagggggtgtctcattttccctgggttgttcttcctgggccttttcttgtctccttgttcgtgagccacgaggtctgcctcatggtcttcttactccaggttcaggttgattttgagcgtttgtctcctgtgccgcccaagctgaggctgcctcatgttctaactcagcattccaatgtcctgcttcttccagatggcatctcaggcaacaacttttcgtttcataagttctcccacagattgggcacctccacgattgagctcttcatccctcgtcctagggttctcctcgagcgtgttgtccgcgtactaggaccaacgtcgggtcgagttctccgagagcatgtggtcagtgcactggggccaccctcaggttgagccctcctagaacgggtggtctttctgtactgcggattggtagatcttctagagcccatatatgggctctttcgtataacgatgattgctttcctcatgtggggtgttaatattttctagagtttcatccatgaaggaaatggtttttcttcaaaagaaaggagagttttttttgaggtctt

SEQ ID NO: 139532 - DNA, 810 bp, Cannabis sativa
ttacacaatcagctgctggtttacacttgtctgaagccaagtatgccaaggatcttctagttaaggctcaaatgagcaatgctaaaccagcccctacacctatgacaagtagcattcgtttatctgcttaccagggggaacccgtggaagatgttcaccattataggtcaattgttggagccttacaatacttgaccattacaaggcctgaactttcttttagtgtgaacaaggtgtgtcaatacatgcaaaaacctctatccactcattggtcagcagtcaaacgaatcctaaggtatgtgagtggcacaataaatcatggattgcatctgcaaaaaccagcaaacatggaccttgttgcatactgtgatgctgattgggcttcggacccagatgacaggagatccactacagggtttgcaatatttcttggctcaaatctcattgcttggaaaagtaggaagcagcagactgtatctagatccagcacagaggctgaatatagaagtgctgctgcagttacagcagagttaacatggctgcaatacttgtttgctgaactaagattgcagctgactcaaactccaactatatggtgtgataaccttagcacaataatgctaactcagaatcctgtgctacatcaaagaacaaagcatattgaacttgatttgtacttcattagagagaaggttctgagtaaaaccatacagatcaagcacctctcctcttatgaccaattagctgatggtttaactaaagccatatctagtcagaggtttggtgagttcaggcacaaactcaaaatcg

SEQ ID NO: 139533 - DNA, 614 bp, Cannabis sativa
tatatatatatatttataaatttataatttgatgaaacgatatatatttccattatttgacgtgaatataatggtaatcagtcatatataatgtacaacatacaataaagtcaataatgttatgctttatgaactttccattagaggtttgagtagttataattaaattcagcaagaacagacggacagacaccctgttcctccaatatattattctctcaaatagtttattagtattgcgtatatatattgtgcatacatatttaattttaactcttaattataaataaatatttaaatttaatttttaacaataataatattttatttgtatttttagaatactgtaagtatgttaagttataatctatttgttattttttattagtatatttaaactaatttttttaaaaaataatacaaatttaattatttagaggaatcaaaaaattatcacgtgaaaatttattcaacacttaacagttaggtacttacaaaaattctaaaattataacttaaatattattgttgaaaaaaattaaacttaagtatttatttataacgggaagttaaacttagatatttatgcggcaaatttatatatatatatatat

SEQ ID NO: 139534 - DNA, 920 bp, Cannabis sativa
  modified_base (389)..(394): a, c, t, g, unknown or other
tagaatagtccaagtggatccttgtcacggaatactaaactcaaatccacacataaacatacagttagaatccattgacagaaaatggatattaagaaaaaacttgtgcaagtcatactgtaatgtgtaatgtgttctagaaaatgtaaatataaaatttatatttggaatctaaaatttaacgtcaaagacttaaatttaaccaaatatacatgagtaattattctctcttagaccaccactagtaatcaaactctaagtttaaatttcctatagtaaacatatatacaataggagattcaagatcaaggatttatatcattttaggatagactgtcgggaaaataattatatgtgccattcaatttcttaagagaaaatagaatgannnnnnaagcaaatgatttataaaccattaatccattgatatatattatttaagctaattcgaattgaataagctaagagaaaaaattaaaggataatttcgaatttaaaataagaatccaacgatgtcccgattggtgagagtcaaagttattcttatttttataaacgtcttcattgttccatgttgtaaatacttgtccaaggtgtcatcaattgatgaacagctagatgtttcatttacaaatatttatgtatcgagatctaacactattatgtatgtctaatggatgacaattcattaggatttgtcccattaaaaactacacgccaagttagaccaacaatgaagatgcaaaattaaactacagttaataacagaaaacaacatggttcattataaattcacacacaattcagaatttatgaagcatttaccaaataggaaggactagtgaaaatattaaaacttacaatcctaaataatttcaaaggtttctaacaaattgataccagtgtcccgtttaggcgag

SEQ ID NO: 139535 - DNA, 2192 bp, Cannabis sativa
  modified_base (54)..(58): a, c, t, g, unknown or other
  modified_base (1358)..(1358): a, c, t, g, unknown or other
  modified_base (1994)..(2000): a, c, t, g, unknown or other
ataatacccagatgcaccaaccattttccatttgttcctacagacttcaagccnnnnncggagtcgaaaacgatggattccagggttgaggagcttccgaccaatccaaactaaggaaactctgtggcttgccatggccgatcctcacaagcgatcccaaacggtataaatcttgtgagcgatctcaaagatcctcttcaggctgatgaggaattccaaaggaagattggcatgatttcaggtggatctgggaaagaatttggcatgatttctatcagagaatctagccaacctaagatccctacctgtgccaggagatctttgcgttagcctctctccagtgttgagaaatttcctaaggctgggaaagagatctcggcttcaggaaatgggatttgatgatgaggagaatatggtctgtgcaaagatcaaggctctctgcgtgcagacggtctttctcgtttatgtgtagctggtctatctccaagctttgtgtagacggtctttctctctcatcctctacttaggagaatgatttaatggtttgcccttagtggcatttttgtaaagacaaatttgtaaccaatcttaggtttctcttatcttaaatgtcttgtactgttttcattcgaacttaatacaattgtgtttgcttgcgttattattcacaatgtaaacaactatattttgatcgaatatacaacacttttgggtttctccattgctcataatattcttgttttagttagtaatctaccaaactttatgattttcaagcggttgtcaattctgcctcgcaattgcagttataatctgccttaagcaaacttaaatatactttaaggatattatcactttgtatatttttaatttgctcgcataaatagttatattatctatccgttttctaggtttaagtactttatcatggcgtcgtgatgcctcgtttagtactttcatagctcgcgagaactgttagtaattcagttttatacgcgagttataacttttgattttccactcccgtcagataggttataaatcaaaaattatagttgtttgatcccttcttcatcaaaaaggtttgatcaaggtgttataacgattcaacccctttctcgtcaaaaaggtttggtcaggtagttataacggttcgactgcacttttgtcaaagaggtttagtcgagaacctttgaatttaaaaaaaaaattgaaatggcgggtttgcattatacaatgtatttctagatgaattccggttagtcatacataaatgccctttaagtaattttaaagaatgaaactttgtaattacttaatataaatgattctctctattcataactgaagtttaaagnttatatcagtaatgcgagttacatcatttatttattgatagtagggtcgcaaatgttctacgtttcagtagttttttattagtgagccatcaggtcgacccaatttatagactccaactccaactactacttcgatgacatatagaccctccaagttcgggttgaacactcctgctgatgcatctctcgtatttgtaaagactcgtcttaacaccaagtctccaacattaaatagttttttcttgactcttttgtgttgaagtatcttgtgattcggtgttgatatgcaacgttggtgatttgtgactcagttcgtttttcctcaagtagatctaaggacaatttaaaaagttcctcgttttcttcttgattataaaactctcttctaggagttgatatgttcacttcaacaggcagcattgcttccgagccaattgctagcgagaaaggagtgtgtcccgtggctgttttcttggtagtgatgtgggcccagagcacctgaggtagctcgtcaacccacctgcctttggcagcgtctaacttcttcttgatagtattcttttgggttttattaacggcttccacttgtccatttgcctgaggcctcgatactgacgagaagtttttgataatttnnnnnnnctcgcagaattcagtgaacaagtctccatcaaattgggttccattatcggatactatctttatggaaattccaaacctacagataatgttctcgatgaagaagtcaaggattttcttgcaggttatggatacgaggggctcgacctccgtccatttaattagtgaagaagtcgactgctaccaccgcatact

SEQ ID NO: 139536 - DNA, 686 bp, Cannabis sativa
ccattgggctatgaagtaaaaggggattaaggaaaagtgttgaagttgaagaaggctttatatggcctaaaacaagtgccaagagtttggaacactcgaattgacaagcactttaagacaagaatttcaccaagtgtccatatgagcatgcactctatatcaaaattaagaatgaagatatattaattgtatgcttgtatgtggatgacttgatcgtcactggaagcaactcaagtatgtttgaggagttaaagaaagatatgactaaagagttcaagatgacagatattgggctcatgtcttattagctcggtattgaggtaaagcaagaagacaaaagcatttttatcactcaagaaggctatgctaaggaagtacttaacaagttcaagatggatgattctaatccagttagcacaccattagaatgtggaacaaaattgtcaaagtatgatgaaggaggaaaagtggatccaactcttttcaaaagccttgttggaagtttgcactacctagcttgtacaaggccagatattctctatgttgttggaatcattagctgctttatggaagccataacaacaactcatttgaaaattacaaagagaatactttggtacatcaaaggtatgaccaattatgggctattttattcatctaacaattatgagatagttggatatagt

SEQ ID NO: 139537 - DNA, 905 bp, Cannabis sativa
  modified_base (781)..(820): a, c, t, g, unknown or other
tgattcctttgtctcagacacccatacgatggaagaaaggttttcttttgagggattgatatatgttcataattggacttcttgctagcaggctccactcttaactgcataagaaatcgaacctgaatctaagattgtgtcagtttaatactgcatgtccgccagccaataagtgcttggcctcgagcattgattaagtgatagaagaggcaactcaatcactcagatgtggggaacatcagccgttagagtatcgctttcatacgacgagagtcattgatcaaatccaataattggtaaaactgttgagcccctacttttgcaagcatgaacttgcagcaaggggtcaactgaatgaccaaagcatcagttgcttactctaacccacaatttgaacaatatttaaaaattatatctcatttttatatattaaaatcacgtttggttggagctaataaaataaaataataaaaaaaaattgtctagttatatttttaaatgttggaataatgtttctattatttttaggtgaatgactattttatttttaaatggaaaaaataacaattatctaatgcaagatgtgaaataatttaataattttttttattaattttaaatatatttccatttaatttttattcacattttcattttcatttctattcttatacttttattcctccaaccagacgcctctagtattgatttgataataacacttttttggatttttgttttgaaaaatgatcaattggacaaatatatatatatatatatnnnnnnnnnnnnnnnnnnnnnnnnnnnnnnnnnnnnnnnnatatggttacatttttttttaacttgtaatagcaggttactaataggtagactttccttttttagatttaattaattataattaa

SEQ ID NO: 139538 - DNA, 532 bp, Cannabis sativa
  modified_base (486)..(488): a, c, t, g, unknown or other
gtatatatttatgatttttaaataatagatcaatttttttaaaaaaaaataataaaataagttaattttgagaaatttttatttttatggtttgaatttttttacgtcaacaaataagtacttcactagagtattagatattgttttttggttattttataatttatttataattgtcataaggttaactttatcagtattttttccttcaaaaaaaaaactttatcagtatttttagtttagttttatagtttatttatatagttgttgtgaggttgatttctcattatttttatattaatttcttacttttttttcaaaaaaaattgtattttataattttaaatctttaaaattatttttttgtaaataaaaatttcaaactgtaaaattgtaattaaataaaacacaacaaacaattattttttaaaacaaaaagctggtcaatgatttttttttccttttcatataatatatatatatatnnntatatatatggaagaggtttctatggttacatttttattgtaac

SEQ ID NO: 139539 - DNA, 524 bp, Cannabis sativa
  modified_base (482)..(498): a, c, t, g, unknown or other
ttataatgatcttcaaatgaaaattaatatgcaattttttttaaaaaaaatgaaaaaattaatatatctattacctattcgtatcctcacaccaattagaaaaaaaaatatatgtacctgttaccctctcatatcgatacgtaaacaagaaaaatatttgatgatagtgatttgtttcctgaaaaaaaaaaatccatttcaattagattgatcatcgattgaaaaagtaaactaattagttgcttaagtacacaaaagtttcatttacacaaaataatgttccataacatacaaggttcgtataccacctaattaagtgttccaacgcaaaagaaaccttgcacacacaacagttacataaaaccaaaagctacatgttaaagtttgcaaaatactacatgtgctaattacaaaacatcagaaaaccacaaacaacagtccaaactaaaagatagtaattgctgttgggttttatgccctannnnnnnnnnnnnnnnntataatcaaatttacttattaatata

SEQ ID NO: 139540 - DNA, 1318 bp, Cannabis sativa
  modified_base (501)..(505): a, c, t, g, unknown or other
ccgtagtctccatggaaccgacaacactttatcatgtccctcttgttgacatatttcttcatgggtctgggcttcctatatggggccaacgactgagttgccatgtacacactttctatatcttcagtcaaaatagtgaatgcagtgtacttggcttgattttcatggggagcttgttcaaatttgccagtgaactttcctttcttcccattcccttgcctgtggttgttgttggaacaattaccacttgaacttgaattatttgggtaatggggaagttgggcggatgttccagtagaaggagcctttgacttgccaagcttttgctcacgtttcactcgttgaatggcttattcgagcttgatgaagccttcgacatggtcaagaaaatcactcattgagtctaccggctcgttcttccttatatccttccaaagttcgccgaggacttcaatgccccccagtatcgcgaataactttccatcttcagttacccgtgannnnntggtcgcctccgtcatgaatctgctgatatttgacaggagaggctcgcttggtctttgcttaacttcgaccaagtctcctagatgcaatggaagttggcgtgaggaggagaattgtgcatggaattctgaagagaaggttttccatgaactaaactttcaaggagccaacttgaaataccattgttgagcagcttccgacagggtagcagggaaaattctgcaacatacatctcctcataccccttacaaatccatttgcatttcgaagtacttgagacgggaaagggaatcttctctccctatgtacatcttccatgttggcattttaaacttgtgggccaatgccacgagattaatctcaggtgagaaaggagtttcacgtgctcggtccagctcaagatcattgtttctttgcccagccaagccgtgaaccatattttttagtttgtctagctgtgcctgtatggctgggctaacctgctcagcatctttttgagcgggaatttgagtacgggttttgggctgcatgatcgtcgtgacattctgatcgtctactcccctccttctattcagatcattccttaggtcatgggtcgccccaaacctttcgaatatagaagcacttggctgcctcagtgattgatttgcttggttgacgtgtggaatggcaccattgatctagttggaaccatcaggtctgagttctcctgatgaattactagacatagtctgcccgcctaccgctaggcccacgagtggaactcgtgacaggggattgggcggctgatcatttgcagtctgggaagtattca

SEQ ID NO: 139541 - DNA, 1248 bp, Cannabis sativa
ttttcttgactgtgctgaaggcttcatcaagcttgaagaagccattcaacgagcgaaaggtgaacaaaagcctggcaagtcgaagtctccttctactggaacgtctgccgaacttccctattacccaaataattcaagctcaagttgtaaacgttccaacaaaaaccacaagcaagggaatgggaagaagggaaagttctccaggaaatccgaagaagctccccgggagaatcaagccgactacactgcatttactatcttgacagaagatatagaaagtgcttacatgggaactcagtcgctggccccatataagaaacctgggcccatgaagaaagatgtcagcaagaaggacatgacaaagttttgtcgattccacggagactacggtcacgacactaatgaatgcaacaactcgaagcgggaaattgaattcctgataaggaaaaacaacccacacttgcagaagtatgtcaagatcgatcagggtcagagaaacgacaataaccaagatttgcaacctccaccagtagatggacatctacaagttatcgttggaggtccgcatattgcgggagattcgagcaaagctcgggagaggtatgcccgaacagcgcagcaagagcaagaggaagttatcctggtcctggaagaaaggaagcccaaagttccacgagcaggagggcctaccataaccttcaacgatgaagacgctgtcaaaattaaatttccgcacaaccacccgctagtcgtggaagtccagatagccaataaaatggtggccagaaacatgattgataatggagcctctttcaatatcctcttcaaaactactaatgaaaagatgggactccagctcaaggatctaaccccatgtctcctgcctttctatggtttctccggtcatggagtcgcacctctaggacaaatttgtctacccgtcactgttggacaagcttcgacgagcatgactatcatggcatagttcctgatattagatgttccttcagcttttaacgtaatgttaggccagtcggccttgtatgaattaaaggctgtcacatccatattccactcatgcctgaagtttccaacaaagaatggggtagggtgtctgacaggaaaccagcattctgcttgggaatgttataaccttgcagtggctaaggctaagaaggaagtatcctccagccagagcacagacaagagaaaaaacatttccaagtagggaacttcccaaggcaggga

SEQ ID NO: 139542 - DNA, 560 bp, Cannabis sativa
attgtactaataacgatatgacacatttaaaagtgttaaacactacgaattcatgtgcattttaccatttctccatactctatttaataaaactatagagactttcattccaccaaaaaaaactatagacttaattgttgcatgcattttataatagatactaaaaggctctcgtggtaaaaataccttaattataagaccaatttttttatgttacattttaaaattattattgtacaaatgcgtaatttcctctctaaaatattatgcattatttgatacggaagatcataagaattaatgtccaaaatatttatcaaatgagcggagcagcatatttttgcaaatatattaatttgtttttcaattgaaaatcataatcgacacaactaattttctcactctctaaaaaacgaatcaaagcaaaacaacttacccttctatttttatcattaggaaattttccatagaaattgtgcatgcaggaaaaggaagaacaaacaaaaaaaaaaatcaacaacaaattaactaatgtacaatataaaaagatcgtattttct

SEQ ID NO: 139543 - DNA, 516 bp, Cannabis sativa
aaaaaaaactaattaatagcaagcaattaaagaattaaattattaaaacctattgattatttgaaaataagaaattaatatttaatgacatataaaatatatacaatttaaaatttcatttaagaaggaaaaaattaaataaatttcacaaaaaaaaaacctcaatctaccttcaccacctttaatggtaatgggccatgttgcacgtaagatgcaccaccattactaaattctaattacaagcacaaccatctcaggctaccgataacgacctcgagaccaccatgatcctactgactcagtcaccgcttgacagtttttcttttctgacattaagacgtttgatttcattgctaaatcaataaaaaatataaaaacaaatagaaataatggaaaaaaatattatgagataaaaaaactcaccgattgagtaaaaaactactaagaaagtaatataatgatggtatttatagtgaattttctatgagaattaaaaatatgagtacaattaattta

SEQ ID NO: 139544 - DNA, 666 bp, Cannabis sativa
gtatgacagtaatggacaacaaataggtgcatcgcataaaatataaccaagatgaatcagttgacaggtttaaatcccggcttgttgccaaagggtttcagcaaacaccaggtcttgattattttgagacattcaaccctgtcataaagtcgtgtaccatacgcattattttttctcttattgttacaaaaaattggccaatacaaaaaatcgacatcaataatgcattcttgaatggagatcttcaagaatgtgtctatatggcccaacatgcagaattcaagagtgagattcaccctcatcatgtgtgcaaactgaataaatccatctatagcttaaaacaagctcctcgagcttggtttgacaagctcaaataagcattactttagtggggtttccacaattaaagagtagacacatccttattttttctcagaagacaaggaaaactcactcttttactcatctatgttgatgacatacttctcacaggtgaatacatcaactacattcatcaattgatatcccaactacaccagcaatttgcactaaaaaaccttggaccagttaggtactttttgggatttgaagctacaaaaacctccactgatctctatctcactcagcccaaatataccacatatttattgactcgtacaaacatgg

SEQ ID NO: 139545 - DNA, 504 bp, Cannabis sativa
ccagccaaggttcaacatatggtgtggcgtgcaatgtctggtactcttccaactaaagttcaattatccaccaaacatgtttatgtcgatcttacatgcccgttatgtaatatggaggttgaaactatttcacatgtgttggttcattgccgttttgctaagtcttgctggaatatctctgcggttgactgtgcacgagatgaatctgtgagctttggctcctggtttggtgatattctgtcaaaaaaccagcaggaagttatggttgaagctgccatgattgtttggcgtctttggatggcccaaaatgatgttctctggaataataaaagtgttaaagcttttgatgtggtgaaattagctagaactaatcttgtaagttggaaaaatgctcaaactcaaaaatcagatccattactaaatgtcaattatagtaatgatctggagcattggaggaaaccgattattcataaatacaagatcaatgttgatggagccattttt

SEQ ID NO: 139546 - DNA, 896 bp, Cannabis sativa
aagatcataaaataaaaattatttattttattttattgttctttgagccgagattgcaaaagacaatagtagattactttggttcgtccgcagacttgataatttttcgagatcttacttacacaataatgtgcacaaccttattatcctaccctgctggcgcctcaatctcgtgataatcatgacggttcaagacttggctctaatacagatgattttattgaatttagtgatcaaaacaatgataattaggttttttaataaagaaaaattttatgttttaaagtttttttaagacagttttatagttttatttaagacaatattagtgtgtactgttatagaaaaattaatattatagataattattattaatgtttgatttctcaaatttaaatacataaattggttaataatatttttttaaaataattattatatacaataattataattatttttattatataaatattaaaaattgataatatttttttatataaaaaataataatactgacgaaatgcaatagtgggttcgtcgggattgttttatcaacatgtaaatgacagaaatttatacaggcagaacccaccgctattaatcagcctgtattaatattattactagcgaaattaaaatgtggtcgctaataatagtattagcgaccatggtcggccatttacctgtgcaaacaatgctaatgcacatggcctacaatttaaaagggcccaatatgatttttcagaatttttttttaacccaaccttccatcaatgtgtcatgtcaaataaaaaagggcattttacgtaaatgtatacattattttaattaattacaaaaaatatgcaaaaaaaaattaattttaaacatgtatacatttgaaaacattttta

SEQ ID NO: 139547 - DNA, 1049 bp, Cannabis sativa
ggaggtgaaggagctgagggacttcaaagatcaaaccttgaagaaggctaaaagagatgagctcctagcccctgtcgtctgcaagcattacaccaagtgcttcgatgatggcattttcatggcctagcaaacaaatgcccagaacatcaagctcgatttttaccccaagcctgaggaagtccttgtttgcttctgggagaagaagaagagacttgacgccttgctcgaggagcgtagggggcctcgtcttccacctcgcattgattaagccaacccgttactactatcactatcttttctttctttttatatttacagtcccttttcccttttttcagtcaattttaatttttatatttaggggagacaattttaaggcccgtccccaggcccttagtgtttttttagggcctgttattgggtccggagatctttacatttgtgcttaaataaatattttgcttgaatacatactttgctttaactttgctaaactttttggcatgtttacatttgcccgtgtggtatatcgtactaccccctgagtggcatgaaactttttttttaaggcactcagctttacacataaatttggaggttgcatatactttgttggtataaaaaaaaaatttgacaaagcctaagtttacattttctggctattgataatacgttcggaggtggtcatcgttccaggccctaggcaccatggttccgtccattctctttagcttgtaggtcccggagccgatctcgtcctcgatctcatatggtccttcctaatttggcccaagtacccccattccgggttcttgagtggctgggaagactcgtcttaggaccagatcaccaatagtgaattttctacttttaacctttgagttaaagtacttagtcaccttcttgtggaaagccgccattcgaatttgagactcatctcggagttcaacgatctgatccaacgcttcttgtaataaagctttgtttgttgctggatcataagttgttctcctgtgggatgagaataacgtttccaccgggaccattgc

SEQ ID NO: 139548 - DNA, 553 bp, Cannabis sativa
attttttccacacaataataatatttttttttgatagacactaataatattttaaataagtgtaatattaacaaggatttgatattattatttggtgctaagtaaatattcagtattattgccgccaaaaagatttggtattaagtacaattataacagaagttaatacttttgccacattattatataagaatcagatattacaaaagaaaaaatatagtaaacgaaataaatatatagtaatatgtaagtaaatgttttaattttagaatttccaaggaaataactctttcatacttttattacttatattttatcatataaaatttccttagttttcacattcctaatggtttttttttaagtggtacatttttaatgttttaagttatgtgttttttcttaaaaaaaaaaattaaaacatatcacttaaatatcatagtatatctaaatttataaatatttaattccatataaatttgtcaagagtaaaaaataagtcaaaagttctgtatatgaatgaacaatttttttttttttttggaaggaaaca

SEQ ID NO: 139549 - DNA, 567 bp, Cannabis sativa
aattataattacataattaaaattttagaaaaaaaagaaattttacatcctaatttttagaaagacgaataaaagttgatacaaaattatctctatatttgaatttatatattatataattcattttttttaatctgtatctttatatatatttatatctatctatatatttatataaataataacacaaatcaaatgatcaagatgacatccaataattatttttgtactatttatttatttcattaaatttagtttgtgttttcttttataatattatatattgaataatatgtcttctaagtaattttcttttcataaaagtcacattatttttaaactatatgagagtatactcattggttataagtaaaaatatttataaattcatttcaaatttgtctaaaatttaatatatattttttattttgtatagattattgaatatttcacttttgccttggtgttatgtatatatattttttgaatttgattaaatttatataaattaatatctaccataaaaaatctatacatttgattatttttttcacatttacttataat

SEQ ID NO: 139550 - DNA, 1086 bp, Cannabis sativa
taacattataactctcaataacttccacactcttggagttggtggaaattttttggattaatgatgctacataatctatttgaagattaatatagaatttggtagcacttgtagaagataagttaatttcatctatttagaaaaaacaatatataaattaatatacacaaacatatattattgtattctaatattgaatagtgaaatctaatttaataattacctcaaaaaattttaacggtagtagaagttactatcacaataaatggaccaccatctttcttatataaatttggattgaacatctcactcaattttccccataaagttatctttaatgtggtcgaactatacataaaaattaatagaatttaataataagtaaaaaaaaaaagtaaattgtatataaaaaattacaatacttactaatctgttataattttgatgtctctttttttataacgacctccaacaatctcaatatcaccgacaccacatgagcatccaataatatctatatataatataaaataataaaaagatgttggaatattgtaaagatgaatagttgaatatatttattaaatatcaataaaagataataattaaatgaatacctgagagtattgtgttatcattaacacgtaaatgagtcaaatttgaagttatgaattgaaacccattgatcggaatgttaactatttctccttcttgtctctttactgaagttgtaaccaaaaataaaattttatagtcatttgaaagtggtctgtactaacctgtggttgccacaatttttaaattttgcagatagtacaaagaaccttcacttaatagcttcttaaacttagaaattaaattttttcgtattgttgcatccattagattttcctgtaggataaatggtagacacattgagtatttaataattgataaataatcaaaaaaagtaataaagggaaaatatgaataaaataataattaccttttcatcaataaaagtcatatctgttagacttttatttgggcttacattatattttattggttttattaaaacttgggttgattggatagttctttgct

SEQ ID NO: 139551 - DNA, 701 bp, Cannabis sativa
  modified_base (55)..(57): a, c, t, g, unknown or other
tagatagttatttctagtaactaattatatttataatatttaattaattagaaannnatatttaagttgaaaattaatattaattcatgttagatcaacttaaattagaatattttttcttagatattaaatgaaaattaataattaacttgattctattctagatacttaattatttgtttcttctatttaatatatatatatatttaattaaatagaaaattaaatatttaagttgattttattctcgacacttaaatattagttattttaatgaaatttaattagatagaaaattaaacttaagttgggaattttaatttcagaacaacttaagtaattttcaaaatatattttgttatacctgaaattctggtaccatttcagtggagggcacgcgtcaaaataaagggaatgtggatcgatgaaatcaattttaatagaataactcattaattgcataagtagcagggtatacttgcaactcgctaactgtaaggtcttatgcgaggaaaagatttacaaattgttgttttaattaacgagaaaccatatgtcattaaatgcataaagcgaggcatcaactccgttacatctgggacgacgaaagcgacgcctattcactgtgaaaacacttagcatataatgtataaactaagtataacagtcaggtgggctcgagacctaataagcgaggtgcc

SEQ ID NO: 139552 - DNA, 614 bp, Cannabis sativa
acatgtatataaataatagaaggaggtagacagacatacattaagtgttgtgaggagatggacatcaagtgaggagatagacatatgcgtatatgacaagtagtgtaaaagtttttttttacttactgatgtgtgcttggcattaaagcaaaatgtaataggttgtatatataaataggagggaggactggcgtagagaatgggctggcatatgactttgtgccataggagcttttatatatatatatatatgtttatcttagtcaatacatctcatcacatgttgatgtggaccaatatgcaagtaatatgtatatatgtaaaggtcatggctacaactctcctgggcgtatggcatgcacgtttgtgtgtcatgggagtatatatatatttatatatatgtcttggtcaatacatctcattacataaaaagaagataggtaagttgtagaggtatgagctcattgtactcttacaagtactacttattattatttatttattatgtaattttttttattgatcagatgagagacatttgtcaccaatctagtgtctccttttgcctataaatatagagagtcatttttactgttgctcacatttgttgaagc

SEQ ID NO: 139553 - DNA, 543 bp, Cannabis sativa
tttttttattttgatcacatttggcttttgggtcccgaaaaaaggctctgacaaccaagtttcattgataaaattgaaactttcttattaaatttgtttttggagatttgatttttgttatttctgctgttttctcatctaagtctctaaacgtagtcagttattggaaaaataataataatacagaaaataattgtgaaggaccaaagtggtgaagacgctggttcctttgaccgattgatggtgggtatatgagttctcaccgttggtgacaacccaacttgcctcagaatattggagtccctactttgtaaatgccactattaaggtctgtctttttcattgcaactatagtcatgcagttcaggacatggttttattgttttgaaaaacgaatcatctactcaagttttacattttacattttactgtagccacttgttttgcttagttatcttggtctggttcaaatagtgagtattgagtaggtaggtattgaatgaacagtaaaaagtaaagtgtgataaactaaaaattaatatt

SEQ ID NO: 139554 - DNA, 633 bp, Cannabis sativa
aaatggttaaaccaaaaaactgccaaaactgccaacaactaccataaactaccaaaaaaaaaaaaactgtccaaaatttcccaattgaaaaaccactaaaaactaccaaaaatcgtacaatcgattttatatggttataatttataaaaggtcagttacgattttcgtaaaataaaaatcgtaatcgaccagtagttataaaattgtgactgattttcacccctagttgaatcgcgtcaattggataaaaattgaatgagttatggtcattttactgaaggcagttcaggtcccagctctcaggttgacatcagtgcccaggttgacatcagacgcaacctagatgttgggtaagtgtagaaacgtccaaaggatgtccttcaagatgcctaagtgatattttgataccacttagtccatttatatgttctggcaaagctggtcaccggttcttgaagatgttactgttttgcagaaatgggatgctcggaactctccatttttaagtgggtcttattagaaatgagaaatgcaaagttgtgaatttgacttctctgacttcatagatcattgtattgtgaaaaactagacgtatggtcaaaacagtatcagattcggataagtagaacccag

SEQ ID NO: 139555 - DNA, 901 bp, Cannabis sativa
  modified_base (749)..(752): a, c, t, g, unknown or other
ttgggttttggggttcatctaactaggatggttgtcatacctcctcaacgagggtcccgggggtgttaccctaagtatgggcttaatcctcaaaggtggttgacaaccatgtgacacccataagggaccctcttcaacagtagctccttcaaatgttcaaatcccacgaaaggctcaaagacagttgttaacccacaaaaatagcgggatattatcataaaaatcagactccaactacctccaaaaatcaaggagacggttgagatagctcagcgttggtcgcgtctcttgaagcgagaagcaccgaccccctccactatataaggggtcacccatgacctgggagggggatccgcaatccgaaacacttagaaaaataaacacttctcattctttgcaatcaagagcttgttcttgacttttggaactaagattaataaaactcaaggggagtaggctattaccgacattcggggtcaaacctctttaaattctggtgtcttttatttacatttatttcgaatttcggtgttattaactgcatttattattgtgattttggtttaaatctcatttattacgactccgcgtcggttggctaaaaatccagtcaataataataatgcaagggtattcacacaagatattcccaagccgattgggaaggttgccaaggtaccgcttcgtcccacacttttactagaactccctggggttgctagaaagtgtagagggtactctaccacaannnnttaaagccaatctttcttagacagaataatctcagcttataccaacttttaccattacacaattgggtttacactaaaaagtttatgaaaatattttatgcacaacttttttttttagcctaaagaataaaagtctacaactaacctaa

SEQ ID NO: 139556 - DNA, 799 bp, Cannabis sativa
cttcaaaattagggtttaaataccctactaggcctctaaaaacaggcgagccgcgacatagctctttcaaagttgtagcccgagtagctaatttttagactgcaagcttctttgtgcaatgaccaataatattttggccataaatctttcaatatttttcgaaattggatgattcaagatgttttgaaaagctaaaagaaagatctagaacttttattcataaaacttttcttgaaagtaaacaaatcatagtcaaaaattggcttgaagatttagacttgattttcaatcacaaatgaaacgttttgaacatccaaaacttagaatttttcacccattatatcttagaactccaaattctatgacaaattcatcatattaagctcatttaacatgttttttctcagtagaggcttgaagtgaggatgttataaaatggtatcagagtggcacatcaaaagcgtggtgggcccataacccacaagtctcaggatcaaaacctcgctctgatattattttgtaacattcccacttcaagtctccattgggccttcacacccatggaatgatggctcttatatacgtgtacaccactttggctgctttctagattcacaattagccctatagatcaacatgagtattttcagcatgctgtcctcactcgcacactttctagaaaacctttccatgaggtcacccatcttgaaattaccccaggtcacacacgcttaactctggagttctttcgtgatccactacctaaaaataagatgcactttattgatataggtagtac

SEQ ID NO: 139557 - DNA, 615 bp, Cannabis sativa
ttgtaaataacattacaacacgcaattggcctaaaatctttgacagtgttaggacattttatttttggaaccaaggtaataatagttgaattgatttctttgagtatattacctaaatccaaaaatgagattactgcttcacttatgtcatcaccaatagcctcccaattgtcttggaagaaactactagagaatctgtcaggacccggggctttgccacttggagtactaaaagctgctgtcttcacttcctctgtagtgaatccccgaagcagtaattttgattgctctactgatacccttgctcctttagagattacactattctgaactttctttctattcaccattttagtcccaagcaggtctttgtagaacctcagaaatgcaccagtgatgagttctggttcatgcacccggtttccatcttgtggttctattgataggatgcgattttctctaattctatgcttaatgcaagcatggaataaggcagtgttgctgtcgccattctcaatcgacgccatttttgctttctgttggagaaaagaagaataatctttctgcactgtcactaaaacttctcgagcctccttttctttgctatgaatttcc

SEQ ID NO: 139558 - DNA, 747 bp, Cannabis sativa
actataatcatctatgaaatgaatgtaaaatttaaaattagtgtgtgatgcaattggggcaggtccccacaaatcagtatgaactagatctaacacagatgaggctctagaattggaatttttaaaggatagtgcatgagattttccaaactgacaagcatcacaaaataaaagactttcattcatagcagtttttacattagtagatttcataacttgactcaaaatgactgaagaagggtgaccaagccttctatgccatagatctgacatagaagtgggcacattggttttatttgactcgacattggaaaaggcagtaaaggagaaaggtgaacagtgactggttttacttcttgcacaattgtttctagagatagtagaagtgtttagttgatacaagccatctttaagcactcattgaagaaccaccctctttgtcacctgatccttcacacaacaaacagtagggaaaaattcaatagacacattattatctgaggtaagttttgacacactaacaaggttcttagtaatcgatggaacaagcagcatatttttaaggacaagaggcttagataaatcagtatttaatagaccagtaccaacatgagagatgtttagctgattaccatcacctacagtgatcttttccttaccaccataggctgttttggagctcatttggccttcatctgatgtgagatggttgctggcgccactgtcagcataccaactctcatcatt

SEQ ID NO: 139559 - DNA, 520 bp, Cannabis sativa
ttaatgggcttgggcttcatgaaatatagctctaagggtgttttcgtctttttcactaattggtaataaatatctgtttttaccttcatttgatttcacccaacttgtcagtcaaactattcatcttcttaagctcagtccgtcttctttgtggtatctattgtctctgggttgtgtttgctgtgcaacaatgggcaaaaaggctgggcatctcattaaaacatctgcattaactggtgatggttcgtcgtcactctcaccaacagtggaacccaactcatcccccactaggtctgaatcgcttccatgcacaccaaacccaggtaagacttcttcctctgtaagtcttccaagaaggtttacacggtccatgtcaattccttttgcttcgactaaggctcatccaccccaatccaccacttcacccctccctcccactgagtctgactcgtctcagccccctctgtcgaagcctcatccaaaaaggaaacatgtctcctctgatgctactccttcctca

SEQ ID NO: 139560 - DNA, 537 bp, Cannabis sativa
ttaataattatgtggatgtctaaatcttttatttattaccattaattataatcaacatttattttttcttagttttcatttttcttattaacacttgtatttgtataaatagcggttcactctattacaataaacaattgaaaaattcttattcactttctctttttctcttcatcttcttcttctttcttctcatctattctatattattttatattatttgataacaattataataaaaatataattattgagagttaatcttacgtgtataattaaaaatttcctaaaagataattttttttttatccaatcctaaaagataactaactcaatacaatttatttattttggcttcctagcatatttaattttatctgctcccttttcacttttccttataataataataataataataataataataccaaaaaggttcacacttgagaatcccgcaattcttcgctagtctttctttgatttttttaacactttctcctccatacgtttaggttagcttcccaacacgtcatg

SEQ ID NO: 139561 - DNA, 667 bp, Cannabis sativa
  modified_base (568)..(570): a, c, t, g, unknown or other
  modified_base (635)..(641): a, c, t, g, unknown or other
tgaagcaaacttcaacttctgcgagggaaggctaaagttgtataaaaattcaagcgattacttatctttaaaagaccgaaggatgaaacatcactgggcgtgagacagactttaagtagtccttctcttttgggaatgagggttgaagacatgtcgtacgtccagtgatctttcatgcacaaaaaaaaaaacgtgcattcaagagccatgttgaatttttatgaatcaaactttggcttctgcgagggaaggctaaagttgtataaaagttcaagcgatgactttgctttaaaagaccaaagggtgaaacatcactgggcctgtgactgacttcatatagtccttctcttctaggaaggagggttgaagacgtgtcgtacgctattgatctttcacgcacgaaaaaagtgcatgcgagagccatgtttaatttatgaagcaaactttggctttcacgagggaaggcttaagctgtataaaaattcaagcgacgacttcgctttagaagactgaagagtgaaacatcaccgggtgtgtgatagacttttgctcagatctctaacccttnnntcctttctgtcgcagagtatcatcaagatctaagcccgattctccttcagttgtttggattcttnnnnnnnttacatactatgattgaggactcact

SEQ ID NO: 139562 - DNA, 1198 bp, Cannabis sativa
  modified_base (268)..(270): a, c, t, g, unknown or other
actcaaatataatataaaaaaaaagtagttatatttatcaactagttaaaaatttaagataaaaaaactggttccgtaaagcaactaagataaaaatttacacacaaaaaccagttaaataaaaaaggtcaaacaaaaacatccattcaacatgctccaacccatcaaataattacactcataccatatatacctcaaaagtactcattcattatgtctatataaccggttctattttagttataatcgatttgagttattttgtgtnnnttatttttattcattataacattgttatagaaccgattctaatttaataataattagtttgagttattttgttttatttatttttattcattatgttacaaagtcggttatatttcaattataaccggtttaagttattttgtgttatttattttcattcattatgttatagaaccggttttatttttgtttatatttgagacatctatttttggtgacttttccattgactttttccggcgacggtgacttttctgacgccggtgacttttccggtgccagcgatttttccggcaaaacttattattgtttataaatatggaatttctatcatttttttataaaaatatggcataaaaaaacctatataaatgtaaaaaaaaataaaaaaaaaccataaccccttagcattaatgctaagtaatttttccatatatagtgtaatttctactattaaattttacattaaaattttacaattgtacattggagcacaaagctaaaatttggagtaaatttactacaaaactactttttgtgtcaaatatagcacaaattttacatctcccattggagatggtcttaggtgttaaattaaggaggatttataattaatggtagactaataaataatatttattgtcttcattttattgaagctaatttgagattttagctgtgcaataaatatttttcaatggaaggatatgatgtattggattggatattaaatttattagtatttaattagtatttaagtttgtaatttttttttgaaatcaatttaagtttgtaatgttggaaactaatctatatctatatataggaaagcattagagaggttaagtggcactctacattttatttcattaaccttttctattttctcaaaattttatatttttattaattttgtattcataaaaac

SEQ ID NO: 139563 - DNA, 738 bp, Cannabis sativa
  modified_base (152)..(164): a, c, t, g, unknown or other
gacttgattatttgcgacatggaaatactgcttctttttcttccatagtttgggggtaggtgttagaatatattttactaggacctatatttactaacaagtatatttttaacatcttaaatatgaccttctaaaacgatataaaataaacnnnnnnnnnnnnngagaaaccttacattggttgtagttgaattaaatgactcattccgctcagatctctaacccttgtatcatttatgtagcagagtatcaccaagatctgatcgaccgacactccttcagttgtttggattattcacagtcttactcactatgattgaggactaacttgttatgggtgggcatgcactcaatcactaaggctcaaattttgatggtgaagaacactaagaatttcgaaattagaagagagaaaataagaagaagaagtctcaaaacactagttgtctgatgtaatgaaaactaggtttacaagctatagaagcattattttgatagtgagacctttcttttctttttatactaatccacttagggttaggattgaattatttagaataaaaaatgatagaataagagcaaaaataggacctagtggccgacccctatgtgggtccatcactagttagatttttaccacttttctcagtcatttatctgttttcaaaaatacaattttgcactttcaatcctataagtgccaaaattatttatttaataattaaattaattatcaaa

SEQ ID NO: 139564 - DNA, 624 bp, Cannabis sativa
cggtgtaccattaaaaatagagtcaaacattagagattttcgttcaaggccttaaagcttccattctttacgtccaaacgtcctctaggagtcccttaagcttaaacacaatcttattttaacaaagaaacgactcatacacgttcaaatccaagatggctcaagaacgtgcatgagaatggtggatttcgaaagctgttgtcttagcccgttttgttatgacgatcagcttccttagatcgtgtagaagctattcaaagtgatccaacaaacccagaaacgctctaagtgtttcaaaatcaaaatctctttttctctctctaagtttcacatgaaactttatcggtctctctctctctctgcgcacggcctcctcccttcaacttctttatgcgtttttaaaccctaaatatatctcataaacatcatatatactcccaaactctaaacttaaccctagatcaacaacttaaaatttaaaaaataataaaatacatacataaaatagttaccatattccacaataataataataataataaactaaataatatgctacaacatatttacccatattattattattattaatatatttataatattattcacttataattaaat

SEQ ID NO: 139565 - DNA, 553 bp, Cannabis sativa
atccatgttaggagtgtacttgctaattctatctttcgtgttcaacctttcccaaagcaccagcaaaagtataaatctatgtttaggaaaaacgagtctatcccaaaccaaattacaccaaggcaatttctcatattcagagaataacaattggtacccttgttggatcttatacttctgcatcacaaaaccattcatgtctaccttttgcttaatcttattcttgacatcaactatctttttccatgcccagctgcaatctaatggagttacataactccaccaatcctgctccttcagatacacattgtgtatccatttaacaaagagacagtcttttttactagctatgtcccaaacatatctccccaaagctgttatattccagtggtgaacatttcgaaagcctaagcttcctgctgctttaggtctgcatacagaatcccaggccactaaaccaggtcagccccttcttgagtgcctttccaaagaaaggatcgacaagttgcttctatgtctttcaagagcttctttggtagaataaaaatatgtg

SEQ ID NO: 139566 - DNA, 1185 bp, Cannabis sativa
  modified_base (36)..(39): a, c, t, g, unknown or other
catttcaagagagattgttattttctaaacaaaggnnnnccaaataaatataaaggacagggagaaaattctaactctagacctaatttccctaagaataactaagtcaactatggagatggttatgaaagtgctgatagtggtgaagtatattcgattttagattcgggctacacttttcatatgactaatgacaaaagttatatatttgattacaggaaatttaaaggaagaaaagtggtcctagggaacaatcaaacttgttagattaaagggtcaggatcaatcagattcaaaatgtatgataggataataagaaccctaacagtagtaaggtttgtgcctaatctctctagaaacttaatttctattagtgtgcttgatgatttgggtgttgtgagtaaggtagaggcatgtcatatgaagcttagtagaggagcactaacaatcatgaaaggcataaaaaatggtggactatacaacctacaaagctctcctatttccaactgtaacatcacaactcacaacgacaaagaagacaaaataactactctatggcacagaagattagggcatataagtgagcgaggcttacaactcatgagtgagcaacaacatggtggttgttcttatttttatctattgtagatgattattctagaaaagtatggatatatctacttaagaataaaaatgatgcttttacaaaattcaaagattggaaactattggttgaaaacttaactaatgaaaagttaaaaactttaaggaatactaataatggtttgaaattttgtaataatgaatttgacctctactgtaaagaaaatggcttgcagtgacatagaacaatgaggattacatgtcagcaaaacagggtggctgaaagaattaaccgcaccatactaaataaggtgagatgtatgctacttcagtcattactatctcaaggatttttgggagaagctgccttaacaacagttcccctaatcaatagaagcccatcaagagcaactgaaggtaaaactcccgagaaaaaatggtcaggtaaatctctgaacctttctcatttaaaagtttttggatgtgctgcttatgcacatcagagtataggaaaactttaacctagggctttaaagtgtgttttcttagggtaccctaaaggagtaaaaggctatagacttt

SEQ ID NO: 139567 - DNA, 724 bp, Cannabis sativa
tatttcacagtgaacaatttttttagtaatttcatgttttgcagattgttgttaatatattttttcccggttgttcatcttttaggctgtttatgtctcagtgtttttaaaatgttattttctggttgctttttggttttttctggaagcttagataatttttttttcatatttttttaccttgaatttttttctctgattcgattatgggtatattcaaagtttttccgatctccttttcttcaaatcctctcctctgtacgctttcagtttttgtttgtaggttgtttttgcatttttttatagcaatggaggttgatatctctgttttttttttccttttttgtatttggatttttcgagattttattgctttttccttgagatctacatcttgatttgagctgatttctctgatttttgaaaaaacaatggagatttggtaaattggggtgttttgactggctcacgaagaaggagaagtttcctcttttgttttttgttaggctggtattcttgtaaatacaaacttttattttctatttatgtttattcttcctttatagggtataaatgtaaaatgtttcatttattagtttattatagaaagaaccccttttataatactagttttcaatgtatctttatatattaaaagtgtctatctaacgtcatttcttggtttaacagaatatacttaaatttttaaaagaatattctgtta

SEQ ID NO: 139568 - DNA, 672 bp, Cannabis sativa
ctacaatgccaaaaaaatacattacatacatgtacttgtatttaagagtttatcttagtacaaatataattagcgtacctgaaattcaggacttagtcgcctttcaacaaatttcaaccaatcagtaaggtcaattttcagatgattttcagggacttgtgccagtcgttgaacatcctttccttctaatgtgggtgttatgacatcttttgttattctattcttgaagtctttcattaacttcccatcaaggatcagacaatcatgtttgaaatcatccgacactataaaacccgtctagtttaaagtaaaacaaacacgattgttaacatctgaattaataaaaaaaaatcaaaattctcacaaataatcgcttacctgtatatctttccaaactttattttttagtgtagggttgacttctttccaatttttataggacaaccctatcgtcttacgacatctaactcctaaagttgatactaacttggagtagtttttgccacactactgtcctttgtcattcacttcgagtgctactctttttctttggtccatcagcttggatatttcattcatctaagtagctccttgtgtaggtatcggcctaggacatcgcttctgggtctgaatctgatcctaaacctgagttagccatatctacaccattaa

SEQ ID NO: 139569 - DNA, 998 bp, Cannabis sativa
  modified_base (378)..(384): a, c, t, g, unknown or other
  modified_base (686)..(689): a, c, t, g, unknown or other
catctagcccgggctcactgttgtccagtcttccttttgcctttacctacatatgtaaacaatatctatgaatcgacagactcaataagaaaagcataaacgtaacataaatatataaaccgtattataaccaggtgcctatatacccaatcacaatcctatcccgcatcaaatgcatactaagtctagaacgtttgtacgacaaagcctagtatatatctattgatatctcagtgtaactctatataggggtgttcattggagcacatccaatatttttaggcctatccatatctgatccaattatatattggatgttaaattttaccatccaatccgatccaactaatttcattcatccaatcgatccaacatccnnnnnnngttggattggatcggttctatctattgaatgtatttcatatatatatttttggtttaatttggatttattcaatattttagagctagtatttttttggatcggatgggatccatcccatattttaagtccagtatgtattggattagattggatccatcccatctaagaaaaaaaaaagtaaaattttaatattaatttttatatatacatatatattttacgtataataatataatattttaattactcataaaaactaaatgaaaaccctaattaattcgattggatgttggatgtattnnnnttttagacacctcatccaacatccgatccgatccaatccaattggatatttaaaaataacatccaatccgattcgatcacaattggacatccaatgtttggcgattagttgcaattggattggatcgttttatgcacaccctaactctatgtacacttcactaatatcctggtatgctaatctaatggctactgattttcctaacatacatatgttggtatctcagtgtaactctatgtacacttcacttggactctgatatataagttattctaatcgcaactgacatgcacgctaaatatgtattca

SEQ ID NO: 139570 - DNA, 794 bp, Cannabis sativa
  modified_base (113)..(114): a, c, t, g, unknown or other
  modified_base (424)..(427): a, c, t, g, unknown or other
  modified_base (724)..(725): a, c, t, g, unknown or other
gatgaggatgattcctcaacgaaaacgtagtgaaaagaagtaatccaaacacaaaaaggaggaatttaacacatcattcagaaactcgagcaaacccattcctagaagttcgnnatccaacccagaaatcataaaaacatgctatataaacgaaccataagcaagtatacaatatacgaagaacttacatgaagtttgaaggctgggggttggtgttgattgccggtagaacgaagactggcgacgtcgaaggaataagagcaagaaatcaatggtgtttaaagtttcttttctctctaaaaaaactctaagaaaatttggtaaaatgctgaaagtaaccaaatgaagtaagaaagctgtcttttataggccagagcaggtgtgagacagctgtgatcaaccaccatcgtacggtcaggatggnnnncgattcgaattctacagatccaacggttgcattaaacactcatcaaggcggtaggaaacgttttagtacccgtctgacacccatttaatgcgctgtatcaataaatggacagaaaacgaatcgttgtctgcaaaaagcaaataactacagtaatgatggtcattaatatgtcaccacgcgcccaaggcacgtgccaggaagctgataaggcaaccgaaggcatctaagcaagccttgtttactttttcaccaaacaagttggggcgtaattgttgcccctgattttgtccaaaatanntggaccaaccggatgatgacacgtagactgaaggggtttaatgttaagataattctgctaagtctcttt

SEQ ID NO: 139571 - DNA, 620 bp, Cannabis sativa
gggtggtagtgactcgaccaccgattagaagagaaaggcaccatctgcacaagggtcatggaaaccatcaaggtggttctgaaacgtgatacacttacccagaatgtcccaactgtaagaagcatcatctgggtgagtgtgaagggcgaggatgtttccagtgtagtttttgtggacactacaagagagattgcccgcaacttaagaaagaagagtagaagacagcaacaaagcccgatcaagcaaaggtgtttactcttacctaggctgatatagaagctagtccctcagttgttacaggtcagctctcggtcaacaactcttatttcattgtatttttttgactttggggccactcattcttatgtggccgctagaatttttgataaattgggtagaccatttgatagttatgataaggggtttggaaccctactacctagtggagaattagttatctctaaaaggttagttaggtctatgccgattgaaattgaggatagagaaattagtgctgatttagtggaatttgacttagcagattttgatattatacttggaatggatttcttgtccaagtattctgctagtattgcctgtaagtggaagatggtgatctt

SEQ ID NO: 139572 - DNA, 563 bp, Cannabis sativa
aaaataacaaggaagagaaagagacacataattttcttataaaaggaatatttattcaagggctgacattaattttaatagtgcgaatcacctacatgggattttttgtatttataggccaaataatttgtactcatgtaattaattatatggaaagaaaagaaaatattcctatcaaagtctaagtattaacagaaattaattgggctaaaaatttcctatacatatatatagggaaatttacactccatactgtattttttctatttatttcaattatactgtgatacggcagttttctattttttactgtctattttatactgctttcttattttgtgtattgtaatattgttttgttgataaaagtgtttttattcttttttatttacacgtgtaagcctagagtttttcatgtgactgtgtattgtcatatttgtggtagactttttttttttttttttttaattcaatgtaatcatcacttcaatacaattactctctctttcacaccacgttttggtggtttatatcgactatcccatttaactattcatcatctt

SEQ ID NO: 139573 - DNA, 991 bp, Cannabis sativa
  modified_base (477)..(485): a, c, t, g, unknown or other
aatgaatgaaaaatacttctgttaatttattgatattgaataatctggattacattgaaatagggttttatttagggcataaaacccaacatggagatcatacaacaaacctcgtggagtgctttgaaatattaaaaaagtacaatatgaaacttaatctgaaaaagtgttcctttggagtttcctcaagaaatgttctgggattcatagtcaacgcgaggggcattgaagaaaatcctaagaagatcaagcctttgatagatatgccatcaccaactaaactaaaggaagttcaagcattcacaggaagaatggcagcacttaactgattcattttgaagtcaactggtaagtgtctaccatttttcaatgtattgcaaggaaacaaaaaatttgagtggaaagaagagtgcaaggaggcctttaagagcataaagaggcatttgttgacaccttcagttttggcaaaaccaatannnnnnnnnacattactcctctacttggctgtctcggaaaatgcgattaatgctacaatagtgcgagaagacaaaaagcaccaacaacctatttactatgttagtaagaggttactggggaactttccttatgcctaatccatgcatctcgcaagttacgaccttacttccacgagcatccgattaaggtgttaactgatcaaccactgagacaagttttatcaaaaccagatgcttctagaagattgattaaatggttaattgaattggggcagtttgacataacttatcaccgatgaacgtccatcaagggccaagccttggcagatttcctcatagaaggaataactctaggggaaaatatgcttgttcagcgagatgcaaatacttggaaattatacgtggatggtgcatcaaatgagcacagcccaggtgcagggttgatactaatttttccagaaggcttcaagtttcattatgccttaagatttcaattcgacacgtcaaacaacgag

SEQ ID NO: 139574 - DNA, 845 bp, Cannabis sativa
tcttagttttattgttaatgctcggggtattgaatccaatcctaagaaaatacaagccctcctggatatgaaatcaccaacaaagactaaggaagtccaaaacttaactgtttggatagccacactcagtaaaattgtttcgaagtcaatagacaagtgtgttcctttcttcaacatccttcaaggtaacaagaaatttgaatggacgaaggaatgtgagaacgccttccaagaattaaaaatactacttgcaaagcctcccgtactctcaaaacccctagacagagaagaattacgaatataattggctattatagattacgctgtaagtgccgtgttgataagagaagagaacaacgtccaacatccagtttactacatcagcaaaagactcattgacgctgaaggatggtatcctttgatagaaaagcttacttactacctaatcttagtaacaagaatgttaaggccttatttccaagctcattttgttcaggtatacaccgaccaaccattgcaaaaacctgatgcttctggacaaatatttaaatgggcagtagagttgggtcagtacaaaataatcaaaggacaggccttagcagattttgtagttgagtgcacgggcaaagaagaaagcaacataagggacaacttggagccagtacaagagcccctgccgaacaacaacgaagacagaccaacctggaagttgcacgtagatgggtcggttacagatcaattttctggtgcgggaatggcccttgtcacacctaggggcaacacctgcatgcagcagtcaaattcggattcaaagcctctaacaacgaggctgaatatgaagccct

SEQ ID NO: 139575 - DNA, 1464 bp, Cannabis sativa
aaataataattatagcaaatgaatgtaaagattcatgaagtcttggatgataaatacaaaatttatttacaagatacaacttttaactttccgctcaagtcccctaaaatgcttggccacccctaagcgcataacaaacatatgggagttaaattattttacaaatagttaaagcatgtgtgagtgtgagggtttcgaaataattacaagcatagtaactataagtattatttattaagtattataaatataataatttaactttcacaccctaaatattaatttaaatatacgtttattaaatagtattcagaatcaaattaaactaatagagaaatataataatataaatgaaaaataatcgaaatcaatatttgtaatatgttgtttactaatattgtttgaaaattgaataataataatttatcttatttactttatcagaaaatgtaatcggaatgttgaagttgactaaaatatcattttgagttaaactatattatatggtggttattttgtaagatatattttaaaagacaaaattgtcattatgtatttattattaaaaaataaaataaatattattttactcttaatgacattccgtaaaaaattagtgggggaagtattccctttcttttatcccttatttaataagttcttcattttttaattttaaattaagtaaatgaatgtaagagaattgttgattaatttggtcaactgacagcagaaccttatttataactaataatcaccacatgtaaataagaataataaataataaatgaaacacaaagatttataaaaggttcggttagcgggtaatgacctactcccactttagttatattcactcttaaaataataccatgcagatcataggtgaaacccttatgatttctagctacggctctcttcagtattacaattgtgagaataatgtattttagattaagaattgatgagtttttatgaagtacttaggaagatactcgacttagtgtctatgaggcatagatggagtatgaggcttgtgagaattagacttcacacgtgtaggaggcctctatagagcatgagaggcgactttcgtagcttgtggaatgacttagggaatgagagagacctaatgccctttatatagtgtagggcttacaaaagatctaattcaaataggtagagatattcctttaaaatatggatatttacatctttttatctattatttaagttacacaaaaggataactagatccctagaaaaaggactaatatctcaagaaaaaatcctattttcgtgggttgttaggccagtctcgcaattttgctcagctcttaggagttgtctgcagaagttggccggccagccctattttttagggcctggccagcctatgcactcctatggctggctaggtaatgttcctgcagccccgggatgtgcctgccaactttctatgtg

SEQ ID NO: 139576 - DNA, 1195 bp, Cannabis sativa
  modified_base (346)..(349): a, c, t, g, unknown or other
gggctggcttctgcatcagcctgacttatcgcgaacacccttgctggagtgggtttcgctgcagtcttcggtccttcagtcttgagttggggacaatcatttttgtaatgccatggcataccgcactgaaaacacccttgccctttacactcccccagatggtgcttcttacaattggggcactctggctaagtgtatcgggtttcggtgccactctagcgattgcctcttccctggttccctcggaacctcttgttctgacctgagccattgtatgcaaacggtgcttttcttttttgatcagtggtcgagccactacctcccctactaaagcctgatgtaggannnntaggagccccaccaacaaccggagtcccaaaagactctagggtgcacccaagtgcacccttagctcgcagtgccttacccattatatcagcataggtggtgttgtcgtcagtagtgatcattaggtcatgtctgatctttgcattcaacccatccaagtatttctctttcttgctgaaatcggttggcacaattcccgaggccaaccttaagcgatcaaactgagtcgtacattcagtaacactcatgttctccttctgagtcagctgggtgaattcttttcttttagcactttggactgcctcgttgtaatactaggcattgaacagctcctggaatttctcccaggtcattgtggtaacatcataaatcatgaacaccatgtcccaccaaaaccagagcgtcttcctaaaatttaaaagtggcacaggccatcctatcattgccagtgacgcccataaagtttaagattctggtgatcacaattagccattgctcaactttcatgacattgggacctcccagaaaacctagaggtgcctgtttacgaaacctttcgtacaggggttccatctggttcactgcaactacaggtccggcattcacagcatgggcaggagctactggtatttccggagcagggattgcagaagcaccctattgtctcaaccgctgaatcttttcagcttgttcattaattctagcttgcatttctataaacctgttttcccactcttgggtaacttgggcagcttggcagcctgtggtgggttagcatcaccccggccacgtgccctacccctgagacctctacctcggccatggatattaaggggaatctgagctc

SEQ ID NO: 139577 - DNA, 546 bp, Cannabis sativa
attttactgtattaatttgtatatgttataaacggaaaaaaaaaattgtaaagtaataattttcttttatctaaaaaacatatgaataaataatgtaaataatggattgataataagcttttaggtctgattattttttgttatattttttttattttattttttgacatttaattccaatttttacataaaaaccgagataaaaaaatatctttttatcccggtttctataagaccttttgtctcacttgcatatatcttggtttttattttaacaaaaattgggataaaatacccctgaaaaccgggataaaaagctctttttgctgtagtgttgatacaattattaatgttgtattccacacattttaaataaataaataatatatgaaatcctacttataacgcgccacattaatataatgttaagcacctaaaggtactaatactaataggaatggttgtacctagagatgttttatgggctcgtttaattggtacgccgtataagggttgtatttgtaacgtccccgcttcaagcctcca

SEQ ID NO: 139578 - DNA, 694 bp, Cannabis sativa
gttgtattatagttgtcataagattgtttttttgtttattttttgttgttttatagtttatttatagttgatttataattgtcgtgaaattaatttctcgctgtttcttaattatttttttttttgctgaataaagtatatttttataattttataactttattagagtatttttgtaattaaaaattttaaacataaattgtaataaaacataaaagaaaagtctttttgaaatttttcttaaaaagttattataaaaaaaataaaataaaaatccatattcgtaattttctattttaaatggttctcatctgttaaaaaggacttccaacacataagtatgtttcaatattttatataattattgagatgatgttaaatattccaatcaaatataacgacttacatttgttttacaataacttgaaatttcattcaattgtaaatctgtaaaaatgattcttaagaaaatcagtaaaaatataaaaactgaaggtgggcttgtctttttacattatgggtacccatttcacatccatttttttccagaatgggccagctagcaattatttaaccgagcgtcccgtttcacttatttaactgcctcttttcaaaagagtttttggcatgtttactaataagtaatgggaataaatagtaaggtaatcattcccttacatttgtttacttgcat

SEQ ID NO: 139579 - DNA, 596 bp, Cannabis sativa
tattattattattttgaaattaaaaaattaccacccttattcaaacgttaaatacaatctagttctaatatataattataagaaaattctatagactacctctttatttacttatttcgtaattatttagaattcgtttaatatgtcgtattatattgtatactattaacggtgaaactatgaaagactaagaagtggccttggcctccctaaaaaaagaaaccttatcaaaatatatgtgcatatttaaaaattacataaacaaaaaaatatataaatacgtgtatacacttgaaaaaaattaccccctcttaataagttcacctagttctgccactgtataatactatattgaattgtatattataccgtatatgtaaaattatacatggtattgccttttatagatacctaaatatataatattttaatataaattaaaatttaatattatataataatatgatatataatctaattcaatataataaagggaataaacagaaaaatacaaaaaagaaaaaaaattacaaaaatactatgggtcggcccattaaacatttatacagtccatatacaaatatttacaaaaatac

SEQ ID NO: 139580 - DNA, 575 bp, Cannabis sativa
aaaattctgcatagtccacgagtgaatcttattagatttctgatattgttctagggccttttctcttatgatttttttcatccctttctcagtctaacttatctctatttataattacatagtcaggcagttaattacagggttgactgtaatctttacaacaattattccatgaaatcgtgagatttaattacatatcacgtaatataaatgcaactaatatttgaatatcacacagctgtgatttgtctgcttttactgggtcaagataattgtctattaaacacgttataagttataaatcatgacgttatgggatgtctcgacaggaacttagtaccaatgaccttgatagcgagttggagcttttcccctatctctttgaggttgataatgtaaacctcgtcacttcttcacttggagatatgacacttcatcttgacaatcgtagctcttagtgacaagggatactgttaatgcagattttcgttaaccaaatttgagcctcacagttatgattcaacacagaaataataaaagttatagaaaagtaaaataagaacactgggtttttt

SEQ ID NO: 139581 - DNA, 563 bp, Cannabis sativa
taaatagttttggcatttataagattaaaattacaaaatatggaatttgtgaaataatagataaatagttaaaaaaaaatgggaaaaatataattggtggggcccacatacatggccagcaactaagtcttatttttggctattattttatcattttttattccatataattcaatccgaaccctacgtgaaatagtataaaaagaataggatgatctcattatctaactaatgactcataacctagttttcaactcgtcagacaactagagagttcttgagacatcttcttcttctttcttctaatttcgaaatcttagagtgttcttcataaaattttcgagctattagtgagtgagtgaatgcccacccatagcaagtctagtactcaattatagtatgtaagactgtgaagaatccaaacacttaaaggaggatcgggctcagatcttgatacaatagtactctgcgatagaaaggaacaagggttagacatctgagtgggatgagtcattatattccactgcaatcaatgtaatgttactcaaactttatatgtgttt

SEQ ID NO: 139582 - DNA, 1967 bp, Cannabis sativa
  modified_base (558)..(566): a, c, t, g, unknown or other
aggaaggcacactcatggtaccttcactaatcagctccagacatctttcaattggatccacaattccatctagtcagctctctcagatagaagcggacactcaaatgatgttgactactgaagtttgccttgtcaccaagaactgcgattgtgaaatggagcgttatgtcttcaagcgcagaaacgacaaggtttaaattatcaacctcaaaaagacatgggaacagttccagctcgctaccagggttattgttgctatgttcccagcgagacgtccaataacaatatgtgttacaatgtatttaatacacgtttacattgaaccagtaaaagtggaccaaacacagttgtgtcattttcaaatgttaaccgcatttattttacgtgggatgtaattaaatcccacgatttcaggggattattattgtaaaatatcagtcaaatctgtaattaactgccctcctatgtaattataaataggagcaggttacactgaaaaaggaataaaaaacttattagaaaaaaagccctagaactgtatcaaaaatctaataagannnnnnnnnggactatgcagaattttaactacaaaaccacataaaaacctttttgttcctattttttctttactgcttttgttttctgtgcaaatctatcacaatttaggctcaaatatagtcaacaaaaatttgcgttaacaacgttcaatgattatgttgatacatcgttgttttagcattttttataagatgtttatatgttattttcaaatactttcattttttatcttgttgttttgttactgcaattgaatgcaagaaacttgatttccagtgatgatgtacttaaatgttgatcagaataggcttgtcatctacttctattcctttgataaaatgaagtgagttacatacattgaaagtgtacaagaaaatattctgatcttccaagaaggttcaagctattgtgcatggattagtgattgaaaagtgcgtttggatttggttatgcattggagaacaacattttttaagaaacattgctttgtagttaattttacatgtatcttgcacatgatattgaacattataatttttttaaatttttttaatatattttagtacagtgaaaaataactattattatatttttaatttatacattaagtatttatatgattctgttcgtacaaacaacgtgaaatcaacatgtttaaaaaataacaaaattaaacaacatgttttcaactttaaaacaactgtaaaacaacaaaaaatgttatttttaaatataaacaattttacttcatatttacaatctagttttattaatgccctcacttgattcaaaatcaacataatgtgtattctcttattatttttcatatctgaatgtaagagataagataaatttttattttaacatgtaaaaaatctattcctttaattgttgaacaactagtgtagtgtataacaatttataactaactttacaacaatatgaaaataacttgattttattttcaagttgaaataagatgttacaaaaacaacacaaaagaaacttcacaacatataacatgaaaacaacttaatgattcttttgtagacattgtgtagttttgtttttgttgttttcaaccaaaacaatatcaattgctgagcaaataattatagatttttcaatatttaacatctttggagatttgcttttggatgttttcttgttgctttatggttgtttctgcagtcaaagtcccaatatcaactaaaataacctcttttaaaccagatcctcccattgaagcagataaaatttgtttaattgttgttgttgtgttgttgtcaggttgctgcacatgtgaaaatactgagtgattgtcactttctgtcattatcacattgttgcactccattgtttgggtagcttccaaaaaagattgtataaaacaacaaacttttgtcatc

SEQ ID NO: 139583 - DNA, 898 bp, Cannabis sativa
tttgtaaaagctttcgagagagataaaatacttttggcttcttttctcacaagttaatatagcaggggagtaggctattaccaccatcacatgaccgaacctctataacaaattttatgtgcttattttgcttaattattactcaaattcatgtactttcaatcgctttaattgactcaccgttgttggccaaaagtgagatcaacaattgtaatatgaaactggtttctatattaaattattgttttattattttacataattggttttacagtttaatttttaatttagttaatcaaataactcatattttaaattaattgtgaaatttcgtaaaataactagccaagtaacaaaaaaagaaaaaaactgtacatgtattaatatttatgatgtattttttatttcttagtgttacaattgaaaaaaatgctagtcatatttaattctacaaatataataatttagatcttgacacaatcaaacaaagggtatactaaaatagaaagataaaaatcataaaatatgtcttcataacttgttttttgagtataggacaaaacaataatttgttataactactaactttatcttttctcatatatcttttgtagttttaatttagtaaaaaattaatttctgcgtttcaaagaatgtataataacaggtaaactgaggcaaaatactcaaatttcaaagaatgtaacacttaaagaagtaatctttatttttggtggaaaaaaaaatactaaatattagttaattataattttttacagtagagttttatttgaaatgttaaggtataacaattaaataattacctttttattgaagaaaggtccttgtgttgatactgctcttgcttgtgccttcattgttgaacagtattttatgt

SEQ ID NO: 139584 - DNA, 841 bp, Cannabis sativa
tcatatagctaaaagttttatatcctacatgtatcataacaaaatgtaaaaaatcgcatactcattcttttaatatataagacttcacaaaactgccccattcattccgtatttcatttatctgattgctgttagacttgtcattttttgactgtacaaccagagatagataatattaaatgtatttaaagtaaaaagcaattgtcaaataaaaatcatgtatgtttaattacctcattccttaaaaaaaagttgctggattgtgctgagtcatgaagcttttaataatcttcatgtagtaatatccacactgtacatcgtccggttgtcctcgacacttgtattgcttgatctttacctcaaccctatttcgtatattttttttgaatcttgtaggtttccaaagcactacaccaaagagaagttacttagtgaccaaattagtaacaaacgttaaattaatgaaaaaaataatagaacttacattgtgacacattttttaatttcattctgaattggcatattctttgggtcaagaaatgccactgactgagcagcagcctgaatgattatcaccgtccaatgttcactacacataattaaaaagtttagtcaactccataattgatatatatttacatatattaaattacaaatttacttacagtggattccagggacaaatcaaccattgatcgggttgtatttccatcaatcgcgcatgagattctctgtacgttccttaggatctttacaagctattgaggatactgaagcaggatttaaaaagacatatgtattgttcaacccactaatattgagtgaatgttcctgcaaataa

SEQ ID NO: 139585 - DNA, 519 bp, Cannabis sativa
cttttcgtttttgctctaaatattaatgagaatgtttacttatggatttcatttattcataatattattaaattaaaataatataaataaaatttaatatttaattatactaataaaaataagtagatgccattttgtattcgtattttttttaaaatgactgattgaattttgtgttttgttaaataataaaataagatatattaaaaattattttcaagttggctatactaaaaaaattatcaaaaattaagtttagtgtactattttaaaaaatacagaatttaatttattatttaacaaaacaaaaaatctattagtaaattttgcaaaatacaacatttaaattggtattaactcatcaaaataaaatatttacataacaaattgaaagattaaattgtaggagtgttcaacactagtccgtcgttcacaattttaataacaattaaagtaaatattattttggaccttgtgtttacaaaagttactaattagactatctgttttgttaaatga

SEQ ID NO: 139586 - DNA, 795 bp, Cannabis sativa
ctaagcctctggtctcttagagtagtgccaccacatgtcctttgccgagtgtcttaaactgtataacctctttagtctcagaattaaaggaaagtaccgcaaaacttttctagcaactttttttccatctccctttctctttttccaacgactctcaccacaaacaggacatactacttttttttcattctctttccaaaataaggcacaattatacttgcatacatcaatggtttcataacccaaaccaagattacgcaatttcatcttcgactcgtaatgggacttgggtaattttgtaccctttggaaataactcaatcaatatggcgagtaacatatcaaaagaatggttagtcaacttattgagaactttggagtgcatcaacttcaccaaagcattgagcgctgattttttgcaacccatgtacaatttagttttcatatccttgaacaaatcgtcgtacttaccaccaccattcacagggggctcattaaaggaagcagaggtaaaatttggattgtcaaactaggatcttctcttaaaatatcagccatgacatctgccatttcttcttcttcgttgtctaatatttctacagccagttgcgtgaacgactccccatgaaaatatcgggtggtgtacgatcgttggatgccatgcacaaacagatgtaccctaatattattgggagtctcaaagttcaccttaaacatctcatgcaagggcatcatgtaactctggcagaatttatttgcattcgagcaactccaacaaactcatccacacccctac

SEQ ID NO: 139587 - DNA, 503 bp, Cannabis sativa
ttttttacttttagtcacgaattttgttgtttaaaaataatattttttgtagtgggaatttgcacttcctccaataatagttggacagcctattcccctcttttagcacaatgttgatagtctgtttgcataattctgagcagtgttactaacttcttaaagagagcgacctaattcgcgactcaacttagattttaatttcgtaaattcgtttctttttattttctgtgacaactatttcaacataatcgcatgtccctaaagcctatatagcatgttgtttgataaaatagtcttcttcagtgcaaacggttggggtaccttgtcatcttgaagacagattatcttagagtttgttattccattaacaagaaggtgatgatacaattcaatccacttttgggttaatgtagcttatatgtagtgcaataatttgattaacatattttcaatgaattagctaattaaccctagcctattttcttgctaagctagctctatat

SEQ ID NO: 139588 - DNA, 1961 bp, Cannabis sativa
  modified_base (1735)..(1737): a, c, t, g, unknown or other
ttattttggttattttactaactggtttctcacattccactatttttttttgttattcttttatggtttttattgcatttttttctcttaaattttctttgtttctttttccctctttgattttaatttctgattctctttgttatatttcttgcatattatatgcttaaatcaattctagtttttgagcaagcaaataaaaaattaaatggcaaaataaagaatgaaactagaagttttgttataaggtattgatataaaatttatatgttcgaaactagtttttaaatttagtatcgtttgtaaaagtttaattattaggcattgtgtatttttcattatattattgatgaaattatttttttgcctcttttaatgaaataattagtttcttttagtattgatgaaagtagtttttaaagttatagtatcatttttagattataaattttttcattatcttgttgatgaaactatttttttattcttttaatgaacttattagtttctttcaatgtttatgaaacttatttttgaagtttgtattatttttagattataattttttatattgtttttttccaggatgatgttgatgaaactagttttttttattcagctgcttttaatgaaataattagtatttaaccaaaaaaaaaaaacaaccaaacagtagtttaaataaaaaatcaggtttaatttctgaaaagaaaaacaacatctacagttgagatcattttttatttattttagtattttattttttaaaaaaggaaaaacaaaataaaaagaaacacaaacttaaagtttttatggcattcctcacaaatttttcccatatttataagttttttttttttttttttttttaaaatgtcatatttggtgtaattaagtatttatgtcatctatatcaaaacttatcttcatttttctatatttttgtaaataaccctttttttctctcactaaataactaatggcttgttttagtataaagtaattagtaattttctccttgaattacaatattgattttagcccctaaaatatacagtttgttaagaattctctgaactgttacatttttagaaatttagtctttctgttaggttcaattctattattccgtttaaatgatgacgtgtctttatcaattaacaactttgccccctaaattttgacaactatcaaatcatactccctcaaaataaaaatgagaaagattcaatatttttttaagtaaatcttaaaaaattattttagatttaaaaaaaatcattttgaatgattaagaaaattaaaaaataaattgaaactaattacccaatataaaaaattatttatttttattagaaaattcatttagatattaaaataatatattaaaaatttaatttgtaaaaatatattaaaaaatatattcaaaactaaattttacaggaacaaacttgaatatattttgtttttatcaaaaaaatgtagatttgtttaaataaacttaatatttttttagtttaatttataacttttttcaaaatatttttttttattgaaattgttgaccgaggttttctacaaccaagtaaatgaaagaatgagaagagctagggaagctttaatgcaggtgatttttacgtggttcgggcattaatgagccttagtccacgactctttgttattaatgagagtgtttgtatagagaatgtccttggtgaatctctctctctctctnnntctctctctctctctcttttactccatttgattccttaattgattaatcgaccccttttacattctatgtttggggtatttatagtgtttttcgggagaatccctaaaaggggatcacttgtctttaagtgttagggcacaaattcctagcagatacaaaataagaaatacatgacctataccgtaggtatcttagggattaggtgaatgtaatcttttatcct

SEQ ID NO: 139589 - DNA, 679 bp, Cannabis sativa
  modified_base (339)..(344): a, c, t, g, unknown or other
  modified_base (500)..(509): a, c, t, g, unknown or other
  modified_base (609)..(644): a, c, t, g, unknown or other
gtgacctcctggaaagttttcccaaggagcatgcgagtgaggataaagtacgttggaaacactcgtgttagtctgtagggtcagttatcattccaggaagcagtcagagtgtcgtattcgtgtataagagccatcattctgtgggtaaaagggcccaatggaggcttgaagcggggacattacaaatggtattagagccttgacccagtcggaagtgtggttgatgaggatgtcgaacctcgtaagtggggtgattgtgatagtcagtagtcccgtgatccgtaaggagaaataccaggtgagctgtgcaatcccacactgcctagggaaggtcaagtnnnnnnattctgagactgtgtaagtatgggattgcacagctcacctggtatttctccttacggactggggaaggtcaagtgggatgattctaagactgtgtaagtatgggactacaaagttgaagagagcttaaatagattgattggtactacctatgtcannnnnnnnnntcttgttttctggtagcccatcatgaaagaactctatagttaagcatgcttgacttggggtaatttcaggaagggtgtgttgggatttatgccctaaatnnnnnnnnnnnnnnnnnnnnnnnnnnnnnnnnnnnntatagatcagaaataaaatttaatgttgcatggtt

SEQ ID NO: 139590 - DNA, 976 bp, Cannabis sativa
  modified_base (45)..(48): a, c, t, g, unknown or other
tgcatcactatttacagggctatgagcttggagaggaagtatttnnnntctcgttacaatggatataagcaaaaagattgcatagtaaatacagaattcaccgatcacgagatttggatagcttgccatatctctgcaattcgatccccaagttatagggatttccttgatgactcacgatgtgaaagcctaattcgctaagtgttggtcagtaggtacggattgctgactgcttggcttcgagcatgaatatgaggtatcctgttcggactatatcctctgagtagatactcggagtcgactccacgtgtcaccatcatatgacaccacatcagagtgcgaaaattgggataacatttaccctccaagtctgtatgggacttccaaagttgcgtgtagacttcatccgagttgtctttatgtttgaatgggtgacatgtgtcaggtgcgcctatttgcgactcgatgtgaggctgactgggcgtcccttcggtttttggctaataaatgctttgacaattaatatttttgaaatctgatgctctctcaccacggttgccgactacacttgattacttttgatttcccatattcgcttttagggggaaccgaggcatctgaggttcttttgaaatgattatcccttttcgttgtttgcctataaataccagtgagcatttgtccacaaactcattttcaccaaccttccttgctaagtaagtttagagcgaaaaagagaggtttttggcttcaagtttgctaaagtgctttcatcaaaactgctcgtttggcctgacataacctggactcagacatttgattccttgagtaagttctctattttctttatgtttactttgcacaatttctttctgaatgcactttcgattttgctgtagaagatatgtaggaaaccctaagtttagaaactctacaattttcctttgttacagttcatgcaatttcatcgtctgta

SEQ ID NO: 139591 - DNA, 1181 bp, Cannabis sativa
ttttagtatttcttgtattttaatttttcagttaagtaccagacattaaattttttccagttgaatcatgaaaaacgtgaaaaaaaaaatatttttcggggccagaagcctagtggtcgcgacccttttttgtggtcgcgaccctggtcgtgacctgggattttacagagttgatggaaatttcaaccgcagtagtcgcgaccagcaaagcccatagtcgcgaacctttttccaaatcgcgaccctagtcgtgaccaacctcttttccagaaagccctgatttttgaattcaagctagtcgcgaccagcccatgggcaagtcgcgactagctcgcaaatttctttaaataccccctcttttccccccattcaaccctacacccaaattcaaaaaaataccagccgtccctaatctctcccattcgaaaatttcaacgttttcttccccaaatcttcaattctttcatcttcaaaccaatttctcaatcataatccatcctaaaacccactttcactcatcaatcctcactttccatcaaaaaccatcccaaaaatcaccaatactatcgcaaatccgaaaataccattgttcttcatcttcaacctcaagctttcaaggacattaaacaatggaggtggagtaaaagcttctttgggtttgtaagtatcacttcctaccatattaaggaatttgatttactatttctaaattttgggtggtatagtgcatattgtttagaattgttgttgatattgggcttgttggaattgtattgtggtattgttgttaatattgggtttatttgagtgattgtgaatttttgggaagtagaaaattaaggggaggtgctgcccaatttttcttagaattattttgaaaaaaaaaagaagaaaaaattacattacaatttctaagaaaatggcacccaaaagaactaggcacgttcaagaaggttcatcatcaaacccaccaactacgagtttcaatagaacccagtttgtcaatgaggaggcttagaatcgtttcatgaggcaaaaaaattaggccttacattgaagaccggggtattgaattccctgaaaaatcccttaaggcgtcaacctaggtttgaagcaattcgagctcaaattgagaggatgagatgttgggttttgtggcctaaataaaacccattacaatc

SEQ ID NO: 139592 - DNA, 624 bp, Cannabis sativa
  modified_base (564)..(584): a, c, t, g, unknown or other
tttaaagtattcctgtcagtttctataaccgtcgcctatacgaccatcgtaaaacaggtagaataggcgacaattcaaaaccgtcgctaaagcgtcgcttataactgggtatggaaagcgaaaagtgaatccaaagaaaagaaaaggtcgccgtgagaaaagtgaagttgttgcaaataaacctcaagggccatggaagaagaagtcaatattttttgagctcgagtattggaagcatttgttgatacgtcataatctggacgtgatgaacatcgagaaaaatgtgtcagacaacttgcttaataccttgttcaatattcctgggcctagcgaatatggaatcaaatcccgtctagatttgaaagagtaagcgattcgggccaatttacacccataagttgttggtcgacaaacgttcttaccacaagcttgtcatgctctaactaaaccagataaataatctttgtgtggttctatctctcgggtgaaagtacctgaagggtactcctcaaatgtctctgattggtttgatatgaacaaattaattttgagtggtctgaaatnnnnnnnnnnnnnnnnnnnnnttcaacatattctaccagtgagtatccattctgtgttgcc

SEQ ID NO: 139593 - DNA, 631 bp, Cannabis sativa
tccatggctatcacaaaatattttgttggatgtttatgaacacaaataaaaagatcatacgactaattagaacaagcaataagttaattacaaaacaactccaaaatagagttgttatgtacctgatgacgacacatcgtttgatgcacactataggtgtttttgtagattctaagaaaaggaaagaagttgcgagctactttgtcagcggtggggctattgtaggaaataatgttgttatttgatgaattcttatgctctttttagttcttggttgtaattgtttacttttgcaagaaataaatctacggagtaaatttgagttttgtttaattttatattattaatggcctcagatgtttatttcaagaatgtaattaactccccatttgttactgctaacagtatggaagaaagaaaaaattaatttgttttattttttgaaattaatatacttgccctattataatttttacttatttatttgtttttttgtgttggaatgtagaggagctgctgtattattaattcttcaacgagtgtagccatttttttggaaaattcttcactttatttcactttttactttttaaatatttaaataaaaattaaataattaagtgtaataatt

SEQ ID NO: 139594 - DNA, 655 bp, Cannabis sativa
  modified_base (307)..(307): a, c, t, g, unknown or other
aacttgtaaaacccaaacagcttatgggggatatcgcttccttcgtcttgaacggcccaacaacagttctacccgagtcaataaatttggcataagccttatcattaaagtcatcctcaattacagccacattctcagactgtgtcttcttcgatttgacgagggatttccctttattccagaaagacgccacttcgagtatatcaaagtcgtcatcctcaattgtcttctctggataaccttcatcttcaacctattttgtagagatagcaaagacgttgataatgattccaccacattttcctcngattgcccaacaacattagtcttcgaacggacaggtgtcttcgacggggactcctccacggcctggctgcactctgccttcttccccacttcccctacagcatcctcctccaaatctcggtcaataccacctacaccttctcctttgtccataaatttcaaagaaaatgatttgaactgagactttaaatccttgaaaaagtactccttcaactcattgatagcacttgaaaagtggtcaatgctctttcttccttctgggccggagtagtagttgggcagtattacaggatttgaagtaagcgttatctgttaaacagaacatgttaaacaaaattaatttttcaat

SEQ ID NO: 139595 - DNA, 608 bp, Cannabis sativa
attagtatattgaataataaataacatgtaatatttcaatttttatgtaatttaatatttttatacatttaaattttataatatgagtgtgtattttgttttctagtatattaatattatttttataattctttaagtaatgttttgtataacaattagtattttgaataataaataatgtatagtattttaatttgttgttttacttaaaataaattaatagagttcttctgttaagtattaaaattaatatttaggatctacttgttaattcttataaaagtataggttaaaaaaagtatacctaaaacaagataaaacaagtgatgatgacttagataatttctaattatcattgcatttcccattaatattttaattcgagttttatcagtcaagtgctttctaggataatagaatttagggttctaattctagaaatataattatctttactttagtttaagttttatgatacatcattggtatgtttaaattttaagtgacattgtattcatccttaggtattctaaaatattattaattataatttgtgagacttacgcgtcaaaccctaacaactaagaaagcatacctcataccaaaaa

SEQ ID NO: 139596 - DNA, 1152 bp, Cannabis sativa
  modified_base (1094)..(1110): a, c, t, g, unknown or other
ttctacatagttcttgttttagtaactaatcctaggaatcatcaaaagaccataaccacaatcatacatctatgacatttacatcttgttcatagtggtattaacaagattattctatgtaaagagaaaatatgcgaatatccacttggaagtgtgtccatttgtattcaaacatatggatgcacatttaggggtggatatgagttatcgttaaatttttaaattcttagacaatcactctagaatataccttatgcaaagaaatttgaaatgttttagaaatttcatgaatttctagcaatggtgaaaacaattaaggtagatggttaaagatcttgtgaactgataggggtggagaaatatttgtttatgtagttcaaagatcattaagttgaactttgaattgtctccaaacttacctctctagaaattcggattgcatattgatgagaatgaaaggtctatgattagttactagcagccacctgagtccttctagggaaatgccttagagatagcaaacgacattctatgtcgtcccatctaagtctgatctcaagaaaacctcagaatgatagaatggtcgttaacttagcatacaccattactacattctggaatgccctgatcatgaacttaaggaaagccaaaactgctaactaaggtttgcatatctaatagttgttctaaagtgattaggggtggaccaccctatggtcattaagataagaaagtgtttgtttcaacgaatactgcttttctaagaacatgactaaatatgaaaataaagtagcaaagcagaggagataatatttgatttaatctcaaagtgttctatcatcttattctatataagactgtcctactgcctctattgtattgacacaatcgatgaggtcaataccgttgatgttcctagacaaaattcacgataccttgtcgttgtgggagggttttaaggaactcaccctgttacgactgggaaaactcttgtgatagtaattcattgttagtttaaacaagcaatggatagtcctaataaggaactgagaatcaaaaccaagagaactatggttaaaactattcacatggannnnnnnnnnnnnnnnnattacaaggacaagaagggaaattctgataataagtctattc

SEQ ID NO: 139597 - DNA, 1225 bp, Cannabis sativa
actgtagcgtgccttagcattagggcgttacaataatcctgggggccagtctttcccttgggaaacctactttcctatggacctttcccttttgggaaatcaaaacgaactttctgtggatctcaggctgttttgttcctttcaggtacagttgtcggattcaccttacgcgacgcgtggtctttcagaagggtacctgattgggctaggttccctatccttctgcttttggcttcccacaggttgagaagggccttcccccgtcatctcatgcacggatggtacaccagttggatacacatgaatgcttgcattttccatcgcctttttcatagcaatcaatatttcttgcattcttttattttgttctttttattctgtcaactaagcctcatggtcagtagctcttttcctcaaagccactagttccgtgtagttgtcttcatcatatgttttgaactcatcttagtcttctatatactcagggtcgttcggatctccttttccttcaacatccacccgagaagccacatcttcttcttttggaccctttgggtcattaggctggggtggtggatgtgaagtgttttttattaataccattatatcaagaggctttttgtgatttcctcttttggaaagcttcctacagctctcaatgaaagcacaaaaatgttgaccgagattttcggcaactattaattagagttgcttatagtaattaatggaagttaaagaagagaaattttacgtggttgggacattaatgagccttagtccacgagtcattgttattaatgagtgttttcttacagagaattcccaagagttcccttcttccatacatcattggggtatttataggctcataatagtggtaaaacgaccaccattgtacgtttgtttgagccatgccttgcacaatttcctagagatgaacatagggcatgattgcctattctctatgatgtgtttaggcttgttctaggcatttggtaagactagacttgccttctattagtgatttgatagctcataatgtagccatcaaatgatgtatggagcattgtgaaatcagagaattatgggcttaaatccttgagcacgtctttttagagtaatgtgtagtatgttcttccccatgctgcattaaatgcatgcactgttgacctcgagcagcatgccatgctttgcatgtccctctatctcttctccgagtcgagtt

SEQ ID NO: 139598 - DNA, 813 bp, Cannabis sativa
taacatagttgttgaattttagactttatttttgcttcaaattgtaacctggcacttttacctatactttttgtatagtttgttaattttgattctagttttgcgtaaagtaattacatgtgaattttgtaagtaacctgagacatccgggttttattagatttgataatcttattaattatttattaatttatatggatataatgtagtttataaatatattttaatttggtgtttgaaacgatatttattgaaatctattaagtccattaattaagtgattttattaataattaattttatactttactatattattgttatatttttttttcctttagttttacattaagtcataattgtctttatatttatttatattattattttctgtaagcaattattattagtcaaataatcagcgaattaatattttatacattgtgaagatttgttgcgccacaattttgttggctttgatgcctttcaaggcttttgcgcttatttttatagcttgcccctaattatttagggcaatatgattaattattccatattttaatgagaaataaaagttttcaacggaaatttttgcggtgttgagcaccacgagcttagttggattaggtgctgttatattgtcagaagagccacgttgcgtagagcaaactcctcaaaaattagttattgtgggtacattaaaaataatatttgttgcttatttcattattttgtttatttctaaaggaattttttgatatcctaagttatgggagcattgcagggcttaattgttgttactagattacatat

SEQ ID NO: 139599 - DNA, 557 bp, Cannabis sativa
tccagagaacgcaagtcttcagagagagccggtgtacaaggaaccttccgagaagcaacaagagcgaatagataaacgcctctctaaacaaacttctagaacatcatcaggtaacataccgcgtgtattaactagtgccttgaaatttatttatacttatcttttatttgtcctcggagagatgactttcttgaagtccgcgccagtcgtcaaccgcaagccaaaatctggaacagcgacaacttcccctatcgttcctcagaagaggaagagcgatgtggtggttacccctgtcgcggattcttccaagaggtcagctaagggcatataagagaaagggaagaaggtcgtgattgacccagctgttcgagcccgcaacatactgactctccaagagaagttcgtaagcgatgaattccaatcgaagatcgacaagaaccctgctgaggagctgctgcctcgctctgcggagttagcttcgcagttcattgccatgttctcgaaggcctttgttactggatccaaggaggtcaaactcgtgaagagacagaacgttc

SEQ ID NO: 139600 - DNA, 547 bp, Cannabis sativa
aaacatatcaaataataaagatacaatgaatccctaaactaattccctaaaaatatggtacaataaaaatagaattattattatacagctatacttcataataataataattaagaaagctgattttccaacaaatagttgcttttgacaatgttcaggattctattcctaatattgatcaagttttagatcaagagaaaccaaacataatcagtcaaaccccagaggtacaaactcaacaacctcaagaacaagtgcctttgcgacaatccactagagaaagaagaaatgctattaatccagataaatacgtagtgcatcttcaagaacatgaggatgacattggaatgatggaagatgatccaatcaactttcatcaggccatgaaaattttaactctcaaaagtagaatgatgccatgactgaagagaataagcctatgcaagacaataaagtttgtgaagttgtcccattaccagaaggagtaaaaccaattgcttgtaaatggatatataaaaccaagagggatgaaaatggtaatgtggtg

SEQ ID NO: 139601 - DNA, 570 bp, Cannabis sativa
gatattgaaaacctatattatgttcattttttaaaatattttaatagcaatcgtgttatgattttacaattaatatttttggtatatttttaggtgtacaacttttaaaaactattatatgtacaaactaatttggtagtcaaaatatttgtcatttcatttctaacatcttatctctacagattaccaactgttatgcaacttttttgtactttttattatacaacttataaaaactcatatcggacttttaaaaactatttctattgaaattttttatgtaataaattaaattcttaataagtatcataacataactgaactgtccagaaactattttgcaactacgaataaactattttaactttgctaattaatagaaatctatgaaaactaacatttaatgctatcaaaattctcatagagatttaaacaatttaaataattctggtatatcaatttaattgcttaattgttacatgtctttcggttgtgatcatgttgaccacattaaatttatactagcaccaagatcacataaagacttctcaaattttaaaccaccaatct

SEQ ID NO: 139602 - DNA, 522 bp, Cannabis sativa
aacaatctcaatagtttagagggcatttttaacgaccttaaaagtccaggaacataatttagtatatgtcaaagtttgggggacaaaaatcataattaccctattatttttatggtatttattatgtcatatttatatttatattataattacttccaaatatcatatttatcttctgtctttgttttatgaaaaaactcaaacgaatgaggagggtccttctctttttcctttcagctcttcgatcggctcaactatagctgccacccctcactgcagctctgaccaaagctccaccgccgtttacaactcactatctcttcctcttcgtacgatcaacggaaaagggcatcgattcccttctcttgcaacgtcggtgcattagatgatggagtcaagatgcgaggtatcgatcctgttggaactttgtatgaaattatgtaaaaatagaaaagtgaagtatgtgagtaggagtcccacatgggatagaaacactacatttgtagtgtatatctagtgcaa

SEQ ID NO: 139603 - DNA, 698 bp, Cannabis sativa
gctaaaacattttcatatctcaaaatatatatgcaagagatacattaagaaaataaaagaaggcatcaacaacgttagaaactaaatctgacaatgatgaacgatttttccacttgtgtttaattttctgaacaagctgaagatagtttatcgcgatgagagagagtagaattctcactgccaaacaccaaagcagagcaatgttgtgcctcagcatataggaaagaaaccgctccaattcttgggtagcgaggacaacagaaacattgttgtggcagtccctcaccacaggcacagcccctatatctgattttccctttcttttgtttaatgccgtctttatttttttggttctccaagttattccccactcctaccagcagtaagaggattagggagtgaactcttttgggcttcaatatagtcctacaacagctttacaacataacattctacattcatattaaaacaatatttttttattgaatatggcgtaatttctattgttccaaatcatccacatgataccaaaaaatagttcaagcttatcttttgataaagattcgaaactcttgagaaaaaatccttaataccacaatttttgttcatgcaatgaagctcattaaaagaagtttctttccacaccagtttatccttggaacactcaagaaaggcatgagtgatggtctcttcatttc

SEQ ID NO: 139604 - DNA, 972 bp, Cannabis sativa
caatatttttttatatgtttctgaaagtaaaagtcccaaaagttaaatggctcatatattttgagacttgccctggtgataaaagaaatgaaaatttacatagtatactaacttttgtcatttttttacaaaaaaactgtcaggcagtaatttttacttttttattgtgtttttttataagtttcatactgcagtatattgtgttaagttttcactggtgttctactgttgttctgagttgttctgctttgtgttttactagtgttttataaaaacacaatatttttgaaaagattttcgtgtgacagtatttttgtaaaaattaacctaaattccagtatttttgtaaattttcctaaaagaaattggaataagttgaagaatattttttttatgtacattaatcaaatttagctttaaataaaatttaattcaaatatatctctttttataaatattgtacttaaattatcttcacaccctcacataattaaaacataatttcaaatataatagatttttaaaataaaaaatataaaaatcaaagacatgaatttaaaagggatatataatgggaaatgacttcttttaaaattctattatttcagtaatataagaattattgtattaatattttactcattttaattaactcataatgttagttttgatatcatatatattgagttatattttgaactgttttatttttcttataatattacttcttaacaattttttttttcaaaactatattttcaccctattttattttattttataaagaagagttatattatgttctcacattttctcagtttgttagtgtatttttgttgtgttatgtttttttgtgatttttttttaagtgtataaattttttgagacattaaagattattggaagattagaagatcattagataagttttcttcatattttaattgctatataagtatttatatattgaaa

SEQ ID NO: 139605 - DNA, 732 bp, Cannabis sativa
actcaagcttgcttttcacaaccaaaatctcaatttaccacttacagcagctagcaaatattatagggtcaaaagcacatatctcatgcatccaaaatcccacaatttaccctaaaaattcagattgcttaatcatctcaaaatcaagcttaaacttatcaagatttcaagttcaagaacatgaactcaaacctattaaaatccagcagtataacaccactttaaacatgaaattccaacctagaaatatcataaaatctctgctcaaactcaacaataaagcatacaacaatacaaactcaaattcagcaaaattaacaccaatccacttaacatgcaacccatcatcatcatcaccaagttcatgcttttcaatcataatatttcagcaaagaaatcacaaattaaaaactataaaactacctcaatctcttgcacaaactatcccaagtcctcaacacaatttttcaatcaacacctctttaattcaagctagtttttcaccaaattcaagttgaaaaattgagagggttttagacagggagagggtcggccaagagagtgtgaaaccagaattttctttttttttttgttttcctcgaaattcaacttttcacacatagaaattagaggtcaaatgaccaaaatgtccctagggccacttaacatacatacacacttccaaggacaatattgtcatttcatacccaaataattccaaataaatttcag

SEQ ID NO: 139606 - DNA, 853 bp, Cannabis sativa
ttttttttaaaaaaaaaaggttatattataattatagaagatatctattgagattttattgtaataacccaataagtcgaatggtaaataattagggtttatatttatattatgtgttaatcaggctagtagaattatgatcctactaatctatttcagcataaaatttaaattttactataagtgagtaaataattgtaatttataaattacaaagatttatatagcatatctgaatataatataagctatatgtggaataaaaatattttcaggtccgacgaccatgagtatctgataagtggataaataagtgtaatttattaattacggagatttatttgaaatacgtggatataatataagttatttgtgaaataaaaatatttccaagttcggcgaccttggagacccgattagaggccaaaaatatcacaacggttttagttaaaaatattgattggattattgagataagttgattttagaaatatcgaggtatttaagggtattcgaaattcgccaaatactttagaagtagagatttcttagtagctaagaaataataagataactattaataataaagtgtttattaacattattattaatattatattatattattaagatattacgtttttttttttaaacttatcgttctgtacaataagtttatatatataaatatatattataagttatgtcaataaacagtttaacgaaagaatgaacaaaaccctcttccttctcttttgataatattttcttcttttatccattttctttgattttcaacatgaaacctaacgatttaagccctggtagtagcgggatagcaaatctttgaaga

SEQ ID NO: 139607 - DNA, 710 bp, Cannabis sativa
aacacaaataatataattgaaccaaaatctagctatctcaggattgagatcattgatctaagatcaactaagtgatattcactaagaaatatattatggtaagtttatgatatcttttctatttgaatatcggtccagtccgatgtataacaatacatccaatacacgcttactttaccaatgccttggaaaagacataccaccatctaagtgtaagtaaactacattgttgattattatatcagtgaaaattctatgtactgataaatcgtgggactaatatttagtcacataatcttgattacttaccactgtgtgacacaataatcatgaataacaatgcgataaggatttaaaagaattataaatcaaacaaatgatcatgaagcaaacatgtgaaccaagcattatatttaaataagtaataatacaattctgttcctttattgataaataaaattcaagataacattgaaatatagttttagttacggcacaaaatccaacacagaattatatttttaggccattaagaaaatttatcaacaattcagctacaatatttatggctaagaactataagagtacttgtcaaagatagcatatcaaaattaagtgtttagcagtaaagaggcgtgacaagtggtcatgaagcacacaatactaaattgggtgatcgcatatccttgactaaaggcatgccgcaacac

SEQ ID NO: 139608 - DNA, 583 bp, Cannabis sativa
  modified_base (312)..(319): a, c, t, g, unknown or other
actataaaatgtgacccaaaacttaggctaaaaatagcctaacacttactaaaccaacacaaaatcacttaagggtattttgggaaattctaaaatcccgactatttccgacatttccaatgtctaaatttatcgtcccgttactaaaaacactaggatgtgattctaatagccaaacactgcgttccaatgttgccgaacacaaaacatgcaaaattatgaaatttctatctatgacatattaaatgcattctgaattcaaataaatcaacacattgaaataattcaaaattaataaataattttcataannnnnnnntaattatctgctaattctaaattaaagctaagcggtctttacacctcgtcttgcactactaatatcgtatggtttctcgttaacgcacgaggcaacaatgtatatatctttatctcgcttaagaccttacagccagcaagttgtgaatgtactctgtcatttctgcatttaatgagttattccatttttaaatataattatcattatatttgttgattcgtattctcccagtttgacacctgtcctcttctaaagtgttagccg

SEQ ID NO: 139609 - DNA, 537 bp, Cannabis sativa
atgagactttttaaaaaagagggtaaaaattaaaaagaggaaatataaaaaagggtatagagtgcaatttcctctagtcagactacgtttatgtttagggctcacttagcctaaaagtataattgactttgaacataggcgggctaaacctgtgcctagagttcataactggtccaaaaaaaattccttttaaaatacacaaattttttactaattttaaaaaatttcatattttttttaaataaaggctcaaattaaaataatttttttcgtatgacctaataaatttcagggatggtcttgcctaaaggcttaaattttctcttttaaaaatatttttttttacggattttaaaaaatactatattttttttagataaaaaataacccactaaattttaagaccacctgtggaattttttttttttttaataaaatataaagtttagagcaaggaatggaacatgataaaggccaactttttttttttttttttttttgtttttaaggtaaataagtttgtaaaaatatggcttt

SEQ ID NO: 139610 - DNA, 1166 bp, Cannabis sativa
  modified_base (1122)..(1140): a, c, t, g, unknown or other
aagtggcccaccatgccacactggaaacaagtcttggcctgacattcaccctgatggtgtttcttgcatttcagacacttaggataagatcaaaatgaagatccacagccttgacggctacctctgtttccccaaaactttctattaccccctaatgttctagaacatcagcctttcgtttgtgatcagggttaccaccgtcggtcccgttactgatattaccactagcaggttgattgatgtcgtggttgcatcctttgctatctactcctttgttacatgctggtcaacctcctcagcaattaaggctagctctaccacttttttgtacaaagtgtcatgagtaatggtaatcttcaagtcctgactgattatggcattcagtcctctcacatatttttgtttttagcattgccaaccccagcattatcccccagattctgcggtgccagtggatttgtctggtctgcaccaagctacacgctcaccctgtggtctaggtgattgcggagggtccatttttacaaatatccctgtaatcaactaccatagttagttaagcaccaataccacacttatgcacttgtcgccttaaaccctaactaaactattcattccaattaaataacatttatcatataacattctaagcatggcatcataaatcacataatactctagaagctcgcatattgcctaaaatggaaagcggtaaataaatgatcatacaagtagtaaaggatttactctcaacacttactgcaccatgagtcgagcttgtctgtggcaatgattgtacatgttcggtcgatctacaggaggtttaaaaaccttggcactctaatacaaaactgtaacgccctaacaaatacacatactacccaaggtgattaagaaaccctaatcccctaaacgggattactagaaagataagcacgggtaatttaaacgttaatagaaaacaaaatgaaaataaaacatataataaacttaactttgcaatcaaaaattacatgtcttgggatcccaaaaatattttacaaaatattacaagcctgttcactagccgacctaatcggcaaaattagagtttcaaaagttcatcactggtagaccccaacnnnnnnnnnnnnnnnnnnnccgaacatgtacatacatcgcccaac

SEQ ID NO: 139611 - DNA, 853 bp, Cannabis sativa
aacataaataactgctaatttccaaattaactaagcgggctttacaacccgggattgtcaagctttgattccatttagacgagatgcacgctaaacttctggacttaggtaagaaaagtattaaatactttataaggttaatattattattgttacaatatcaattaagattgaaatcttggtatatgttgttatgatttaatcttaatcgaggttaacgttatgtattggttgtgactcgattatgatcgaggaaaataattggtaacaattattatcgttgtgactcgattatgattgagggaaatgataggaaacgattatcatcgttgagactcgattataatcgagggtaatgatatgaaccgattattatcgttgtgactcgattatgattgagtaaaagatatggtcattaccgttatgagtaattactcctgaaaccgcggataggtttcttacttatcatttgttgtatcgggcaacgacagtgacataagtagcttgtggttaacgagtggtaagggtactttataaagtatcaggattgtatgattacgaagttgtgaaatgatttaagcatgttattatgtgatgagttgtagctggatatatctttgttataatgtgaatgaatggatttttatattacttaagaaactagtctcttttcttgcagaatctagtgactcacgaaatgtaagaattcgtgtttataaagatgtaagattagagtgctttgtgaagcactgagattatgagttatggtaatgtgtgaattagagtgttttatgaagcactgaaggtgagtatttataatgataaatgtttagggtgttgtatgaaacacaga

SEQ ID NO: 139612 - DNA, 880 bp, Cannabis sativa
cctggcaagtcaaaggctccttctactggaacatccgcccaacttccccattacccgaataattcaagttttagtggtaaacattccaacaacaaccacaagcaagggaatgagaaaaagagaaagttcaccggcaagtccgaacaagctccccgagagaatcatgccaagtacactgcattcactattctgactgaagatatagaaagtgtttacatggaaactcagtcgttggccccatataagaagcccgggcccatgaagaaagatgccaggaagagggacatgacaaagttttgtcgattccacggagactacggccacgacactaatgaatgcaacaacttgaagcagtaaattgaattcctaataatgaaaaacaacccacacctgcagaagtatgtcaagaccgatcagggtcagaggaacgacaataaccaggatttactacctccaccggtagatgggcatctgcaagttattgttggaggcccgcacattgctggagattcaggcaaagctcgggagaggtatgcctgaacagcacagcacgagcaagaagaagttatcctggtcgtggaagaaagagggcccaaaattccacgagcaggagagccgaccataaccttcaacgatgaagacgctatcaaaattaaatttctgcacaacgacccgctggtcgtggaagtccaaatatccaataaaatggtggctagaacaatgatcgataatggcacctcttccaatatcttgttcaaaactgcttatgaaaagatgagactccaacttcaggatctaaccccatgcctccagcctgtctatggtttcttcggtcaaggagtcgcacctctaggataaattcgtctacccctcactgttg

SEQ ID NO: 139613 - DNA, 592 bp, Cannabis sativa
attaattaatataaaatatatatttttatttattttctccataattctcctatttttttattttattttttcagaaaataataactcgtttttttaggccttttgccttttctcttcatcacattttatttttatattttgaaattaagattgatatattttggtttttttttttgtgcttttggctttttttaaaacaaaattgaaaaaaaatgagatatttaaaaatgacattttttaaaaaaaaaaaaaaattgataactctaaaattttttagctataatatttttgtctttttcgcctttttaaaaaaaaaaaaaataagatgtttaaaaatgatatgttttaataaattgataactccaaaatctatcattatgttttgactttttatctttgtttatttttttaaggatatttaaaaaattattatactacaagtgaaatacaagacaactgttttaaaattatttgcaattttttttagatctgaattttatgtgaagatttgttgggattttatgccctaaataaaacccacttcaatctaatgtgatttattatcaataaaagattagaagtcatttatgtt

SEQ ID NO: 139614 - DNA, 578 bp, Cannabis sativa
tttaataccatttaattcaaaaaacacaaaatactataccaaaaaaatggtaaatccgaaataagtatcctctattattaaactcttatgtaccttaatgaaaaatgtaaaaaatggttcccaaaacatatatgtacacatttaaaatgatagaactcatattcatacatacaacattaaacatattaatccaaaaaattatcacaaattttagatttggaaaaaaaaaagggtatatgaaaaatttgagctttaaaatcaataactttggttctgataccaattgttaaacacaatcacagattatgagcattaaaagcaatatcattttactcaccaaccaacattactcatagtcataaatccaagatcaattatttatttagagcatcaaatgaaataaatgcacatacctcccaatccatccatatgagctattttgtttcaatgtctccaacaataatcatcaccaaagatttcaagattagagtcaagccttagagccacaatctggagctatcctctcttttcctattaccatacaccttaaaaatactcaatcaccaataacacatata

SEQ ID NO: 139615 - DNA, 647 bp, Cannabis sativa
tatggattttttctcctggagtaagtacctaccgttgattgcattttcgtacaataacagttaccagagtacgatagggatggcttatatggttgaaagtgtagatctcccatccactgggatgagacggtggagaagaaatacctaggtccaggatcaatacaacggaccaatgaggtaattgagaagattaaagctagaattcttgcctctcaaagtagacaaaacagttatgcagatccgaaatgcagaaatattgagttccaagtaggggatcacgcatttttacgagtatctccagtgaaggggatcaagcgtttcgggaaaagagacaagttatgccctagatttacaagacgtttcgagattctcgagaaggttggacaagtggcatatcgattagctttgcctccggttctttcagcaattcacaacgtattccatgtctctatgctaagaaaatacgttttagatgctactcatgtacttagctatgaaagtcttgagctgctgccagatatgtcatatgaacaaatgccactgcaaatccttgattggaaggataaagtccttcggaataagaccatagttttggtcaaagtactctggagaaatagcaaggtggaggaagccacgtgggagttaga

SEQ ID NO: 139616 - DNA, 677 bp, Cannabis sativa
aaaccaattaactgagtctgcaagtagtattatctcaactattgtggggaccataggcttatatcatcaagcctacattcgactatgatctgatcagattttggaaaaagtcaaagcataaaagttctagatctctttttcagattttcggaacatcttgaatcgtccaaactgagcaaaattgagagatttatggctacaatactatcagttgtcgcaacaagaaaaatctaaaaaaaaaggataaaaagatagcggaaaaaatacagcttttcaagtagagttgccatttttatgttttttaagtttaaattttaaatctttttagtatcttttaggtaactttgttagcctatataaacacattattattagtgtttttagtaggttttcagagttcaaaaaactcagaaactcttaattagtaagcaattcaggagtacgaaaattggagagcataatcaatcacgaaggctttttcaacggggttttcaacattcttttcttctctattttctttttctattctgaattaatatatgtgaatttgctacgatgaacatgagtagctaacaatttattaggggttagatgaatattgtttaacattgatttatagttttaatgtgatttaattttctcctaatttctatgtattctattttattcgtacttaa

SEQ ID NO: 139617 - DNA, 1756 bp, Cannabis sativa
  modified_base (32)..(78): a, c, t, g, unknown or other
  modified_base (1722)..(1725): a, c, t, g, unknown or other
tgaaccatggaacattaaatgttatttctgannnnnnnnnnnnnnnnnnnnnnnnnnnnnnnnnnnnnnnnnnnnnnngggcataaaacccaacaactaatgtactacgttcaaccctaagtactgtgggagaccaaccacattgattaccttaggatgctccttcaccggcttctcgaggggcattgttttgaagatattgtgcttgagccaagagatcccaggcgttatccttatctggaacggtaatctgttgccaagaagaatacttgggaatcttgtaatcacaagtttacttcttgtcggcaagaaggcccaccgatcgcaggttggtctcattcaaatggaactcgcatgattaaagaccgtagggaagagttatcaggtgcctatgccgactgaccatctcggaggtaggagtagacctcgtcaagagagctagaaaaacaaacaaaacattggtcagaaacttgaaaaacaaggattgatataaatgagaaagaggaaaacaatcacttacgaagtttgtgaaaggtgcttgtgccaatgggggaaagaccagatgtccagaatgagtaccgaggtagtagaagcccactgcagtgttcttcctcgacggcatggccttaaccgagtaaagatactcaatttctatttgtgtgggacacccctagttcaaatttttgtacaagaccttcaaactagcgagaatcatgtaggagatgggattcagctagaatggggaaactctaaggtgatttatgtagtccttgaagtagtctcaaaaaggaagtgtggatcctgtactgatatactcaaggctccaggcacctataccagttgaaccactgatactagtctcaccattggtccctgggcactgcttgaaaaatgcacaggagggaaacaactgaaatcaccctctcatactgatctaactttgcatgattgcccaagttcgatcccacaggtcttcagcaaatcacccgtgtagcctgagatagatcacaccttcgattctatcaactcagcttcaaaggtgacgttggggtcctggggagtctttgatgtgcgtggcttgggaggcataatttcagaattcaagtcactggttcagaagcaatcgtgacattgggtaaaaacaaagggtttgccacaggaataaaggacacgctggaaggctctagccaggctgcttctcgcaagaatcgacatttgcctttcggatatttcttgcaagaaacgcctgtagcgactagcaatatcttcctggtgggttctcactacatgttccctaaccctagaatcgttcaactctaatttagaagtgggttttgaaggattgggcttatacgggatggtcgattctgtaggaaacttgatttttaaaacttatggacgataaattcctaaaccagagcgggacaatgctgcaggcaaaaagcagtcccaatccctggagagaattttatcaaacccgaaggtaatgagttggagatcttaaaacaacctacatattacttgaaccctagtatggacctaaatacagtctaaccctaaaaactaccaacaccaaatgagatgacaacgatacaaacaaactaagtagcaaattaacacaatgtagcaagcatgtgaaggaagaaagcaacttattgtttggagttaaggcttggggcaatggctggttactgttggaaatatattttaccaggaacttannnntactcacaagtatgttgatttagcaacctaa

SEQ ID NO: 139618 - DNA, 637 bp, Cannabis sativa
aatggtatttaccctttttatatataaattaaaatattttacatatccgccgcgaagcgcggaatgtttactagtttacatatattcctaactttttctaatttattatatttatattctcaggcagtattttttatcttttttactgtgtgtgtttttttttgtacggcagtataaacttttttgtacaattttttttttattttttttacttaccagtatcttaataagattttcccacatcaatatttaaaatttgttattttattagagaagctgattgcacgtgggatgtgacaaaagtgacaccttctttactcttttttttttaaaaaaaaatttaattctttattattttttaatatttaataattattatataaatcccactttccaatatcttactactcatcttcttattctattttttttccaaccagaaccttctccaactcttcaagtgcttcacttaaatccttgttctctccttctctttccacttgatttgaagttagaagagggatttggattgtttggctctctgttttcacatgaggctaatcgatgagttagagctttagttaaggtcaaggatttagtatattattgttgaccgagattttcggcaactaataaa

SEQ ID NO: 139619 - DNA, 700 bp, Cannabis sativa
tgtctaatgcgctccctgttagatttgagattaggagacgatttcagattaaggatacaagttgtcctttgtgtgggctgagggatgaatctattgaacatttgtttctttcttgtgaggtggccctacatttatggcgatcttcaccttggggaatctactttgtttgtgatactggtattcgtgtttgggactgggtgaaatttatttgggatcttagaaatagggggatcagagttgaggacgtctttctttatgctttaattgttgttgacaccatatggaggacgtgcaatgaaagggttcagaataattctcctcctgatgtgttgaaatgtattgacaatatttgtacttcttttgtagagttacatgattctctcccaatcctacgccgatcttgagggagacctgatctccacctcctcaggattggataaaaaataaattgtgatgttagagtgggcttagagagtatgtgcacagctattgtagcaaggaatcatcttggtagggtgatttgggttcacacggcttggttggatttctcagatgtgttatgcgaagaagttgtggcctactgtttggctatctcgctggctatggagttagggtataagtatgttattgtagagagtgactcgagactagctatcaatgctctcaatgggaaggtgttccattgggctcttgataacta

SEQ ID NO: 139620 - DNA, 528 bp, Cannabis sativa
ttactcgggtcaaccattattccaccttttcgaacaatatgctcagaaaagatatctctgacaaccaaaattcacactttttgaactttccatacaacttatgatccttgagttgttgtaataccattcgaagctgatgctcatgtgcctcttatgactgagagtatgcgatgatgtcaacgataaacactatgacgcagttatcgaggaaatccttgaacactctattcatgagacccataaaggtcgttggagcatttgtcaatctgaatgacattacgagacactcgtagagcccatattctggttcgaaatgcaatttttggtatattttttttcgaattttgagcaggtgataaccgcatcgtaaatcaatatttgaaaacacagtcttcccttgaagttgatcaaacaaagcatcaattctaggcaatggatatttgttcttaattgtaaatttgttcagttcccgataatcaatacacattctgagggaaccatctctctttttcacaaaaagaaccggag

SEQ ID NO: 139621 - DNA, 1362 bp, Cannabis sativa
cttactcttagggatagagctcaagagtttgctcagctgctgggggatgaccgaaatatcatccagttgacctccgaggacaactttgtgaagtacgggatatatccaaaggatttcattcctaagccagtgaaggggaggaagaggaaatctggtgcgggacgggctgagtgagctcatcaggaggatgagctgattcaactaaagcgcgaggctaagttgaagggaggtgcaagggccaagcaatatgctcaggagcccttgaatcttgaagatgaggcataggaggagcagttgactccgctcaaaaggaggaagaagcttctgccacaatccaggcctattgaacatgcaattggcattagggagcccagtttgcctgctcgccttctcccgtgctcggaaaagggaaagctgttatgtctgagataagaggcttgtcaggtgatgacgaactttcgagtcttgctcgggcaatcgttctgcacagactactccgtcttgtttttaagcttctggactattatgctttattcttctgatgtctgttttctctaaccatgtggtttttgttccatgcacacatgtctcagaagattctttatgctctaaagaagagagttagaggaggctcgagcggatctcctccggccaagaaatccagaggcggtgaggggaccccttccaaggaaaaggcgcctaccggggaggttatcgacatttttgaggaactaactgttgcgaacccctccactccgaaaattgctcagtacaaggattctcgaggacgaagttagacctaagcaaccaaaaggtggagccgagctgatcaagggtgggtctgagcaaatgcgggctcctactcctcatttgccagtgcttccagaggccaagaaagggaaggagatgctcgcccactatattaaccggtttgttcgtaaggttagtgagcaattggctagtgctgacaacgactcttctttggagctgctgatgggaggattcttgaaggaattgacaagggtaagcttttcttgacagtttccgttaatcctctttatttggctcggattctaaagtttttcctctgcacaggctggtctgaagttggcttatacatactcctgggctaagtctgctgcttccaagaatgcagctatgtccaacaccatgagggcggaggtggacttggccaggaaggacgctgatgacgccagggtcaaacttggagttgttcggatggagctgggtgaagtgaacagtaagctttttactgctcagaagaaaataaccgagttgactaaggatctcgaggcttctgaccaacttgaagagaccatcgagaccttatctgcagaagtg

SEQ ID NO: 139622 - DNA, 544 bp, Cannabis sativa
ttaccttgaaaatcatagtttttgagccaaaattctaaactagcttaaaatcaaccaatcatgaatcaaaatcagattcatttcactcaatcaagcatgcttaaacttttgaaaacaacacataatcacaggagcaacaatccaaaactaagcatgcaacctatcatttttcttcaaaaaaactcaagaaataaatgagaaagttataagaaccttaccaacaattagagatcactaaaacttgagaaaataacttgaattaccaaagaaaatgcccagcttcttgctgctcaaagagggccgaaagagagagagagagagagagtttgaggaaaaggaattttgcttttctcttgattttttttcaatttttaataaaatgagttataaccttcattttccttagctaactcagccaaagccaaataaaaatcagattacataacatattataaaaattcataaaagacaaatctcataaaggcaaatgactattttgcccttccaacactaaaaggggtaaaagaggacttaagggtatttt

SEQ ID NO: 139623 - DNA, 566 bp, Cannabis sativa
tcataaccatattcctatagctacttcaccacttgatcgtcaatcaaccaatagtaaattgtctctaccgtagagacataactgatgtctttactatagatgtatcctatatatttttatataatatataaaattaattgggtaagctatttaattgtccctataaagagaaacaatattaatttttggacaaatcggtgtgaatgaagaaatattttacttgtagtattttttttgatgaaatatagtgtgtatgttgtgtttacttgtagttaataagtataatactcacatagtttataaacaatgtgagactctaacaaaatatatatatatatatatatattagggttgtatatcggtcggtttgtcatatatattttctaatctaatttaaagttcgggtcgctaaaatttaagtgcaacccgcccaatttttttaaaaaaaactgtaaactgatcgacggtttgggcagttttgtcgggttaacctgcccaaaccgaccaaacttttttatttttttttagtttcaaagtcaaaatcaataaaaattaaaaaaataaat

SEQ ID NO: 139624 - DNA, 815 bp, Cannabis sativa
ttaatatattttgttgataatttcattatattaatactatattttgaaaaaatatatatacttaaagaactttgctaaatacaataaattaatctttaaagaaaagaaaaattaatttattatctcttttataatttaggttttcttgatataaaattcaaaacttataaattagtcattaaaataattattatatgataagtaattaaattgataataataaaaagtctaccttaacaattttatgtttttcttctatattggtttaaatatgtacattaatagttaaaaataaatacacaaattaggaattataaaaaaaggagaatgaatatcaaaataactattattgataaataaataatttaaaaattttaaactgagaaaaaaatgaataattatagacttattaactataataataaaaaatttgaaattacattttgtttttaatagaaaaaaaattataataaaaaatagactcaattgtacacgtaaataaaaattatatatgttaagaaaaaaaaattaagatggactttaattttattaaaagataccgcatataagtttattttaaacctcttctatacaagttaaactaatagcatgtatatgacatgtattaacaaagatcaaaaactctataattctagtcttataatgttatttattctgttttattctttagtaaccacgttttaaattgtagaatcaaaatatttatttatatatatatatatatttattttgtatttaataaatttgatattgttggaaatttataggtacttcaatagaaaaactaatgtcaa

SEQ ID NO: 139625 - DNA, 815 bp, Cannabis sativa
aggaccaggagttggcgagcctacgattggcgagccccatgtggacttgggagaagatctcgagttagccaaactcagagaagctgtaggccaagcctgcttaagtgaagcaccatgcgctcctgattgcaatgtattcgctcagtagagatgcaaattccaaagatggatggatgatcaggagtgcatccttcgatctcatcaagcagagatggattgtcgcaacagagaggccagcgatctgataaggcggttcaaccagagaactgatagaagaggctaggatctcatcaaagatccactttaagtaagactcattgatagatcaaggagggtctatcgacaagctgaccagcctggtccctcagggactaggacagatcttccttgccagagggaggacatacattgcctcaaaggtctaacgatgacaatagccatatcccgaaaaccaatgacatggggggtccgccaggaatatctggctcaaaaacatatcccaccattcagcctttggccggccagccacctgtaggagtacccttggccaaccaaaggggagcactacctccccgaggggagcgaggcactcaaaggtcaatcttcaatcgacaaggactgtgagcaggtggaaacacccaaaatggtgattcgagaagtgaaactaatcaattcagaaacctagatctactaaactctagcaactggtgcgatctacctcccattaacacacagccgacgtcaattaaccgaggactcgcgggtagccagaccctaccctttgtaggtctggctagccatggagggattatgga

SEQ ID NO: 139626 - DNA, 616 bp, Cannabis sativa
  modified_base (260)..(261): a, c, t, g, unknown or other
gacagaaagtctacatcagggatgatttttactcttgggggtggagtagttgtttggagaagcactaagcaaactgcaatatcagactctaccatggaggtcaggtacatagttgtcgctgaggctgctaaggaacttgtttggctaagaaagttcacctcaggacttgatgttgttcctggaatggaaaaaccgctagttttactttgtgaaaacactggtgctatagccaatagtaaagagcctcaaagccacaagannagcaaacacatagagaggaaatactacatcatcagataatatgtggcaagaggggccatactggtggagaaagtgggactgaagacaacctagttgatccattcaccaaagtattgactgcaactacatttgaaaagcatagattgaatttaggattaattgaaatgtactcattgttttatgttagtggaagtgggagttcgttgggctttgtgccctaaataaacctcttttacaatgtaatttttctattcaattatcaataaagaaatagatttaatttcattacttgtttaatgtattattcggttcatgtgatcacttatttacatatttgattaataaattcatccaa

SEQ ID NO: 139627 - DNA, 515 bp, Cannabis sativa
cgcaatatctattcaattcaatatgacctagttgatcttagatcaaatgatcttaatcctaagatggttaggttctagttcagttgcattatttatgttcttcaatcatgctcgttaaagttgaccaatggttgttctcgtgctatatagattaaggacatggtagttcaattgagtgggagcactaatcatagatacataatctatagcttctatcagaacatacaagtgacacgatgatttccttcgagcttggcttaatagaaataaatggttgagcgctcatttcagtgattatattagttcactaaaataatatttataggtagctaagtgttttacatttaagggtgtaacggtaaatttgtccctactcaatttagatcatctgtagaggatcactgattaataagattataacaaatgaataattcatagcgtatctatatcgtggaacatatagagcattcaatataattgagagtgcaataccaaatctatagtggtgcaatgag

SEQ ID NO: 139628 - DNA, 701 bp, Cannabis sativa
aagatcctggtaaaataatttttctacagccctaaccccgggtcgtccccctacaccctcgcatcatggtgagtgaagccccggtccccaggtggtgtttgcttggcatctgcgttcatgcgagatgactctgggttgtcaggttgcacattcccacaatttgtgttttcgcaggaggttcttggatcgttgggttgagtttctttattgttggtgtatcgtagattttggggacctccttcgtcaactggaatattccttgtattccgtagttgatcatcttagggattcatgagatttccatggttatcacctctaggactttcctcatgtctcctgctttttgagcctaggtcttccccgaggtcccctagtggatgtgtttggttggttaggaggtgcatcgctgcgcagcccttctaaccataaccttgcattcaaactcaacattcttccaatttgattttgccaatcttaaacagagttgtctattttccaatccactaacgacacatatcttaggtctatagatcttaatcttgatacggttaggttcaacatcttagttgtattgtttatgttcatcaagttgttcgtgtggaagctaaccaatattttaggcagatatttacatcttgggaacatggtagttcaattgagttggagcgctgatcatagatatggaatctatgacttctata

SEQ ID NO: 139629 - DNA, 662 bp, Cannabis sativa
tactacttgattgcgtgcacttgtattatttaataattttcgtaacaatccccaaagtgaggatctaagtctgcctccttactttgggttggacttcattttcctttggttggctcttggttagagctcttggcaagtgtgttttctttcttcgctttagacaaagccaagttgtagtagtgtcagttagattgttgatctccccttacgcatcccaccccatgtcttgttgaaaacttcaagcataggtgacaaattgatgttactgccttcaggtcgtataaggtcggccgacctatcattgcattgaaggttgatggcacgccgattaccacaaattgagccattagtgttcttcttgtgggactatctccaactggtagaggtagtcaaatgtatcccaagggtgcaaggccttggccaaaaaattcgtacattagttgtgtatagggtgctagatctattaactaaagtataacgtcctaatgctaaggcacgctatagtgctttttcaattacagtgctatcttagctaatccaagatttttttatcaaaaaacatgtcaaattaaaacttttataataaatattaaactttataatttacataataatttacaaacaccgagatcccgttactaaacttttacacaaaatatgcc

SEQ ID NO: 139630 - DNA, 711 bp, Cannabis sativa
cacatcatattaaattaatgacttttttagtaaaaaatattttttttttcaaaaaaaaatcaataaataataataataaaaagaaagaaagaaaatgtcttgtggtcatggtctatattaagcaacactttagataaattcctcttaaaaattgaaccatcaatatatatatataaaggaagattttagggagttgatgtggcatgcctaagattcttataaccttccatacctatttttccttttttctaattttttaataattttgtatttttctatatgtaagccaaaagtcatatatgtatcatatcaatactatatttattgctaataatttttattttcacaacaataacatatcacttcatatatcatttttaaaattatttattatcaatcataatatatagttaagaaaaataaattttttattttttatttcttttttatactaaaaaatcacaaaaattaacctgtgacattctaaaataaaaaaaaaaaaaactatcatttctatcatttatatatattcattaataattaatatcaatatcaatatatatctatatattaatataaaggaatgcacaaaacattctaagtggtatcttatatgaagttttttcctaattctttgttaattctatttttcatatttatttaaattttaaattactttttcattccattacatcataataatctatagtc

SEQ ID NO: 139631 - DNA, 529 bp, Cannabis sativa
attttctctcatcctcataaaattgatcacatttttttttttttttttaaaaaaaaaaaaatactacaatagttgacaacttttaacgttgtccatcatgatcccatatcaaattaaattaataaatttttaagtaaaaaataattttttctaataaaaaaattacaaaaaaaatattatgtggctattgtctatattgaacaacacttcacataaaattaatcttaaaaattaaaccacattatatatgtagaaagtcgatcactctaatagacaattaaaaattctttaatgaggtcaacaaaaataattatctcattaatctcacctgacatacttagctaattataattttattttatttttcttattaaaattacccttaggattccgggtatttattttggaaattatttgggaaatttacatggcattgcatttgcagatttataagttttatattgcagtatactgtgtttattcttttattttttatttgttttagtgttgttttacgattattttttag

SEQ ID NO: 139632 - DNA, 548 bp, Cannabis sativa
  modified_base (45)..(49): a, c, t, g, unknown or other
aattaatataagtcaataccaaaatattgtattgtattaaataannnnnatacaatacaatataatacattactatacagcgtaccaaacgagccccttaagtatgtagcttataggttgctggtgttagtaaaatatgttggatgagattacacacttgtgatcattcttctcttcaattaatttcgaatgaatatctattttagcctaatacattggtatttcttaatttttgtagaggagtagataaaacactgaactagaatgacttaagaacaaattctcaaaagtcataataaactttttaattacctcataatcctagaaaaatatctaactagttactaataaggaaagttcttgacccttttgtcaattaggtgataaaaattttaattgaccaaattatgcaaattattatattattttaagaaattcaaagatgaaaaatgtaactttttgcaaataacttaaagggtaaattgtggcataaatacttaatgtttcatattttatacacttaaatacctaatatttatttttggagg

SEQ ID NO: 139633 - DNA, 1536 bp, Cannabis sativa
  modified_base (1161)..(1167): a, c, t, g, unknown or other
  modified_base (1250)..(1258): a, c, t, g, unknown or other
aaaaaaaaaaaaaaatcacaaacaggtgtctaccactcgtgatttattcaatggttatagtggaaaacttcaggattaagaagaaagagaggatgagccaagtctctcaacgaacttcattcaaatgagagaggatcttcctgagttcatcagaaatatgattgtctccccattttttaacggcgacaagcttaccccgccaactcgaaacatcaccctgaagaagggaaactagagaacataagtattctactgtttctttagatgaggaaagctcctcagttaaccttaagagctcaacacgaagctcctctatacttttcgtgctagtatcatggaaacacgaacgttgctttttggtaggaacatgaatgatagttgtgcccttcaaagtatttttgccaaatgtggaggacgacatatttggaagagaaataagcagacagagtatgataaatgaaccaagcagttagtcttatttatagaaaaaaaaactggaaggtgttaaggagatataaggaaatatgtcaggaattatgataatgatatgtaggctctgaatatagccttatcacgagaagtagcttctttcatctagcctgacataaaagtagtatacctattttagtaaacaagttatattatattatattatgttacattatattatatataactaacatattactaagatagagtaagttcatgacatctctctacagccattacgaatagcaaggtgctaaaaaactatgctgttgagattttacaacctctttctacaagtcgttgcacgatcaacactaccacaaaatcaagctatgaagagaaataaagtggtcacacgtaggcttggtaaatgaaagttgaaaaaaaaaactaaaaagtaaagaaaaaaaaaactttcttttaaatatcatcaagagtgagaggatccagcaccaccaaaaggatctgataaaggaacttcaaatgtgttgctgaaagggataacacgatcattaggactatgaactgtcaatgagacttgatgttttgcatctaagtaatgacgaaaccagacttgaacctaatgttttgggagctctatatgttggaatatattttaccaggatatagatttactaccatgtatattttaacatcctaatatgaatttcnnnnnnnatgtaatttaaacacataaaagttatgagaaaccttagagtgggtgcagtgaaattacatgactccttccgctcagatctctnnnnnnnnnatcctttctatagcagagtatcactaagatctgggcccgaaactccttccttgtgtttggattcttcacagtcttacacactatgattgaggacaaacttgatgtctatgggcacttactcaatcactaatggctgagtaatattttgtgaagaaagatttagtgtttcgaaaattcaggaggaagaagaagaaggaagaggtctcatcagaaagctaggtttttagctttggaggcattagttggatgaaaagtgtaagaccgcttagtttaatttg

SEQ ID NO: 139634 - DNA, 515 bp, Cannabis sativa
tgatgttattgaaataattctataaaataaatttataaagaatgtataccatacagtaacttttatgtataaaattacaaattagttttagtaatatgaaattagttgacatattggattttatttaagttattggttgcttttttttcattaaaaaatataaaaaggactataaggttaattctgaaaattttattcggtgaaaaaatctatggttccacatatcaaaagaattatcttgaaaaaatagatcaaaatggtgtcactcttggagctcaaacaaatagcgggtgtaacttgaattttatttttcttatgttttccttataagttattttaaaaatctaccaaaattgttctataaaaaagagaatacaatttagtaactaaaatgttactaaaaaatattagtcttaaaaaatatatgtttcccacatatcaaaagatgtaactgaaatatattacagaaatcgatcaacattgcattataaagtaaacttatgtagcatacaatt

SEQ ID NO: 139635 - DNA, 609 bp, Cannabis sativa
ccactgggttcaaaaaacccagaaaacctgattttaaggtctaaaaatgctcacttttccatatattcgaaccataatcaaaccatacccaaaattaacatcttatagttaaaaatcatcacagcagagagcaaacaacatcaacaacaactctcaaaattcagattacacaatcaattctaaatcatgcattaaaccaagaaaactgaagctcaagaacttgagctttaactcaacaatccccatattttctagcaacaagaacaacaataaagatgtactttcaacttattaaattccgtgaaaactcagccaagaacacaaccatataatccacaattaaatcaagaaatcacactcaaactaacaaaagaacatcactaccatgcaacctatcatcatctttaacaaactcatgcatttgaacaatatattcagcaaggattacaacactaaatctcaaatatactcagcagtaaattacctcaatcccaagcttaaaattctccctaatcaagctccaaaatcaagtaacaccaagaaattcacaccaataagctagaattttcaagagagggttagggtgagagagagagaggtcgggtgaga

SEQ ID NO: 139636 - DNA, 888 bp, Cannabis sativa
ctggggcattggttaacccaaatgacatcactagaaattcataatgcccataccgtgttcgaaatgtcgtctttgctatatcttcctctcggactttcaatttgtggtacccatatctcaagtcgatctttaagaagacgatcgccccttgtaactgacactactagaaaaataggttttagtgacacgctttgagtgactctaaaactattcagtgacacttcactgcgcgtcactaatgaaggtgactggaaagctagtttttagtgacccttcagcagtgtcactaaactctttcacaatcactcattgcgcgtcattgtaggcatttagagtcaggctttgtcagactaaaaaagtaatagcaactctaaaacaacgtcactatatcttttctttttattttttattattattttgtagatatagtgacacacaaaaagagtgactatattagattttttttttaaaaaaataataatattcaattctttttacttaatattttataaattatttttttttaattaactggtattgtttttatttaaatcaattttaggataaaaaaatagaatggttacattgttaccatatttcctttaaaaaattgtaccagattttttttttttttaaatagaacttaaagaaataaaatactcacaatatttttataccaaatgaacaaacacaagtacaaaatccaaaataaattactgtaaaatatttctaatgtatgttgatttgaagcaaaaagaatatataattggttaaaagaaaataaaacccagaattatgagtaaatttgaataaaaaatccgaaaaaaataacccagccattgggtcaatgatctccagagcacgaagtatgcggtatgaaaaataaaa

SEQ ID NO: 139637 - DNA, 992 bp, Cannabis sativa
  modified_base (944)..(946): a, c, t, g, unknown or other
agagactatttcaggcaagatatttttaagtctagaacaaatcaacttagtagccaccttatatagcacattacaacaagatataggccgaaaatcactcaccctgttcgggcattttattttaggaattaaggtaatgacagttgaattaatttctttaagcaaattacctgacttcaagaaggaggcaatagcttcacaggtttcatctccaactagctcccaattgtcttggaaaaaataacttccataaccatctggccccggactcttcaccctaggaatgctaaacatggcagcttttatttccactttagagaagtctgtcatgaacgcttcagcatgtgtgcttgttatcaaaggcccctcattcattactgaagttttaaccctctgccttcctatcatgcttgtccccaataactccttgtaatagtctaggaatgcctcagtgatcttctcttgatcatcaactctatcaccttgagcattgacaatggaaagaattctatttttccttgttctgtccttgatacttgaatgaaagactgatgtgttggaatccccatttttaatccaattaactttggatttttgttgcagaaaagaaattagtacttcatgcttctcagcatactgctcgcgtacttctttctcttgctgcattagagaaacatttaatggatcctggttcagcctttgttggcactcattcataagctccttcaccctcatttcttctccttggacatcagcaaaaccttgcttgttgattgctgtcaaaaccggtttgagcctcttcagtttggtgactatttgatacattttagttcccacaaccggtaccttccaacttttagcaactttatgttgatgatgaggggaactcgaccacattcgaaaatatttaaacggttttctaccacttggaagtgagggataannngtcaatattacgggggtgtgatcaaagagaccctcctgcaagaaaa

SEQ ID NO: 139638 - DNA, 523 bp, Cannabis sativa
tgactgtcaaaatataccattgcctttccaactagaagcttcaactcctttagaattccttgtagccatattgcttctttgaatgcctctgtggtcaccatgaattatgcctttgtagttgaaagtgctactgcagattggagctatgatttccaacgaatacaatctctattagtttaaaacacataagaggtagtagacctcctagtattcttacttgatgcataatcaacatcaacatatcctttcaatgttactttctctgaaactctcttgtaagttaatccaatattcgatgtcgctctcaaatatctcagcagccatttgagtgccctctaatggtttatcctaggatttaacatgaacctagtcaatatacttaaagcatgagcaatttcaggtcttgtgctaaccatgacatacatgagacacccgaaagtcattgcatatgaaatttcttccatctcttctttctctttcgttgtcatagggctttctgttggaagttattttaccaggaact

SEQ ID NO: 139639 - DNA, 684 bp, Cannabis sativa
gttgtttgaccaaaaaagtacggattggatcggatgaacaaccctagctccaatcttgtttgccaagaaagttgatgaaagtttgcaactttgtgtcgactgtagaaatttgaatcagatgataattaaaaacaaaaatcctctaccaaggattgatgatatagttgattaacttggtggttcaaagttcttttcaaagattgacttgaggtcaggctaccatcaattgaggattagggaagaagatatccctaagactgctttcagacacgttatggacactttgagtttttggtgatgtcatttggattaacaaatacactttaagtttgtgatggtattcattgatgatatcttggtgtattctaagacacgtgaggatcatgttgaacacttaacaatagtattacagacgttgagagatcatcaattatatgctaagaaagagaagtgtgacttctaaatgactgaagtcaaattcttaggccatgtaatttcttaagatggtatcattgttgatcctgcgaagatagactctattatatagtgggaaagaccaaagaatgtcactgaatttcgaagttttcttggcttagcaggctactattgttactttgtcaaaaatttctctcggattgctatgcctttgaaaaagttaacaagaaaggaagtaaagtttgtgtg

SEQ ID NO: 139640 - DNA, 681 bp, Cannabis sativa
gtagataattcccaactatcctcaacaactttaaaacacattggctcctttaaccaagagttttcaaatctaaaaactcttgtattcacttgaatgttctcggcaacagggactagatgcaaggggcagtggtccgaagtggacacttccatgttatagagtttagccaaaggaaacttagcaagccaactttgtgtaactaaagctctatcaagcctagcctctacccatgaatccgttcctcggcccctttcccatgtgtaaggataaccactcaactccaaatcataaagcccacactcatccaaagtatcacaaaacccatttatcaaccaactaggataaagattacctccacttttatcttgttgagaggtaacattattaatgtctcctacaatacaccaaggcaagtcactctccattttcaacgagcgaagaagatcccaagtacgcttccgcaaactacgattaggctcgccgtataaccccgttaatctccactctccatgatcacggctgtgaacaacaccatctatatattaggaccgaacctagctaattgaaactcctccgcttctcgccaaagtaaagctaccccaccactcttcccttgagcgtcaacactaaacgcaccttcgaagccaatacaaacccgaagcttctcaaccatttccttct

SEQ ID NO: 139641 - DNA, 720 bp, Cannabis sativa
acataaacttcctcactcaaaatgccattcaaaaaggccaacttcacatccatttggtacaatttgataacaagaatacaagcaatgcacaagagtaaaaaagtagattctaatccttctacaagagcaaaagtttcatcaaaatcaataccttctacctgtgtatacccttgtgccaccaacagagccttgttcctcacaattgtatcgaattcatcacttttatttttaaaaatccactttgtaccaatcacattgatgccttttggtctttgaaccaaaatccaaaccttgttgtggacaaactgattaagttcttcttgcattgcattgagcctttcttcaaaagtcatggcttccttcacatttttcagttcaatttgtgagacaaaacaaaggaaactaatcaaattaacataccttcttcttgttaccatgctttctttaagatttctaagaatgagatctttaggatgattcatttttactctggtgcttggttccttctggatagaatcagtaatgatgtttggatgagtcgagataggctgctctggttctcctgtatcagttgcagtggcagattcatcatttgcgatgtcagaattcaattttgctgcattagaaactacatttgctgcttctggtggagtatctagaaaactatctatctaggcttctgtggaaaattctaaaaaatctttaaaatcatcaacaacc

SEQ ID NO: 139642 - DNA, 548 bp, Cannabis sativa
tcgggcttgagcggggttatggaatttgactattttacccctagtcttggaaaatacctaagtttgatttaaagggcattttagtctttttaaaggggagagtaggtggctgattttaaggatgacacctagccattatttgggcaccaaaggattaattaaaatcctttttccatttgaagaaaaatcaagaaaataaggaaattaagacatatctcttaaactctctctctctctctctctttctttcggctgggacaaagcaagggcaaggaccagtttttctcttccatttctctaggatttatcaagaattcaaggaggaattaatcaaggtaaccttagttgctctctagttatgtttttttcttaagttttgcttggtttcaagaagtgattttgagttttaggagctgttagggttagggttgtttggagttcgaattttatgtttaatttgggttattttaggatcctagcagctgatattgttgattggtttaagttttatacaactttgagctttaagttcaaagctttgagcttta

SEQ ID NO: 139643 - DNA, 774 bp, Cannabis sativa
aaataaaaatagtagcttattatattatatgacaactcattagttttgaaaataaactttaaggttacccaaatatattttgaataataaaatagtacaatataacttaaaaatagctaattgattattaagatgtttacaaataaggttatagaggtaatcaaattatatctcaaattatataatttaaaaataatttattttacgtaaaatcaactaattagttttttatcagcatcataagtaaccaaaaggttacttttgaaaactcgagaaaataataaaaaacggaatttgggattaatttaatttcaggcatattattttagaattaaggtattttttaatgacgtggcaaggtattattgtaattgaaatttattaaggtatttttgtaaataatttatattttaagtatattattgaaaaaatcccaaaagaaaatgaaggaaaacaaaaaaaagagcccaaaaatatgctcaaaggcccagcccaaggtctactcctccaacccagaccgtgggccccttttcatctagtcagcgcccatgtggtgcttgtttcttccccagtcgtgcgccacatggtgccataggattggttccaccattctctccttctcttctgcccatgtgggcctaccatgcagttgctcctctatgccttccacgctaaagcccatactccacctgtattgaaacatcaatcacaaaatttaatctttcaaagatttatcaatcaacaacaaagacaagggaaatttgaatttccatg

SEQ ID NO: 139644 - DNA, 568 bp, Cannabis sativa
gaagcgaagataacatccgtcgaatagcattgatgatggttccatagcttgaaagattttcattggttgattgtagatccgtgaggaggtttttacagtccacttcgatatgttgaatgttaagtccattgtcacgacaccatttaagaccttccaacaaaacccagccttctgctacttgaggttgcatctgtcccattcgattgaaggtgttgctgcaagtacttttccagagtgatcacgaactagagccccacctcctgttctgttctggtgagtagatacggcagcatccgtattgagtttgagggttcccactggtagtggttcccaagccaaaaggttaaggtctgtggtagattgggtctgtgccctccgcttatcctgagctgcttgataaaagtccaaatagtcttgagcttcttgttcaatgtgcattggcttcgattcttggttcttgaaaacagctgcatttcttgcattccaacacttccataacatacaaagaaaaaggttaaaggcatctttggaaaaattaagctgtatgtataaaatgatatctaacatg

SEQ ID NO: 139645 - DNA, 593 bp, Cannabis sativa
tattaaatttatttattatttcttcccattatttaaactttaattatttcttaatcctatatatatatatgttttttttgcattatttatttatgccatataaaagtaaactctaccccattttcttatatttatttatataatatatttttttattttcgtattgtttttacgttaaatgcaaaaaaatatttatatatttgaacgtaaaagtataaattttttactaaatataatactttgtaaattttcaaaattttatcgattaaatttgagtttaagttaagataataaatatatataatttcaaactataaaatatcaaataaatattattgaaagtacgggatactgtatttaaatgaaacataaattatggtagacactctacaaaaaaataatatattaaaaagtaaggatcatatttttattattattattttttattttgtctcacattttacattacactataaatcaaatttttaacattttttttattctacatcatttaactattatatatgtttttaatataatttttttttttattttaaaatataggctaattagtaatttttccccttgaactt

SEQ ID NO: 139646 - DNA, 595 bp, Cannabis sativa
cacattgagaggaagtaccatataataaggagtatagtagagagaggtgatgtgacggtcttaagatcgcttcagaacataacctcgtagatctattcacaaaggcgctactaggaaaatcttttatgggttatattgctaacacgagattaagggagatgtcccatttacttttagggcaagtgggagattatcagggtttatgccctaaaaaatttgtaaagacacttttgattattaaataaagaattaaatatttaatatacgtgtgaatgttaaattgttaatatttattattgaataatttatatcaaatattaaaaaattccgtattcatatatgaggctgcgacttgtagctgtacagagaactaagggccagtttggcacagctttttaaaaagctaaaaaatgcttttaaagaaaactgtgataaaaagatggttggtaagcagttaaaaaaagcttattgaagaatttattatgaagaaactatagctggtacaacctaacttttagaaaaaactgttttgattaaaagactctataataaattatttttttactaaaaacatatttaattatttattatatat

SEQ ID NO: 139647 - DNA, 916 bp, Cannabis sativa
  modified_base (455)..(465): a, c, t, g, unknown or other
  modified_base (570)..(580): a, c, t, g, unknown or other
ttaattgtagttataaattttgagtcttcattgttggtctaacttaacttgttgtttttaatgggacaaatcccaaaggattgtcatccattagacaaacataatagtgttagatctcgaccgataaatatttgtaaatgcggcatctagttgtacatctaaagatgacaacttagactagtgtttacgatatgaaataataaagagatcataaaataagaatgactttgactctcgcctaccgggacatcgttggattcttatttttaattgaaatatcctttatttttcctcttagctttttcatttagaatttacttaaatagtatatcattagatagatggtctataaatcatctgcttatgatgtcattctaatttctcttataaaattgaaaggcgcagatgactatattcctgacattctatttagaaatgatataaatcctcgatcnnnnnnnnnnnctacttgtatatgcttactataggcaacccaaacttagagttagattagtagtagtggtccaagaaagaataattactcgtgaatatttggtataaatttaagtnnnnnnnnnnnaattttagattccaaatagaaactttaaatttcagtttcttagaatacattggacaatacagtatggctttcacaagttattaatatccattttctgtcaatggatccaaactgtatgttaatgtatggaatatgagttttgtattttgtgaccaagttccacttggactattctaagaactctttatagtaactagacctaagttcatcaaagcaccacatatatctatggcatttgcatcttgttcatagtggcttgacaagatcattctctgtaaagagtcaatatgcctatatccacttaaaagtaggatcatctgtatttgacatatggat

SEQ ID NO: 139648 - DNA, 705 bp, Cannabis sativa
aaatagaggtggccgtcaaggccgtgagtcttcattcctatcatacccatagagtcctaaatgcaagaaacaccatctgcgtgagtgccagtccaaggcatgtttccagtgtgtcatggtgggccactttatcagagattgtcctcaggctaagaaagaggagcctaagaagaatactacacagaacccagggtgactttttaccatgactcttgctgacgctgatgctagtccgtcagttgtgacaagttagttgtctattaatggatgttcatatactgtgttgtttgatgcgagacctactcactcttatgtgtcgagtagagtatttaaaagtttccataagccatgtgatatctatgctttggggtttggaaccctgttaccttcaagagaccttattatatccactaggttgattcggtctttgtccttctggattgacggttgtgaattgaccgctaatctaattgaattgcaactgtctgattttgacataatattgggaatggattttctatataagtaaggggcaatcattgactgtaaacggaagatgctattgttttagtccgataatgctaacccagcggcattcgtgggtaaggttctgggggaacgcataccaagaataacattgttgaaagctaaggacctgatgagcagaggttgtctgggattcatatgttgggttttgtgtcctaa

SEQ ID NO: 139649 - DNA, 1398 bp, Cannabis sativa
  modified_base (608)..(611): a, c, t, g, unknown or other
tctaaagatcaataggactttatatgtttataatgtaaggctagggtgaaaggtagatagagaaggttaatttacgctcaaatcacatcatagcatacatgtaaaacattctctcaaataattcctatttgtactccccaatcacttcccccaataattcaatcttatatctttttttttttcataatacttattattcccccacacttaaattgctgcaagtattcactttttttattatttttcattgatttttttttgatgaaatacttacaacttacaaatattcattctaagggaataataattattttttttcctcatcatcacatatacataaccatgaatattttctcatgaacaaaactctcacacctttacaaatacatatagcatcaatatactatggtgtgaaaaaggatgaataaagatcttttttaggctcaaaagattattgtatagggttaaaagaaaaataagatgtcaacatttaggctcaaattaggtaaaactagggaactaacaaatagggtaggcttgaaaagctcaatcgatccaaaaaaatttcctatatcatatctcaaaatcatgtgtaatttatcaatttnnnngcaaatgattatcaaacaagttctgtagtggttgagattttaaattaaaagtcaaacatgcattcatctttccaaacattagcaaatatgataattcaattgatatgcaaaagtttttagtttttttttaaaaaaaatcaagtttgagcagtaattaatgtgtttcaccatcaaatttcattccaagtatccatgcttttgtattcaacttcttactcgcagtgagtaagaaggttctcccaaataaagttgatgtaagattgggatcaccctcattttccatctcaattatgtatgaatctcctggaatgacaagtccataagcctgcacaaatacatctttaattatccttagaggataagcattagtttgatcagtcaattgaataaaaacttgagtttttcttgatggaccaagatttacaaaattagaataagacatattattaataattgctcctaaatctatcatacaatgatcaaacctagttttaccaattgtgcatggaattgtacttgtttcaggcaacaactttcttcggagaactacattagccttctcccccacacttactttcgcaccaccattcaactttaactcatttggacacaactcctcaagagtgttagcacaatgaggctcttctttgatttcctcaacacatggtatttctacctcaacttacggaagactttcaggaatctccttgatgggcacttttttctttgattttttcaatctacttggaaaagatggaggagggacataagttggtacaattggttt

SEQ ID NO: 139650 - DNA, 659 bp, Cannabis sativa
gcataaaccctaacagttgcatcccacagagattttctaattaattgaagaaaaccttcttggagtggaacgctacccaagttgtggcattctctcagtggctaaagtcctccaaagtatgggacactatacttagcagggatttagtccaatttgtattttttcttttttctcccttggagttttttttaaacctctaacaagatgaataagggattttaaatcttagatgaaaatctatataagcggggtgaagtcacttgtaaaggaaccctgaaattgatactcacgagatcatactcttgagctcccactctcaaattctaaaaactcacttgaggagtgaactcttggagaactctcctcaagcattgagattaataacactccaagtggactagcctattactgctgaaagggggtaaacaactacaaaattcttgtgttcgtctttggtgaatttactttcgcaaataggtttactttgattaactattgcttgtgtttatcttgctcgttttacgattttcttagatctgttaacgaaaaactgcgtcaacagtatgtattatatatatgtatatgtatatgtatatatattatgtgtatatgtatatattatatatgtatataatatatatgtatgggggctattacag

SEQ ID NO: 139651 - DNA, 1707 bp, Cannabis sativa
ctcgttgatcctgaaatcgagaagacttgtaggagaaacagtaggaacaagaggcaagaaagagtttcagcaacagctaaaacaccagaaatcatggcagataatgctaatgttgctaataatggaggcaacaacggtaataatggaggtgccgttgaagatcaagcaaatggccatagcttgagagattacattcttccaactcttacgagggttcagtcttgcatcatgccgcccgccgtagatgctaataactttgaaattaagcctgcaatactccaaattgtgcagtcttcagtcaaatttggtggactccattctgaagatcccaatctgcacttgtcaaacttcacggagttatgtcagactgtcaacgtcaatggggttagtgattatgccatccgtttgagactttttccattctcgctgggagactgagccaagagttggttgatttccttgccctcaaattctatagcatcatggacaaacttagcaacaaaatttctgtctaaattcttcctgccagcaaagtttgctcagctgtgaggagaaatcaacaacttttgtcagttagataatgaatctctccatgagtcttgggagaggttcaaggacctcatcagaaaatgtcctcatcacggcattgagaagtggatgatggctcacaatttttattatgggttggttggtaataccagaacactcatagatgttgcagctggtggagcattcatgaggaagattgcaaatgaagcctatgatttgttagaggaaatggccctgaataatcaatattggcaaactgaaagaagccaaacaaagaaggtggctggtatgcatgaggtagatgccattactaagttgacatctcaggtagatgccttaactaaactgatggctgtgcaagcaaaacaagcttaggtggtttgtgagctatgtggaggtcctcatccctatgcgtaatgctcagtagatgtgaatagtttgccaatggatgaagctaaagccattgggaattactctcagaacaacaactatgggttcaatcaagggggaatcgaaggaattctgggttctatcagcagaggaatcaaaattagacgcagaaccaacagctaccatagtagcaaggttttagtcggagttctggtcttcagacagactaattgctacaatttatgactgagacaagatcatccattaaggaaattggaaactcagataacaacccgtcctcagggaaattttccttgtacaaccgacgttagtcctaaagaaaattgcaaggaaattaccctgagaagtgggaagaagtatgaagggcctgatgggggacaaccagtggaagaagagattaaggatcaaccgtcactaacattaacagaaaaggagactactgagtgtcctgcaccaaaccaagagtctccaccaatcagtatagatcatcatgtgaaaatactgtacccacagagactctgaaagaccaatctagacaagcagttttcaaaatttctagaggtctttaaaaggttgcacatcaacattccttttgctgaagccttggaacaaatgcccagttatgtgaagttcatgaaggagatcttgtcgaagaagaggaaaatggaagactatggaacaatggcattgaccgagggctgtagcgccatactgcagaagaaacttctgttggattttgtgccctaa

SEQ ID NO: 139652 - DNA, 632 bp, Cannabis sativa
tacaaaatatttcttctagtagacccaacccgcgtggtttagtctggcctaaacatgtacaatacaccgccaagccctcaaacccatggcagatttactttttcctgcatagtagagcacccgtgagccaagcccagcaagacagtttaaacaacataatgcaatatattcttaatttaaataaatactaatgccactgtatctattatcatatgacatagacctacgtattgcgctcacacgtctatttacaataaggccttagattggtttatctcggttctaattaccgagtctaacctaattatgccttacctgcataattctttaaccctagatcatataaccgctcactttagggtaataaccctaataccagtttctcacttaatcacaagcataatatcaaacatgagcgccacacgcttaagtctacgtgctaactactgtcttacctggtatcccaagtatgtggagattccgaacccccaggtcttcttgagcaagcgctggtagtcctagtcatacatacccgagatttcacaaatagggttaatcccaaaatcactttcacataatcacataatttgcattccaattacaaattcgcatatagagctcgaaatgagctt

SEQ ID NO: 139653 - DNA, 680 bp, Cannabis sativa
  modified_base (167)..(168): a, c, t, g, unknown or other
  modified_base (263)..(263): a, c, t, g, unknown or other
aaaaattttatggttagaaaccctgaaatccaaacaaactaaccaattttttaaatttcatgttatttttgccaaaattaattttaattagaaaaacatctaataagataaaatgttaaaactaacatctatcaaatattatagttttaattaataaaatatatttnnaaaataacaaatttgaaaaaatatgatgtggttagcaaattttgaaatttaaacaagattattatttaaaaaatattttaatatcaaaataagancattcaaatttaataaaaaaaaatgtaatatctgatcttataattaaaatagataatctaaaatttcaaaattaactataaggctattttgtgaaaaaacaaattttcaaaattcaaagcctactaacatctaaaactaattttaattaattaaaaattagtgaaaattaaatttattctgataattagatttttaattgaaaatttagattctacataaaattctaccaaaatttgaatttttcttcaatgaaaaatgatttttgaatcaaaaaatatgaagaaaacaaatttggtgcacaggggtatgcaatgcatacccctgcgcgcgcggatgggagtgtttggctgagggacgagactgcattgcagcctacttggccgagggagctcggcgtgacatggcttcagacagcc

SEQ ID NO: 139654 - DNA, 583 bp, Cannabis sativa
ccacaaagagaaaaactaaaaactgaaaataaaaacatatatattataaaaaacagattcaaataaaactgtaaatagaaaacctgaaacatgcaaaaatataaattgaaaaaccagtttcttaaaaaaataaaaattaccaaaggaccatcaacagaaggagcctcgctcttcttcttgccatgcgatttggaaaccggtttcttcttgactttcttagcaacattaacaagcttctgatcaccagtaacattaggttcacaaactttatcctaaaaaacataaaacacaatacagttaaatgaaaatgaaaaaaaaaactattaaattaaacaaaacaaccaaaaaaatataagaaaaaaagaagacataccaaattagaatggtccaccacatccttagattttcttttctttgacgcactaacgtcgtcactaacagcttttctttttttgcttgaaacaagttttggcacaactttctcagtttgaaaatcatcatcactcgctgctggaaggacattagtatccttcttactaacttttttagaacggtgtttctgagaaacatgatcagcaacatc

SEQ ID NO: 139655 - DNA, 646 bp, Cannabis sativa
cctggtaaaacatatttcaacaaccccatctcttctaaacataaccctatgtgaatacctatgtaaagaaagagaagagaattgaaaaaggctaatgtcacttcttcctcttctcttgatttttgaattcaccatgaaatttctctctcaaatttgttccaaaggtaatttgagtattagcccacactattcaaggtgatactcaggcctttgtggaagactgtaatgaacacaatcaaaggaggagaaaatccaagtttagatcttgatattattctattacagacaggaatcaacggctagagatctgaatagaaggagttatattattctactaccatcaatgtaaggatttatttatctcttatgtgtttatttatcatttttagaaatttcatatttaagatgttggattatggaattatagtcaacatacatgttagtaaatctagatcctggtaaaataagtttccaacagcaggttcgagtaatttcagctactagggattggattaggttgctccatattttcgtggtacaaaatactaaaagattgtgagttggattcaagttattgaagtccaaacttccatcccagagcttttgaagtcaagggctaggatcctctgtaatatccactttatat

SEQ ID NO: 139656 - DNA, 805 bp, Cannabis sativa
cagtctgtttaatataaaagtttaaattctgcgctattttaattagtaacttaaatcgcaaccaaaatctgtataccagcccacctagaaattactggagaaaccactttacaaactcaaactgtaaattaataaaaaaaaaaagttataaaaaaaaatagtatatagggttgttaacgcaaattttcgttaaccaaaaattgagcctaatagtgataatctcacatagaaaaataaaaacagtaaatgaaaaggtatgaacacaaatgattttttacgtggttttgcagttaaaattttgcataatccacaagtcaatcttattagatttctgatagcttctcaggaccttttttgtatgatatttttttcgtcccttttttgatcttacttgcctctatttataatcacatagtaggccgttaattacatagttagctgtaatctttacaatgtttatcctctgaaattgtggagtttgattacatatcacgtagtatacatgcggttattatttgaatatcacacatctgtgatttatccgcttttactgagtcaaaatgatcgtgtgtttaaacacttcttaaatcatagcgttatgggatgtctcgacaggaactcaattctaatgaccttgatagcgagctggagctttttcccctatatttctgaggttaacaatgtatgcctcgttgcttcttacacttcattttgacaatcgcagttcttatttacaaagagtacttcgacagtcatttaaatgtcagcttctaactcgctaagactataagtcttactgaaagat

SEQ ID NO: 139657 - DNA, 842 bp, Cannabis sativa
  modified_base (89)..(93): a, c, t, g, unknown or other
  modified_base (789)..(796): a, c, t, g, unknown or other
aattatactattttaattattattaaaataaaaaactaaaatattaaataaaactaacactacgtggcttggcacgtaacaatcacctnnnnnatatatatatatatatactaatgggtcaaatctttatattgaattatctcaaaaattatataatatattatatatatttaaaaaaaaaacaattgtaaaaattattaattttataatatatggtacggtacggttttaactgcaactatttaactcaaaatcgttaattgcattgcattacgtggtttgtcaaacatggaaactacaattaaaccgaaaaagatttcaaattacattttttttgtactgtgtggacaatttgatgaacattacacctatatcctacccataatattttttaaaatagaaaaaacttagtttaaagtaggagagagtcacatttattttaatagaagtaggagaggagagagacacattataaaggcctcttggggttgctcatagaattgtttttgctagatatacaatgtggttatcattttttaatgtaattttattaatactattgtctatatttagcaatacacatgtgacattataataactttatcgttttcctttttcaaaaaaaataaaaaaatcactatggtactattttatagtatttaataaaatttaatcatttaaataatggcatatgagattatggtagataatttttagagttgtctattgttaaaagtaatttttttatgaaaagttatcatatcttatagggtaaatactattttggannnnnnnntttgcaaaagttacagattggactctgtgttttgttaaatgacaaa

SEQ ID NO: 139658 - DNA, 566 bp, Cannabis sativa
cccaattaatgtaaccattagagatggtcttagtgttttagttaattatgttaaaattgttaaaaatttcaaggttaatcctctataagcacatttaatattaaaataaataaaaaattgaaaagtggaggttggaaattaacctctttacctcctacttaaaaatgacactatactactatgtttaaacattgttttgtcatatttttttttattatttaacattttatccatatataaataattattttcttttcgaaatttagaaccctttgggagctaaatgcgcacaccttgctcaccacttaggccaatcgtcagggccggtcctgaaacaaagtgggccagaaggaatttttttttggggcctttatgttaaaaaaaatgtagtattttttaaaatcagtaaaaaagaatgtataattttaaatgaagaaaataaattttggacccctggctcgctggcccctaggcacaggcctagcccgcctatgcgagggccgggcctgccaatcgtgaatgtatttaagcacttttacttgaatcaaatattagacaatacaact

SEQ ID NO: 139659 - DNA, 804 bp, Cannabis sativa
  modified_base (471)..(474): a, c, t, g, unknown or other
ttcttcgtggtactgtgattgtagtttttatttttctcaaactgtgagatatggtgcgatatgtggtttagaattaaagaattaataaatgttcaaaaagcaccgcacacacttttaagaaaatacaaaaattcaaatgtaattttctataattatttcaatctatagatattaatatcatatatatattagaaaaaagttatatgcaaggcacgcatgcttagttttaattatattaggtgctatataatttaattatatataatataataaataattatatataatttaatttattaatatggtctaattaaatttttttaatataaaatgattaagacaataaaaagtaatataattattttgtgaaattatttttatgtatattcaatacatgtaaataattaattcttagatgaagaatattctatcattctttataaaaatgtatcttctaatgcatataatatnnnntttgccaagtaataaaatgtttactttagtgtagtaatgtcttaaatgttctgtctaaaaagaaacacacagtatttcttaatttgtgcatatacatatacatatataaatatatatttctatcaaaaagaaatatatatacttttaatgaaacgtattctaaaagatgcttacattgatgttacgtgtaatacacgtataattaattttttttaattaggttcaattaggtgatgttacgtacaatacatatatgtttaatttttttaattaggtaatgtatttttttaaggctaattaacaatttttcttcccgaactttgacatata

SEQ ID NO: 139660 - DNA, 585 bp, Cannabis sativa
tgaactgacaaatcatgggaattgaacttttgaatatataatcatgattatattccactatactgacgacactataatcatgaacaaatatatacatatttgttatacttgaaatttggctgccatcttagtagaagacacatgtcaagataaaagggatatgaatcgatgtaattgctttttatggaataactcattaattacataagcatcagagtatatttaaaacctgctgactttaaggtcttaggcgaggaatcaatatacaaactggcacttattatattagtgagaaaccatatatcgctgaaagcaaatagtgaggcatcaaggacaatacacataggaagacgaaagcgacatatattgattgtaaaagcccttactttacaaactaagggtaacagtcaattagctcgagaccaaataatcgaggtgcccgtctcgcaatgggaagacttcctataacttcatcctgtcaacgccagtgagcctcacaaccttggcaagtcaagaagctaacattcaaatgagcttcaaagaactctttgtaaataagaaccgcgatcgacacaagacatgcat

SEQ ID NO: 139661 - DNA, 516 bp, Cannabis sativa
tgctctaattttcattaatgtatgtattaactttatattatttatgtgtagtgctcttgagaggtactaccttgagaaaagaaaccgacagtcagtagcaataagcttcattgagtacacatgtctagagcaaccagatggcatctagtgtgggttttatagcatgagatttattaaatcattcatgactgaaaataatcctacacgaaaattggaaacagaggtagaaacactaattattttcacaaatattaaagtttttaagtacttttattatgacctattaaattaatgatttgtctcgtttgttgcagtttaaaaggaacatatcatcctcttacaccaacaaagaaattaataaaatacgtgacgaatggacaaagtatgtcatgtaaatgataacagcaggtaaatgactaataacatagagtatgatgaccaatgatcgctcatggacgatccccatgtgatctaagaaaatgattgataggtttgacatcgatcttagttactatt

SEQ ID NO: 139662 - DNA, 532 bp, Cannabis sativa
ttttattaattactatgaccataatttatagtgctctttaaatgtccttgcgattaaataagattataggtagtccttattttttggttttcgagtttggatttcgtttagcaattttaatgattaaatgtatataagcaatatatatagaacatgattttgtcatgtcattgtactttcacggaatgtattgatgtacggcagccgttagatgagagagttatttgatctgagggctgaaattgatctagggataattagagttaaaaaaatagtaacgtacccacacacttatttaacgtaccatgagaccaatctaatgtaccacgaaatacattctgtggaagggacaaaatcgtgtcccaatatatatatatgagtattgctattaggcactagtattactattaaattatatgagatctgatacttagttggactaataacgatattgacacatatgaggtaactagacaccactggtgccctttagcatttctctatatatatatatactagataaatgttacgt

SEQ ID NO: 139663 - DNA, 915 bp, Cannabis sativa
  modified_base (359)..(359): a, c, t, g, unknown or other
aacacagggtccaattggtaactttcgtaaaacagagagtccaaaatgatatttaccctttaaagtttgtattttttagtgtttaatttgaaatttagaatttatagttgataattttgattgtatttgaatattgaaattgaaatttaaaatttacatatgagtatgatttttttattctattttttgaaaaatattatttaatatttttatgtttattcaatttatatttattttttaacattagtttttttttttttgaaattaaattcttcattcattgaaacatttttttaacattagtttaaactataactattttaatcttaaaagacatatactatacatttattttttcnaatcaattatttgaacaccaaaaactaacaacaatgaaaaaaaaaaaaaaataaagatcggtttaaacgggttaacccgatcaaaccgacgaaaatcattggacgggttacacttttttttatgttttcattggacgggttacaattagatatttgcaacccgacatttatattgggttggtaaaaatactttataacccgaccaaatcgaccgatgtacacccgtactggactgtagcgtccccgctttaagccttcattgagtccttacacccacaaaatgatatctcttatacatgagtacgtctcactctggcttcttcctggaataacgtctgatcctacaaaccaacacgagtgattctagtgtggtttttccttacgctggcttcttaggaattttttttaggaagtcacccaatttgaaattatcctagatcaaggacacttaactatggatttcttttatgatgggctacaaaaaaaaaatgcatcttgttgatataggtggtactaattaatttatttaagccctcttcaactgtgtagtcccata

SEQ ID NO: 139664 - DNA, 1243 bp, Cannabis sativa
  modified_base (246)..(254): a, c, t, g, unknown or other
aaagaaatccctataacttggggatcagattgcagagatatggcaagctatccaaatcccacgatcagtgtattctgtatttatcatgcaatctgtttgcttatatccactgtcatgagaagggaaatacttcctctttacgtttatagccctataaatagtgatgcatgctcactgggcaaaagttcgagagattttacttaagagatattatccaagaattcatattcagagatactgttgtannnnnnnnnagaaaaggaatctttctccttgttcttgagttaatacaaataaccagaattaggctactaccgactgctcgggactgaacctctataaaattcctctgtctttatattgctttactatatatcaatcgttataaaatattgtcgcttactaaataagactcactgtcattggctaaaagcgaggtcaacattttggtgctttcattttggtgattgataacggagcccaatgtctcctacatgtctatggtttctctggcaaaggagtggcacctctaggacaaatttgtctacccctcactattggacaagctccgatgagcatgactatcatggcacaattcttggtattagatgttccttcagctttaaacgtaatgctaggccgaccagccttgtatgacttaaaggctgtcacattgattttccattcgtgcctgaagtttccgacaaagaatggggtaggatgtctgagaggaaaccaacagactgctcgggaatgttataaccttgcagtagccaaggctaagaaggaagtatcctctagcagagcacagacaagggaaaaaacatttccaagtagggaacttcccaaggcagggatgaagatgtggatcctcgacttggggacccaaacagcaatgttagacctgtggaggagttagaagagattgagatcaatcttagatatccccgccagaaagctaaagatcggaaagggtttgttgctcgaagtaaaatcagaattgataaaatttctgagagcaaacatagacatttttgcctggtcacatgctgatatggtcggaattgatctttctattattttgcacgttctgaatattgatcccaatttcgggccagttcaacaaaagcgaagcctattggacaaagagcaagcactcgccctaaaggaagaagtagaaaagctacgcaacaaaaatttcataattgaagctttctacccagcttgggtcacaaatcccgta

SEQ ID NO: 139665 - DNA, 582 bp, Cannabis sativa
aaatatagtaggatgatagtaggatgtcacctcattttcattagtgtttttttagtgtttttttttatatatatatatttatgtatagatatagatgatttctttattaaaaattgattttttttttatttaaaatattttacaaagattaaaaaatgtaaaaatatgtgtaaataaataatatatatcattcacatatttgatgaaatatatataacttaaaagttttaatattcacaataaggggaccgacagtggcaaccctgatcacaaatggaaggctgaggcttccggagcatcaaggagtattagaaaacgaaaatgtatcaagacctaaaggccatgttctggtggccaggcatgaagaatgacattgttgagtatgttgcaagatgtcttacctgtcaacaagttaaggctgagcatcagaaacctgcagggttactgcagccactgaacataccatagtggaattgggaagattttctatagacttcgtggtaggtttgcctagaaccacgggacaattttactctgtgtgggtcatagtggatacgtttacaaagtcagcccacttcttac

SEQ ID NO: 139666 - DNA, 701 bp, Cannabis sativa
aaaagaatttattgttattagcgggtccgccgctaataccccgccgctaatagcactatataaactccatcagacccctcttccccacttttcccttcttcacttaattcaaatccttaaccctaacccaaccgcctctcccctctcttcttcactttccccacttggctgcccaccaccactccgtcgcaccaccacaccgacgcaccaccaccacactccgacggtctaccaccgaacatacagcggctatttttggtaagtattgttttttttattttagatttggtattatatagttttaggttttaaattggtatatataatgtgtatttaaatttcgaatgttatatattttaggttttaaataatttttgagtttataaatgtaggtttttatatataaaagtctgtgtatatatatttttgtatataaaatcgggtatacttatatatatttgtgtatatacaattgggtatatatataagttttgatttttttttatgtatatatatatatcatataaaaactgtatattatatatatatatattgtatataagagtgttgtatatatattgtattgtattgttatataaaatataaaaactatatattatatatctatatatattatatataacagtgtagtatatatattgtatatattaatctgtatatatatacattatatttatata

SEQ ID NO: 139667 - DNA, 505 bp, Cannabis sativa
ttacatatttattttttaaaaaataaattaaatattatttaaattaattttaaaattggctaaaatacataattttatttcataaaagtaattaaatagtacacaaatatacattaatgtaaaattagtcgaaaatattaataagttaataaatctaactacaagttaatctaaaaaaaattacatgagaagaaaaattcttgggcctttccacctcaatcatcatcgtgaatcagcgccatcaatcgttctatccactttggctgtaatggtaacaattttaagtttttggatcgtattgccccttacccccaaactgttaaaaaaattaaaaatttatattagttgatatatatgtatattatatatttgttattataataaacactaaaatcaataattaaaacttacagctttttgatcttgtatgtaacggttggggtttgcacgtgcgacgatgtcagtcatgtatttcaaaacttaaaaaccacattcttggctttta

SEQ ID NO: 139668 - DNA, 682 bp, Cannabis sativa
ataccttaagtatttttcttaacaaatataagaaataatttgcatgagtgaggatactccttctttaaattgcatacacaacatactaaaaagatcttttatttttaagatgagtgatcccttggacaacccagagtactagtctcaagggagagcattcgtggatgaaccctaaaaaagggaaagcttcatacttgcatcaatttcagacaacacgtctctgttggaagttattttaccaggatttagatttactaacatgtatgttgattataatctataatctaacaccctaaatatgaatttcttaatacgatgaaataaaaacataagagattaagaaagtcttacattgatggcagcggaataatataactccttccatttaaatctctaattcttgattcttttttgtagcagagcattatcaagatttgaacccggatcttctcactttcagtttggttaaccacagtcttttacactatgattgagtacttgacttgatatgagtgagcatggtactctatcactaaaggcttagaaattgatgaagaacaaggagaggaattcgaaatacttaggaaggaggttctcttttactagttgtctgacaaagaatgaaaactagcttatgtgagatggatgaaaatgagagcatcttattccttttatagtattt

SEQ ID NO: 139669 - DNA, 675 bp, Cannabis sativa
gaagtatctttttggatggcactgggctcacaacgaatcacaagtggctctgataccatgttagaatttgggataagatgaatgaggttccatctcaaaatcaatcggcaatggaaggagtagcccattgatcttatatatgacaatttatttccacatattagcaatgtgagaccaactctaatagtatttgttgttattgttattaccacaattgaatttgagtttatatgtattttatagagaggaaatatttagtagatcatcatatatttttaaagcatttggatatgtggttcccagctctgagaataaagcttgaaactagaattttagaaactgtttccagtatatagatcaaatggtcgtttaaaataatgaatacaaaataaagattatatagattaaatgtgtccactatagtaatattttaatggggtttgccacaagaaatttataattttttttaataatcaatatagaaaatatagaaattatagatgagtttatgtgagtaaatggattaaaaaaaatttaacatgtggaataacacatcataggatattgtagtatctattagtaatattttacaaaattttaatcaaaaatttaaacaattattttaataaattaattttaattctttttttttttgaataaaaatcataagattta

SEQ ID NO: 139670 - DNA, 616 bp, Cannabis sativa
ctcttttaatatatgtaggattttcttcatattaaatatgtcttaagaagtaattgtgtataaattactaaggttgtaaataattacattatattttaaaataaatataaagtatgtttaaataatatgaggtgataattacatataaattcttaatattttatttgctaaaataattaataattacacaaaaaaaaatatttcttaatagttaatatttaaaatatattttttttaataattatacagtgtaattacactcaattttcatgaggctataaaattagagagtgtaattggaaaccctcaattacattcaattacacaattacacaacgggcttgagctcaaagtgaggtgcttggatttcgagtctcacaatacccggattaagctcgttgaacataagagctgcatactctcttattgctcgggctctatcatcggctaaagcaataggattgccaccattatgagcacccccaacttcaaacccatcggccatattgcagcaatttttaaccttttgttcatttctcctttgtttgaaagtgcgttcaatttcggggtcaataggagcaagttcaaggtcttcttcttgctcgttcatgcatta

SEQ ID NO: 139671 - DNA, 609 bp, Cannabis sativa
acttgcgccaggacctacgacccaaaaccttaaacccaggatctctgacccgggacctagactagaacccagacctgtaccaaaacccggacccagacccagacccaaaccaagacccgaacccagacacggactgaaactcagaccctaaccaagatctagacccagacctggaccaagaccaagatccagacctagacccgaacccagacccagactcgtaccagaactcgaattcgaaccagggactcggacccagactcagactaggaccgagacctgaaccttgattgggactagcacccggactgggaccgagaccgtgacccaggatcgggaccgggaccctggactcgatactcggaccatggacctaagaaccgaatcgtgacctagacaaggacatggccaagacccaagagaaggaccagtaccgaacacgaaccgagacctacactcggactgggaccgtaacccagaccaggtcctaggaccctaacctgaatcggggaccaggaccaatgactcaggacccaagaccgaaacctatacccaaacctagacctgagaacagaaccaggacccaagacatgagcttgaactggacca

SEQ ID NO: 139672 - DNA, 517 bp, Cannabis sativa
  modified_base (306)..(336): a, c, t, g, unknown or other
ttaaacaatataaaacacatacacctgcaataagttggatagttggatatagggtttatttaattttaaattaattaatttatttagtaatttcaaaaataaaataaataacaaaaaaattcggaatataaataatcaaaaaaattaaaattaaacctataatttttgaaaaattaggtttcaattaagtatcttttccgaaaaaaaatgctaacaacttttcaaattttatgttatttttaaaaattaaatattcaataaaataaatgataattaaatattatttttctgattttataatttaannnnnnnnnnnnnnnnnnnnnnnnnnnnnnnttagcataatatcctatttctattaaaaatatcatgattaaactaatcttattttaaatttaaataaggtcaatttgttatataaaaaaaaagaataattttaaaaaaaatatattaatatctgaccttaaatttaaaaataagataaaataatgaaattttaaaaataagataattaatt

SEQ ID NO: 139673 - DNA, 821 bp, Cannabis sativa
aaaatttgttattttatttaaattgaattataaaattagataaatgatattgatttatcattttgttttattacacatttaattttattttttaaaaaaaaataacacaatttttttttgaaaagttaattgataattttgaaaagatatttaggtttgttaaaaacctaatttttcaaatttgtaggtttaattttaaattaatcctttgatttaatttatttaattttcgaaaataatatttaattatttagattttttgagaattaatttaatttgaattaaataaatcctataacaatctaatttaattgcatgtgtgttttatttattgtttaacatccaaacttgttttattaaacctattattgtttgatctaaattgatatggttaacttggtgacagatccaatgatttaattttaaccatggtccaattgtcaatgggtcaaataaataatttgtaacaagtatattttgtaatcttctttcatatgtgtataaacctagtaacatgataggatcattccaaatctatgtgtgcctgtgcctatatgtttgctttgggcctagatgcatataggggcccatttaattttgaaaattaaaatatactaggttgctaaaataaaaatatcacatttgatagtttttatttaggtccaatttgtattggacttattcaatgaataaaaattgtttaattaaggttaaattcttctcatttgagacttgtgtgagagttagggggccatattagtagtaggtacgagaacccaacccttcctcacatgaataaccccaattatgaaggcctattt

SEQ ID NO: 139674 - DNA, 665 bp, Cannabis sativa
aaattagattttatatgcttgatgaaaagagttttatccacagtacctctttgataatcatgagaaattaaaaattgagttaacctttcacaccatgcacgcggagcttgtttcagaccatacaaagctttttcaagtttgtacacatggtctggaaactgaagatctttgaatctttttggttgctcaacataaacttgcactctcaatatcccatccaggaaggcaaatttcacatccatttgaaaaactttaatatcaagaatacaagcaatgcacaagagcaaatgaatagattctaatcttgctacaggagcaaaagtttcatcaaaagcaatacctgctacttgtgtgtacccttgtgccaccaatcgagccttgttcctcacaattgtaccgaattcatcccttttatttttaaaaatcaattttgttccaatcacattgataccttttggtcttcgaaccaaaatccaaaccttgttgcgaacaaatttattaagttcctcttgcattgcattgagccattcttcaaaagtcatggctgttcgcttttatgtcctaaataaagctcaatttcaatgtaatctttatcctttaaatatctataaagaaacagaagtattttcatcactcatttgtgtgtcatttggttcatgttaaca

SEQ ID NO: 139675 - DNA, 536 bp, Cannabis sativa
ttagaattttcggggattagtatttgaccattttgcccttgaggggttataattattttatttgggttaaggggcatttaggtcctttcttttttttttattttgttttggcttgtagggagcactagaagcagccataggttatgttgaattaatagataaagcttgaggaaaggttttattgggaaataagttagaaatttcaagctactcctcttttctccctctctttctttcgaacctccatcccagcaaggagaggattgtttctttgctgaagttttctaatctcaactagatattgaacattttgaatcaaggtaaatcctcttaactttttattggagttttagttgaattttgagttgaactaagtgaaattaggttgaattggggggctgtatatgtatattcagtttggattcatttgttgaaattgattaatggttattcctactgttctaagctagatttaagccttaggttatgaattattcaagttagagcttagaaaacctaagttaggtctttaatgg

SEQ ID NO: 139676 - DNA, 660 bp, Cannabis sativa
aagtaggtttaaaataactttaatcaaaatatttatccaaattctaccgaaacttcagcagcataacaactttaaatcaaatgttctcaaaaaaattaacataaaatcaaaacatataacaatccacaacaataaaaaattaaatttcacccatctgaccgcagtacatgtatttgcagaacctacttcactacagatgaatatttaagatattcaaactcctctaacatgtttattaattcataattaattaaaagatagaaaaattatacctctagctcaacacttggaaaaaatcttgttctcctttcaatttagatccttgatacttaaccacaaaacctacaaacaaatacaattattaaaaaaattaaaagaaataaattgttactagctacgaaattcatgtaactagttattactagttatttgataataaaaaagttcaaagagtaaaattgaaaattttacgtattgaatttatatattgaagagattgttaaattctaatttattaattattaatgcttcatatcttgctcctatgttaactgttatcccaattcttctactctgatgtggcatcacatgatggtgacacgtagaatcgactccgagtatctgcttggagaatatagtccgaacaggatgccttgtatg

SEQ ID NO: 139677 - DNA, 739 bp, Cannabis sativa
  modified_base (702)..(714): a, c, t, g, unknown or other
acaagttgatcttgatttattattattttttttaacataaagaagacaaagagaaaaagaaaatgaaaaagtgaatgagatttttctcaatagtttattctaatagggtgaatttttatttatacaaaaatattactagaataatgaaaaactaaattaatgaaataaaagaaaagataatcaagtatatatggtggtaattaatacattgatttagacatctataataatcttagatgtctatcaaaactttctcattaaaaactttgctgaaaaaaattgatgaaaagaaaaagagtgcagtgtaaattaaccccctcattaatttaggcattagtcgagattttctaattgacgaattccaatcttatatgtcatacgcttctcaaacgttgatgttggcaataacttaatttataaataagtatgcataattgacacttcgttgaatatgttggacaccaatatatatccattctccttaagataatgagttaagaagaattttgtgaaaatacctttggttctatcttcttcattatagctttagttgagcaactgttgattaaaaattctcaaactttaatatgtgttagtgactgtgtttttatttcatgactaagtgatcttaattctccgtataattacaagttacatcctcatttatgaataataaatttttcgatatttatatataaattnnnnnnnnnnnnntattaataatttaatattcatgcat

SEQ ID NO: 139678 - DNA, 587 bp, Cannabis sativa
  modified_base (328)..(329): a, c, t, g, unknown or other
acgtggaagatttatactgggagagaagatcctctttcccatctcaagtactttgagatgcaaatggatttgcaaggagtacgcggagatgtatgctgcagaatcttaccaaccactctgtcggaagccgctcagcaatggtatttcaagttggctactggaaagtttagctcatggaaaaccttctcttcggaattccatgcgcaatcctcctcctcacgctagctcccattgcatttgagagatttggtcgaggttaagcaacgaccaagcgacccgctggtcatggaagtccagataactaataaaatggtggccagaaccatgnncgacaatggagcttcttcaaatatcttgttcaagacagcttacgaaaagatgagactccaactcaaggatcaaactccatgcctccaacctatctatggtttctccggtcaaggagttgcacctctaggacaaatccgactacacctcactattggacaagctccgactagcataactatcatggcacagttcctaatattggatgttccttaagcttttaacgtaatgcttggccaactagccctgtatgacttaaa

SEQ ID NO: 139679 - DNA, 584 bp, Cannabis sativa
  modified_base (204)..(204): a, c, t, g, unknown or other
catgcggcattaaatgcgagataactgctcagaggaagcctgacatctcccagagatgctttgataccgcttaagcctccgggagcatagaggacttgtatgccttctccgggaggcagatcccggatgacgcctttctctacaaagacttagccattaatttgaatgttaaggtcttcgtgtccacgtgtccctgtgtggttngtccacgtatattgggcaaaaccaggagcaatacttagtactagtagtttaccgtgtttaactttttttattcttttttatggttttctttcaaagttaattttttttttttaattttcatttttttagaagcacatatttttccattatttctttctatatcttcttattcttatttatatatttttcttccttcgcccctttttcatctctcattttttccatcaatattattttgtttccttttatttttctttccacctacctcttaaccctctcatatcttttttcattttatctttttcttattgttttatgtgtctttttttttttttttttttttttcgtattttagttattatttatctttatattttttt

SEQ ID NO: 139680 - DNA, 532 bp, Cannabis sativa
caccctcttgatctctcagccgcaccatctcaatcttaaacatccatctccttctccgaaaaccactccgagccaccagttgcacctcaaccatgcccaagcgtccaagcccataaattctctctccacctacgtctcatccctctcccctccggcctacaacaaaaattatgtcgtctttccccttcggcctaaaccctaaatcccagatttcactctctcctcttccattgaccacacccgagatgccaccaccacccaaatttcttgagagagagaagtgaggttgttgtatattgaagaaaagaattagggttaattagagtttggtgttgtgtagggttaattagggtttgtatattgaagaaaagaatctgggttttgggttgacattttggggtggctttttgggttgatcatggtcgacgctttgggttagatggtggtcgaagggggtcttagggagagagagagtggttatggtggtggtggtgctggtttggggttgggggttggtggtgggtttctggca

SEQ ID NO: 139681 - DNA, 547 bp, Cannabis sativa
  modified_base (311)..(313): a, c, t, g, unknown or other
agagagagagagagaaagagctaggcgtgagaaagggggagtgaggaaaagtcaatcatattctctctactttcaatggcttagtttatgttgttatcagtctcttatttatcctactatatatcctatatgtatagtgttataaataaaaccttttaattcttttgttgacctcgaaaagtgatcaactgacaccagggttgtatgaatatgatatttgccatgtgttgcgcaattataattagaaagtaaagaacacacagaattattatagagatttggccccctttgatagcgggtaatgacctacnnnccttttagttgtattgataccaagggttaatactattccaatcactctataggtaggaggatctgatataactctcttcttaataaggatacaaagtaagaatcgaggttggcaaatctcaagtgttgggaatacttgtatgggcgtgtgagagagagtgaggaagagagttattagacttaggcttagaactgtatcacatggaggctagtatcaggcttggagacttaggtt

SEQ ID NO: 139682 - DNA, 532 bp, Cannabis sativa
tagtcgcattattacacctcgcatgacgtaggaccaagaaggacgtgttcaagtctcgaacataccaagatatatgcgatgtctatgaagacttctcctgtgatttagttaagattgactctttactcattgatgacccgataataactcgcacgtcctgagttgtcgacacaaacagggtatccatatatgcgactcgattaggacgtagatatcttaacacgagactcattagtcttgttttaacatgaacgcaccctaagcttgtgagcttgtgcgagtatacaaacatacaactcgcactatgaaggtcgtgtacgttgctatattttgtaaaacagattgaaactgttcttcatttattccatttatgtttttcttaattttaatgctaatattcaatgtaaaacggttcaataattaagttctgcgtaattgaagggacacttgctttgtatataaaggagtgatccattatgaataaaacaagacaataatccttgcaatagtggattaagcagaccgtgatctg

SEQ ID NO: 139683 - DNA, 650 bp, Cannabis sativa
cctgggtctagttctaggttcgagtctgagtcccaagtttcgatctcgatctgagtctgggtttagttctgggtctacgttctgggatccgatcccagtttgggttcgagttcgggtccgggtgcaggtctaggtttgggtctgattttgggtctaggtcccaagttcgggatcaattttgggttcggttcctggttcgggttttgtcttgatatgggttcgtgtccaagttcctgtcctagtttgggttgggggcaggtttcgagtttgggtctgggtccaacttcagattcgtgggtccaggttaggtcctggttcaggtttgagtcctgcatttagatttgggtctgggttccagggcaaaggtccctagtctaggtcccccatccaagtccgattctacgtccttgtctaggtccaagttcaggttcaggtcccgaatcttggttttattctaggtgtcggtctgagttcgggtccaagtctcgatcccagtcttggtctgggttcaggtttgggtccttgttggggtcttgatcctggtccgggtcgcgtgtgtcaggtcccgacgagggtttacgacctggtcaggtctaggccccgattcgggtctcggtcgaggttcaggtcccaagtctcaggtcccagtc

SEQ ID NO: 139684 - DNA, 843 bp, Cannabis sativa
  modified_base (774)..(780): a, c, t, g, unknown or other
gtgacccaaaacttaggctaaaaatagcctaacatagacctatgtgttgtgctcacacatctatttatatctacgtggcgtagacctacgtgttgctctcttacgtctaaatacaataagaccttagaatggttcatctcgtttatggttacagagtcaacctgattatgccttaaacacataatgcttgaatatcattacatttgacatggcatggcaattacacatataccactagggtaataaccctaggctatgagaccgttcctattagggtattaaccctaatctcgcttactaaacattcacacatatcactttcaatataagcaccactgcgcatactctatgtgctaactactgtcttacctattttttcgcaatatcagagattctgaatccccgggtgcttctgatttggtgtcggtaatcctagtcacacaaatccagaattttcataaatagggttaatccttgatttcactttcataaaatattcacaaggcatttaaaaatttatatattcagatagagctcaaaaagagctttccaacggtatatagaactcccaaatcggagtccggatcacaaagttatggttatttaaagtttacaaaaggatctgcacataaagaaatgggcgcgccgcggcatgctaaaactaggggtggtcgcggtgcgggtagtgcggtttttaaccattttttcaaaccaacccgcacatgggatttttccaattttccaaacggcacccgcactgcgatactaaaaaannnnnnnaaccgcaccgcaaaaaatgatgcggtgcggtgcggtttctgtggtttatgcagtttgaactat

SEQ ID NO: 139685 - DNA, 617 bp, Cannabis sativa
gtaaccctttcttcttcacgggcaagaggacggaggatttcaaatttctaaaggagaaaattctcaagcgtatcgagggttggaaagcaaaatctatgtcacaagcggcaagaactactctggtaagatctgttcttcaaagtatcccaacttacttcatgtcgactactatggttccaagaactacgtgtgaggaattggacaagatagtggctcggttttggtgggtaggctcgaattcagataaggatcggtactgtgctttgaagtcttggggggatttatgtcaaccgaagaactgtgggggtctaggatttaggagattccacgacatgaatactgccttagttgccaaactctgttggatgatcctaaatcaggaaaacaaattgtgggtgaagattcttttgggtaagtattgtaatttattagatgcttggagggtggaaccaaaagaccatgactcgattgtttggaaaagcattctctctactcgtccaatttgtctaaggggggctgggataatcgtagctagtggcgattctgacctctggaacaaaccttgggtgccatggaagactaatcaagaagttaaggatagtttcagctacaacaga

SEQ ID NO: 139686 - DNA, 794 bp, Cannabis sativa
  modified_base (370)..(377): a, c, t, g, unknown or other
  modified_base (758)..(767): a, c, t, g, unknown or other
gattcagaattgcactcttaattgggcgggttgcacttagatttttgtaacctgatctttacattgggttaaataaaatgtaacgtaaactgaccaagccgaccgacgtacacccctagctagttagaataaatttaaccaggatctaaatttactaacaagtatgtttattaacaccctaaatatgaattctctaaaacaatgtaaataaacacatataaagttcaagtgaccttacattgattgtagtagaataatatgtctcctcccactcagatatctaaccctggttcatttctgtcacaaagtattatcatgatctgagcctgattcttcttcaagtattacattcttcacagtcttacacacnnnnnnnnagtacttgacttgctatgggtggagatgtactctttaactattggttcaaaatttatgaagaggccagagagaggatttcaaaataggagaaggaatggaggctctcaaaaactctagttgtctgacagaatgtaaactaggttatatgagttggatgagaatgagactatcctattctttttatactatttcacctagggttaggatttaaattatatggaataaaaaatgataaaataatagaaaaactaaccctatagtggtcagccatatagatgggccccactaattataattttgtaatcttttcaactatttattttttatttcacaaatgtcatatttttcaattttaatcaaaattatttatttaataattnnnnnnnnnnatcaaataaaattgtcatttatcttat

SEQ ID NO: 139687 - DNA, 562 bp, Cannabis sativa
tggaagaggctccattatctatcatggttctggccaccatcctgttggctatctggacttccacaaccaatgggtcattgtgtagaaatctgattttgacagcatcttcaacattgactgttatggtgggctctcctgcctgtgggatttttggcttcctttcttctacggccaggactacttcttctttctcgtgctgtactgttcgggcacacctctcccgaggtttgcttgaatctccagctatgtgcgggcctccaataatgacttgcagatgtccatctactggtggtggaagaaagtcttggttgttatcactcctctgattttgatcggccttgacatacttctgtacgtgtgggttatttttccttatcaagaattcgatttcccgctttagattgttgcattaattgttgtcgtagtcgtattctccatgaaactgacagaacttgctcatgtctctcttgctgagatcttttttcatgggtgcaggcttcttgtacggggctagtgagtgagtggccatgtaaacactttctatgtcctctgtcaggatggt

SEQ ID NO: 139688 - DNA, 511 bp, Cannabis sativa
tctgtagatgaagaagattcttgtgtaagattgtgagagttgaaacactttgagagaactcaacagagaatctgtctcgattgtaatgtacctaatgtttctcaatcaatgaagaagatttggtagtgttccagaacttgagtagagccataaatcacatcgatctatcacacttgaaccaatatatatcttggtgttgattttttattttctgcatttattgtctttggttttatctactctgcatgcctctatttttattcgattattgtttttgatttgtttatcgtgttttcgataattgtttgattgtttaaaattttattaattttgttatgcattgttaatcgtaattttcgcacatagtttaataattaaatgcaaaaaaaattaattgctaaaagattcttacttactaacaaattgtaaaaaattgattaataattattagtaatttaattttaaatatcaatatatatatataaaggaatgcacaagaagagtttaggtg

SEQ ID NO: 139689 - DNA, 1422 bp, Cannabis sativa
  modified_base (847)..(851): a, c, t, g, unknown or other
ctaagatcctagtaaaataaatttccaacaaatatcactatctagtgatccatataaataagttgttgactacatccatttatcgcatatcaagtttttcactcacagtcaggctaactaaatatcttaatgttattgcatccaccacaagagaatatgtctcttcataatcaatacttggtctttaagaaaaaaaccttgtgctacaagtcttgctttgtatctcacaacttcatttttcttatttctattacgtacacataactatttgtatccaacgggttcacaccataaggtgtttggactataggtccaaattctttgtgtttagtaagtgaatttaattctacttgaattgtttctttccattttggccaatcttttctattttgacaatctttgatagatttaggttgtagatcctcattttcatttacaatttccagtactacattataagaaaaaatattgtcgtcaattacttcaagtcggtcccattcttttcctgtattgacataatttattgagatctcattatttctaatatttttaagtacctgaatctcttcaagagatttgtttatgccaacatcttccttgaaatttttagcctcttcattaggaccatcttgattatttgctccttttctttttcgagaattttatctttgcaaatggttggtctaccaagtttcatgcatgctttagaatcattagctaattgtccttcagggacttcaatttaaactggagcattttcagctggaatatgtgattttataattttctttgggtcaatgaatgcatctggtaattgatttgcaatattttacaaatgaattattcnnnnnacttcaagttcacatttatttgtaggaggatcaaattgagataatgattgtgcattccatacaattaatttttccaattatttcttttcccctccccttaaagttggaaaacttgtctcatcaaaatgacaatcagcaaaacgtgctgtaaatatatctccagttgtgggttcgagatatttaatgatagacggagattcataccaaacatatattcccagtctcctttgaggacctatctttgttcgttgtggtggagcaatcagaacatacactatacaaccaaaggtttttagatgggaaatatttagctcctaaccaaaatccaattgtaatggggagaatttatgatatgatgttggcctaatgcgtacaagtgatgttcgcataagtaattgtcttgccattaactggaggcatttaatgaatgattctgcttgaccattttgtatatgtatacgagtaagaagatgtcctacatttatccatattgacatacaataattattaaaaagcctgtgatgtaaattcaccaacattatcaacacggattgtcttgattacatagtct

SEQ ID NO: 139690 - DNA, 575 bp, Cannabis sativa
atgaaaaaaattagactaaaaaacttttctggataccgaaacaagtagagggtgcatcaatacatccattttaagggggtgcattgtagaatcaccctataatataaactataaacttaatctaattaatttacacgatttctctctcggttagctataataaaaactaacttaatgttttctcaccaaagacaattattcgaggtcttctctcttctctcttttgatatctttgtatgaacttatgatgagaggctccagatcagataccataatcagatttttcttaattgcacacaacacactttgtttagactattttttttcttcatatctatgtttgtatgtttggttagtaaaattttgtagaccaccccaaatttattttttttatttactactaacaaaatattattttattttaatctaattaagaattttgcccttgaactttaacatgtaccaaatcattcccctaaacttttaaagtcgttaaaaatgcccctggcctgaactattgagattgttattttcaacaaccttaaaagtttattgtaaatgaattttttttatag

SEQ ID NO: 139691 - DNA, 596 bp, Cannabis sativa
ctaaacacaattttatactcaaataaactaaaattattatatatacacaaataaaaaataaattaaataaaactaaaataaagaaaatataggttaccggagcggaggtacggcggtacgtcctcgtcggaatcccggtacaaatgtttttttggaaaaaaaaaagaagaaaaagagagaaacaagtttggaggttgaaaataatattttgggaggttgaaaatggagtttagaagagaacaaagggggctgccggcggtgggtgtgggaattgcacagagatagaaagagaagaggaaaaatgagaaagaagggttcgctgcaggttttatttattttcaacttttgccggcgcaattaggtgcaccggcaaaagtctttcctgaatgaaaacgcacaaaacgttgcgtttcatttaagttgggacttttgtcggcgcacctaattgcaccggcaaaagtttcccacaaaattttcacgcgcgttttcctttgcgtgggaagttgaccgccaaaattttcaagggtttttgatgcaacgtgtccaatggtcaaaccgttcccacttttgccggcgcatataagtgcgccggcaaa

SEQ ID NO: 139692 - DNA, 629 bp, Cannabis sativa
cactacacaaccagctaggccccaacggtcatattttgtcctttttattccttgtatttttgcctcataaactttttcatttcccaatcaatccttacaaaaataaaataattagtgagcttatgatactatcaaagtgtgccctttaaaatataggactcttggattaaaatctttgatatatattttagtgtactattatttaaagtttgagtcaaaataaagtaatcattgtagattattagatattaaattatgatgggctaaatgtgtaaatactttaaaaaatatttttaatttattaaaggtaaaattagaaatacttaaaattataacttagttatgggattatatatgaggattgttattgggcacccgtagtacctagcaccttctaagcgtgtcgccttacgattggttaacgatactctataaaagttattatattaaactatatgggatttgatacttaattgcaccattgacacgtagaagggtgctaggtactagtgagccctttagcatttctcattatatatcgtgagtggtccctaaaaaacaaacaaaaaattatattctcatcttccccatcaagagaaaaagttaaaaaaccctaagtcttattttct

SEQ ID NO: 139693 - DNA, 1794 bp, Cannabis sativa
  modified_base (617)..(617): a, c, t, g, unknown or other
tctaaaacttattttacactcaattatacagttctttgtttaataaacaacctactttgtgatccaacattcatcaatcactcaaatacatgtcttttaaattgcatctcaaatcataagcttttccccattctgggtgagtatgcctttccataatttcttaataaagtaatcttttctcaaaatttcaatggtctccttatataccatgttgactatccagtcaattttgaagtactctccatcattaccgtatcaccttaagtaattcaggtaatcttctttaccttagtgatacaactactcttcctgacattcttttatacgttacccccagtaacgtccccacttcaagccttcattaggccattattcccacggaatgatggctcttatacatgagtgcatcactctagctacttcccggactgacgacttgcccccatggaccaatccaagtgtttctaaatgtgctttgctctaactcgcacacttcatagggaaatttcctaaatgaaatcaccccaagtcatggacactcaaccatggagttacatcatggtgagctaccaaaacaagatgcttcttgctaacataggtagtcccatgcctacatnatctcaaaattactacacaatcgttgtcttcaattcacctagtattccagataacactcataaattttcccacctttgctaatgctaaatcactcctaaacaaaaaattgtgttatttgaatcaattagatcgatgcctccattaactactcatgtcttatattccacttgggaataccaacaatttaactcatattgtcatctttctaatctgtctaccctattaaatgggttaccaaccactaaataacatacatgcacagtccattcagatttcttgatgtctataactaaatgtacaatgtttaatatcaatagcaattataatattgccataaattctaacttgagtcggccaaaggaccgataaccgagtccccttgagtcataactagcacttggggaggacctgcacacttttcttctttaacatcaatctttcttaactgtggataggttcttttcaaatgacccactatcccacaataacaagatttggctctacattagcccaaatggcgccttttttacatttgaacacttaagataaggtcgccattacttattctcaacttgactactattctggtcaccctggaacctttttgttctatcccataattggtggttcatttagttttcacttcttgatctactagtaagttgacttcacatattccaccaccatctagtggtacaacaggaagtgtcggtagtacaagaacagacactagatgagcctattgttttttcaaatctcagatctattcccttgttgtctaatcatatcttgcatagcagaatttacatgttcctaacattatggcaataaaaaattctcttccttaccatttgccccaagcctagatagctcgctaatcaaactattgattgcccttactacataacttatcacacatttagtccacatcttctaaccatttaaaactcagacggatatcaatatcaatatgaaaataccatacacatattcttatcaaaatcatcactatgctacttttcccaacatactttataatagcctaaacaggtaatccaataggaaataatataaatactaacaataccatgagtcgacctgtcctcgcagcaaatgtacatattcaaccagtcttcaggacctttaaaaactatggctgctctgataccaagttgt

SEQ ID NO: 139694 - DNA, 630 bp, Cannabis sativa
cgggaaatagtcatcgaggttcaaacttactctctccacagatgttggagagatatttctcagttttaactacaacaaaaaaaaaacaaattatagacaaacagcagaaactaaataaaaataaaaatgaaaacgaataaaaatttaactaaagaaaaaaaatgtaaaacaacaatagaaaacttgtaaaaaaaatccatttttccacggccgattaaaaacgaggttgttcatgttatccatcttcaactggagtacttttggcttttgcattttaggccaattaaaaagccttggaatgccaatatttgaatacaatgtaagttttccaataacatatggacaacactcaaaaaacaaaattgcaacgccaacgaaaaacccaataacctataatacccaccatcttcttccttctgcataacctttctaagactaaaatcaatcttacccttcaatgattgaattgtcatatcaaaacactcctttccccacccatattcattgtatcgaccactatcaacatctatttcctcaatggaaacaactttcctaggaggaccaccaaacaaatagtacttaacagaatataacacaaccaacttgactgcaagatcatcattatcccta

SEQ ID NO: 139695 - DNA, 505 bp, Cannabis sativa
aagaggaatgttgattacaattaatggtaataagtaaaaaatttggacatccacatgattattaatatttataacaataacaatataaaaaaataaaaatttaagagaaaatattttataataatataaaaaaattttagttataaaaaaaaagtatttttaactcgaacacataacaatataaaaatttaaaatagtaaaataaaattcataaactaaatatatataaaattaaaaaatattactataaagttaattattagaagataaatataactacttatacaaatatataaaaaaaaaattattaggtaagacattaatcaatcacccataaaaaataatatttcttagataaaagaaagtaaaataataaaactactacttataacttatatggataacatctaaaaggtttttaaattgggacttttaatttatatgtatagtatatttttcaaaaaaaaaaaaaaataagagaatgtctcgcaaaataggaaaaata

SEQ ID NO: 139696 - DNA, 1231 bp, Cannabis sativa
aaattatctcattagacaaaccatcaatatcactatatagaatttaaatattctagttgcaatctagtaaaatatccttgatacctaagccagtattcatatatcactgtcattgtcaaactagacaatccagatacctagccaccagtatccctgatatgtcattgtcgttatctgatgagataacagcaagtagaaaacttaaaaacagtttaagtttagattcatgactattcttttataacgatcatgatcgcttcttcactttcataacagtaatgactgtctcgttcgtttcataacagtaacgtacgtctctttagtatcataagggtaatgaccatctcgttgcttttataacggtaatgaccattgtggtgaatcttcaccctcaaaacagattgttacagtagtagcaatgttcaagaatgcacaaacaaaactaaaaccaatcacaacattaaaactataacttaattgaaattaaataaagaaaacttagttcaataatgaatgaataatggatctttactgaataaaaatagtcagtagtacacaatagaatgaacccaaaattacaactcaacatagtaaattattacaaagaaatgcctcacattgagaaaaatcacttcaagagtaatactctctttacatcacacatacactcactatgattttggacactttctctctaaacttaaatctgaatctaaagtatgagtttggagattagagatcagaaaaacacttaactatttatagttattagtggggtccttgatattaaaactcatgcattaaacctaacacttccaaatctaattaataagcaaggccggctatgatggagtgtaaagtgggctactgcacagggcctaaaaaaaataaagggcccaatatattttttctttaatgcccaatagtttttttaatgaacttaacttttgaaggagctaacaatttgtcactagtcacttctatcctaatgccaaagcccattttcaattctattaatgcttttaagcaaaaaaaaaaatatatattactgctatttattattttttttcaaattttttatattctttttttcttatattttttttctattagaatcaataacaattttttataaatagtttgaattttttggtgttttgtaaaatatataactgaatgataatctttaaaaatattatttataaattacatttttttttgaaatttttac

SEQ ID NO: 139697 - DNA, 577 bp, Cannabis sativa
  modified_base (295)..(296): a, c, t, g, unknown or other
tttgttgatgagctaccaactttaagtttgcagttgctcatttttcttcgattttatcaagtgattctgcaagatttatgtgattggtaccttgattgtacgtcaaccttctgtgggatggctgtttgagttcgacgggaagcatagcttgtggatgtgccactgcggcaaagcttttgatgatgccatggttcgcgtagaaatcagcgaaacattgactgtcgaactgcttgccgttgtcggaaactattttgtacggtagtctgaactggcatatgatgttcttcactataanntctcgaaccttctttgatgtgatagttgtgagtggttcggcttcagtccactctgtaaagtagtcgactgttaccattgcgtactgcactctgccttttcctttgggtaattgtccgattaggtcaattcctcagatggcaaagggccacggactttgcatttgtgtcagctcattgggcggagctcattgggctagcgcatcggctgttgtattttcctctcttggaatctgcttgaggctatagcttttgaattgtgcgagcagatcatgtattttgct

SEQ ID NO: 139698 - DNA, 871 bp, Cannabis sativa
  modified_base (322)..(329): a, c, t, g, unknown or other
aagataaaatgttaaaactaacatctttctaatcttataatttaatttatatttcaaaaataacaaattttaaaaatctgatataaatagcaaatttgaaattttaactagattatttttaaattttattaatattttaatatcaaaataagatcatttcaaagttaataatgaaataagtaatatctgatcttataattacaataaataaaataaacaaaaataattaaaaatttcataattaaccataaggctagtttgtgaaaaaatcaaattttcaaatttcaaggctactactatctaaaactaattttaattaatnnnnnnnntaataaaaattaattttattctaataattagatcttttatttgaaaagttagattctacacaaaattctacaaaaatttaaattttatttcaataaaaaataaatttgaatcaaaagatatcataaaaaaaagattgcattgcatactccccgcgagcacatgaggctgcaagtgggtgagggaaaggctgctagcagcctgcttggggggcaaatctcggtcaggaggggaaaaattcagacatggccttgtttgaaggcctcatgtctgagcgagcctccccatccgagcgcgggtgtgcatccctttgagatatttttattcaaacttcaaaaaatcacaactaattcataaaaaatccaaattaagttcggtaaaagtataaatctattaatgtttcatatacttttcaggaaaaatactttcagaatgaatcaaaaaatatttaacatcataatttgcaatttccatacaatcatcaaatatgcacataaaccaacatgaacacatccaaatcaacacaaacatcgttttaaatcca

SEQ ID NO: 139699 - DNA, 709 bp, Cannabis sativa
atgaatatgaaaaaaaaaattagagtaaaatttttttctggatattgaaataagtagagggtgcatcaatacatctcttttaaaatagtgtattgtagaatcactctaatatatatagggtaattctataatgcactcccttaaaatagttacgcgtatttttaccctaatgtatatcatgtgatttaaaattctttgtggtgcgggtgcagtttgcatttttaaccacatggtgcggtgtggtttgcggttcaaaccgcaccacattatatattataaaaatactaatttttaaactatgatttctctttgttatatatgaacaactcatgatatacttaagtccaagccatacaattaaatttaaagaacatccatataaattattcttattttttttgttaactttttattgttaacatattattactgatatatatatatatacatatatgttagaatatattttaccaatatctaggtttactaacaagtacgttagattatattttataatctaacaccctaaccatgaattcataacacaataaaaataaacacatataaagtttagataaccttacattggtagcagggaaatgttatggctccttctactcagatttctaacccttgttcctttctatcgtagagtaataacaatatctgagcctggatctccttcaggtgttggattcttcacaatctt

SEQ ID NO: 139700 - DNA, 1052 bp, Cannabis sativa
ctcaacatgcaaaagaccatgtcaaccatttacaagcgatgtttgagatactgcgatgatacaaaatgtgactcaatcctcttaagtgtgtccttagggtcgactcagggaaattcctcgggtttatggtgaatcagcgaggaattgaggcaaaccctgcgaagattaaagcattagtggaaatgcgatctccgactaagccaaaagaagtccaaagtctaacatgtaaggtcactgccttaaatcgtttcatatcacgatcctctgataaatgcaaagaattttttcaaattttaaaaggcaataagaagtttcaatggaccgagaagtgtgaagaagctttccaagcacttaaaacacatttggggcagcccctaatcctgtcaaaaccactgcccggagaagttttatccatttaccttccagtgtccgaatatgcgattagctcggtactaatccatgaagaccaaggtaaacgatatccagtgtattatgttagtaagcgtttactagacgccaagactcattacccgcaaatggagaaactggcgtttgctctggtaatagcgtcaagaaaattacgaccttatttccaggcccatagcattgaagttttaacgaactaccctttgaggcaagttttggcgaaaccataagcgtcggggagattgttaaaatggtcggtagagctgagccagttcgatatcaggtacaaaccaagatctgcgattaaggggcaagccatggtggatttcatactcgagttcccgagcactgaagtggcactcatagaagagaagatcgatactgatgtaccaaatggtgaaggatggactttatacgtcgatggagcctccaacagcgaaggctccggcggcggcataatactcataagccccagcaattttaaggtacatgctgcactaagatttgaattttctgcgtctaacaatgaagccgagtatgaagctttaatttcaggattaaaactcactcttgagatgaagatcgagtacttacaggctttcagcgactcccaaatcgttgtatgc

SEQ ID NO: 139701 - DNA, 631 bp, Cannabis sativa
agtactaccaataatcaaaagtctagtaaaaataaaaaatctaaggttatcgatagtatttccacaaatattggtgcattggcagaatctgtatctgaaattgtcctgaagcttcaaggattgatagatgcattatcagataagaatgtaactgagatgcaagacaatttatacacaaaaataagcaagaccgaaggccttactataatgcaatgtattcgagcaaccaacatattagttaaagaacctgcattgatgcgagtattttatgcaatatcatatgagatgaaaatgcaatatattatgaatttgttgtaaaacgatgcataatcatataatcattagatatttgcatttttgttgaacatatttgaacatcattatttttttcgtaaggagcttattttaatatttagttatattttctattccaataaaatatttatggtttttttttcttgagtaatattatgtttgtttatgaaatttattaaatctttaataaatatttttttagttatatttaacgttcatctgtaatattattaatttaaaattaatattaattatagtatatatttatttatgaatttatttagttaattttataataaataaattaaaaataaat

SEQ ID NO: 139702 - DNA, 951 bp, Cannabis sativa
agttccatttggtccatccactatagcatgcttgttgaaagttgagtccatcaggaaaccaacatatgggaaacaattcaatccagataaaactttgatgggtacagtgctaactggcaaggatgcctaaatttgggacaaacaggaaatcctagtcactcacttgactcccttctatagggttcttcatcgggtagccttgtacaattggttccctaattctcatttgtcatcagttacactttagattggcaagtttctgtatgctataggtactcatgtgtccattgatctgccatcgctcatatttgaaaggatacttgaagcttcagaaactactggcactcgtaacaagctaccatttccaagccttgttcaacgagttcttatgctcacccacctcttacaacgcatgactatcaagttcaaaatcctattctcagtaagagctttctctctatggtcaataggcagccctcatcaaccactccttctgcatcaaaggtgactaaaggcaagtctactatgttcaaagggctttcggattccagctggcaggtacaaatgttttctgagtttcaatcttttgccaaacgttataagaaggatcaatagtgtcagcttgcctttgaggcctccatgtatcaaatggttcactctatcaagttgactcttttgcaccgttttcctggggattctctgcctgacatttctctgcctgagtttcatcgagattcgtttggcacatcctctgatacgtctggaagtaacgcacatgtgtagggggagccttcagcatttgcccctgtcacaagctcaacccaacctgatctgcatcctcctgctgactagcctctagtaatcactgcaacacccttggtgtcgactgggccaccttcccagggggagtctggcaaagaacaggatcaagcagctcatattcaatgaagg

SEQ ID NO: 139703 - DNA, 701 bp, Cannabis sativa
  modified_base (96)..(105): a, c, t, g, unknown or other
gcatccaatgtaaggtttctaatatgtgtttatttcataatcgttttagaagttcatatttacggtgttaatcaacgtacttgtgagtagatctannnnnnnnnnaaaataatttccaacaattacaaatcacaatagtactaggcactatgggtgctctttagtatttctctaaaaataataataatatagaagttttatttgcagagcataaagttatgggtggttctacaatgcaccccactaaaataggttaactggtgcaatccctaagtgtttcgacatccagaagaattttttagttcaatttttttgtagtcgcgtacgttatagttatttaagacatctaataaaattttaagaaatttagaataatttactatatagaattcaatactcaaatcgtctatttcacacgtatacaaaataaaaaagtcatgtgtgtaataaaactctatttttggtgtgtgaaatttttttcgaatttctcaaaatttgcaggatgtcttaaatagctacatatacaatcataaaaaaaattcaaactaaattttttttctatataatgaaacagataagagtgtatcagtacacctttttcaaatggtgcattgtagaatttccttaaacttataagtacacccttttttataatttttattttatataaacataagaaaattggctaattagcaattttt

SEQ ID NO: 139704 - DNA, 2377 bp, Cannabis sativa
  modified_base (627)..(630): a, c, t, g, unknown or other
tatggatcccaaatccaaacatagactacgggtcaggtccaagccctgggtccagatcaggatcccaatcttgggtcctagtctagttccacttctagtcccaggtcttggtccgggtcccagttcagggtccagttttggggtgaagtcctcggtcccggtgctagttccgaagcccgagtccctattccaggtcccccatccaagtccgggtcctaggtcttggtccgagtataggacccggtcggggttcaagtcctagtctgagttcgggttcaggtttccgatcctggtccaggtccaaatctgggttctagtcacgggttcaagtccacatccaggtccgggtctgagtctcaggttccgatttgggtttgggttccgagacccgggtcctaggttccagtctggatccatgtttgggtttgggtcctactaccagttccgatttcgattctgtttctgggttcgagtttcggtccgggtctaggtcaaggtctgagtactggtcagagtccagggttgggtctgggtccaagtcctgatccctgtcagggtcttggtttgggttcgtccctggtttttgggtctggttttggcttcaggtccaggtcccggtctgggtcnnnntcccggtcttggtttaggtcccaagacacaggtcccggtctgggtccaagtctcagtatgggctctggtctgagtttgggtttaggttgggtcctattacactcccatgtccgagtttactcccagtcctggtccgatcacggtcagggtatgggtccgggtatgggttcgagtccagtttcatatctagatccatgtcaaggtccgagtctgggtctaagatcgagtcctaggttcaggtctgacccgatcccggacccgaaaccggaatcggaccaagattgggactagaacccggacatgggactgtagtaggacccaaaactaaacccaaactcagactcccataccgagacttggaccaagaccgggacctgtgtcttgggacctaaaccaagaccgggacctggacccagacccgaagccaaaaccagacccaaaaaccggggctgaacccagtacccaagaaccagactcggacctgggacccgaaatccggccccagattgggactgggacctaaactcggacccgaacccaaatcggcaccaggactcagaccggacccgaacctgaaccgaaacatgaactttgacccagaccaagacctaggatccaaatatagatgggggacccggagctgggaattgtgcccacgaactagtaccagaacttgggcctcagatcttggatcgggatccgggactcgaccctagacccaaacctggacttaggacccacctcgggaccttggattcgggactcgatgctaggacccgacccgtagtcagtgtctggatctaggacttaaaccaaaacccaaacctaaactcgaactcaaactaggacccggacacatacaaagacccaggcccacacacgggaaccaaaaccgaaacttgaactggaaccagaccgggaccttggaacggtaccgggacctaaacccaaacccgaactcgaaactagacccagccttggaccctaatcgagaccaaaactcagacctgaacctcgccccagacctaaatcaggacccgaacctagactcgaatcaaaactcgacccgaacccgtaccccgttacttgaaactagaaccgaaactaaaagcagatcaggacacaggaataggaccaggagcaggacttggacctagagccaaaactgtaaccggacctggacccggactcggacatagacccacccggggattgggtccaaaacttgaacctgaacctaaaccaggactcgggacccaaacccgaactcagacttaaactcagactcgaacattgaataggactcgagacccagaactgggattgagacccaaaactggaccccagtctcggtcccacagctagacccatacccagagcgggacctggggcatgaattgaaactcgactgggacacgtgattaggatcagattttgtcacaggatccgagaactggggcttggacaagacccatagtcgatgtcttgatctgggactcggataaagactcaaagctggaccaatacgtggacccagacccagaccttggacccgaaacaaaaacttgaatcagaatgtgaccaggacccttgaacaagaccgggactgtgaccagtacctggacctgggcggggacctgaattacaccagaacccaacccaagaactcggcctcagacctagtccccgacccagtcccggacccagactaggaccgagacttgagcccaaaatcgggactcgatcc

SEQ ID NO: 139705 - DNA, 730 bp, Cannabis sativa
aaattttgaaaaattcggaataatataaaatatagaattcaatgtttaaacctgtttatttcacatgcgtataaaataaaatagtcacgcgtgcaacatactttttgaattgtattttcggcatgttatatctttttttttttgaatttctcaaaattttacaagatatcttaaataactacaatatatacgatcgtataataaaattggactaactaattttctagatatcgaaataaataagggtgcatcagtacactcctctcaaggagtgcattgtagaatttttcctaaaaaaaaattagaagctaaaacaaatacaggtacattggtacatctaatatcgtaacaaatatattcacttatcatttacttaaataatctcataacctaataatttaatttaaactaaagtaattattttatatattatttttaattttttttttaaatttacgggttaaattactctagtagtttgtacgtgagttgttatataaattttagttacaatttaaattgttttattaattactatatgtgttgctatatttattttcataaaaaatataaaacaaattattttaaaatgtaaaaaataaaaaaaaaaaccctaataaactattataaatgggaaatttgaatttgtatgcttgcatttaattaaaatttatcctcaaaactcataataccctatatttaaaatatatgacaatttttctattatgcc

SEQ ID NO: 139706 - DNA, 734 bp, Cannabis sativa
gacttaacttgtgaacgatagagggctatatatagtacttgttgatttgatgtgtggcgttttcgatatggtaaaattaatattaattatttacatttaaagcctgatttgactagactatacaagctatcaatgaagataattttgtcaatgcattggaaaaagacatttggataaacccaaccaaatgggcggattattcaaatttcaaatgaaaaattaaaaaaactaaacatgttcattttcatgatattactaattacttgatatttatatgtaattattttaataatattttaccattaatccgtataaggtcacattagtaaggtgtacgatctactttcaaaaccctagctcataccatatcaaatattaaaacaacaacagaacacgcaaaaatatcccaataagatttttaaattgaaaatatttttttcatatgttctcatcaaacccaaatatgctcccacggtcacgcattattgaaatttgattgtgacgtactgtgtacagactttgacgtacgtattttaaaaactttgaacatattcaaatacgctgcaaatgtgaggacttacgtagaaatacgttattagaatatataataaatcatttatatttggtaattaatttttaggaaccacttgcgctataaagatggaagttatttttgtgagtaatgaagggtacaaagttaggtgatatggcatccacttattttattatggaat

SEQ ID NO: 139707 - DNA, 873 bp, Cannabis sativa
aacaataaaataacacatgcaataataaaaaaaagttatgattatataaaattgaattataattaagatcaacaattgtatagattatttgtgttgagttaaactatcaaaacgatacaattgattttagaaatcattgtcgatcaaactcatatgtagtagcttttagtaatgttagttagtaaaagactctaattagtgtgtggtacaatttttttttctattcattcttaatttcaaattttgacacggacccctaccatgtcaggggtttgttccatgcatcacacccaaggagtgcgtctaccaccaaaggaaaactatctttttgttaacaaaactcatatattaatttacttaatgattatttataattttcaattaattatttttcttacttatttacttgatgaatatttataaatgttaattaattattttttactttcgaatttatatattaacttttaattaattttattttccgctcaacaataattatagcgagaaaagtataaaatatttaaattatttaatactacaataaataatacaaccaataatataatcatggtgtaagaccatcatcaacggaagcaacataaattgctattgggagacccagaggcgaaggtattttatggtgtgtggtggccatggccccccttcaaattttttaaaaaaataaatcaataaatatatgtataattaatctatttaacttactgctatatataagcatttagatatataataatagtataatatattttaacaatttattattatcaatatatttatggaaatataataaagattgatactaatgcctctctattgagatatgtaattaaaaatttaatttattaaatt

SEQ ID NO: 139708 - DNA, 757 bp, Cannabis sativa
gagatgtgcactgcagagtattccctgccacactttcagaagcctcacatcagtggtacttcaagttgtcaccaggaaggttcaactcttggaaagccttctcctcggagtttcatgcacagttctcttcttctcgccaactcccactgcatttagaagacttggtcgaagtgaagcaaagaccaggggagcttctttgagctcacataagcaattcatgacagaggccataaaattagcacggttaactgaagaaggaaagctagatgccatactgggggcatcgagattcttggatagctatggaaagacattaagaaaagtggtcatgtagactctatgagtgattttcctcgaccgagcagatggtttcatcaagcttgaagaagccattcaacgggcagatgtcgagcctagaccgggacaaccacaggctccttcagttggaacatctgcccaaaaccctcagtaccctagtagctcaaatcctggcggtaaaagatctaatcacaacggcagaaaaggcaatgggaaaaagggaaagttaacaggaaaagccgaacagacccctaaagagaatccttccaagttcattgctttctctatctcgactgacgacttggagaccatttacatggctacgcagtcgatagtcccgtacaagaaacttgctcccatgaaaaaggacataagtaaacgggacatgtccaaattttgtcgttttcatggaaattatggccatgacactaatgaatgc

SEQ ID NO: 139709 - DNA, 678 bp, Cannabis sativa
aaaaaacatgttacttttgtattacaaccagcaaaaatataacacattaaactaaattcaataattcaggtgtcaggttactttaggaaacatcgggttagtttttgatgttgctagtaggttatatgtgtaaaaaatgtagcacgtcagctaaaagcaggataaagacaaaaacagaaacatgttacttttgcattaaaaccagtcaaaatgtagcacactcaaccaaatttaatattctagttactaggttactttagaaacatcgagttacttttttatgtttccaataagttaaatgtgtaaaaatatagaacattgaccaaatttaatatttcaggtaccaagttactttagaaagaaaaataaccagacctaaaatttctttaagtgtcaacaaggtctgtcaattcatgaccacagcttattcattcaatatacctgcaactcgatgactcttatacttgtgtatgtcaatgatataatcatcactggtagtgatcctaaaaagattgcaaccctggtcaaagctttggattcaaaatttgctttaaaaaaccttggcaatcttcactattttcttggcattgaagttcatcataccaaagaatgattgcatctgtctcaagctaagtatgttagagatttgttgtgcagggctcaaatgcaagatgcaaa

SEQ ID NO: 139710 - DNA, 645 bp, Cannabis sativa
tagtagagtgggacggtttatttagacattgggaatgttgggattggttgggaattagaatttcccaaattaccccttagtgccctttttataacttttagtgttgaaggggtaaaatagtcattttgcttgtgtgagttttgtcttttgtggatttttattaaagttcattaatgtgatttttagttatgttgtatgctgattgttaagtaaagaaaatcaaattcttttttcatttttattgaaaaatcaaaattagacaaaaggttgcttttttctcaaagtctctctctctctctctctttcgaactcacctagagcagctgggttttggttgatttctcttcatttcaagctggttttagcaagaaattgtgatctcaagttgttggtaagactcttgtagctttctcttaagtttcttgagttttaagaaaaagatgttttgcatgctttgaggttttattggatatagttgttgtagttgtttgttgttgaattcagaggcttagtgttgagtttttatgttgatctatgcatgatttggtggttagtaggttgtttgagcaagctttggagttttgaactcatgtttggctcattagtggtgaaatgttgttaccatgtatgtttcattaacatcct

SEQ ID NO: 139711 - DNA, 529 bp, Cannabis sativa
ctccaaaggtatctgatttttctttgaggaagtttacccaagtgtatcttgagaagtcatctacacacaccatcacataccgtttccccgcaatgcttgcagtttgcattggacccattagatcaacatgaactaattccagtactttggaagtaaggagggcatttataggaggatgagaggacttaatttgtttaccttgttggcagggaccacacaccctatctcttcccaatctgaattcaggaatcccacggacagctttgatggaaacaatcttctttaagtctctgtagtttaggtgccccagtctgtagtgccataaatcaggtttatccaagaacaccctgtggcattttacttgattggtcagaacatagcagtgatcagccgttctgttccctccgagaactgttttcccatcagatgagactaagcattgtgtcttggtgaagttcacatcatagttagcatcacatagttgactgatgctaattaagtttgctttcagtcctttcacgaatagcac

SEQ ID NO: 139712 - DNA, 779 bp, Cannabis sativa
taagtaaatctgattatatcgaaatgtgttttatttagggcacaaaacccaaaagttagggtgttacaaaagtagaccaggtacctcagttagcgaaatgtcgcatcctcgcggcaaccttggaggataacgctcatgactggtttagccagttgcctgaggcatctatatcgacttgggaaacctttgtggatttattcttgacacgcttccaagccacgatgacgtataaaccgccttacacaacccgggctaacatcaagcaagaagtcgatgagtcattgtaggattactttaaacgttttaatgctgacgtaactaaggtcgagaagactcttgagtcttcgttagtttgtatgttgattacaggtatctttccaagaaccgatttctagaaagagttacaagctcgaaaaccagaatcattagtagaattcttcgccatggttgagccgcataagagaatcgaaaattctctagctgacctagaaagagggaaggataaacgcgagtcatccgtaccacggtcacgatctcaaagtcctagacgaaagaattcaagaggaagaagctcgagaagacgcagccctcagaggcagtgaagttcgaagctagccaagtccccctcaaagaaggaaacatctccaaagagaaaaggaggaccacaatttgtcaactatactgaactagcagtcccttgcgatcatatttacgcgattgaggagaagaatggagtcttcagaaagcctcccccgattagaggaaatcgcgacaaaaga

SEQ ID NO: 139713 - DNA, 512 bp, Cannabis sativa
atagattaactattcaatcaaatcagcaataatagtaaaaacttcactataataagaccatagcaatgaaaatgatgacatcgctaaaatttgttttggggatcccctattacaaaagttttacaaaaagggatatatacaaaagtaagtcaaaatacacattaggtacaactctaaatagctcctgacaacttgaccacacaagcaggataagtcgatatgtacatttaccgaagaagattgtcatctcatagttgtcctagttttcccttgcctttacctgtaccacaaagtacctgtgagaaacaaagactcagcaagaaaaacaataacaacaatcatataattcatcacacgaatatcagcaagtaaactcacattaccaggatcaaacaattatacattactcatgtattcaaatctaggtctgcatggctactcaagcataatgaataccaatataagaatatacagttatacacaattaccagtctaacaataataactataac

SEQ ID NO: 139714 - DNA, 1385 bp, Cannabis sativa
gtaataaccctaatccaggttacactactcacatatatcaatctcaatataagtgccaccgtgcatattctacgggctaactactgtcttacctgttgtcccgcaaaggcagagattccaaatccccgggtgctcctgactaggtgccggtaatcctaatcacacaatctgggattttcacaaatagggttaacccctgatttcaaattcataaaatatattcatgtcatttaaaacacagataatcacatagagcttggaacgagctttccaacgatataaaagaactcccaaaactaagtcctgagtcaaaagttatggccaaaacaaaattcagcatttcccaatatagtccaaccggaattccggttggaacaaccctgaacaaaccggaattctggttgtctgggcagcaacaacacgaaaaatttcaatctttaagcccccataacctactcaaatcttccccaaacactaccaaattttccagagcatcaacatatgacatattaaacatattccatagctcaaacacaataatttaactaaaaatcaaaaggggccattaaagctccaagcttgagttttacacaaccaaaattagagtatacaatcaaacttcaaactcaaagaaaccctaaaaatgcctcagaatttaccaaaaaaaaatcccacaactatacacaaaatcatgactttagctcataaaatccaagctcttgaacttgagcttaaaaccaaattatttccagtattttactgccgccacataccaaaaatcacaaggatttcaaccaagagaaaaacctaaaacctcagccacaacttaataaattaaacctacaacaatttcaagttattcacacccaatttaccaagatcaaacatcaaactcaacaacatgcataaacaagaataccacactcttttcatacttttcttacaatatttttaggaagaaatttaattaaaattcagtaggaaaaactacctcacttcaaattcaaagctagactccaccaatctctgaaattcaagctccaaaccaagcgagatcactccaatttcaccaaaaaatcaaagttgaaaagaagaggatttagagagagagagaggggtcgagtgagagggataaaagcactagaattcgcttttcctttttctcaaaattcaattttgtcaaacttagaaaataaaggtcaaatgaccattttgcccctagcgccaattaatatgcataaacactttcaagggcataattgtcacttcgtacacatttaattccaaaaatatttcagattatcaaatatcaaataaaatgccaacatttcatcacaaattgcatttcgggcccgaacctcgttcgtcccgaaatacccggttgt

SEQ ID NO: 139715 - DNA, 614 bp, Cannabis sativa
actgtgcatattctctgtttttttcggttctcatctcatgttcttatcatatacatatttagacattgaggacactgtcttattttagttgggggtactgcgtatattcttgtgttaagttggataaattttttacctttttgaaaattttgagtcaaattctgatgctaattatgtgaataaataaatattgtgttagactagtttatactatatttagttaattagatagtaattccagtaaaaactgcacaaactaaatatataatttgattgttttaaacacatttaattgagaaaaatcttaagttaaaagctttcattttttgagagaagtgagaattgagaaaacgacttttcgaacatatatgatcttctgaattggtaaaatcaaaatttttgaaatttgaaaatatgataattactagagggatacttaatttagaattgagcctaattgtaaattttttttatcacacatgttgcctcttgtttaaaaaaaatataaatatatattgtggatattgcccttaaaaaaatacatatatatatatatatatatcttataaagggcaatatcttacatactatatacaaaaaaaaaaaaaagaaaa

SEQ ID NO: 139716 - DNA, 588 bp, Cannabis sativa
  modified_base (50)..(64): a, c, t, g, unknown or other
tttaacatagtattatataaaaatatgatatataatccaattcaatatannnnnnnnnnnnnnnatacgacttaatacggcgttccaaacgagctcttacagtagcgatttgtgactaaacagtagcgatttgtgaattcaattggaatacaaaatattttcataaaatatatgtatatatattatatagtagtgcacatgcacacgttgaagttagtaaggaaaaatagtagcaggtaggggagtttgattcatccaaagcaaaaaaatatatatttatataggggtcaaaaacctactaccatacaagatagagagagaataaaaattgtaatgtagctactaccatacaagcaaaagatatatacatagtgttatcgacacatgaattttggtcaataattcttaagggtaatgggattaccattctcatcaaacaccaagatagagagagagatatatagaataaatattgtaatgtagatagttttgtatgttagggtttataaaacacttaaagaaatatataaatcacagatctaaacatattcctaaagtgctttaatatagaaaaccctaaatcatata

SEQ ID NO: 139717 - DNA, 609 bp, Cannabis sativa
ctcttccgattcctcgattggtttcaataggtatctctcatcttgaactcgagggtcaagatcttcatctttcttctcgttttcttctgtcaagatctccatcaactgatgactggctttcctatgctgcagctcaatgcgatagcaatcgcgatccgcatctggtcgccacgcaccactcccacaccattaggtgtttggaatttcaaggataggtgcttaatcaaactgactacccctagtccgattagtgttgggcgacccaacaatatattgtaagctgagagcaggtcgacaactaagaagttttgcatatcagaagcagataaaggtgtctcgcctaaggttaatgcgagcttgattatgccaaggctagcgatgctatctctggtgaatccgcgaaggttcaccatacaaggcctcaatttggccttttcgagccccattttctgtagagtctccttataaaggatatttaccgagcttccattgtctattaacaccctcttaatccttttattgaggagttgaatggtaatcaccaatggatcgacgtgaggatatctcatgtttttctcatcctcctccgtgaatacaatgggaggttcc

SEQ ID NO: 139718 - DNA, 504 bp, Cannabis sativa
caaccaacagctatcccatccccgttgtccattgagcccgctctgaataatcccccttttgccgaattaatgccgatgtaatcataaaaggctaatttttcaggaattttagaccaagcttaaaaattctaacttatgacttgatgtgcttactaattagtcttgatcacttaattaatagtttccctaatcatatattatcaaatatgagtatgtcgatctttctttttaaatacagagctaactctaacattaatttaaactctgtgtctcctaatttgagtctagactctattcgaccttcattcattttcttaatacattttctagaattgaacacttgagctaactaaaaatatttaatacatacatatcatcttgttacactatcaaatttaaattatataaatactataaaatttacaataaagatataaagatataatattatatataattagcctaacattaataattttttaagatttaattttgcgttaataa

SEQ ID NO: 139719 - DNA, 874 bp, Cannabis sativa
aaagttaataaatctaataaatgccaataaaaacattaattatcacacagctcattcttactgaataaatagccatttaacaagcaagcttatatatcacaaccatatcttagatatgtgatagtcatacatatcaatggacaacaaattttatctaaattcatgtcataacagtataacaacaacaagcatcaaaacatggaagaaatattataaggagaagacatatcaataccagctgtaaatatgaataattcagttatagaagacaagaagattaaagtcaaaccatatgccaatatctgtatacatatagaaatcatgttatgatgtgagtactaaaattaacactcttgtcataacatgacaaaattataaagaataaagcaacatactttagactaaaatcgaaaaaagaatagtacctattaaatgtgatgaatcttacaaacttagtaatgcacacaacaacaagcagctcaaagataggaaccttttccctctttctgcccaattgaaaacaaaagagacgcatgaaataaacccacattcacaagaaaaacaatgaactaaaaaaacaaatgctgccccaaaccctaaaacaacattcaaggtaatatgaaaatagctacaaacctaattgcatattggctaaggccttcaagtatattacctgttcaaatagtccctttggcaaaaaagaaaaaaagttgtacttggtagttgatatagaattttcatgcaacaatcgaagcaaaataaccaacacaaagttaaacaattgaatcgagatgccaatgaaaaaacagtgaacacagtaaagtcaaatctcaaattttattagttgtaccggtgacaacgagagagagagaga

SEQ ID NO: 139720 - DNA, 648 bp, Cannabis sativa
tgactaaccggaattcatctggaaatacattgtataatgcaaacccaccatttcaatttttttttttttgaaatacaaaggttcttgattaaacctcttgacgaaagtgcagtcgaactattataactacctaaccaaacctttttgatgagaaaggggtcaaatcgttataagaccttgatcaaacctttttgacaaagaagggattaaacaactataattttttatttataacctatttgacgggagaggaaaatcaaaagttataactcgcaaataaaactaaatactaacaggtctcgcgagctaggaaagtactaaacgaggcatcacaacgccttgataaaagtacttaatctagaaaacgaatagataatataactattcatgcgatcaaattaaaatacacaaagtgataaaatccttaaagtatatttaagtttgcttaaggcagattataactgcaattgcgaggcagaatttacaaccgctcgaaaatcataaactttggtagattactaactacttaaacaagaagattacgagaaatatatttgatcaaaatatagttgtttacattgtgaataataacgcaagaaaatacaattgtattacgttcaaatgaaaatagtacaaggcatttaagat

SEQ ID NO: 139721 - DNA, 559 bp, Cannabis sativa
aaatgtataatttttttataaaaaaagaatgtgcattatgtaattatttctaaaaaaaaattgtacacacttatttttattttttttttttaaaaaaaacatttttatagaacaataaaatcagaaatcatatggttgttacagataatgcttactgctattgaagaagttccaattatactagataaattacgttacatttaaaataaaatatgtgcttggatgttaagtggtaaatacatgtcaatttctattgtcatattttaaagatagttagtaattacacaataaattaatattatataatatttaaaataaataaaaattaatctcttcataaaataaacttaaatttcataacaattttgtaacaaatatttaaaatgatttttatctattaagattactttataccttagaagtttaagtatctatcattcctatgttaattaaaaattaataataaaataaatttaagtatttcatcaattaaaatttatgttaagtcatgaataaatctattagatatataattaagtaaatagtggcataagtactc

SEQ ID NO: 139722 - DNA, 807 bp, Cannabis sativa
attattaaatgatcagattgggggaggaattatagtacgtgggaagcacaacctctagaaaatactcaggacatggtaacacgtagtttaggtatatgatatacacgaaatctaaaattattgactttttttttttttgagaaaataaaataacataattgactttcacatatatgtacaacatttagaaatatatatgactgttattgaaggaatttagacgatgggaaatttaatttttcatgaatatattaattaaggtaaaattagttagaaaagtaaaagtattggtaattagtaaagtgtgtcaacatttagttatacctcaagttaatgcagatttttgttaattatattaatgcttaaatcgtgattgttttgtacagaaattaatagtagtaaaaaaaaataaagaacacaaagcttttttttacgtggttttgcagttaaaattctgcatagtctatgagtctatcttattagatatttttgatacaatattacggctttttcgcttaaggattttccatccttttttcagtgtatcctgctcctatttattgttacataagagggtagttaattacaaatcaaactgatatcctacaacaataatcccctaaaattatgagattaatcacgtcccgcgtaaaataaatgcatttattatttgaaaatcacttagctgtgattggtccgcttttactgggttaatgcatatgtgtattaaaaatgttgcaaagtgtatcgtgttgggacatctcgctgcgaacatagcaacaataaccctggtagcgagctagagct

SEQ ID NO: 139723 - DNA, 738 bp, Cannabis sativa
ataataatttcacaaatcactattttacccttaagaatttatttcccatagaaattaattatcactcaaaatccattcatcaaataaaaccttcctctgtacaatgttgtatagaggtgactcagggactatggacctttattttaaagctccaataaatccaagattactatgaatctcctcaatagaataatctgatttattaattctatttttgctccactataaatatagaattgcactctttgacaatataaaattatatttatagaattcttacttgtagtctattgatataatgaatataagtacactactacaattcgaccttttagtaacactatttagtgacacacataaaaaaactggtcactaaatagttaagagtaatttttagtgacatgcacaatgagactctaaacatttggtgttaccctcttgtaatgtgtgtcactaaaaatatagagtgttactaaagaataaaatatatattttttgatttttattaatttaaaaaatattggcctatagtgacgcgcctggcgtgactgggtaaatatattccgacacacttggcgcgtcattatatcataatcctatttttttttttaaaaaaaaacactgtaattaataagtaaataaaacaaataaaaacttaaaaaagaattctgtacgttttttttattaaaaaaaaaagagaaaatacctaatatatattagctctctctctctctctct

SEQ ID NO: 139724 - DNA, 840 bp, Cannabis sativa
  modified_base (50)..(52): a, c, t, g, unknown or other
tatgaagaggaagagtcgaagtatataatccaggacattcgcgaaatttnnnccacccttgatgaggtttttgtgagatgtcctcctcaagatcatgagtttactggtgtcaactatgctatctctggcgccaaccatgctgatactgaatcaaacattggctcagagaatgaccattcttttgacccatatttcaaacgggtgaagcgtgtaaagcatgatgggtctactcatattgaatatgtctccttcccacttactcagagtgtagagatgccaccatctaatactcgctttgaagcttccagctctagggatgaagaacttgttgactttgatgggtctgatgattatgccgataatagatttgacaatgaggcattacctgaagaggcaattgattcactagaacctgttatttcatcattagttgtttttcccctagtctacctattcctttaccagatccaatgttggcaatgtcagcttcagcaatcaccaaccccgacttgaatgagcacacaaaaaggtttgtgattgaatgtatgaaaggcatttttcatttgttatcttctcctttgacaacaacagacaatttaaaacatcgtgctgacgtgggtatgcaacttgacatgtcgagtaccctttgcgggcattataaatgtggcttagcagaggttgcatggttaaccgaatctgtcaagaaaagtctctcgcttatgctcaacttgttgagaatgcccttagtcttgatgaatctcttattagggaccttcttcgccgtgatgaggataattcggcagctatagatcgtttgtccatattgttggaaattatttt

SEQ ID NO: 139725 - DNA, 759 bp, Cannabis sativa
attcgtggctcatcttttgaggttcaaatatcgtcatctcaataaggtcgagagttaatccttaaacccaagctcactcctcaatggaggatttatgtattttttaatgatacattatttaataaaatttataaataaatttaaaataaaaattatatcaaaacctataccacaaaatatggtgtacaattcgctaataaaacttaaaaattcttaacacaactttgccttatgattaacgattcacattcatgcataaaacaataattccatccattcacaatatatctctgtatatataaatgtataaatactcaacacaatatttaatttatacaattatgaagatagctcggatactaattattagtttttatgatccatattaaagttagaaaattgtagaagaaaaatttgataaaaatagttttatctaatatgaaccataggcccaaggattccaacataatttatatagattaaatctaaactattgaaagaaagattatccctcttgaagtctatcaaagtatccttgtttctttttatataattatcgaacatacaatccaagaactttattaaagaatcctcacattgatcttctaagccaacctcaacactcaggaatagagtgggctattagatcttatttggatgaataaatataagtattacagtgtgtactcaactgttgagacactataattgagacaagattttgatctcacacacacctgaatagaagggcgtgtgaga

SEQ ID NO: 139726 - DNA, 563 bp, Cannabis sativa
cggttaaaccctctcaattatcatctcgcttacatttaactttccaaactcaactttcggtagtaaaactcttcaaactacaaaatcattagcaaatttaaggtgccatctatttttcatagttaactgtcaacttgaattacttatgtacatgacacgtttacattgatacatctaatattattatttaaaaattataaaaaaattataatatatattttttaaatatttttttataattttatttaatttaaaaataattttttaaataataatattatgtgtactaatataaacgtattatgtgtataagagtatacatataagtaatttatgatagcagttaaccggataatactttagatatactaacagaagtttagaggattttaccgctaaaattttaacttaaagaattaaatgtaagtgaaacgataattatgagaatttagccgccaaaaattcaaattattttaagacaataaaaaattccaactacccaatagtgtatataatgtaaattagcttgcccaagctatccatatttgactaaaatattagta

SEQ ID NO: 139727 - DNA, 1742 bp, Cannabis sativa
  modified_base (1681)..(1694): a, c, t, g, unknown or other
gcctaacactccaacaatgtacgccatatctggatgcgtacaaacttgagcatacattagactcccaacaactgaagcgtagtgaatcttttgcatttcttgaatttcaagaaaaagggacggaaattaatctttgaggaaagagatcactgattgtaatactatatcaatatccagaaatatctttaataagatagactcgtggactatgcagagttaactgtaaaatcacgtaaaaaactttgtgtggttattactattattaatttttttttttcagttttctaatatatctgtgtttaaattattacgaaaaaaaggctcatttttcgttaacaaaaatctcgttaacaaaaataaatatcaaatgaaaatacatttctcaaaataatgagctttagttataaggacatttaatctccattgtttgtcctacattgttaatttgtttaaatataatctcgagatgctagactttatcccccttatggatggttcttcgttgaagcatttaacaccataaagatctcgaaagataagtattttctaagtttccgtctctattagactctcccctcgctgactacttagagataaatttacaaagtacgaaacaatggtggaagctcataaaataagaaatcttgactctcgccaaccgggacatcattgaattcttattttgatcgaataaaatgttgctagaatggtgtccattttagatgagcttactactctattcaatgaatgatatttttgactctcgcctatcgggacactgtattagtttgttggaaacgttggaaaatatttaagatgtgcttgttttgtattttcacatgtctttgttacttgctaaatatatgataatttctaaatgtgcatgaatttatattgaacaatgttattttctattattcattgtagttataaattttgggtcttcattgttgatctaacttaatttgttatttttaatgagacaaataccaaaggattgtcatccgttagacaaacataatagtgttagatctcgatagataaatatttataaatgtaacatctagttgtacatccaaagataacaacttagactagtgtttgaaatatgaaataatgaagaatttataaaataagaataattttgactctcaccttccgggacatcgttggactcttattttattcaaaattatcctttattagtatcctcttagcttattcatttcaaatttgcttaaatagtatatcattggatgaatggtttgtaaatcatctgcttatgatgtcactctaatttcttcttatgaaattgaatggtgcagatgactatattcctgacattctattctaaaatgatataaatcctcgatcttagaaaatctcctacttatatatgcttacttgaggcaacttaaacttagagttagattagtagtggtggtccgagctagaataattactcattgtatatttggtatacttctaagttttttactttaaattttagattccaaataaaaattttaaattttagtttcctagaatacattggacaatacagtataacttttacaacttattaatattcattttctatcaatggattcaaactttataattatgtatggattatgagtttcgtattatgtgaccaggatccacttagactattctaagnnnnnnnnnnnnnnactagacctaagtcatcaaaagaacacaaccacataatatatatctat

SEQ ID NO: 139728 - DNA, 534 bp, Cannabis sativa
  modified_base (170)..(171): a, c, t, g, unknown or other
aaatatattttaacaaattttccttttcaatttatcccgccggtcactcaccaacgccacttttaaatgaaattaagataaaatattaacaattagtctctctgcttttgtcgagttatacaattcatatcacacaaatacttatttttatatagagtaatttgcggcannaatacctaagttttatgccgagtagcagataagtacctaagtcgtatttttggcagtaaaaaccttccgtcagtagtgtggaacttccgtaggtatctaaccgttatgtgccaaatcagtatgcacgtgtcactcattcattcgtctatatcattaaattttttatttatgatttaaatatttatttaaatgttcaaaaataattttaaaaatataaaaaataatcaaaaaaataaatacaatccctttatttttttatttttttatttaaaaatctatataaactttttacaatcattttaaaattaaaaaaattattaatagtactttccaaaaaaaaattattaatagtcatttagatat

SEQ ID NO: 139729 - DNA, 541 bp, Cannabis sativa
gattttagtctaggtccagattagtctccgagtgttggttcgcgccctgggtcttggtttaggttgggtccgagtcccaagttccaatctcaatctgaatctggattcttttttgggtctaagttcttggttctgatccttgtctaggttcgagtttgggtccgggtccgggtctagctttgggtcagattctaggtgtgggtttgagttcgggtccgagtctttgtctgggttttatcctggtctggaccccgatatgggtctaggatcgggtctatgtccatgtttgggtcttgtctgcgggtcctggcctaagttccagtctcagtttcggtctgggtacacgactgtgtcctagcctatgttccagtcttagtttgggtctgaggctgaggctaggtctgtgatcggttataggtctgggaccgggtcctgatcacggttatagtcttgttctagggtcctagttcggcgattcttattcaggttcgaattttgggtcccaggtataggtcttggtttgagtttggttcttcgtctg

SEQ ID NO: 139730 - DNA, 681 bp, Cannabis sativa
tcccgccaagttatttctacatcagcatccttcagtattttgagttaagaagtcaagaagaatctatgtctgaagctgttaacccaaaatttcgttaacaataaatgaagctttgtaaataaaagaaaatatgtatcgttaataaatatatattgtaaagttctttttggaaaattagttgtcaaatatttttagattaatgtgtgtttttattgtgaaaataaagtgattctatggtgttgatttcatggctctatttgatcttttcttgtaaggaaagttttattctcagctgacttaatttgtttagaaaatttctcttacaagagaaggaattctcttatgtaaagttgcctaattttgggaaacttgacttttctttttctaattgttgaattcattttttccattattataacaaatcaaataaactttatttggtaggtattaaagaccaattcgtgatcttggtctattttggaaagttttctttctgctcttgatttgctgcagcagaatctgaatttaatgctgcaaaatagggacttttctatgatagtcttgtaaaactttgaaatgtgtttatggctatctgcagggtttttatgttctaaaaatgaacttagagagcagccaaacgtttttcatctcttccaacttcatttttcatattttcatctt

SEQ ID NO: 139731 - DNA, 617 bp, Cannabis sativa
atctgagaagagttagggttaaattgataatctgtcatcaccagtagggagagaattataattaacattagcaattgagaaactgaactaacatgtcctaattacttatccataaataatcactcttagttattattttcttgttagcttttatttttatcacaatcataaaattgtcgatttgccaaatagaatcatagatttaatctagtggtattcagtccaattccatgtagttcgaccttacctgtgtgagttactacttgattacgtatattgcgtactgtttataattttcgtaacagcaattgaaaaaacataaaaggaaaaacatcaataagattttcacttaaaatattaaacaacaacaaaacaattaagaataaaagaaaaaaacataaactgaagtaccttgtctttggagacataaaaaatcagtctttaaaattttgaaagtgggctggctactacaagtccactgaataatccttataataccaaaaatttctttttggcagtacttaccattcatgtatttacaacactcataaaaccaaacttgaaatacatgaggacaaccgatcaaagtatataatacactcggcctctttcctaaa

SEQ ID NO: 139732 - DNA, 732 bp, Cannabis sativa
  modified_base (28)..(41): a, c, t, g, unknown or other
ttttgttatgactaaaagtcacatttannnnnnnnnnnnnnatgttgtgactaaaaaattgtcaccaaagataacagttttttgtagtgtatattcaaaagatatatatatcaaaaattaagtttagaatcctatttgtactattttgaaaaatatataaggtttattttattatttaacaaaataaaaaaattcaattgataattttgtaaaatgcctaaaataagtattaacccttatttaaataactaggttgatgttacgtgcaatgcatgtataattagttttttttaattaggttcaattagttgatttaagtgcaatacatgtatgtttattttttttaattaagtaatatatttttttaatttttaaataaggtttgcgtttatcatctttaagaaaaaaaaaatttagctattgctacattggtgtgttatttagatatgattatatatcaacgtattttttaattttttaaaattttcttaattaggtaacgtatttgataatgcatctattgttatttactatattcttaaccaaaactcagataattaaatttgagtgtgtttatatataggctggattcataaatttgatataaaggttttttattcccaaactttacgaaaaatatgatgtatgaatcggtttacaataactaaaatagaaagcaatcaattctttattacaaccattttaatttaagatataaaataaataataata

SEQ ID NO: 139733 - DNA, 630 bp, Cannabis sativa
aaataaagggtagtggggagcccacttcaatccaaatcaatgaaaaattgagtaacaaaactgcccaggaatttgctgataccagcccagttgatacagcaacgggtcaacaacctaacagtcagcaatccgcaccagtatgttctagtcctaaaccaccccttctatttcctcaaagatttcaaaaatagcagcaagatgggatattcaaaaagtttttagatgtgttgaagcaactccatatcaatattcccttggtggaagcattggagcaaatgccgaattatgtcaagttcttaaaagatattatgacgaagaaaaagaggttaggggagtttgaaactgtagctctcaccgaaggatgcagcgccatgttaaaaatcaagattcaacaaagttgaaagatccgggccgcttcacaattccaatttctattggtggtcgagatgttggaagagctctttgtgatttgggacctagtattaatctcatgcccatgtctattttcaagaagttcagaattggagaagcaagggcaaccaccatcactttgcaattagcggatcgttccatggctcatccagatggaaaaattgaagatgttttggtacaagtagataagttcatctt

SEQ ID NO: 139734 - DNA, 532 bp, Cannabis sativa
  modified_base (26)..(26): a, c, t, g, unknown or other
ttacaattacagtgatgtcaacacantggaatgtgattgtgattatatacttcaaaagatatagtccctgtttcatcagtgcattggatttacactgatgttgtgaagactcagtttgactgaatcaaacggagtatatatataataaataaattaaatataatataatatatatatgtatattaaaaaaaattattttatatacagtagcagatcgtcctctctctctctctttctctatctatctatccttttctctctcttcaaactcaagcacaaaagaaaacccaccatcaccaccactccggcgaacaacctctagccactgcccgaccccacacaccaggcagaacgggactctaggtgccggtgacctcacccctcaagccccgccgctccttttgccactgttaacttgggatagcaagtcaaagtttggggtttcaaactttgaacggattttccggtcacctccggcatccgtttgacgaatcttcttcaccactaaactcagctcgtcaaggagaacaac

SEQ ID NO: 139735 - DNA, 1133 bp, Cannabis sativa
  modified_base (306)..(307): a, c, t, g, unknown or other
  modified_base (561)..(567): a, c, t, g, unknown or other
agagagcaaagcctaaagagcgacttcgaacgattcggcgtcattggaaaagattgatgtgtggcagttctgaaggtaaacatactcttgtgcaaaaatctgaagtttacaatattagaggtaaattttcgtcattcggtacgagggctctattggatgcaaggggtggacttgatccaatttgaagcacgattgaggttcaaccccttctgatgggggtgcaagtaagtctccctttccgtgttttgtatgacacattggggacaatgtgtattctaagtttgggggaggggacttaaaaaaaannaattgttttagttattctgttcttttaagtaattttgctttagttaattctttttatttggttgctagtcgattaaataaattgaatatagttgtgtgctgctgttaattgtgatatgtcttgaaattttgaaactgtgtgcttaattcttttcactctttggattagtttggatgcttgtgaaacatgtgtagggatgcaatttgagatctgtgaaatatgttataatggttttactatggtttgtggtaagnnnnnnnggatagcttagaacttgcatgtcttattctctcaaggcaaaatccttgacagcattcaataggaacatgatttaggcagttgtttggatagtttaagtctttcaagcctaccgtaaaatgaatacccttagtaaacccttttgagcctaaacttgttttgtttcttcactctttgaaccaaaagatgtatccacactgttgtttttgtcttcaatacatttttaatcatatcataagctttataataagtttgggggagcaaaatacatagtgtgtgaaaggatagaagaaagaaaacttgtgagattgggaaaggaaaaaagaaaagaaataattgtaactcggcatcacttgaaaaaagaaaagaatgaaaaaaaatcaaatataaaagaaaatttcagtgatgtctagtgattgaaaaaaaatagaaaaatctcaatcatggttagtcgtgggaacacttcggtaaattttaaaattatgagaagcttgtgggttcttttgtgcttaagatatctttagccaaaattgtctttcattttccaaatatctaagccataaattct

SEQ ID NO: 139736 - DNA, 579 bp, Cannabis sativa
taggcaccactagtgcccaataacaatgctctttaagaaaaactatattctaatattctaaaaagtgtgctaaatttgagcattgagtcaaatttaactcacaataaatactacttttttttacctcttataatgccactaattattataattcggacataattttactaaactttatattcattatttaccgtattaccattatttaaataataaaagaataaaaaataatattttttgtatgctctcaataaaataggaaatgactatcaatataattaattattttttctttattttacatcttgtacattggagtacaattgtaaataatgggccaaatataacacactcatcttttgtaccaaatttagcacaaattttagatctttcattagaaatggtataatgtattattgtttatttttctttagcaaagaaataaaaaaccaaatcataactatttttcttcttttttttatagtctgttttatcaggttgtagtgatgaggaatgcatgaagattttgaagaattgtagagaagcaatttcaaagaatggtggaggaaaggttctcat

SEQ ID NO: 139737 - DNA, 1332 bp, Cannabis sativa
agataagatacgcccttcccacccttgaattctcttccgaagcttatccttaagaaaaccaaggatagcattcttatttctcccaaccaaacacgacagaccaggtaatagccattttcatcggcctcgtaaatttccaacatagcacaaatggaatcccgcacctcaataccagtattattgctaaaaaacacagaagacttagagaaattgattctttgccccgaagccacctcgtgagtatgcaacaactccttcacattgtacgcttcttcctcagttaccttacagtaaatgtagctgtcatcagcaaagagcatataagagattaccggcacacctcgagcaactttacacctcgtgagtaagccactttgttcataactccgtaacaaactggagaaaccttcagcacaaagaataaacaaatatggtaataaatgatccccttggcacaaccctctttgaacaacaatgggccacaactccttcccaccatgtgaaatggtataaaaacagaacatacacattgcataactaaattaatccaacgaccatcaaagcccatctttaccatcatagctaggagataaccccactcaagcttgtcataggctttgctaacatctagtttgagtgccatataaccttccctccctcttcatttcctctttaaatgatgcataatctcataagcaatcataatgttgtctgagatcaaccggccttgcaaaaacgcactttgagtatcagatatgatagacgacataacactcttaagtctattagcaaccactttggacataatcttgtacagcacattgcataatgcaacgggtcttaaatcccccatattcataggctgcttctttttagggattaagaccaaaatggttttattaaggtttgtaggaagagaaccattatgaaaaaactgcttaaccatattgatgacatcatccttaacaatcggccaacacttctcaaaaaacccgaggtcattccatcaggccctgggaatttatccggatgcatttggaacaaagctttccgaacttcttcatctgaaaccagtaatagcagcttagcattctgctgggatgatacacgagtttgcacgctacttgtgacttctctccagtcggtttgggaagagaaaaaaagttcgtgaaaataagaaaccataagatcatccaaatcactctcccagtcaacccatgcactcgaatgatctttaaattttgcaacaaaattattccttcgtctcatagttgtagaagcatgaaaatacttgctattattatcttcctcttgcaaccacaattgcttcga

SEQ ID NO: 139738 - DNA, 535 bp, Cannabis sativa
ttttttgaaaatattgagattcaactattttcagggatcaaatggaatttctcaacgggcaaaaggaggacccagtgcccaggttgacacttggagttgggccctgtgcccaggctaacatattatcaacctgcgctgttttcgatcaagttcaccaaaaagtgtttcaggcattttttctatcatcagaaataattacaattcaagtaaactcaaagagaaaaccacaaccctgagaccttggaaacggtgcccagcacctaagttgacaatcaacctaggacggttccttcaattgctcaaatgccaaatcggatgcgaccattgaatttggaatgatcaaaaatggggtaggataccttttccacaagtttagaagccttgaaagtatcaaaacgagatcttgggagctcgggaatgggtacctagcgcctatgttgactaatggcctggtgcgttggattttgcttattcgattttgattgtgtttcgaccatccatctagttttttacaataattaagatccataaagtc

SEQ ID NO: 139739 - DNA, 588 bp, Cannabis sativa
  modified_base (185)..(188): a, c, t, g, unknown or other
agcttcccagataagctttgccggcgcacaactgcgccggcaaaagttggttttcttgtagtgcatggtgtgtaggaaaattgctattatacacttataaagtttatttggtacattttgttgtattatattgtattgtattatattatattagtcctataaaaaaattttatttttagtcacannnnaatttgtgactaaaagtaaaaaaactatgattaattatataaatcttaatttttatgtattaatcacaaaaacaatttactgtgactaaatgtatttttagttacaatatttatcgtaactaaaattaaattagtgacaacttatatctaaataataaaattaaatttaaagataattaaaataaagctacttgatttgatttgtaaaaataataaaataataataataaaaagctacttatttttatggttgaaggcaatttaagtaagaattataaaatagaacaaaaataatataaaatccgagtaatttgcggcaaaatcccctcaactatcaatttacttgcaaaaaaccatccaacttcatattttggtgggaaaaccctccaaagtactcttt

SEQ ID NO: 139740 - DNA, 562 bp, Cannabis sativa
aacacaaagcagagcaactcaaaacaacagtagaacaactaaaaaataccagtgaaacttaacacagtatactgcagtatgaaatttataaaaaaacactgtaaaaagtaaaaaattccgcctgatagtatttttgtaaaaaaatggcaaaagttagtatacgatctaaatttccctttataaacaaggggtaatttgaaaaatgcctcttttattaatcaattaatcaaatttaccttaaattttatatttatttgaaacatacatttttttatatgtattgtacccgaaataccctgacataagagagtcacatggaaagtatcttgaagtgacagggacaaaattggtacaatgtttaaaaaaagatgtaaaaataattgactttaaaaaaacagtaaaaataaaataggacaacataaaaagggtatagggtgtaatttcctctataaacaatagggctatttacaaaaatatgggaaaatgaagataagttttgatatatatggcataaatacttaattatactaaatatggcatttttaaaaaaaaacttacaaat

SEQ ID NO: 139741 - DNA, 615 bp, Cannabis sativa
cataacaataatagtacaaaaaatcatttactaaaaaaatagtaaagagatcattcataaaaaataaaattaaaaaaatgatagaaaaaaaaaattaccaactaattattatgtaccacatcgatataacattaagtacaataagagtatcaatagttagtatgaaaaaatcaatgtaaaataataaaattaaaaaaaaaacataaaagttaaaaaaaaatagtataaagattattaaaaaaatgattaactaattagtaattatttacaaaaaaataatagtaaatagtacaaaaattattcataaaaaaaaaaaaaaagacaaaagacaaaacaaaaattacaaactaattaattattgaatatcataccgatatgacattaagtacattaagagtatcaatagtaagtaaaaaaaactattaactaaaaaatcaaattaaaataaattaaaaaatgtacgaaaaaaaatggtaccatagatatagcattaagcacgttatcaatatgactttaaacacattaagagtaccaataacaagtacaaaaaattattttttaaaaaataaaattaaaacaaaaagaaaataaaattaaaaaatataattaggaaaa

SEQ ID NO: 139742 - DNA, 773 bp, Cannabis sativa
agcaaagctcgaaggaaatcatctattatagtgagatttttctcatctagaaactcgagaccagactcctatttgaaacccttggatatgcaaggaaaggggaaaactggctttaagtctcaaatggctgggggtttcgcagtaactcaagggacatgcaatcgcacgcatgaacattgggctacggcgacacaccaaccatttgaaagacccaaccagtattcccacacaaaaatgcacaaaaagcataaagaaagccctaaagttctaaacaatgggtcggagtgaccaagtacccagaattcctaaggaaatgtacacgggagtattcgagatgttcatctcaatacttgcgagtacttaaaatagcaagtaaaaaagatgcaaatattcaaagtactcttcctggaattcacgattgtacaaatttcaggtctatttttcctggaaattaatcagttctagcagaaaaataaggctatatgtgcattccctatgaacaacatgcattttctattcctcaaaaattcaaaatacagagtgtttctctcaaaatcagaaaccaaaattcgcaagtagttttgaaaactaaccttaaaattcgacgattctctctgtgatgtcattttactgcctctaaaactcaaaacattcaaaaagaaaggcaaaaatctgggagaagaatttgggtctttggagtttcaaatgaaatgaggaaaatgaaaattagagggaaagtaaaggaatcgtttcgtatcagggagtttaaatac

SEQ ID NO: 139743 - DNA, 896 bp, Cannabis sativa
acaatttatttttttatatataatttaaaatattttatatatccgccgcgaagcgcgggatgtttactagtatatatatatatatctatttcttttttttttttcccttattttttatttaatatttttatagtcagttaattattatttacagtaataatttttttttcgcatattattagaaaaataaaaaaatacatttggataaagcttgaaatttattttaaaaatttattagttgtcatataataagataatttactatattatattttgtatactataaagtaacattttttttttttcaatcaatagatatttcagtcacttaatagtatttatatatgaattgttattagtattttgattgaccaagaaaaaaaaaacatttaagttactttaaaattataactaaaaatgtgtatttaaacttttagtatactattgaataacttttaaatataaaatcataaaataatttataataaccataaaatttgtttgtaattaaattttgtttaatttatagttcaattactttttgataatagaatataaaaaaaattaaaatgttactttttaatttcgatcatttttttctattcatgataaaaaatatatatatatttctcacatattaaaatgaccatctgaaaaaataagatccaatgatattacttgtgagaaacaaatgagtattttttctttagaatcttattaaaattactctaaaaagaaggcttatattttagttacttttaaatataaattaacacattactttttaataacttatcaaactagttagtatattaaactttatttacattgaagtttgatcattattttcataaatgaatataaaagaaactaaaaaattactccacaatggcaaa

SEQ ID NO: 139744 - DNA, 813 bp, Cannabis sativa
ctattattatttataatattaattgtttgtattaattttttaaattagactaatattattattttaattgatgaatatttttgtctcttctctttcctagggccatattttttaaactgaaaaaccgcggtttaaatccggaccacgacaatccgaaccattgtaaaccgtaaccgggaaaaccgtttttgttggtttggtcaatccggaccgtttactgtgtaatggttcggttgcggttcgaaataaataattaacggttaaaccggaccggaccgtttataataaataattaattcatatatatatattttatgtatgactatatgtataatttaaaacttttttgtgtgtcaagttttttattgcatgaattttgaatttttatgttatgtttgacttttgagaatgtttttatatcattatttatatgttatatagatctattacttatcatgttaaatatatattttaaaaaataaaattaaaaacttagtaaaaatagtataattacttaaaaagtatgaataattataaatttcacttaaaccgtggtttcgaaccaaaccaaaccgtttttgatggtttggtttgagaaattttttggtttggtttggtttctaacattcaaaaaaccgttatactggtttggttcaaaaactataaaatctgaaccaaaccaatcagtgaacacccctatacataaactaattaagatatatattcaaagtaattatgaaatgaaaaaattacaaatattataagtaaatggaaaaatattaattttttggatatttatataaagttgatcaa

SEQ ID NO: 139745 - DNA, 1151 bp, Cannabis sativa
atattgaacttggataaaatatcataaacttactgttgtatctttctaagtcaatgttactggttgatcttagatcaatagatcttaaccctgagatggttaaattcgaccttaactgtattatttatgttcttagagttttttgttaaagctcagtcggccaaatacttacatcttgggaacatgatagtgtaatggggtttttttcaataatatacctaaaattgattttatttacaaaaataccttcaacaaattcatttgcacatataccaatgtgccacgtcagcataaataccaaaattcaaaattattagcaaaaatagaaaaaacttgaaaattatcgcttctagaaatttgagtgttttgcaggttttaaaaatagtaacattttggttgcttttgatgtaaataatttatcaattagttactttttattcaaaaaaaaaaaaaatgtttcaagataattttttctcatatacatttagttacttattttgatcaaataactttaaaactatgatttttttagactatattatatgttattttattattcaggataccttgaggttacctattttttctagaaattttaaagtatattttgagatgtgggaaacagtacatatattttttctgatatagaaaatgatgaacaagataaaagtaaccaatccctttcttacaaagaagtaactaaaatattatatttaaataaaataagtataccatctaattttatgggttactacaataaatattataatatttcatatttaaaaaatttttactatctaaatttaatttaaataagtaacaccaacactttctatacatcagagaatacgtcatgtttacaaatttggtttcttttaagttattttagaaattagttgatatttaaaaatttaatttgctagtaaagaaactaaaatattacttctgattttaattatttttttctaacaacggtaatgaaatatatgcttcctatatgttaaaacgatccccttaaaaagtagaatgtggtgatataaaattgggaaaaaaaacaggaaaatacataaaagagaaaaaaattacaaaattactatgggccagcccattcaacatttatacagtccacatacaaatatttacaaaaatac

SEQ ID NO: 139746 - DNA, 801 bp, Cannabis sativa
  modified_base (739)..(740): a, c, t, g, unknown or other
taattccgatcatatatacattttaattcaatctacatgtatacatatatattcatattttaattttgtttatatatattatatatatatgtaagttgttgtatatctatatgtatatacaattttatatatatatatatgtttatatatattatacgtttaatatatgattttattgcataaaaattatatgtgatactctctttcatacttttatgatatttttatgcgatatatatattatatacgtgtatatataaacatgaaaaattgaagttttttgtcttttggttgttttatttcatttttcttttttggtatttatttcgaattctatatatcactatatttatatagtattatagatcgatctaaacatgtgaaaaaccattgaaatctgtaaaaaaaaaaaattaagaactcatacggactagaaattttttattaaaattaaagttcaatttttacgtgttttaatcgcctaaaacctacatgaatctctttatttatgcatggagattcaaatgggattgattccataaatttttatcatcagaattcgttttcctgttcgggtttgggtcgggtccgtcgaagccacgcagccttctagaaaaaatgacgtgtcgttttgcatatagctaaaaaacgacatgtcgttttcggggcagtaattttcaaaaaaaaaaaaggaaaattccaaattatataaaattttttatttatttggaatattaannattttcctattttgtgttaatttagtcaataaattacattcattcaatttccatttttaat

SEQ ID NO: 139747 - DNA, 519 bp, Cannabis sativa
tattcaggcttccctcttccattagcagtaagtaaatttccctaagtaaagtacaagaatattgaaataccttattaataatttctcttatttgtgtgtgtcgattttggtgtatgaatgtatccagcagtggcgaacaaatatgtagagcttaaagatcacattaacaattcagtgtcgagaatttatcgacggaggacaacttggaagtgtaagaaaagtccctcttacagtggtgtagtagaggctttaggtgattcgcaactccaagatatctattcttcaattcatcataaagttggttgaactcggaaattttataggcattagaagtttcttcaaataatttaacgacacctttaactttaacacgtgctttaatattttgagataatttctacctacaatgcccatgttgtgacttcttataaatatttgacaacccattgatgatgctttgatgcctatccgaaatgaagaccaattcactctcatccggtattgttggaaattatttta

SEQ ID NO: 139748 - DNA, 836 bp, Cannabis sativa
ctcccggagatgctttgttgtagctttgctctccgggagtatgtgagattgacatgccttctccgggaggcatgtccaaggttgatcattgtggttaaagagactttgctgaattatttaaacgttgaaccccttcagtctacgtgtctccggttggtccacgtattttggccattggccaaaatcaggggcaacatttacccccaagccttgtttggtgagaaagtaaacaaggcttgcttagatgcctccggttgcctcttcagcttcctggcactgccttgggcgcgtggtgacacattaatgaccatcattactgcagttatttgctttttgcaggcgacgattcgtttcttgtccatttattgacacggcgcattaaatgggtgtcagacgggtactcaaacgttttctactgcctggatgagtgtttaatctaaccgttggatttgtagaattcgaatcgattgccatcctgaccgtacgatggtggttgatcacagctgtttcacacctgttctggccaataaaagccagccttctcacttcatttggttactttttgcatttcaccaaattttcttagagtttttcagagagaaaagaagctttaaacaccattgatttcctactattattccttcgtcgctgccagtcttagttttaccggcgatcaacaccaacccccaaccttcaaacttcaagtaagttcttcatatctcgtatacttgctttactgtttgtttatatagcacggtttacgatttctgggtaggatgtttgaacttctgggaatggttttgttcgagtttttgaatgatgtgttaaattcctcc

SEQ ID NO: 139749 - DNA, 594 bp, Cannabis sativa
agtgtatggaccagaagatggattgattggtactacctattgttgacagtgagaattcgtcaactaacttgttggccaaaaaatcaaactctactttgaacttagaactaagatgaagaaaaagatgaaatacaaattcaagtatctatctcaaagtagagataaaatgaaaactttcaattactctcaatacggtagttacaagaattattttccaaccccatctctcatctaagaaatgggtacttatatgctctaatggcatgagatacatggtggtcccaagaagacaagttgttgctttcaggctccaaatctcaagtgcaagaggtggtcttgcacctcgtacctttgtctggtgtcggtggtcctgggttgcaggagtagtggctgcaaagtcctggtggtcagggcgtcagggtatgtaggagcgatgctcccactgctcgtacttccatgcttttcagagcttgcagaaggcgtggtcatacggtcctcacatgcacaccttgtccttatgattgtaccttttcgcttcattctccccgtacttgggagagctttactatgttgagccacattgtcatggatgtc

SEQ ID NO: 139750 - DNA, 739 bp, Cannabis sativa
ggttctcctgtggaaagtctaggcgttttacttgggaacttttggataagcttttttataatgctccttgccttccttgggttataatgggagattttaatagttatttatttagtagtgacaaacatgggggtagtattagttctaattcttgttcttctttttttgctgattttctaaccaaattttctctcattcctcttccttttgttggcaataaattcacctggtataattctagtgttaaagaaagattagattgggtggttgtctcggaatcttggtgtgatctttacctaataattctttacatcatctcggtttttttggctcggatcatagagctcttaagttagttttagataataattcttatactgtccctaattttgtaaataaaaggtttagatttgaaaatgtttggctggaggaccctgaattttattctactgttaaagaagtttggactggccaagctcttcctttgtctacctctgggttgcaatctttttttgataagcagcaacactgtgccagccatcttaagtcttggggtaaaaagcataattctctttttaagactagaatctctcgactcaatttagaaattgatcaacttcagagtaagatggcccttagttctgaggagtcccgtaggcttagttctttgaagtctgctctggattctctgctgtacaaagaggagatctattggaggcaacgtgctaggattaaatgg

SEQ ID NO: 139751 - DNA, 773 bp, Cannabis sativa
  modified_base (33)..(76): a, c, t, g, unknown or other
tcttccgatcttatcgttttagaagttcatatnnnnnnnnnnnnnnnnnnnnnnnnnnnnnnnnnnnnnnnnnnnngtaaaataaattccaacattatcatgggttggtttctagggtttctctcgttaccacggggaatctcctgattcccaggcctaggctatctcgcgtcctcattcatgcgagaagcttctagtacatcattttgttcgttcccttggttcataaatccttgggatccttgaggaacgtctcattgttgctcttgattatttgtctgattatcattggaacatcccttgtacccccaggttgctcttcctaggtgttttagggatttccttggtttgtttcctgtctcctggttctcgaatctcgaggttcgcctcgtggtcttcttaccgcaggatcaggttgattctgaggatttgctccttgtgtcgccctggccgctgcagcctctttttccaacttagcattttgttggttagattcggctatgcgttgccggagttgtctattttctttttctaacaatggtacatacctagttggatcataagcatcctcacttctaggtacgtatctggcagaattatcggtaacttcattccttgtttctgaatttcgatcaccaccaccaccattcctccttgaacgtggtgttctagtggtatggggtctctgagatcccattggctcttttctagggcgacgtgtggtttcttcagggcgatttctatcattttgattgttatcagccattgaatat

SEQ ID NO: 139752 - DNA, 549 bp, Cannabis sativa
  modified_base (84)..(86): a, c, t, g, unknown or other
atacaagggttagagaactgagtggaaggagccgttaaatttcgctgcaaccactgtaaggtttttgaaactttatatgtgttnnnttcatatcattttagaagttcatgtttaggatgataaaaatatacttgttagtaaatttagatcctggtaaaataattctaacaactagcctcagagccatggcaattgatttactttcaagaaatttcaacttaaaattatatatatgtgatttggatgtgattcatgttgatctatgtattttttcatgattgttttatgtttgcaaattttttacgaaaaataatttcaatttattttctggaattttttgttggatagtttggaaaaaaattaagcaattcacttttttacataaattaattttgaattaatttgaattagctatgaatttttgaaaatcagaaaaattaggaggttgttacacctcccttatgcgcgaggatccccttgatttcaggggtgcacgcgaattcagacaagccctttccgagatttctcggtcatgatgggctgatttgt

SEQ ID NO: 139753 - DNA, 601 bp, Cannabis sativa
  modified_base (559)..(562): a, c, t, g, unknown or other
aactcagtttggtcatttccttgtttaatggattgcaaatgtagattgttaggtcttgagtcgggaagcgactcctacaaaaaatcaaatattttctgtttgaattgaaagccttcttcatcaacatgaacgtaggtgacagttttgatatctttgttgagcaatgggaacttgtcttggaagatgaattctgagatagagagttttgtcctttgtagtttagattggatgaaagaacgattagatatcaagttgttccaagatttagaaacacatttcaattgaaacaatgtctttgtaggtaatagggataacacttcaaaaattagatcattatttaagcaccttgtctttctcatttcctgaaacataaaatccgatttcattatttattatatgtataacatgtgtcactatactaaacaagtaaaagaccataattgtaactctttaataataaaagcatctatgcaccatacaatcaaatattgccctaccataaatagtgctatgcaccattctaaataatattaattacattgcaatataacttgctatnnnntacaattaagaccaaaaggaaaattactttatattgaac

SEQ ID NO: 139754 - DNA, 623 bp, Cannabis sativa
catttgttgaatagtttgagcctttcaagcctaccataaaaattttatccctagttgaccctcttgagccgaaacttgttatgtttttcacgcattgaaccgaaaattgtatctacactattaattttgtcttcaccatttcatccaagatatcataagctatacaattagttcgggggagcaaaaatatttagtgtgagaaaatagttagaggggaaaagaacttgcaagattgagaaaaaaaaaattctaactcaatgtcactgaagagaaaaaaaaacacaataaaaagtaagatatgtttgggaaaagtttattcaagaaagaaaaatttattttagtgatgttagagaaaaataaatatatcttttctcaatcttggtgaatgtgggaacactatggggttttgaaaaaagcaagaagctttgtgggttctatttgtgtgcttatgatatcttgagccaaaaccgtcttttgtcgatttttgaatatctaagccataatttctaaacctcgaaaagacctattgattccgaaaggatatagtcgacattagtggagagaggtaagcatgcaagcttatgagctattgggctgtggaactgttggaaagagtaaaactt

SEQ ID NO: 139755 - DNA, 1348 bp, Cannabis sativa
  modified_base (707)..(708): a, c, t, g, unknown or other
  modified_base (1317)..(1323): a, c, t, g, unknown or other
aaatcgtttaggtgttgatagttgtttagcgcaacataaggtgttcatgctcacctgaacaaagcatggatgattgatcacaatatgcgaggttatagattgatcgactacgagatccacataaccattcatgcaacctttttgttatatggaacaatggaatggaaacggaagtattgatgatggatcagaatacgaaaaagtatgcactgtaggggctttcaatgtccgaattgacatggaaggttctcttagaattcgctggccctacaaactaggggaagaaacctatccttaacaccaattagttcttggtataaaaatcgtttaggtgtagatggttgtttagcccaacataaggtgttcatgctcaccttaacaaagcgtggatgatttatcaaaatctgtgaaaaaactagattgatctgctacgagattaccataaccattgattcaactacttggttatatggaacaatagaattgacacggaagtatggaggattgatcagactacgcaaaattatgcactgtaggggctttcactgtccgaatggacatggaaggttctctacgaattcgctggccctactagctagtggaagaaacttatccttaacaccctttggttttggatataaaaatcgtttatgtgttcatagttgttgaccgcaatataagttgttcatgctcaccttaacaaagcnnggatgattgatcacaatatgcgagttactagattgatcgctacgttattactataactattgatgcaacaactttgttatatggaacaatggaatgtatacagaagtatggaggacggatcagaatttgcaaaattatgcactgtaggctctttcaatgtccgaatggacatgcaaggttctctaagaattcgctggccctacttgctcgtggaagaaacctatccttaacacccattggttttggatataaaaatcgtttaggtgtagatagttgttgagcgcaacataaggtgttcatgctcaccttaacaaagcgtggatgatttatcaaaatgtgcgaaaaaactatattgatcggctacgacctggttatatggaataatagaatgggcattgaagtatggaggattggtcagaatacgcaaaagtatgcactgtaggggctttcactgtccgaatggacatggaaggttctctaagaattcgttggccctattagctagtcgaataaacctatccctaacacccactggttttggatataaaagtcgtttaggtgttgataattgtcgagcattacacaaggtgttcatgctcaccttaacannnnnnngatgattgatcacaatatgcgaaag

SEQ ID NO: 139756 - DNA, 986 bp, Cannabis sativa
cttgctctaaaatgcaaccaccaggaataaaccgagattgccttgcaatagcatgagcaactcgatttgctgatcgtttgaaaaatcgtatttttacattatttaaagaggaaaacaataaacgacaatcttctataacaattccaaaagtagaggacatcttttggttacttcttattgcttgcacagataaaagactgtctgactcaagtaccacattctcccaatttttcccttttatccagctaagagcttcttttatccccaatgcttcaattacttcagccggatagctaccagaaaaatggctagtcttggcttcaaggaacttgaaactgttcataatgttcataatgttcattgttgttgtaagatgaaactggttttggtttattttttattttttgtttagatagaatttgattcctccagtaaggatgcaacaaaaaatgttgctcaagatttaagtgttgactttgagaagaaacttcctctaattaaaattaaaattctaaggaaggttattcacaaaaaaaaaaaaaaaaaagtaaatctaatccaaattttaatgattcatctttggtatgtattatttttgaagtatattaattttgttttaaaaaaaaattatctcttgatgtatgttcaattttttagttgtttatactaaataactggttttcgtgtttaattgttgttttatgtaattgaggtttaaattttatttttattttaggaaactggttttaatgtgttagatttacttaatttgcttgctttttgtaactggtatttctgtttcactttttaattgattgtttaacataagtggtttcagtaatttaaatttatttatatgttaagaattctcttgtgatatgctttaatttttttttttttaatttcctgactagtttgtgtttcaatatatctttttattgttttatttaggcttcttatgtttttttttttctatattaatgaat

SEQ ID NO: 139757 - DNA, 1055 bp, Cannabis sativa
gtacgtaataatgggtcttagggtacgttaacattttttaaccctaattacccttagatcaacctcagccctcagatcaaataactcccctatctaacggctgccatacattacagaatacattccgtgaaaatacaatgacgaaaaaaaatcgtttccctatattgttatcaacaaaaaaaatctattttttttctttttacattaagatatcacataactttgaaatttttaaacacatacctttgtttttcaaaatctaaatatccataactctaaaatctttcaaacaacaagaagttattttcaaattatgtgatatttttttttattttttaattagttaaaaaataattatttttatcacttactaaatttgatatatcttcttctccaataatatattttttttttttaaaaaaaaaaagttctctataaatatttatcatttttaaaaaaaacattatacataaaaatatgtttaaaattatttgatacaatttaattgttcaattaatattcatatgtataatttaaaatttttataaacaatcacatgcaaagcgcgacatgtttactagtttaaacatatagcaaatatgaaagagatgagaaaaatttcaaaagcattcatatctcaaaatttctaaagttttcaataaaaaatgatatacactgttccagtatgcaagagttaatccattaaatagtgtagtcaactcatctaaggatggacactatcgttagcaatcttttattcaatcaaaataagaattctaattactctcctaataggacagattcaaatcataatcttattttatgagcttcacctattgtttcaatttttataaatccagctctaatagtcattgttagagtgaatctactagaattcgatttataaacatctatatgttgacgagatctatattcaaccaacgtggagtcgtaatgtaatgaccgctttagtaatttggattagtaagggcaataagcattaatttttattattttattattatttatgaattaatttaattgtggaccccaat

SEQ ID NO: 139758 - DNA, 648 bp, Cannabis sativa
tgtttaaagaccagatcagaagaagcatggaagtatatgtggatgatatgctcgtcaaatccagagaggctggggggtacatatatgacctgaatgaatgcttcaaagtcctcaggaagttcaacatgaaactaaatcccttaaagtgctcctttggaattagcttgggaaagtttctgcgctttattgtcaatgctcgaggaattgaagccaatccagaaaagattcaagccctcctggatatgaaatcgccgataagaactaaggaagtacaaagtttgattggtcagatcgccgcactcagcaaatttgtttcaaaatcaatagacaagtgtgttccattcttcaacatctgcaaggaaataagcaatttgagtcgacagaggaatgtgaaaaagcttttaggagctaaaaatgtaactcgtaaagcctcacgtactctcgaaacctttggaaggagaagaacttgggatatactttgcaatcacggagcatactgtaagtgccgtgctaatcagagaggaaaacaatatacaacacccggtttattacattagtaaattactcattgaggccgaagtccgacacccattgatagaaaaactcacttactgcgtgattctagcaacaagaaagttaaggccctat

SEQ ID NO: 139759 - DNA, 814 bp, Cannabis sativa
tattgcatagaaattaataataggaagataatcatattagccataatcaatagaaacaattgaaatcgaagtcctagtttttattaaatgttaattttctttaattgattgcatcttacttgttttcttatttttaaattctttttaatttttatttaaccaaatagaagtaaaagtttaattttaatgtacttaactacaatcctcgtgggatcgacctcactcctggtgagtctattacttgtaaacgataagtgcacttgcgtgtggaaaatatcacaacatgggtgcctaagaagaaaccaccagactgctcgggaatgttataaccttgccataaccaaggctaaaagggaagtatcctctagcctaagttcgaacaagggaaaaaacattactaagtagggaacctcccaaggcagggatgaagatgtggatcctcaacttggggactcaagcagcaatgttggaccagtggaagaattagaagagattgaaatcgactcgaatattccgaccagaatgcttaaaattagaaaaggtttgttactcgaagtaaaatcagcattgataaaatttctgagagcaagcttagaaatttttgcctggtcacatgaggatatggtcagaattgacccttctataatttcacacgtcctaaatatttatccaagcttccgacctgttcaacaaaagcgaagactgttagacaaggagcaagccctagccctaaaggaagaggtagataacctacgcaacaataatttcataatcgaagctttctacccggcttgggttgctaatcccgtactgg

SEQ ID NO: 139760 - DNA, 636 bp, Cannabis sativa
tatggtagaattgatttccttcagtatgttaccagattccaaaaatgatttcacagccccacaaatctcacttccaattatctcccaattgtcttgatagaagctactggagaatccatcaggccctggggatttattcccaggaatactaaagacagcctttttgatatcatcttcagtgaactcctttaagagacattccgcttgatccgaactgaccaaaggccctttgttaataacattcctctcaaccttcttcctgttagatcttttagtgcccagcaagtttttgtagaaatcaagaaaagcatctgagatgagagaagagtctgtaattctgcagccctgctggttttctatagaaagaatacgattttgtctcaatctatgcttaatacaagcatgaaataaggcagaattcatgtccccatcttgcaaccaatccattttagccttttgctttaagaatgaagtataattctgctgtttttgaatcactttctcccgagcttctttctcttgttggtgcagatgggctgctaaaggctgctgctgtagacttacttggagagcttccaattcagcttttgcatttgttaattgcttcaataagtcacaaaatccctctctattaat

SEQ ID NO: 139761 - DNA, 1625 bp, Cannabis sativa
tgcattttgatttgattgtaccctgaataagcgtccatgaagcttaatatttcttgcccgactgttccatccacaagctgatcgattctaaggagtggaaaacaatctttgggcattccttattgaggttggtgaagtcaataaaaactcgccattccttgttcggcttgggtacaaatacgagatttgcaacccaagccgtgtagaaagcttcaattatgaagttgttatttcgtagcttcactacctcttccttcagggctacaacttgctccttgtccaacagccttcgcttttgttgaactggtaggaagttgggataaatatttaggacatgcaaaagtaaagaaggatcaactacgaccatatcctcatgtgaccaggcaaaaatgtccaggtttgctctcagaaattatatcaatgctaattttacttcgagcaacaaaccttttccaattttaagctttctggccgaaatatctgggtcgatcttaatctcttctagttcttccacaggtccaacatgtgtacttgggtccccaagtcaaggatccacatcttcatccccgccttgggaagttccctatttagaaatgtcttttcccctgtccgagctctggctagaggatacttccttcatagccttggctatggcaaggttataatattcccgagcaacttgctagtttcctcttaggcaccctaccccattctttgtcaggaacttaacgcatgaatggaatattgacataagagcctttaagtcatacaaagctgatcggcctaacatgacgttaaaggctgatggaacttccaataccaaaaattgggccattatagttatgcttgttggagcttgtccaacagtgaggggtaggcaaattggccctaaaggtgcgactccttggccagaaaaaccatacacgggctgaagacatgggttaaatctttgagttggagccccatcttttcatatgtggtcttgaataagatgttggaagaggctctattatctatcatggttctggtcaccatcttgttggctatctggacttccacgaccaacgggtcgttgtgcggaaatctgatcttggtagcatcttcatcattaaatgttatggtgggttctcctgcccgtgggatcttcggcttcctttcttttacggccaagactacttcttcttgctcgtgctgtactgttcggggatacctctccccggctttgcctgaatctccagctatgtgcggacctccaataatgacttgtagatgtccatctactggtggtggtagcaagtcttggtttttattgcccctctgattctgatcgaccttgacatactttttcacgtgtggattacttttccttatcagttgtttgatttcctgctttagattgttgcattcattggcgtcatggccatcatccccatgaaaacgacaaaacttggtcatatttctcttactggcttcttttttcatgggtgcgggcttcttgtacggggctaatgactaagtagccatataaacactttctatatcttctgtcaggacggtaaatgcggtacacttggcagtattctctcggggagcttgttcggtcttgccagtgaactttccctttt

SEQ ID NO: 139762 - DNA, 536 bp, Cannabis sativa
tgcgaaatggattggatgaacaaccctattaagatgataaagtggagataaaactcttcaaaaaaaaaaatgaaataaaataaaatagaaaaaaaaattaagtgttaaaaatccatcaattgaaggttgcaaggattgaactcatgtcacttagcatgagctagggcaacttaccatatgtggtagaataatttattgtataattttttttgtagggaatttattgtataatttgtagggaatttttatatattattgtgtatagaatgtaaatatatacatgtgttttttaatgtaatatgcattcactttttctaactatatatgttttttttttcctaaatagtacttaatattgattttatctaagtttatgtatcttaaaaaataaaattaattattacaaattttaaaactattaaattaattgaaatcttaaattaaatataagttaagaaaagaaaagaaaatattatttctaaagtattgaacttatgacattttaattattttaagagtgattattataaaattat

SEQ ID NO: 139763 - DNA, 685 bp, Cannabis sativa
  modified_base (632)..(633): a, c, t, g, unknown or other
tctaggtcccgaccctggttctgtttccctagtcttgttccatgtttgggtctatcttcaggttcggaaccttagtccaggttttggttgggatctgggtctggctcccaattcgggtctaggtctggtttagagtccgggtcctggtccagttacagttctggatctaggtcaaattttagttatgagtccaagtccaagtcctagttcccgtcccggtcaacttccggttttagttccaatttttgatcacagggtacgggttcaggtccacttttgggttttggactgggctctgttccgggtgtgggttcgggtccttgtcagggttcgggtccagagctgggtcccaaatccagacaccggatacgggttttgtccaagcccatggttctgatccgaatcccaatctcgggtcccagtctggttccatttgtggtgccgactcacgagctgcgtcctaggttcaagttcaggtctgggtcggataccaggtccaggtcccggtcttagttctttttcccaagtccctgtcttgattctgggtccaggtcccggttattgtgtcagtttaggtccctgtctaagttcgggttccagtcctagtcttggttcgggtttaggtctctttnnggtttttgatctgggttcgggtttggttttaggtcctggtcttggtcctagt

SEQ ID NO: 139764 - DNA, 557 bp, Cannabis sativa
ttccttcagttggaggcgcctgtggatggtcctccctttgagtcaggggtcgattgctcagatccaccgggatgttaatgccatcctagccaacagtagtggctagatttgtggtgcctactatgggggcagaattaaccacatctgctgtgttcatggtaattccagttgtagctagaacatgaacatcggtatctatagtctgtgggtcttgtgaggaacccaaagatgcagatggtgcgattggggttctttttgtgttaaccatgacatttgattagatacgatatccttgctctcaatggaagcaccaaattattggcctcgaaaagtgatcaaccaacaacagagtcgtataaatctgatgtttgccacctattacaaaacaagaataataaagtaaatgagacaaagatttttatagaggtttggcccccttagttagcgggtaatgacctactccccttttggctgaattgatacttagagataatacaattcagattcctctaggtgggatttgatatagctctctatatggatacaaaacatgaatc

SEQ ID NO: 139765 - DNA, 559 bp, Cannabis sativa
aatgagctcctctttggcaaatgtgctcctttttggctaatgagctcctctttggcaaatgtgctcctttttggctaatgagctcctctttggaaaatgtccatatctgcaaaaaaaatttagagaaagttaaaatctacataaaatgaataaaacaaaggtggcaaggctaaaactcccacttagatcattgccaaaagtatcagacgaggaagaactgctacaataattactgaactccctagaaccagtgatcatgaagagatagaggtaagtggagacatatcccagtctggactagcagccctattgatgttaatgccatattgttcaacgatcccataatacgagctattacaaattaattggacatgaaacctaggatactgatacaaaccacaccaacagttgtgatgaaacccgataccaattatggcagcctctaagaattcttaaattttggatgtggaaccgcgacccaatgcttagttaagcatgaaccttggcatgaaggaaggcgccacaaatggtggtggaaatccgtttgataagtcaggtt

SEQ ID NO: 139766 - DNA, 654 bp, Cannabis sativa
tgtaatgggacttaagggtataaaatttttgatattaggttgtattattagggtcaaaaattgaaatttagggtcaaaaattgaaatttccccagtattttcagttttactctcttccactccattaagtactgctatgctatttgttttttttcttgaataacatcatgcattaaactgaaaaatcttagtgagtacacgaggactcacttctcaaaatgaagcaaaccattacaaagatgcacaagacctacacattaccacatttatgaacaaagaaatttgccaccgcccccactccagcacctataacaaaatacacaaacacatgaatacgaccaggtcttgggagaccttatctaaccacttggataccgccattaaaataagatgagagtcttgagaattagcaagaatcctctactgatccataaagatacttttaggtagcgtttggttgaaggtaataaaatgaaatagaaagaaaatgaaacaataatcttcatttcattcttttgtttggttgcatatatttaagtgttggaatgtctttctaatggaataacctttccaccattatgatagaatgactattctattttgaaatgaaaggaaagaccattccaatgtatgatgagaaaaaatttaataatt

SEQ ID NO: 139767 - DNA, 1261 bp, Cannabis sativa
tttattaatttttagtttgaattattattatttttaaaaaattaatttaagttatttttatataagtatttatttttaaaaaataattttacttatgaatttcgctaccaattttttttatactaatagttaactataataaaattgattacttaaatactttcactaccaatttgtttagatacatagttatactataatcatcttttaaattaatttactttattaatttttttatcaaaaaaataatttttgattgattaaatggagccaattacatccacaaggggattccccttcaaaagagaaactcacaactcttttacattttttgaaaaaatttaatctatggtagacaactttctttcccgtacaagattaagtctacttttgaagctttctttaatgctactgtctatacaactcagattcatacatcttttcttatttatacacaaattttagtttagctaaatgccacaaattgtacctgctaacacattcttatgaacataatataatttttatgacacattctaaatatatatttttttatttttaaaattatgtgtgtttttttaaatcatatttatttttttcaataaaaaaattgaaataacaaagctcattattcattaacttaaagcaaaaaaaaaaaaaaaacaagtcccttaatggatacatgcacatcacatatataaagcagccctctttcttgctttttttattctttttttttttttataaaattcacatctgtacgtacatactaccataccatgtaacctctatttagctttaattttattggccaaaacactaccacatgccatgaggtacaaactaagagtcctataatagaattagggaaatttgacttttatgcttacaaatacttaatatttttcccctaaacacataacatgtaatatttgtgggatatgacacattttacaatatccctaaaatacccccatttaaattatcccctatccctctcttcttctctctttcttcatacccatcagaccccaatcggggtccccatcggacctgtcagacccaattttttttttacccagcacatgtatcggaccccaatcggggtccccatcggacccaaaagttttttcatcacatgcatcgaaccccaatcggggtcccatcggacccgtcagacccaaaaatagaattttttcgcacatccatcggaccctatcggggtccccatcgggccatcgtctttcccaaactgcgattt

SEQ ID NO: 139768 - DNA, 1145 bp, Cannabis sativa
ctgtactggaagatggtataaaagaccagataaaaaatgtagcagatattgcagagtttcagaggcaaaaatacaccattgcaactgcatacaagctgctctctcctcctcaaaataggttgctctggagtcatgaagtatgggctggatggaactccccaaaacatagtgtgatactatggttggcaatgcttaatcgattaaaaaccaaggatagatggctggattggaatgcaagagccaatagccttcctcaactggtgagatggatcggtaaggcaaaatttctaaattcaaaaaactggtgtttgctgcagcaattgctgctctggtttacagcatttttcgctagaaatggtattatttggcaagagaatcgtttaaattcctccaggctgatcgaggatactaaatggagtttaaggctttgaattgctatgttcttgccaaagaaaatcaagagtgtagatagagatttgtttcatgctttatagatgtaaaatgtatagaaaaaagcaatggaatttgtatagatctcttaggcccttgatggggtgctaataggatgtaaatattggtttgtgcaatacaattctctgatttatcaaaaaaatatatatatataatttacacgtatttaaatggagcgtattttaagcccaaaattttggggaatattattatgggattcgaatttaaaaataattaactgcctagctatgttactataaataggggcagattatacagaaaaaggtgacaaaaaaaaacctttgagaaaaaagaagtttactaattgtaaaaccctaatgttgtatcaagaaatatcagaataagatagactcgtggactatgtagagtttactgcaaaaccacataaacacctggtgttatttttgtttctattaattttctcaaatttcttataatttttcaaatttattgcgaaaataggctcataatcattaacgaaaatctgtgttaacaaaaatcaacttaattattaattctaattaagttctaagaaaaatatcctaaattatgttcgtcaaaaattaattaatatatttttctacttaattaaatattaaaaaaaaaattagttactagaaatcactatctagaatttttctttaaactaaagt

SEQ ID NO: 139769 - DNA, 786 bp, Cannabis sativa
  modified_base (26)..(54): a, c, t, g, unknown or other
tttcattgttttataattcatattannnnnnnnnnnnnnnnnnnnnnnnnnnnnatctagattctggtaaaatatttccaacagttttcaagcgccaactactggcatgcacaagttctcaaagcatacaaaatatggcatgcactacctacgtggtaggctgcttaggttttaggtgagattagcctttatccctctttaattgatgtgattcataatggagccgtcactagctcccttgattatcgtgtaatcgcccaaagccaggtttgtgacgtctgacacgtcctctatgggtattcccagacgtttttcccatgccgcattaaatgcgaagtgactgctcacctccagctttactggctcggagatgtttattcgtccttcacctcccggagaagaagtggagctatttgctcatattcgggagcttgcccttgaatcataattgttggttctgtggagatttaattaagtcttttgttcatctcttggtaataggcctctacctgccacgtgtcccgcattacagctgccacgtatattgggagaaacttggggcaacaacttagaacaatcggttactaactcaatataatattaataacatacataaggaccattgctatagtattgcgggaccaatccgtggttcacaaaaaaaaggcacaaaatcgactccctataattattggaaatatattatactacaaaaattttatttttagtcacaataaaacttgtgactaaagtgaaaaagttgggactaattataaattattattc

SEQ ID NO: 139770 - DNA, 538 bp, Cannabis sativa
  modified_base (384)..(389): a, c, t, g, unknown or other
  modified_base (495)..(496): a, c, t, g, unknown or other
aaaaaaaaaaaaaaaacaatcaatcctaaataatttccaaggtttccaacaaattgatacaatgtcccgtttaggtgagagtcaaagatataattcaattaatagagcagtcaactcatctaaaatggacaccattctagcaacctttaatttgatcaagacaagaatccgccgttgtcccgtttaggcaagagtcaagctcattctatcttatgagcttccaccattgtttcatactttttaagccctactcttagcagccactttggagtggacgttactaagaataaaagacttacaataatacttatctttcgagattctacaacgttaaatttctaatgaacgttcttccattagggatgaatctcactaaaacaagannnnnntagaaccaacaatggagatcgattatccttataataaagctcattatttaaagtgaagcttcatctaatatttattttaatctatttttatatatatatatttatnnaattaaaattaccaatttagaaaactctaaatataaatttta

SEQ ID NO: 139771 - DNA, 576 bp, Cannabis sativa
tccaggttgatgccacatgtcaacctaggtactgagatgccaacctgaaagctaggtcattaattgccttcagtaaaatagccataactcactcaatatttgacctgattattgcgattcaacttgcattatgaagataatttaatgatctatcaagtaatgtctcacacttcagtcgcaattctgaagttattgacctcaaatttcaccctaaggcaattacaaaaataagctctaagttacatgcaaggtcattttgaactttcagaaaactactcataaggtcagagcttttctctctagaaattaaagtttctgacacttagcctttttctgtaatatcatcttgagaaataaaaactcgaagtagatgtagctcaattactgccgtgattcagggagtgaactactataaatttgttgtctctcttataattacttaacatctgtttcattctcgccaatctaacaagcaagtgtgacttagaagcttaatctaaatttctgagtcaactttttattatcttaaaatcaatttattaagggaaatttgattttctatacttagaaaatcaa

SEQ ID NO: 139772 - DNA, 648 bp, Cannabis sativa
acaactaaacactctcctaaattctcccatcaatataataacccaatctctttaatattatattgttattggtaggattaaatgttaattattaaataatttaataaaataatttttattctctagttgggttattgaaaactatgtctcttcagttttcttgtaacggtcgttcttccttattctctgattgtattttctctaatattaagaggacttgtaattatgtagcccataatgtagctaagtgggcatttacccacaagatttttggtaatatcccgttatccaccatctcttcaaacattttatgtaatgaccgagatgtctaatttattcttaatctaagacgcctttattcaaaaaaaaaataataataaaataattcttataaaatatcactaatcaatataaaattttacttttaaaaaatattaaacaccaagatattaaatagcaatactcatatatttatatgtatacactttcaatgggcaagactatggtaggacctaacaaaagttcccaaccgtagggaacttttttttaaccattgattttagatcatgtggttattatgatgtaaggtgtatactcttacgataggactgtttatatacaattaaaactttattcatattataataa

SEQ ID NO: 139773 - DNA, 763 bp, Cannabis sativa
tatcaatggtaggtacttactccaagagccctcgaaatccataacacaggctcgcaacatatcttccagtatctgaattgtcctttcggactgtccatcagtctgaggagtgaaagttgtactaaatttcaatttagtacccatagcccgttgcaaactctgccaaaatttagaggtaaacttgagatccctatccgacactgtggactttggtaccccatgtaaccttactatctctttaacgtacaaatttgcatactcatccactaaaaaaggttgttttaactggtagaaaatgtgtggacttcaaaaatcgatctaccacaaccaaaatagaatcaaacaaacccgtggttctagttaacccaaccacaaagtccattgtgatatcttcccacttccactcaggtagggttaaaggctgcaacaaccttgccggtctctgatgttcagccttgatttgctgataggttaggcatctcgatatgaattctaccacattcttcttcattccgctccaccagaagaaaggtttaagatcttgatacattttgtggtgccgggatgtagggaatatggagtagtatgagcctcttcgagaatttcatttctaagttccacactattaggaacacaaaccctggttttgaacaacaacatctcactgcctgacactgtaaaatcattggcttgaccagctgaaacctcttctctgatctttactaactctagatcagtcaattgagcgactttaatttgttct

SEQ ID NO: 139774 - DNA, 526 bp, Cannabis sativa
accgtgtagtggtatttaggtaataaagttatcattttatatttttgatgtaaaaattttattttttgttaatgatcgcacatgttgcattttttttaacatcatttgtaaatttttcaaaaaatttaaaatagtttttagcatcgaaaatttcaaacaattacttaccaaacgtataagaaaatacacaaatatttaaaaaaaaaaaagggactgaaaaactacaaaatgtaagttatatttataaattgttttaaataactacaaaatacacaaatattaaacaaaaaaaaaaaaaaaatagactaaaaaactttccaaaatgtatagcaaaatgacctttattagaagatatataaattaggagtatgtataaatcgatccaatttaagaagtactgaccgatccaatctgccaaacattggatattcaattgtgatcgaatgggatcaaatgttatttttaaatatccaattggatcagatcggatggtagatggagtgtctaaaaatccaatacatccaac

SEQ ID NO: 139775 - DNA, 527 bp, Cannabis sativa
  modified_base (364)..(369): a, c, t, g, unknown or other
ttgtatcacttttaaataatatagaaaaaaaactaacataaaatttagtatacgtgcctcgtacgtactttttggtagtatatatatatattttgttgaagttacaaacaacttaggtgatacaaaactgacataaattgatcctttatgttcaatatattattcagattactttatattaaacatatattttttataaaagataagtttaccatagaaatacattttctttaaagggaatatactcatttagtaccttgtgtttttatgaaaaatatatttggtatcctatgttttcaataatacttaattggtacctcatatttttaaattgtacatatttggtactgttgcccctgatttnnnnnnatatacgtggaccaactagacaggaacacgtggaccaaaaggccttaaaactcaaattaattgttaagtctttatgaagaaaggcagcatccgggacgtgcctcccggagaaggcatacgaagtcccctatgctcctggaggcctaagtagcatcaaa

SEQ ID NO: 139776 - DNA, 1310 bp, Cannabis sativa
atttttcatcagattattttaaaattaatttaagaaaaatacactttgtttaatgaaattaattcaagataaacaatatgtatttttctctatttaattaaataaacgaatttataactaattagatttttctagatacttaattatttgaattttcttagaaaatatatttaagttgaaaattaatattttttaaattgattttggatcaacttaaattagaatattttttgaaattaataaataagtagatttttctacaaaattagttattaagataatctttaaaaataattaagtgaataggaatatttttcttaaattaaggtaattagttcaagatatttaatttgttatttaattaaattttgaaaattatttatgttaaaaatttagctattttagaacaacttaaattagatatttttagaaatttattttattatattttatatgatttcgaaattatatatatatatttaaattttcaacattaaatcaaagttaaaaattattttttttaattaattttacaccaacttacattaagtaatttttattattaacatataaagattaaaataaatgattaattaaaaataaattattttaaataatgagctttaatcaaagagacattcgatcaccattgttggttctacacaattcttgttttagtgagattcatccctaatagatgttcgtttattagtaatttaacaccgtagaatcttagaagatatgtattattgtatgtcttttattcttagtaatgtccaccctaattagggctgagcatcagtcggtttggttggtttttttctatataaaaatctaaaatttagttttctgtttggattggtgtaattcaaaagttgaccgaccaatcccgaacctatcttaaaactgaccgttttgaacctcggtttggtcagtttaaaacgcccaaaccgaacttttttttttgataaaaaatatgatttaatttattctataaacacactattttacattttacaactacaaacatacaaattaattgttcaaaaactaattatcttattctttttaacttgagtaatttgcagcaaaaccccctcaactatcaatttacttgcaaaaaaccttccaagctcatattttggtggaaaaaccctccaaagtactgttccttttacatttttaaggtgtcgtttgtccagcctcgttaagaactaatttttcccacgtggcaatgacaggtcactaaaaaattatcctacgtggccattttttacaaaataaaaataaaaaatttaagagtaatttgc

SEQ ID NO: 139777 - DNA, 668 bp, Cannabis sativa
aaattaaaaaatacttatttcaaagtcatcatgcactttcccacttccactccaataataaatacttataaatttaacaatatcttctagaatgcactataacaaaccaaatgtagggaaaattatacatggggtatgactattaaggatgattagtcctcaaaattatttatcaagtatattttatgagtgattagtaatatttagtaatcttttttaatagtgagaattatttaattaaaatatgtaagatttgataaattagaactattataacatttattaatggtgtccaacattatttatatatgtaccctttagtaaattaggtaggtaaaaatatattattatgtgctttaatatccaatcatctaatataacttttgtggatcatataaaacaatgatacgttattattaagttttgtgtataaattgagagtgttcactacttaatatttcgaaaaaaaaaattgcactacatatgactttaatttatttgattttatgagaatttacatttattattgtttctatgttttttttcttcaattttagaaaatgttatatatgatcgattttatgagaaaatcttaaacttaattagggtgcgtttggaaagtcacaatgtaattggatttgtgtgtaatttgaggtaattacacaatt

SEQ ID NO: 139778 - DNA, 1337 bp, Cannabis sativa
agatcctggtaaaataacttccaacagtatacatatccaatcgatatgatatcatacataatttatttgactgtctattacatgatgagattaatatggtgtttgttgattatattagtccaagtgggagagatattagaattttttatggactaatataatcacaaacataattccatattcacaaccatgttagatgttttctaaagagaccatatgaggttagtctttcgcagcaactctcaagatactgagattcaatggatcatatcgttttattctgaatagcctcatgaatgttgtgactgaataaggatttacatctaaggctatttaaggagttttaatattatgagaatctaagacattgtatttgacaatcttggttttttaatcatataagagaagatgaatatctcaaaggttttattgagaatatctagttcaatatgtacgtccctcctagctattattgttgataagtaaataaagctgcatatgttgaagttttaagctggcattagacaagttttaaatttttttatggaataattgggtttgtccctcatcttgttgctttcgctattattattaatgatgtactattggacagaatatggtaagaaactctatatatcaagacagtttgatgaacctgtgtttctatacacgagacaagttttattacatatacctctaattttctaaacaatagccattggtaattcttaatccttatttggagaattgatatggttatatcacaatttccaagatacaatcaaatgtgaaagctttaggcttaaatctcatatcaattgggagtttttcttgatggtcaaattaaggtaaattaaagcttgtccactagaacggttggagcaattggagctcctattacacctagaagttgttgttggttgttggctaggcttgatctgcaccactgggtttacctagctaagtctaccactataacaagggatttgttatggattgtaaagtggtgactatttgaaaatcaataaataaggatgtgagaactaaactcttgtttaaagatcataccttgttaaatggatcgattaagcctggaaaaggtaactaaaaggacacccgagttcaatagattcaatcccttttgaggaagaacatcaagatagtgattactgtaattctcaaaatggttaattcaaagcattatcgctagtcaatactatgtgaaagatcagtgggagcaatgatatgtttatattgttacttgatatagtacattgcttatattttatgatagtgatctattctggagacagttgaactgttatttgataatctct

SEQ ID NO: 139779 - DNA, 702 bp, Cannabis sativa
tctattttattgttttaaaaaaataatagtagaaagatatttttttaatatatgtggattgggtaaaaaaaataatagaaatatgtattttagatatgtgcaataagtttatatttgaaatgcaatattaaaaaaatactttatgttatatagtcacatgtaatatttgatataagatagatatgtgtagtttaaatttgaattgtaatgttttaaaaagaaacaagttatatagccacatttaatataatacacaaaaataataaggtagtgagatgttctcacaacattagttttatttgactaaaatgttgttatatttcatagaagataagtttagttaacttcttttctatagtggtgataaagtttattttgaaattgaaacattttttagtagtcactaaagaagtaatgtatttgtatttaaatattattttttagtagggtcactacaaaaaactgttacttttagtgataattttttagttgtcatataatctttttgtgactaattgtgacttttagtcacaacaaaatgttacttgtaactaaaatataatatttagttacaggttatcactaatttagttttagtgactaaaaatatatttagtcgatcacaacaaatagtaatttttgtgactaatacttttagtcacggaccttttagtcacaacataggagatcggaagagcggtt

SEQ ID NO: 139780 - DNA, 811 bp, Cannabis sativa
  modified_base (659)..(664): a, c, t, g, unknown or other
caaaattagaaaaatagaaagagagaattataagatgccacctaagatcttttgtgctttcctttatttatatatattgatttttaccaaaaaaaattaaaaggaattttatatatttatattatctatacttttagttaaaataatattttccaaaattctattttaatctatatttttgaaactaaattttaaattataattttattagatatttaacctttatacgttcaaatcttttaatatttattaataaaacaatctacctagacattttaaaggtgaagtatgaggcggtgacatgatattttaaaatcactttaaaattatttttctcttctctccttaattctctcaattttaatattgtattaaagcataaatctacaaactaatattttactattatttaaataattttcttataaaaaaatataaatctataaattgatattttactaatattttaattttctacaaattgagataagcaacacacacatccgattaaaaattaaactataaatgaagctttatgctactatttttgaattccaatatttattagcaacaaatttaatattttaagtatttatgtcacaaattttttaatagtaaaattaaaattttaaaataattttactaagtaattattattnnnnnnaatacacaatttatttttttatatataattgaaattattttatatatccgccgcgaagcgcggaatgtttactagtatctatatatatataaaggagaagtatgaggcgatgacgtgacagtctaaaagggaaatttgaatttgtat

SEQ ID NO: 139781 - DNA, 553 bp, Cannabis sativa
  modified_base (508)..(513): a, c, t, g, unknown or other
aaaaaaaaaactattttttttaaattttattttgtctccatttaatttatttatgttagttttgtaataaattataatttagttttttaatgaatgaatgagtggttttgttggtatgtatggtagtcggttgctgaggattggacagtggaagcaatgcccacattcttatttttgaaagaaggaaatatagtggacaagatggttggatcaagggaagaagaacttcaccacattattcaaagcaacatttccacttcagctgaaccatcctcatcatcacacataatataatctaatattttttttgattgtttttatttaagcgtttatatattacacaagatataatttgagactcgaactcagaatttctaacacacactctcttatgaccacttgaactagcctcaagtggttataatataatctaatatagttgtacttgtatatatatatgtatacatttatatttatgggtgactattcaatagttacatttttattnnnnnnatatggttacatttttctttaacctgtaatagcagggtac

SEQ ID NO: 139782 - DNA, 693 bp, Cannabis sativa
actaatcagattgtaaagagttttatttagggcataaaaccttacacttttctatgttgtaactctatgcaatagaaatcccgagccagcatctggtcgccacgcactactcccacgccatctgatgtttggaatttcaaggattggtgcttgatcgaagtgactgcccctagttcgatcaatgctaaatgacccaacaatatgttgtaagccgagggcaggtcaacaactaagaaatcttgcataataatagcagataaaggcgcctcgcctaaagttaatgcaagcttgatcatgccaaggctggcgatactatctccggtgaatcaataaaggttcaccatacaacgccttaacttggctttttcgagccccattttatttagagtctctttataaaggatatttacggagctcccattatctattaacactctcttgatcctcttattggcgagtttagtggttatcaccagtggatcgacgtgaggatacctcacatttttctcatcttcctccgtgaatacaatgggaggttcctcagtttttagcttcttggaaggttaaacggcaaagaccgattgcgtgttctttatttctttcacatatctattctgggcattattgctttcccctgcaatatgtggccctcccaaaataaccaggatatcctctccttccacaagaataggt

SEQ ID NO: 139783 - DNA, 848 bp, Cannabis sativa
gagcaacaagaagaggagatccaaagactcagacagcgggatgatcctgttgaacttcctccgcaaccgcctactgcggttcctgtagcccctgtagtgccagctgagcaacatgttgctggtaaccgtatggagcctttatatgagaggttcaggaagcaagcacctccagtatttctgggaggtcctgatgtacttaaagctgaacagtggttgaccattatcgaaagaatattgaatttcatgggagtggtcggaaatgatagggtggcatgtgccacgtttcaatttcaagaggatgccttggtatggtgggaaacggtatccctaaccaaggattttgccagaatgacttgggaggaatttcaggatttattcaatgctaaatactataatgaggcggtctgcagtgcaaagcggaaagaattcgttgagttggtacaaggtgagggtatgtcagtgactgaatacacaaccaagtttgaccgcttggctaaattagcctatgggattgtacccatagatttcagtaagaaggagaaatatttggcaaggttaaatgccaaaattaagcatgatttggttatcactaccaatgacactacaacctatgcagaaatggttgacaaggctcttcgagctgaaggagcagttaagtttttgcaagaaacccgagagactcctagtgttggtgggaccactactctccctatatctggccctgggaaagagagtggtgactctactcctgatcaaaagaagagaactttcccatcttcggggagttcagggcaaggaaaaaggtttcgaggaaaccagaatagagggggcgtcagacttactcctat

SEQ ID NO: 139784 - DNA, 599 bp, Cannabis sativa
tcatttaacaaaatacagggtctaatctgtaacttttgcaaaacacaaagtccaaaatggtatttacccaagaattttaccacaaaaattaaattagaatacaaaaaaaattcttcaatagaaacaccaacaaaaaaaaaaaaaaaagaggaaataatggggcgaaagtgagacctttcattagagtataggagaaccaccatcaagaatcaaccgatatgagttgtgaatgtgatttctcaaattccgctttctatgcttcacgcctcgtttgcttctcccccctcacactacagctatgccagaaatacatacccacaatcaatcctctttctccatccttttccctcccttaattttcattcggagccaaaatgactgtaatcgacattctcttccgagtggattccatttgcaagaagtacgaaaagtatgatatcgagaagcagcgcgatcttaatggcaatgggcctgaagatcccttcgctcgcctctatgctgccttcgaacgtgacattgatgccgctttactcgtacgaattgagttttcttgaattttgctttgaatcttcaaggaaccgattttttttttttttttt

SEQ ID NO: 139785 - DNA, 1913 bp, Cannabis sativa
tctctctcttcaaaccacaaaagaaaacccacaaacccaatcgttagcgtaacttcgatgaccactctttggccactgtctgaccccacgcactggaccattcaaattccaggcactgaaaacctcaaccccaagcagcatcgcccctttcaccaccggtagcttaggattgcaagtcaaactttgaaggttcaaactttgaacagattttggccaccttcggtgtctgtttgacgagtcttcttcaccactagacttagctcgtcgaggagaacaatctacagtaagccatttctctaagcccgcgactatttctggtgacgtttttgtagctccgccccttttcggtaactttctggcaatatcatgtaccgttttgacaaatggttggtatgggtatgatctactcgtttagatggttgtttttatatacagtacccctattttcggtaaaataatttctactgccactgataattaacgtgcaccgcttaggtgaagtttcggtactccaaaattttaatatagtcatattatatgttgttagactcaattttgaatgtagaatgtaatgatgataattatttagccatttaattgtataggtgagaccgtgagagtgatatcgaagattggactaaacaattagagctcgggacttgagagcttatgatcgtctttttaagtaaagtttaacgacttggaagatgtattgtttattgattttatatgtgttgaataatattagacatatttcaatttttatgatttgcaaattatttaaaaaattaaaaacttaatctgtatatttttctagactgttctggggcactgagagccaaatatatatttcttttttacaaatatttatgcaggttatgatttattaggtttatttaaaatacaaccgttttgctgtcgaattttctagaaaataaaagggaatatgttattttgttattcttattgtttgcctacttttggttatactgatgagagtcatgttgatcatgatttatgcatattattgtttcacaacctagtctctatgtcatcatagataaattaggtgtgcactcacctgtaggtgaaagacctagaatttgtatagggagtaaattgaatctgagtcccaatattatggtagttatcaggtgcgactatccaatttttagatgtcattttctatgattggtattgagagctagaggtctagtggacggtgtgatatgcatatgaagcttgattttgattatttgtggtctctctattttttatacactttgaaaatggtgatgagatgttttatttttaaaagctaactatacataaattcttattaaaccaatggtcctttgatattagttgttttcctactaggcttaataagttgtttcccctattttctcttattgcaggaactcagtttgatgctagtggatgaggatggtaccgttgaggaagaaagttgttattagtttagtcttattctacttatcaaactttttaatgaaacttattttgtacttaaggttaaatggatggtttggatgacttaaactagccatgtactagttagaaataatgaatgacgtatgctagatattattttagtattttattaacttattaaatctatcaattcagggactacataactgtggggatattattgttgttttatattgatgagttatcctgattttgttactaatattttctttttttatataggagttaatctattatttttaaataggtattttgtgatataagttaaaggatcatttataagcgttatctttctacaagggtcaaagtgtgaccttgaccattcaagttatagatattacatatgtaaagcccgcttagttaatttggaaatcagcagttgtttatgtttaattatgaaa

SEQ ID NO: 139786 - DNA, 856 bp, Cannabis sativa
ctttctctaaattataatattacataatactaatatttcataatatttcactcatacttaattaatttttaagtttttttttcacctcaataaggaaaactttatttaatctacttaatttttggtacaacaactctaatgattcacactaatgtgtatttggtaatatttttttaatcagttttttatttttaaattaaaaaagtgaaatattttctaaaatcatattctataaaactatttttacttttttaatttttcaattaagaatctaaaaaaattttattttttttaattaatattttggactccaagtccaacttaaaccttaaaaaccaaacctaaactcagtcccgcacttggactcgcccccattctcgacctcgaattcagcttgaacttgacttgataaaatcaacaaatgaaaataaaaataaaatttataaaatatatttttatttgttgtttttaaaattgaaaaacaaaattagttataaaatacatttttgtttttcaaaaataaaattttacttttatttttgtaactaaaaaattttaaaaataaaaatgttaccaaatgccatctaaatatcacatcaaatattctaccaagtaaatatatttacgtaaaatatctcgcattttatattatttacattaataataaaaaataactaatttattaaataattagtaagaattatatattcaaaactattcgtaaaaatttaaaatctaaaaataatttaataaaatataatatttattaaatcaattaattcaacactacattttcttttaaaaaaatcttattaaagtcctataatgatcatattgtattatacgcgaccatttt

SEQ ID NO: 139787 - DNA, 686 bp, Cannabis sativa
gggtatgtgtaccagtcaataaggataacgaacagaaggttctaaatggatttcatttactctatacatttttatacacgggaacaactaagttatatcacgatattaaaatcatttgctagttatgaagatatattgtgaaatatgaattagatgcccaacttgttagaaaatcaagtaatggtagggctttatgaatttatttgggtaagtaggaacagtaagtttctatgattctatctaggtacgtagaacaaatgtacaaagtcagtactgtttccttggtttgagcgggatatgattaaaatgattagtgtgataaattatttgttgaggaaataggttaaccttgtgttgcttcaatggtaaatatttcagattgagatttaaagtttacatctaaattctgaggaagtctgtgataagcatgtgtgatagattttgaaagttccttaaatgagcataagctgctgctgaatgagttttcgtatgataatagttattagagtactattaatatggtattgatgtaggttaatgattcaagtttgtatgatgcttatataagagatagagaagagctatgctaattcaaagtgtagagatattaaattctaagttgggaattttatctttcttcaggtggttccaatgaaaagaaaatttggaagttgggacaaaaggga

SEQ ID NO: 139788 - DNA, 910 bp, Cannabis sativa
  modified_base (34)..(52): a, c, t, g, unknown or other
ttttagaagtttatatttaggatgttaatcaacnnnnnnnnnnnnnnnnnnnagatcctggtaaaataattcaaacagagtcacccagctcccagcttaaaggcctcgactcatggatcagccaattactttcacggaggaagacgcaaaactggtgcgtttccctcatcatgacccgctggtcatagatactcccattgccaacaaaattgttattggaatattgattgacaatggaagtttcgtgaacttgttatttaaagaagccttcactgcaataggcctcagggaccgagatttatcaccgagcggttcccaactcacgggattcattggaaccacgcttatcccaaagggaaaagtgagatttccagtcaccttatgccaggatacaccccagagtactttcaagtactgcacctttgtggtggtagactgcccaactgcatacaacgcaatccttggccgaccagccttggtggattttggtgcaataatgtccatccagcacttatgtctgaaattccctacccaagaagccagggtggggactgtgaggggcaatcagggagaggccaggcaatgctataatgtcgcggcccacttaccggtgttaatggtccatgagaatattgagccaagattggtagaagaacatgagttggattcctgtgtgggatctaaaaagattgtagaacctatggaagacgtcaaggaagtggaagtatgagacctcgaccctaccaagatcctccgactgggaaataacctagaactagaggagaaagataaaattgtcaaagcactaagagtagccacggatgtttttgcgtggtgccaaggagatatgactggcataagtccgcatgtatttacccatgtcttgaacgtcaatccagacatgccacca

SEQ ID NO: 139789 - DNA, 756 bp, Cannabis sativa
  modified_base (298)..(299): a, c, t, g, unknown or other
  modified_base (342)..(343): a, c, t, g, unknown or other
tacattagtagaaatcaccattacgtttaaaaacttatttttcttttaagcactaataggaggcgtttggtggggaggaatgaaaatataggaataggaatgggaatgggaatggaaataggaatggaattgaatgaaatttaaaatgcataaaaaaattgataaaaaatcatttatttttttttcttgttacattggaatggtcattcctttcttttcaaaatggaatagccattctaccaaaatggtggaaagagcattccattagaatgtcatttcaatactttaaaatgcaacnnaacaaaagaatggaatgaaaattgtttccattccatttcattnnctccaaccaaacgccaccttaagagaactcttatatgtatataactttgagaatcatcaagctttggactatgtttgaaagttagatttttataagggaaaaaaatatagaaaaaaagtagaaaataataatagtataaataatattatatttggtatagaaaaaaaaattatataaaaaatactcaatacaacaaaacttttcatttttaaacttaaaaaatttatttatttaactttttatgttctacacactctttttttcctacattttttctatctttcttttcctcaccaaaatccaacttgacacgtagtcttagatttttctaacaaaatgcctttttttttaaagaaaactaagttagtttaaatgagcacattaaaccaatatttacagtgtttaggatgatc

SEQ ID NO: 139790 - DNA, 502 bp, Cannabis sativa
atatatatttatttaattggaatttaagcctttctccttttaccatatatgttatcctttaaaaaatttatacctatgtttgaagctttgacagatggtgtgcctatattaggaacattacaaaaaatctctccagacttttctctctcaacatgcatagtatgaacaagagttcttcttccttcccagtgtgttcacacctgattcctgggcgtttccacaaggtgaaacccatgcccagctccagatcgcttgatcatggtggctccgattcttcatctactgagacacaaaacagctcgacccatccaagccacgcgagccgtcctcctcagaagatacccaaccactccagtcgcatcatcatttactccggcctcctcccaaaaccgtcgatccgtacagagttaaatgagactcttacaggtattgatttccccttacaattttccctattcactgtcaaatcgtttcagaaaaaatggttttttattgaacaatt

SEQ ID NO: 139791 - DNA, 1507 bp, Cannabis sativa
gacactttgaaatgcaactaatgccgccgttattgtattttctacaagaagcggctgatgatcttcaaagacaatcactggaaaactggaactggatgacactgtcaatatacacgtgttctgccgtgagtacaattactctatttgaattgaatcataaaattatttgcttccttttcctattctaaaactgacatttctttgtggggtcttctgaggcatcccaattttcaaggagaaataattacaccctttagtctggtccttatacatatttgtaaaagaacagttttcactgtactaatattcatgttacattccattctccagagctgttcgctttcttctgataaagagaatattagttggagtgagggttggactgtggcggaagaagctgtaacagtagaatctgagaaatctttacatgagttggcagaacctggttatttcatttcgtctcatcatgagcagtaggggaggggcatacaaatagttatcaaccaatacgtgtaagtatgagcgagtatttttgtggatagatctatgtttacgcactttgcctgctgtctttgtttaccatgagaattatgttccttggtattcctaatgttgtttctaacagggggtatggctagagcttttgagatggagaattctggggttggtcctctggtttgcccccgaatacaacatcaagtgtttcgattttcactgatgtagcctgctgtcgaggagtttaatagtctgatagtggaagcttcagttctccagcatgcttgaggctgagacactggctttgctccatgcagctgcgtcctgcaggtcgagcgaggggttggaacaatcctgtttttgttatggattgtaaaaccgaggtggagggatagttcagtttttatgcttttatttgatgttttggatatgttgtctaattcccaggtttgtcgggttaattgctgactgactgggcttttctttgtagagaggaggtactaaactccttttcgaggaatggaaagagttaatcatttaaaaatcttaaattttctcagaaataattgttgcagttactatgatatgtaaataattttaactgaagatgctgtaaataaagctggaagactttctagtgacaatctctcctttaaaaatgtgttttgaatttgtactaacttcttagttttctttttcttttacctatattatatagcacaatcttcattgtattttagatactcctcatatggaataaatatgatgctaacatgaaaaattttagccgaatagggctggtacatataaaaatattgatatttttttgtatggaatttaaataaaattttaaattttttgagaaaagttcaatacctctagtttaggagccttggactggtgctcctgctactcagccaagagccttgagcattgttcaaggacgcgctgtaggaatagcccattagatcgtattatattaaattgtattttatgcaatatttttatgtaa

SEQ ID NO: 139792 - DNA, 1140 bp, Cannabis sativa
aaaaagttgtcactaaaaataacagttttttgtagtgatttttggttaatataagaattatattagaatttatcaaattgtaattacattagatttcatatttcatttgtgacaaataatatgcattatttgatttaataatttcattctagaaatgttaattaaaataaaatacaaaaattaacattaacaaagtgttatcattaagaaattgtaacattaataaatagttattgttaagaaattatagtaatattaaatacaatattttttagtgagaacataataataatgtaattaaaaattataattacatttcaaaaatgttattaaaatgaatataacataaggaatcataacatcaaaaaatattattattaagaaattataacaacattaaaatataatatttcttcatatataacataataataatgtaattaaaacctatacgattacattttgaaagtgttattaatgaatgtaacataaaaaaccataacattaaattaatgttaactatttataatatataacactaaaataatgttataatatgctatttaataacatgtaaaaaatgtaattaaatgtcaatacttttaattacatgggttgtcttaacaattgctaaagtgttataaaatacatataattacactttttgagtgttattgtaaatgttttttcttgtagtgtattttccaaaatatatagtcactactacaaaataggtctttagcttcctttttttcaacctattttataaaaaagaaagctaaagggtctaaaaatacccgcctattgaaaatttacatgtagaggcggtttttttataaaaaccgtaagtataaaattgggttataccatttagagcgatatggaagaaaacgacaaagggtttgtttatttaaccctatgttgtcggttgttatagaataaccgacgacatagggtacacgtgaaatttgacacgtgtaccctatgccatcggttattctataacaaccgatggctaggggtatataaacaaacccttgctcgtcttcatcttcttcctcacgaaccaaaccagagcccatagcagcagccaaagagaacccaaaaccctcgccaaccaccacctccgccacccccttt

SEQ ID NO: 139793 - DNA, 598 bp, Cannabis sativa
agttcatgacggagttgccctcgggcgaggttatgatatcatctagaggagtgcgggatgcgccaataaggattgcagacaaggaacttagtggagatctgattaagctagagatgagggactacaatcttatcttgggtatgaattggctatcacaacatggagcaacaatagactgccaaaagaggacaaggactttcacccctaaatctagggagccattcatatttgaaggagtcaaagtcaagtcaagcctaccgctagttacatccctgaaggcacaaaggatgatacgtgcgggatgtcaagcatatttggccagcatagtacataagtcaagagaaacccccctcaagctagagaatgtccacatagtatgtgaatttcaagaagtttttcagaaagacctaccaaggatacccccagatagagagatagaatttgtgattgagttagtgccaggcactccaccaatctcgagggctccataccggatggctccaaatgaattgaaggaattgaaggctcaactacaagatcttttagacaagggattcattagaccaagttactcaccttggggtgcgccagtattgtt

SEQ ID NO: 139794 - DNA, 618 bp, Cannabis sativa
atatttatgagtgttttataaatcttaacatttgtatgtaaaaccatgttagttatttcaatggttgttcgatggagatatgctagtctctctcgcggtgatgaaacattcggtagcgtccctcatcattaaatggaaatacataacaaatgaaggtttatgttggattttaattacttgtacctgttaccttggttatgaaaaacttattcttaggttaagctgaatttcttttctctattatgttaacttatcttgtctacaaagttgaaaatagttttgatggcaaaccaatgatactgattttagagttaattaagtatttattttatatttaggaggcaaatgaacacttttgtctacacttaaataaaatttacttgattaaatgtacacgtaaactttgtagcctaaaaaccattgaaacaatttattgccccctaaggattatgtgtcactactttatatgttcaagttaacagcatttgcttttataattcaaagttataattcagtgtagatagccttttaggtggtgtttggttagaggtaatgaaatagaatggaatggaaaggaaacaatttttattccatttctttatttggttgcattttaaa

SEQ ID NO: 139795 - DNA, 663 bp, Cannabis sativa
tgaaaggttgatttgtgttaatattttctgtatttataactactcttcatttgaaagagcaagttatcaatcccaaggggtggtccagtggtaaggagatactggaaagtgctgataggtaaatttccaaggtttgaatccccctaagactcaaaaacttggggccactgggaggtctcctggtcgagcttccagggccacacaacaaaataaataaataaatcaatagaaagagtaagtataattaggcagatctactgatatgtttatgatcatggagtcctacatagttgaactaaagtagcatttgttacttgtaccccaaaacattgttaggaaaaatgcttgttgaaaagagaagctatctatgctccttatgtttttgatgtaatttaatctggtggatcttttataatgttttttcctactatctgtcatggtgaatgtttgataggttgaagagaagggattgactatagaggcagcagataaaattggtgattttgtgaaagagaggggatctcctcttgaattgttaagtaaacttaaaagcgaggggagcgaattcttgaataatattgcatcggttgatgctttgaatgatctggagattttattcaaagctttggataaatcaaagtgtatcaacaaggtgacttttga

SEQ ID NO: 139796 - DNA, 950 bp, Cannabis sativa
agcttctcacggagtgggttaggatccctccctatatgaggaccgcgcctacccagattttcctccagcgggccaagaccttttccacgtacgacaagaaggcccttgacgtcagggagtcggtcacgacggagaattgtcggaaggacaagctaatctcggagaaccagtcgggggatgacttcaacctttccaaagtcatctgcacgaatgcgagaactccggcagcaaagaaggcactccgggtggacattatcgccacggcggaggacaagtaccagaagtatctcttcaagagggaacaggagctggcctatatcaaggcccaggcggtcgctgggaggactctccgcctggaagctccgccggagcagaggacccacaggcccaagcctgtggtcccagtcccaaataccggagctcccaatgccagcactttgggttctggtaagtcctctttaacaatacattatgttcctcctgtccgtgagtataccagccttaggcctacagggttcaatgagcgtctccataggtttagaatgccttctacccagtggggtaatcatgccaaggagtgttatttttcccacttaggccattacttaggtcggtcccggctgggttttggacctccggtgcctattcccttggatcattcaagatacgtatcttccaactggtttcttccctcggacagttatctcggggatggcgaagccagcgtcatgattcgagactttgctagggtcgaattagagagtcagtgtaggactagttttattgcttttttgcaaagtgtatgctgttctcatgaatgtcctagcacttaacatattctctttgttgcagcagccaggcccatggacaatctcttggcaactcttgctgaggcctacaatcctgatgcttctacacctctggcagcctcccagttggttactcctggg

SEQ ID NO: 139797 - DNA, 1057 bp, Cannabis sativa
gagttttttgcggctaaatcctcttaactattattcatcttatacttaactctataagctcaaattttgacagtaaaatctttcaaattattgaactgcttgcaaatttaaagtgtcatctattttttacagtaaactaccaatatagattgtttgtggacacttttgtatctgtgtcaaacttatattagtataccttatattattattttaaaaatataaaaattatttcaaaatttataatatttttttattttttaaatatttttttattttttataattttaaatgaattttgaaaataatttttaaaataataatattggttgtactaatataaacgtgtcatgtgtacaagagtgtacacataaacagcttataatgacagttaaccgaatgatactttaaatttactactatttcagtagtttagaggattttatcgttaaatttaaacttaaatgattaaatacaagtgaaataacagttgaaaagatttagcgaaaaaaaaactcaaatatatatacctaaaaacttgacattgattatccaatagctattttcatggggtaagttgaaaaatacctcttttattaatcaattaaccaaatatacctctaattttttttttaattgaaacatacctctttttatgtgtattgtacccaaaatgccctaacataagagagttacatggagagtatcttgaagtgaaaggggcaaaattagtacaatatttaaaaaaagaggtaaaaataatagactttaaaaaagagggtaaaaataaaagagtacaatataaaaagggtatagagtctaatttcttctattttcatcacattaaggaggattaatggacttagtgggccaactagcccaacacttattatacggggaaacttaaaaaatattaaaatttaggttaatttttacaaaaatactgacacatagaaaaattttcaaaaatattgtattttttaaaaaacaactgtggaacaactaaaaaacaaccgtaaaacaacaatgaaaacttaacacagtacatagtataaaactt

SEQ ID NO: 139798 - DNA, 1473 bp, Cannabis sativa
aggcaataaaaagtttgagtggacaaaagactgcgaagaagcctttcaaaacataaaaaggcatctaacaacgcctccagttttggcgaaaccaataactgaagagactttgtttctctatttagccatctttgaagatgcaatagtgctgctatagtgcgagaagagggcaagcactagcaacctatttactatgtaagtaaaaggttactatgggcagaatctagatatccccctctaaaaaaacttgcattgggcctagtccatgcatctcgtaaactacagtcatacttctaggctcacccgataaaggtgttaaccgatcagcccttgagacaagttttatcaaaaccagatgtttctagaagattgataaaatggtcgattgaactggtgcagttcgacataacataccatcctcaaacatccatcaagggtgaagctttggctaacttcttgatagaagggataactccagaggaaattccacctattcagcgagacgtggaaacctagaagttatacgtggatggtgcatccaacgaacagggttcaggtgtaggggtaatattaatatcgccagaaggcttcaagtttcactatgctctgaggttccaatttgacgcattaaataacaagactgagtatgaagccttgatagtcagcttaaagagaactgaggcattgaaagtcaaaaacctcatctgtcgtagtgattcccagttgattgtgaaccaggtgctcaaggaatcccaggctaaaggcttaaaaatagcaaggtatttagagaaagttcggaagaacttagaaagattcgattattttaaaattgaacaaattccaacgccgatgccttagcaaaactggcctcccagaatgacttggatgaattgaacttagttttggtagagatgccaatcgagccaagtgtatgtgaaactgaagacgtccagatgatagacaactctcctacatggatgacccctattatcaattttttactcgacggacaacttccaactgacaaaaacgaggcacgaaaactattgtattcagtgcctcgctacacaatgattgaaggaaaattgtatagaagagggtactcaatgcccctactttagtgtgttctccctgcagaagcaaatgaaatcatcagagagattcatgaaggtttctatggggatcatgcgggttggcaatgtctgtctaaaaagatcattagataaggatattattagccaacgatcaataaggacacatacgagtttgtcaagaaatgtgataagtgtcaaaggttttcacatatatgtaatgccataaataattaggcacgctacccaaaaatacttatgaaaccccaataccctaatcagaattactaatcaaaatagcgcagaatttaaactttatattaaacagaatgaaaataaaacttgtaatacatttaaccttttaaacagttgggatcccaaa

SEQ ID NO: 139799 - DNA, 1062 bp, Cannabis sativa
  modified_base (523)..(528): a, c, t, g, unknown or other
cgtgacataaagtatgtaatcaagttcagtgtaggtattgtagtcaccagtttcgtaacgaaatcactaaccgatatcgaaatagggttctacttagttgtgccgatgtgcactcgcagtagtgacactatcactgtagatgtttaggggtcccatgacacaaagtaattaatccagttaggtgtagtgtatcggagttactagtttcgtaatgaaataactaaccgatatcgaaatagatttctaattagtggtgtcgatgtacactcgcagtagtgacactatcactgttgatgtttaggtgtcccgtgacacaaagtctgtaatcaagttatgtgtagtgtatcagagtctcccactaaccgatactgaactagggtgtcgatgtaccctcgcagtagtgacactatccatgtagaagattcggtgtcccttgacacaaagtatgtaatcaagttaggtgtagtgtatcggagtcaccagttttgaaacgaaatcactaactgataccgaaatagggttnnnnnnagtggtgtcgatgtacactcgcagtagtgacactatcactgtagatgtttaggggactcgtgacacaaagtatgtaatcaaattaggtgtagggtattgtagtcaccagtttcgtaacgaaatcactaacggatatcgaaatagggttttacttattggtgccgatgtacacttgcagtattaacactatcactataggtgtttaggggtctcgtgacacaaagtctgtaatcaagttagtgtagtgcatcagagtcacccactaaccgataccgaactagggttctacttagttgtacccatgtacactggttaggtgtacaatctgtaataaagttaggtgtagtaaattagagtcaccagtatcgtaacaaaatcactaatcgatactgaaataaggttcaacttagcggtgccgaagtacactcgcaacagtgacactatcactgtagatgtttaggagtcccgtgacacaaattatgtaatcaagttaggtgtagtgtatcgcaatcactagtttcttaacgaaataac

SEQ ID NO: 139800 - DNA, 822 bp, Cannabis sativa
atcaacatgcacagaaagtcgatcgtctgaagacagagcttcaacaacgatcatcgacctctgatcgtcctctacagctccgatcctcttcaggtaatttcttcaattgcttctgatcgaattcttaaccttcataatctgaaaaatcaatgctaattaaagttgaaaacgaaaaaactaaaaaaacaaaacaaactatacaaagacattacatgtatatacggattaatggtatataaacattacacgacattttaatgaacaaatataaaaaataaataaccggttaaaacgatgtacaaaattaagatcaaccatatcaaacgcatacataacaggcaaaacaaatatataccataaccaaaataaccagttaaaaaaagtaaaaaaaaaataatgagagtcacatttaataaaacataacagcaaaaaaaaaccggttaaaaaaaataatttttaaccaatagaaacaaaacaaccacacctaaaaccagaaaacaaacaaaaaaaaaccagttaaaaacctaacatacacaataaaacataaaaattaaatgaaaccagttacattacattacaatacaattaacaatgctagaagaaaacaaaattaaaacagatacaacaatatataacataaaaaaaccagttaaaacataaaaacaagttaaaaaaactcacctataacattgattctttaaaaacaatttaaaaataaccggttccaatatagaaatataacaatataatattacttttgcataaaagagttaaaaaataaaagagttaaagaaagtcacaaataacaaaacataacagaaa

SEQ ID NO: 139801 - DNA, 853 bp, Cannabis sativa
atcccaatgaatgggcgaacgacatttccttccataaagcatctcatatggagccatgccaatagtactctgataactattgttataagaaaactcgattagaggaagatacttatttcaagaaccttcaaaatccattacacaagctcttagcatatcctcaagtatctttataatcctctcagactaaccatcagtttgaggatgaaaagctgtattgaacttcaacttagtaccattgcctattgtaagctttcccagaacatagacgtaaactttggatctcaatctgaaactatcgacttcagggcaccatgaagtcaaactatctccttgatgtataaataagcatattgatccactgtatacattgttcgcactagtagaaagtgtgcaggcttcgtgtattgatccacaatacccaaatagaatcatagtacccctaccgtccttggcaaacccaccataaaatctataatgatgtcttcccatttccactcgggaatcttcaagggttgaagtaaacctgctgacctctgatgttctactttgatttgctgacaggttaagcatcttgacacatattcaacaatatgactcttcatacccgaccaccaatatagagctttcatatcatgatacatcttggttgttcccgggtgtaaggagtacggtgtagtatgcgactcgttaagaatctcctgtctgataattttatctgttggtacacaaaccctgctcttgtatcacaataacccatcagacaaaagtgaaaagtcttttgccgatccggcctctaacttctctttgtgcccctacaactcagaatcactttgtgttgggttttgtgccc

SEQ ID NO: 139802 - DNA, 1200 bp, Cannabis sativa
gtagtggctcgaccacggatcaaatacgaaaggctctaattgcacccggtggctcaagtcagaataagagcttctgagggaaccagggtcgagataaccagcagggtggttctgaaaccagatacacttacccggagtgtcccatttgtaagaagaatcatcatggtgagtgtagagggcaaggatgtttctagtgtgggtttccaggacactataaaagagattgtctacagcttaagaaagaggaatagaagtcaacagcaaaactcgctctagcaagggtgtttgctttagctcaggctgacgcagaagcgagcccctcagttattaaaggtcagctctcagtcaacaactcttacttcattgtattcttgactctggggccactcatttttatgtggcagccaagatttttagtaaattggatagaatgcatgatagttatgataaagggtttggaaccctactacctggcggagaattagttatctccaaaggtggattttgtctatgccgattagaattgaggatagggagttgagtgctgacttgatagaattgggtttagcagattttgatattatacttggaatgaattttttatccaagtactcgactagaattcactataaagatggtgatcttccaacctgagggcgaggaactgtttgtatttgtgagatcagttcagggatcccgaattccagtgattttagtattaacagctagagatttgttacaagacaaatgtttaggatttctggcagtggtattggataccacatggcttgggacaattcggccagagcatatcaaggtggttcaagaatttttatagatgtttttcatgatgaacttcggggtttaccaccgcagagagaaattgattatgtaattgatctagcaataggagcagaaccataatctaaggcaccttacagaatggctccgacagaacgtaaagaattgaaaattcaacttcaggggatgcttcacctaggattttctcggcctattgtgtcaccttggggagctcccattctgattgttaagaagaaagatggatccttacgcatgtgtattgactaccgagaattaaaaaaactgattatcaagaacaaatatcctttacctaggattgatgatctttttgattagcttcaagggaagatgactttctcaaagattgatctctgatcg

SEQ ID NO: 139803 - DNA, 653 bp, Cannabis sativa
  modified_base (614)..(627): a, c, t, g, unknown or other
aatttctattcaaacataaattaaacataaattaataattttttttttaaaaaaaaattcatgtgattttgccaaaaattaattttaagaaaaaaaatatctaataagataaaatgtcaaaactaacatttttgaatcttataatttaatttaataaaatatatttcaaagataacaaattttgaaaatctaatatgttagcaaattttgaaatttaaactagattattctaaattttattaatgttttaatatcaaaataagatcatttaaattttcataatagaataagtcatatctgatcttataattaaaataaaaaaaattatcaaaatttcaaaattaaccatacagctatttttgtggaaaaaacaaattttcaaattcaaaggctactaatatctaaaaccaatttttattaaataaaaattaattttattctgataattaaattttttggcactaagggagtatgcattgcatactccccgtgcgcacatgaggctgctgatgggcgagggagaggctgcaagtagcatgtatagggggcaaacctctgtcaggaggggaaaaaactcggacagggcctggtctctgttggaaatattttaccannnnnnnnnnnnnntaccatgtatgtttcattaacatcct

SEQ ID NO: 139804 - DNA, 1106 bp, Cannabis sativa
gtttccattgtagaaaatacatgcgttcttgacttgttgtagaagatagatagaaaatctaggctcaaaactttgtgattttctctgtaatagtccgtacggctttagggtttacgacatttgcctttaatctcacattgttagtctttcaccttgctcattcgaagcttcgtgaaatttaaccctaaacccaaaaatttcaaacttctgggttttgacttgatttttatacattttttgtctttttaatctgttgagtactcctggtcggcatattttcctatttaatgtttgatatctaggccaaacactcatctcgtgtgttgtcttttgtagatgaaccctggtgagttttggggaggcgagcaccaaattgatcaggacttgttttaacttctgtatgaggatcagcctcgtcttcgcgccagtccatcctctttgagtgacagactttctaactcgagttttgaagatttggaggggagtagtgatcattctcctactccagaatccgtagttcaacaccattattactctgagcagatcgccgaagagtggtacagccgctttatttgggaattgaagaagggttggaggcgttatcttccgtccaactggacatacatcgtctggccaggcgttgctgatactcttcctgttggctgtccaagtttgggtaacttcgacatcccaattgctgtccctgctgttacggttgcacggcataggaatcagtatccatccaggaggaggatgatggcccgcacaaagcagaggatgcgaaaggtcaatgcatttgatcctcatgtggccaagctcgccacattgccaagtgtcgaacaagatccatccgccatggaggagggagatcatgaggggaacattgaggtccaggagattgaggagcaggacgacgtccgtccttgcagcccttctgaggccgaggaggaaggagtggctgaacctcataactttggagggtataacgaggcccgggagccagtgtctgcggagggtgaagtcttggtcaaaggggaagactacatcaccaaggagcttactgaagcagtttctcacaagaggcaaggtgccttaggtgccagatg

SEQ ID NO: 139805 - DNA, 573 bp, Cannabis sativa
agataatgagtttagaaaaatcctggtgttgttctttgcaatcttggttttgtgtatttgaattcttgctggtatgaatgtgaatcttgatgctttcttgatgtcttctttatgctttcttgattaatctttgctgcagattgtgccttgtttggctctaataccactgtaggatattgttccctgacttaaccctacacacagcacacataaatgaaaaaagccaaggtcaattaagacctttacccagtcaaagccctcttttttgactcacagcataaacaccaaaacgacaacccctctctattaattgctacatgtcgtttcatataaaaggaaaccctagacacatatcagaccatatatatacatctttatctcttttatcattcaaacatttaaaacagccaccacaaataaacctagcagagaacgtcttcttcttcgttgttcttctatgaagaacacgaagaacagctgcagagtaaacccagaaacaacccagcacagattaaactaaacccccctttaacccgagccaccttcttcaatgttcttctctgaagaacatga

SEQ ID NO: 139806 - DNA, 641 bp, Cannabis sativa
  modified_base (292)..(297): a, c, t, g, unknown or other
  modified_base (576)..(591): a, c, t, g, unknown or other
atgtctggtttcaaatttaggattttgttttggagttttgatttaaggcatttattgagtttttgttatcgtgacataggatggatcgcccagctttgtttccacttaggtcggtccgcacacctgatttctggactgaggtaagaaaagtgttatgcatcacttcggattaagtgattggtgattgtgtttattatagtctcaattatgatcggcatcctggttatgtgtttattatgccttggttatgaccgagggttggaaacagtcattaccgttacgagtaattacnnnnnnaactacggataggtttcttacttatcgtttgctgtatcggggaacgatattgacatacatagctcgtggttatcgagtggtaacggtactttatgaagtactgagattgtgtgattattattatgaagttgtataagcatgttagtgtgcgatgtgttatgtttgcgtgcattttgttacgatatgattaattgaggtttatgttgttatggtttaatcacttttttggctgagtctctatgactcataggtgctaatgttggatatttattttaccannnnnnnnnnnnnnnncacaagtatgttatttaaacaccctaaatgtgaactttctaaaacgataa

SEQ ID NO: 139807 - DNA, 885 bp, Cannabis sativa
  modified_base (641)..(667): a, c, t, g, unknown or other
ttatgccactaaaaaaatcattgccactaaaaaaatcattgagtttacgccgctattgagtttacgccgcttacaaactttacgccgcttacaaactcaaaactttgagtacttatgccgctattaaacctttctaaaataaaaagaaaataatttgtattcttatttatttatttttttcaaggatattattatttattagaagatgtcattgtaaagtattatctggctgttgtgattgttttgttttgtttaatatgctcattcccaaccactccatgcacatttataaaaaaatatcatgattatttacaaacatgtttaaattatgcagtacgttgtccctattatattgtcttatgccgcacaaaaatcgtggatgtgaaaacgccaaattttgtgattttgtacccactataatacaatagaccattcaattctatccaacttacaactcaccctctagttgattagcaaatataggataattagataagacattattttttataaaaaattatatttttatatttaaagaattattttttacatttatatcgtttttcataaaaataatatcaaaacaacaagaaaactacataaaagtaacataaatataacaataaaaaataacatacagnnnnnnnnnnnnnnnnnnnnnnnnnnnaagagtacaatataaaaataccgtattttttataaataaaataaaaaaaaattgtaaaaaaagttaaaaattctataaaactgtatttttataaatttttttattgtttttgtgttcttgtaaaataatcccatgtagaatggctgctctagatggattaaaaatgggttgagatgcaaaatgaccctaaatttggtaactaagttagtaaatgtcca

SEQ ID NO: 139808 - DNA, 871 bp, Cannabis sativa
  modified_base (37)..(39): a, c, t, g, unknown or other
tttgtatattagttcctcgcctaagaccttacagtcnnngttacaaatatactctgatactcatgtaattaatgagctagtccatttagagcgattgcatcgatccacattccccttatcgtgacacgtgtcctccactaagatggaagccaaatttcgggtataataattgccccttaaaaagttcttttaaagtaaaaagtgctttttaataattacaaagggcatttttgtcagaatcccttcttgaaaaacaacttatttttttattctggcggttatacagtttcgagggtcattatgaattgtcccttcatattctgccttccaaccgttgcatttctcaatccttagctttcttgtcactagactttgtgtataaaagggcggctcaagattgtcatttttcacaaaccttcggctttttagtgggatccattttcagaaggaatcatctctttcttgatagaatgtctcttttgaatttagaagttcactctcccaaactcataataccaggatgcaccaaccattttccatttgtccccaagaacttcaagcctccattcgagccgaaaataatggattccaaagctgaggagcttcagaccaatccaaaccaggagaaccccgtagcccgccatgaccaatccaaaccagattattattttttgttgccctattgaccttttttcttcgtctccacaggaataggcatagatcttgtgagcgattttaaaggtcctcctcaagctatcaaagaattccagaggaaggttggcatggtttcagatggacccagaagaaaagttggcgtggatactatcagagaatccagccaacccaatgtcttgttggaaattattttacc

SEQ ID NO: 139809 - DNA, 687 bp, Cannabis sativa
caaatttggttaacgaaaatctgtttaacagttttgtgctttcattgagagcctctgtgaaaaagctctaaaaaagcctcctaacataaaagtgatggatgacaccaccggtagtagtcctaaagaaggaatcaatcatcatcctggaaaagaaccattgagtcctcagggatctgctaaatcatcgcatgaacagaatgaaagccctaggaaaacccagtattggggcccctagcttgacagaccttagaagagcaacaaacggtcactccctaatcaggttgatgaggatggcgcttacgacctaaccagacacataccgatcgtggaattagaaaatcgccatcttaggcgtcgaatggaggaagcaaactaatgtaatgccgagttggagcgtgaaatagctgccgtaaaggcaacgctgggagattgtaaccaaaaacaacctgacatggaggaaagaggtttacgaggcaaaccttgtggctcacaagtcaagggccaggatatgacaaagggatatgctgagagctctcagaagattcaacttgaggaaactgagaaaagactagggatacaacttgggatacgtagagtatcagacgaaaatttccaacccactattcagtctcataagaatgaaactcgtgcaaacccttgtaggaagaaaaaagtgagtcaaacctt

SEQ ID NO: 139810 - DNA, 558 bp, Cannabis sativa
tgaatatcccgcttttattgggtcgagatgaatgtgtaattaaagatatacagtaaaccttatctcatagagatgcctcgccgaaaatggaaccaagttaactttaatagcgagcagttgcttgtcatttgccttcttgagactaatatcattttaactttgataacaatattttctggtgtcgagatgatcttcctcacaagcataccttcttctagcaagataaacgcctcattgtctgttatcttgactcgccacactatctacagtcaatttgtatatcatataatgtacacttagtgtttttagtgttatcgtttctcttccacgcagtgagattgaggcctcgtcatgcacacgtgcacccacatggtttctcgtcaatacataagttagcagtttgtacattactgtctcgcataaggcttttcagcaagctgaattataaacataccctaggaattgtatttccaacaagtcgttccatgctaagtgtacttttcgtttgcgtgtttgagttcttcatttttcccagctcaacacgtgtcttcctctgat

SEQ ID NO: 139811 - DNA, 734 bp, Cannabis sativa
  modified_base (36)..(42): a, c, t, g, unknown or other
ccatcaagaacaaatatcctttacctcgaattgatnnnnnnnttgatcaactgaaggggaagacggtcttttccaagattaatctttgctcaggctatcatagctgagaattcgagaggaggatatcccaaaaactgcgttctgtactcggaatggacatgatgaattcctcgtgatgtcttttggactcaccaatgccccaacgacattcatggatctcatgaatcgggtgttcaaggattacctagatagatgtgtgattgtgtttatcgatgacatcttggtgtattcgaaatcagaagaagagcatgcgttgcatcttagagcgcttttgcaacgattacgagatcataagctatatgctaaattcaaaaagtgtgaattctggttatcttgtgtctctttcttggggcacatagtagataaagatgggatcatggtggatccgaccaaaattgaagttgttcgggattggccaacaccaaagtcagctactaaagttagaagctttctgggattagctgggtattatcgtcggttcgttgagggcttttcaagattgttgtatccttgacggagctgacccgaaagaacttaaagtttgtttggactgatcggtgtgtaaaaagttttatgaagttaaagcatcgcttgattaccgctccagtactaactcttccttcagataaggaaaagtttgtggtttattgtgatgcctcgagacagggtctcgg

SEQ ID NO: 139812 - DNA, 507 bp, Cannabis sativa
ttaggaagatgaatttaatggtttgcccctagtagcatttaagtttataatcctacttggggtttttttatcttaaatgccttgtactattttcattcgaacttaatacaattgtgtttgcttgcaattttattcacaatgttaacagctatattttaatcaaatgtaaagtacttttgggttcttccattgctcgtaatcttcctgtttaagtagttagttatctaccaaacttctttgattttcgagcagttctcaattgtgcctcgctatggcaattataatatgccttaagcaaacctgaatatacttttaattattttattatcactttttgtatatttttaatttgctcatatgaatagttagattatctatcaattttctaggttcaagtgcttttatcaagaccctagctcgcctgaaccgttaacatttagttttatgcacgagttatgagtgttggaagttattttaccaggaatttagatctactcacaagtatgt

SEQ ID NO: 139813 - DNA, 816 bp, Cannabis sativa
cgtgacaagtgatcgcttgggtccgagttcctggtataagctgccatttcgggcatcttgaaatttttggggagctccgcttccaagatgtgcctggcgcaaggctcctggtcttcacagttagagtcggagtcatcacctttttgtcttcgagaaactcgggcaatgtcttttcggagtatggcaagctcagccatgattccttcgtttagtgttctcgtggagaccgcgggcatgtgtttcttttggtctaggtgatcccggaggtcaccatgtctcccgttaatctgatgtcccaaatcgacaggaggacatttttggccccttctccctctccctccgggttcttggtgcacagaaacgctctttcggtcctctcgattctgagggccaagactccctttttggagttttcccctctgcagaccattccctttcgggaaatctaagcggacctttcacggatcctacacctttttctttttcccaggagtggaagtagggtttttctgctggttcccttaagagggataccttatagggctaggttccctggatttatgcttttgggcactcggcgaggattctcctgctgtctccccaagtccagcaggaatggctttatgatgcacgtggattcctgctgcctcaatggctttttgcatggccaacatcacctcttgcatcttttggttttgttctttttgggctaggatttcagcctcgtgatcagaagccttttgtctcaagagtactagctctgtatagctgccttcattgtaggcgtcgtattcatcaaagtttccttcgtattcg

SEQ ID NO: 139814 - DNA, 578 bp, Cannabis sativa
tatttggattccttgtgaagaattaagcaatttttgtttttacgaaactcgattttgataaaaattgaaaaagttatgagagtttgaaattgggtagaatcggtgtcgagtatggtgctcaatcgcaccacgaactcggacaaaccgaagtgatgcacgcacggattaggagattctgtgtctgaagacacggtgctcactctattcagacacgatggacccttctactagcccacgggaatgctgcaggcgccgaagaatgccgcacgttctccctctgcttccttccacttgcacgcgcgtaggaggctgcatgcagcctcctcgtgggcagccaagtggttaaaattgcaattttcgacggattttttcccaaattccgatttttgcaattttcaaaccttaatatctaattaaaatattatttttaaaaatttaaacttaaatatcttttttttttgttaaattaataatatttattttttaaatagattattattaatctttaatattttgagctttaaatttaaaaattgattattttattttttaaggttatggtcagatttaaaaatttg

SEQ ID NO: 139815 - DNA, 856 bp, Cannabis sativa
gcatggaatttcgaagagaaggttctccatgaactaaactttctaggagccaacttgaaataccattgctgagcggcttccaacagattggcagggaagattctgcagcagacatctcctcgtaccccttgcaaatccatttgcatttcgaagtattagagacgggaaaggggatcttctctcccggtgtacatctttcacgtcggcattttgaacttgtggggcagcgacaagagattgatctcaggtgagaaaggagttccgcgtgctcggtcctactcaagatcattctttttttgtccagccatgtcgtaaaacatgtttttcagttcgtctagctgagcctgtatggctgggctgacctgcttggcattctggtcagtttgaattagatcagcatctttctgagcgggaattagagtacgggttccgggctgcgagaatgtcgtaacattctgatcgtttgctcccctccttctatttagatcattccttaggtcatgggttgctcccaacctttggaatacagaagtgcctggttgcctcatcgattgattcgcttggttgacgggtggaatgacaccatttatctagttggaaccaccaggtatgacttctcccgatgaattactagacaaggtctgcccgcctaccgcttggcccacgagtggaactcggactagggatttggcggctgaccatttgcgatctgagaagcattcatcgctagatcttcgtctgtttcacctaggggaatggcgttcggcggcagctgacctacagtttggtaggcttttcgtatcagtacggtagcctgtcgactacaattttaaatctctgcatggtgagcccttaa

SEQ ID NO: 139816 - DNA, 761 bp, Cannabis sativa
atgttgttgtaacattattatttttaatatcaaatctctcttttattgtccttgtattatttttacaattgagctgtatatatcttgattttcttccgttgtaataatatctctaacacccacatcttgagggtatttatacttgaattttgctatatgcatgagaacatatatgtatatgatatgacatatgattagcataataaaagttaccgttttagaattaattagcttcctccaaatcttaactaactaattatgtcttttgttagcgtaatgaattccagtatacttattgtgttcaatagtgttggaatatcttttaccaagatctagctttagtaacaagtatgtttttaacatcctaaatatgaatctctaaaacgatgaaaataaatgcataaaaggtatgagaaaccttacattggttgcagtggaataaatgactccttccgctcagatctctaaccccttgtatcctttctgtcgcaaagtatcatcaagatatgagcccgaaactccttcagttgtttgaattcttcacaatcttacacactataattgaggactaacgttctatgagtgggcatgcactcaatcactaaaggctgaatttgttttgtgaagaaggctgtagaattcgaattagaagaatagaaaagaagaagaagaagtctcaaactcactagttgtctcacaagaagaaaactaggtcaagagttaatatttgcattagttggataatgagactttcttttctt

SEQ ID NO: 139817 - DNA, 634 bp, Cannabis sativa
tttatatttttttttaataatggggtgtatttataattttatggggtgcaaacataactctccttagtattattggtatctagtattttttataagtggcattttaggattaattagtaatattttcaaatagttattttcttaaattatatgagatttgatatttaattatactaatagcaatatgacactaaagcatcactaataataaaactttagaggatgcttagtgaggtagacatattatgtgtcaaaatattgagatgctataacattaaagagaaaagaatgatatctagaaatttacatagatgctatgttgtggcattgatgttattcatttgtttttaataaaaaaatgaagctaaaaagtagagctgagcatcgatcagtttagtcggtttttttctatataaaaatttgaaattcaattttcggtatggattggtgcaattcgaaaaccgaccgaccaattcagaacctatcttaaaatcggccgttttgaacctcaattggtcggtttaaaccgcccaaaccgaatttttttttaaaaaaaaaaaaaatatgatccaatttattctataaacacattattctatattttacaacaacaaacatacaaattaattgttca

SEQ ID NO: 139818 - DNA, 703 bp, Cannabis sativa
ctgccgctcaactccgacagacccaaacgaatggacgtaatcttgaggtggtcgataatttctgggtttgcgatttgaatcttgatttaagggtttgtttaatttgttagatttatcaaagaaagcagaatattttataccaaaaagaaagaaagaaagacagaaaaattaagagaacatgatgattttcttttaagttagtataaaaagatgattgactaagagatatgtttgggcttttttctaatcggagaagaagacgataggagtgaaatatgaataaaattatttttattttgttattttatttataaataatttataattagtttttaattttttataatgtttaaataattaaatttatttagaccaataaatatatgccatgtgtaaatgaatgcactaaggggcagtctcatgtggcatttaatagtcaaagttaacttatacattaaatttgccaacagaagtaaacataagatagttttaccactaaaaaataacataagggagttaagtgtctacaaatataaacataaaggggtttgaccgcaaatttctctaattattatatattattattgtgttctatgttctatagaaattgatcttgggtttattattaatttttctaacatgtggtatcagattgtctattgtatatgatttagaacctataatttgtataacaattaatatg

SEQ ID NO: 139819 - DNA, 790 bp, Cannabis sativa
cttttataacaatgtttcacatgtaaataaattttgtggttgtacatagtgttatgaattgagcatctgaattaattgttagagttagtaggatcaaaattctggtttatgcaaggaagaaagcaaagcttgagtcagcaatgtagtgattatctgatagcgtagttattttttttatcttactcgtgggcgagtaagaatctaggttgggagactttttttaggttatatttagcctatgtttcgggtttgaaaagtaagcatttctcgtctattggtgtcttttggagtagttttacgcttgattttcattgtttcaggttccctgggtatcaaagttcaaattcagtcaattggtgaaaagacgggacaaactggcaaaaaatcagaaaaatctgctcaagaggcgtcagtagtcgcgaccaccattgagccaggtcgcgacccttttctgtggtcatgactctggttgtgacttcgaggatttgtcagaaacttggttttttgagttttgcctgtagtcgcgaccagcttataggctcgtcgcgactaggttcgaaaaatgcagttttgacctaattctaatttttctctcaattggaggcacacctttcatccctacataaggaatacgacttagaaggtcaaattaagcagaaatagacctgaataatggatgaaagtggagaggaagatatcttgaagacccggagcgacatcaccttctagtttctttcttttaccctttattctttcttttatgtctattgttgtttcagatttaatcatg

SEQ ID NO: 139820 - DNA, 701 bp, Cannabis sativa
agttgtgaattttgcagcccactcataaaaaattacccctaatgagaacatatcatattttcaagtgatgttttgtatagacactttctgatcaacttctttggtctcattagcttcaacgggttggtaaagacgttttcattgtatacaccttttctccccttcttctctaagagcacaaaagaaagaaaaaaaattaatgcacatctttaatttagatgaagtaatttacaatactaaatttttaaataaattttaacctacagcgaaatcggctagctgaacattatcttgcatatcaattaatgtagatattgtgaggtgtaatatcgatatgaataatcttgagggaataaatgtgatgcatggccctcaatactaagattcctaaccaagaagtaccaagtcaggcaataattaggtggaaatccacaacatagactagatccattaatggactcaattagcaactaagtctaaattcatatacatggttatgcatataaatatataaattaattttgttaatatatttatttgattctagaagacaaattgacacaattaagaaaaaaaatctccaaaaattcaaatttgaacaataagtatgtagacataaaatttaattcaaccattaaaataagaaatatatcttaaagaataataacgtagggatatgattttgtcccgtgatgtacttt

SEQ ID NO: 139821 - DNA, 913 bp, Cannabis sativa
gtctgcacattttctaccagttaagaaaacctttttagtggatcagtatgcagatttgtatgttaaagagatagtaagatcgcatcgtataccaaagtccataatttcggatagagatccaaagtttacctctaaattctggcagagtttgcaacgggctatgggtaccaaactgaacttcagtacaactttccatccttgatggacagtccaaaaggaagattcagatactagaagatatgttacgagcctgtgttatggatttcaagggctcctggagtaagtacctaccgttgatagagttctcgtacaataacagttatcaaagtacaatagggatggctccctatgaactgttatatggaaaaaagtgtagatctcccattcattgggatgaaacctgggaaaagaaatacttaggtccggaatcagtgcaacggactaatgaagcaattgagaagattaaagccagaatgcttgcctctcagaccaagaaaaagagttatgtagatccaaaacgcagaaatgtagagtttcaagtaggggatcatgtgttcttacgagtgtctccattgaaagggatcaagcattttgggaaacgaggcaagttatgccctaaatttacacgaccttttgagattttcgagaaggttggacaagtggcatatcgattagctttgcctccagctctttcaacagttcacaacgtattccatgtctctatgctaaggaagtacgtttcacatcctgctcatgtactgagttatgaaaatatagagctataaccagacttgacatatatatgaagaacaaccagtttaaatccttgacagaaaggataaggttcttcggaacaagaccatagctttggtcaaagtactctggagaaatggcaaggtggaggaagccacct

SEQ ID NO: 139822 - DNA, 1068 bp, Cannabis sativa
ggccatgaggatgatgaaggagaaaagggtatggggatggcaagcgacactttttttactttctttgggaaagaagttattttttcacattgatgagttagggttatatataaactaggaaataaaagccgcgcgttgcgcggtgttcaaaaatcttaagttatatacattattaaaaaatgtttacgtttgtaaagaatgttggtaaaatactaattaattattgaataaataaaaactttattacagtttatatatataaaaaattataatattttctaaatgtcagatttttacaaagtaagatcgtaaaaaaactgaagtttctaaaaaataataaaaatgcattgaaaaaatataatccatcttattagtcttaaatatataaatttttttaattattaacaattaatttattaaaatatcttttgacaaaaattgttgagggatattttttttttcttaaaaattgataatcagtacttttcaaaaaaaaattaatagacacaaataatacacataatattattttcactaatcaattaataaaaaaatataaaaatatatatatataaaacgttatttgaactttcaataattaagttacaattatattaatatcaattattacttaacttttttaacaatggacatacaattatttaactaatttttttaaatagattaattaattagcattattcataatttgtaattaaatattaaaattaccacaaaaataaggagattagaggaaaaaaaaaagaatataccgccacctctttaattattatttgttttttttttttgtgagggaatattatcatattattgttgcatttatgtttaaataaatataataagttgaatgatgatgtaactttattttttacttaattaaattattagtatcatttttagactaatcaattatttatatatgattgatattgtgaagttaaaaattgaaattattatagagtaaatactattttggatcctgtattttgtaaaagttactaattagactatctattttgttaaataataaaatggaccctgtatttt

SEQ ID NO: 139823 - DNA, 819 bp, Cannabis sativa
aaaaaaaaaaaaaaagaatcaattctcaccaatttaaagtgcccatgcatatatcaagcaattaataattattgaaatccattattcaagcaagtcattgaagcaaaacctagccgttatctacataaaacatacaaattcaagaaagaaaaaagtagaagagataggaagcacgactgtgggagcaataattgatattcctaaactatatatgtggatgttgtatatttttctatatataggaataattaggaataattggtttgttattccaattatatatataaagatgtatttgaagtaattttaaattaaaataaataaatttaaaaatgagaaagtttaaaatagaataaaaaatgggaaaataacatttacaattacaaacgatatttttatctaatttacagaattaccgttgctcatttcactttacaaaaataacgtgcaaaaatttcaaatttataacacggtataaaagggcagtcaataccttctcttaatcttctttgtatgtgtactataagccatttactttattttaattaattttctttttttatctttatctcttttctacaatttttttgtaaaaattctaactatattattatttgtttgagattaaaagttaaaccgcagtgtctaacttttcaaaataataatttttatatgtaaaaaacatatatttttcaaagaaaatgacaaaattaaatgcaagtatgcaacttattagtttttttttttcttttttggtaaacaaaaaagaaataatcaacctaagtaaaatttaatataccaactaatttattatttata

SEQ ID NO: 139824 - DNA, 750 bp, Cannabis sativa
  modified_base (275)..(276): a, c, t, g, unknown or other
  modified_base (483)..(484): a, c, t, g, unknown or other
  modified_base (525)..(525): a, c, t, g, unknown or other
gtagtattctctctgtaataggatctgataggttgtatacaatacaacatttctccaccattacatatccttaatcacaaaatccttgatattgtgaaattcttctctatatgtctactcctctaggaatattgaattctttactttttggcaactacttttgtgttagtcgggaagtaacactagtagttattaaattatttgtacaacgccaaaaactgtaaagacctttccataaactgaataagtatctttcctgaaactttaacattcannctcactggtagagttagagactcagataggtttttacacttctccaaaatcattgctccacccccacagtaatcaccatctcatcagcagactttctagcactaaggtaagtcttgaaacctgaatttggtgtagtctaagagtattaaaatagctcccttatcaactaacatatagtttctctttttttgatcttaagatttactnnattgtcttccaatgttcctttcatggattaatctgataccnactcattactcccactcaacagttggtgtcaagtctaatgcattgcatagcatatatgagacctctcactgttgatcataaggaattctttctttgacctttatcttttctggaatattagagacttttccttaataaaatctatgtctagaagtcgataagcttctatagatttacatcatcttacaaaagtaagttgcttgcactagagtaagtaaatcacca

SEQ ID NO: 139825 - DNA, 592 bp, Cannabis sativa
ggtgtttataaaaagctattttttttaactttcttgatccattttaagagtctaaacctaattgttaacgcagattttcgttaactatatttgagcctaaattgtgatagacttgcacataaattaaaagcagtaaataaaaaataagaacaccaaggtttttacgtagttttgcagttaaaattctacatagtccacgagtcaatcttattagatttctgatatagctctcaggccttttttcttatgaattttttgtcccttttttagtataacctgctcctatttataattacataggagtgcagttaattacatagttgactgatattttccaacaattatcccctgaaattgtgggattggattacataccacgtaaaatacatgtggttaatatttgaaaatcacacagatgtgataggtctacttttaccgggtcaatgtaaacgtgtattaaatacgttgtaaatcgcgtcgttctgggacgtctcactgggaatcatagcaacaataaccttggtagcgagctggagcttttcccatgtctttccaaggttgataatgtaacctcgtcattcctgcgcttgaa

SEQ ID NO: 139826 - DNA, 801 bp, Cannabis sativa
ctggagaatgctctctaatgctatccctgtttctttttcccttcataaaagatgtattattgattctcctttgtgtcctttgtgtaaaatacatcctgaaacggttacgcatgctttgctagattgttctagatcgaggaaagcttggaaatcttcaaggtttgctactctttactctaaatataagcatctgaatatttatgatttcttttgtagtgtttctcaagagctagacaaggattatgtttgtattttatgttgttttctttgggctttgtggaatcaaagaaataatattttccatcataagcaagatagtcaaccttttgatgtttatgactgggctgttacttttttctttaagtttttggatgctcagcaggtccctattcctccctctgcttccacaccagattaggcatctttgcaacttaccccttctcagggagcttttcagatgttcacagatgcagccattgatgttcagaggaaaaagtatagtgttggggctgttgttttgaatcactctaaccaggttgtggctggtttggctatgccatttacaggttgtgttgatcctatggtagctgaggctaaaccaattatccatgctctacagtgggcctcctctattctcttgcctgtggacattttaaaaacagattgcaagtctattgtggataaattgtattctagtaacacgggttgtaatattttagattgaaaaaccatgtttttgcaaatgttagttgtgtataagaaaatataaaaattgtaagcgtttgcagcagcagaaagtaa

SEQ ID NO: 139827 - DNA, 516 bp, Cannabis sativa
gaagctcaagctcatctcctccggccaagaaatctaggggcggtgaggcgaccccatccatggaaaaggcaccgaccgaggaggttattgatatgttcgaggagctacctatcacggacccttctacttcgaaagttgctaagtctaaagattctcgtggaggaagctcgaataggcctgagcaatcaaagggcggatccgagctggccaagggcggatctgagcagatgcgggctcctactccacccttgccagtgcatctagaggccaggaaaggtaaggagatgctcccccattacatgaaccggttggttcctaaggtgggtgagcagcttgtcggcactgacaatgaatcttccctagagttgctgatgggaggaatcttgagggaatttataagggtaggtctttcttgatagtttcctttaattcttctttgtttggttcagactctaatgttttttctctgtgtaggctggtgtaaagttggcttacacctattcccgagctaaatct

SEQ ID NO: 139828 - DNA, 570 bp, Cannabis sativa
aatataagaaggaagaaaaaaattcaaaaaccagtataaattaaaaatacatattttatataaaataaaaattattaaaatggagtgtgcttataattttatgggatgcaaataaaactttgagaattacctcatatgtaatttttaacttctttttttatttttacggtttggattgcactggtggtttctatgtgggttgctatgtggatttaagatgcgatatatgttgctttattagttaatatgtgtgttactgtggatttcctaaaaatgcacaaaaaaaaaactactttcaagtgtaaaagtgaaattaaaaaaaacccataaaacttccctaaatttaataataaattttgaaatattttttacttaaagtttaatataatttggccccctaagtaacatttagtcgtagctttaccctgaagaaaaccctataaacaataagtaataatttgttttaaccaaaaaaaaaaaggtaaggtgtaaattattgttgggtccgccccttttgttgggttggaccaataagggcttaaggcccatttgtttgattcaattaaaaga

SEQ ID NO: 139829 - DNA, 729 bp, Cannabis sativa
tttttatgaggtggatgtatccatttgaaaggtacatgaaaaaattgaagaactacgtaggaaataaagcacgttctgaagggtcgatagcggaaagttacattgtagaagaggctttgacattttgttcaatgtatttcaagggggttgaaacaagatttaaccgtcttgatcgcaatgaagatgaggttgtccctagaaagctttctgtgtttcaatctcaatgtcggcctattacaaaagccaatcttcgagctcttgatcgcgcaactcgtgaacaagtagagtggtatatatttaacaattcacctgaaattcaagcttacttagagtaagtttatcttatttttgattttttttcacttaaattttcaatcaattaattcaaaactatttgattttacagtgaacacttggaagtgatcagacaaaaatacccgaatggggatcataatgttctacacaaaaaaaaaaaaaaatcggctgtggtttacaagaaggtaaatatggatgtagtaaaagtttattatcttaagtggtgtttgtcattctctaatgaggtatttatttttatagatatatgacttgcacaagtttggagcactagtagatggtgaagagttgctagctttaacattcgggtctgatcacttaggtacttactatgaaggttgtattgtgaatggagttcgatttatggctaccaaaagagatgagaagaggagcaca

SEQ ID NO: 139830 - DNA, 523 bp, Cannabis sativa
aaaataattatataaagagcgataaaaatataatgaagaatagagagtatcacttgagaatgaggaagaaaaaattacaatagccttttcatcacttttcatgaatttatcataaaaaaatatttttttacatctgagccctcaccacttcctgcgacagctaacaaggtaataattcatactaatgagtaaatcataaataattcaaagacatcaatgacagtaaagttgttgacataaaaaaatagtctgtatgtctccaaattatagaaaaatattgaaaatcgaggtcttgatactatatattgatgactgtcgaagtgcgatgcatacatcaaaaattaataattactgtaactcaaagcaaataaaagaaaaaagaaaaaaaaaataggattagagatagatggagaatctttattcaaaaaacaaaaaagattaaggaaaagaaaaaaagatagaagaagaaatagtgtgtgagagagatgtatataaaataattttcattaaaaaaataaaaaaa

SEQ ID NO: 139831 - DNA, 715 bp, Cannabis sativa
  modified_base (77)..(82): a, c, t, g, unknown or other
ttatggtgatcgaacctctatcggatacaagatgttgtataagcaaggagataacttgggggtagaagagtccactnnnnnngtgatcaacctgtacaaaaaggctaacaaacaatcatcacttcccttgacacttgagtcctcagaccccactggaaaattccatgttccatctagacctaccaaggtgaagttagaaggaaaaagaatttcccaagagaatatatctctgatggagagattcatcccagcgtgtcacttctttaataggaggggtcattttattcgacccagatgttataagctgcagaactacttgaaagctatgatcaatcgacctaagagttttcaaaaacccaacaaaactcgaggggaaggatctcgaagtgagtggaaattgaggtctgattgtgaatcaaatgttgggctggtagctcaagtttcaatgtttgcatttctagaaggacagtggtacttggattgtggttgctctcgacacatgactggcaacaagaaatttttagtcaattacaaagaagcaaaggagggatctgtcacttttggtgatggaaacaagggccaaattattgggacagtagacttggtgatgactagagttgcaccttttactgaagtactatatgtgaaagggctcaaggcaaacctgataagcatcattaacctttgtgatgcaaattacactgtaagtttttct

SEQ ID NO: 139832 - DNA, 532 bp, Cannabis sativa
  modified_base (506)..(507): a, c, t, g, unknown or other
ccctttctagtctcctcatgtaagtcttataatgattaagccttacatttaaattccgaaatacaacaaaacatgtttccatgcacagtgccacttggtcttataactattatggtacacatccccattattaaaccatgctttataaatactatatactatatataatatatatcaacatatatcattcaaatatacttactctaattaatggaacccttgcaataaaattttaataattaatctaatcactttatactatcacaacctaacttacaagcccaataaaaaaaaatacttgtcactttattttaataaagaattacgccacttctagcatttattaaaaatcaagacaaattctacataattactatttccacatcgagatatctagactaacataataaaagataataatcaaatattttggttattacataattattgtgtttgagttgtaaaacatatttattatgttatatgtgttggatatattttaccannatctagatttactatcatgtatgtt

SEQ ID NO: 139833 - DNA, 1145 bp, Cannabis sativa
gtggggcaattccttgtcgggtcggggcgggtcagtgacggggcggggcagacccgtcccgttttccattcctaaatgactgtagccaaccatcaaaatgaatcggccaagcatgaaagaccaaccagtaaaacacttcgtgcacttcctgaacattgtgacaaattgtgataaattagtatcaaatcaataaattgttgtatttaaagtttcaatttataattatcaaatataaaatttaaatgattaattatttaattaattaattaagattacacataattattgtaacaccctgatacttaggcacgctacagtgatttttcaattactgtgccacttttgctaatcataggatttttcttgaaaatcgtgacaaattaaaacttttgatttaattgctaaattttatacatttatttacaaaaggcgggatcccgtatttaaacttttacaacgttattaaaatatatttataatctggtcgcacgacgactacaaaataaaaatctagctgtcccaagaccgaacactccagatcgcaaatgcctcgacatgtacaattaccatgaaagtagcatctgtgagtcaacaaactcagtaagaaaagcatacaacaaaatatatatattcacgacttatgtctaggtgcccatacacctatccacaagactgacactatgttcgcactactatgatagcatcaacaatactcgaaagtataattggccatgatatcactcttaactagtacgatgcctgtactgctgaactgacacaatgattgtgtcgctatgatagcgccaattaatactttatggggtgaatatcactcttaaccaatacgataactatattgctgaactgacacaatgattgtgtcgctatgatatcacccaaaacatatacaatcacaattacaatatgtacatatcacacataaatgcattcacatatataatatgttctatactattcttacctcgtttctgaatttaagttagttgaccgacctgaacagaaagccacatcacataaccgagtaaataacacgccaaaaccctaatctgggaaacttaaactccaattgttatcccaaattcggcactttgacgtggcatcacgagaatggtgacacgtggact

SEQ ID NO: 139834 - DNA, 571 bp, Cannabis sativa
cttggaagacttgctctgcttctcatcctcactatcaatactttcattatttttcctttgaccatacgaaaacaagagggcagcaagtcgagtgcggaaaacttcaatgtcaaagtcatcagggacatctttcccatgaatgaagaactccacaaatgctcctcaatcactattttcaaaaaaggaaaacaaaatagttaaacaattattatacaccatgaaaaaaacttaaaaaaataacaactcactttttctgctgagatggaagactagcaatctccataactcttagaggagctttcgggtcgaaacctaaattaggaacattggacctattcttccaaaatctaaggcgatcaaaaaataaaaggagcaaaacagaataagccttcattgcattctttgctgcagaattcattttcgcagtcctcaaagaattataaagaaaattataatccccccattcaaatcaagaaggccaaaaatccaatggctttctttcctaagatttataatgaataggacatggttggcttcataccaaagcttagaacaaggaaatcgcaagcct

SEQ ID NO: 139835 - DNA, 766 bp, Cannabis sativa
taagtaagagagacatgtccaagttttgccgttttcatgaagattatggccatgacaccaatgaatgcaacaatttgaagaaggaaatggaatttctaattagaaagaataactcacacatgcaaaaatatgtcaagtctgatcaaatcggagggccacccagacagacaataatcaagatttactgccaccacaagtagaagggaatttacaagtcattattggaggcccgcacatagctggagattcaggcaaagcctgggaaaggtatgctcgaacattatagcatgagaaaaaggaagtggtcctggccgtcgaagaaaggaagccaaaaataccgcgagcagcagaacccaccataacattcaacgaagaggatggtatcaaagtaaatttcccgcacaaggatttgttggtcgtggaagtatagatagccaacaaaatggtggcccaaaacatgatagataatggagcctctgcaaatatcttgttcaaaacaccatatcaaaaaatggggctccaactcaaagacttaaccccctgtcttcagcccgtatatggtttctccagccagagtattgcacctctagggaaaatttgcctacccctcactgttgggaaaactccaaagagcataactgtaatgacacaatttttgttattggatgttccatcaacctttaacgaaatgttaggctgaccagctttatatgacttaaaggctgttacgtcgatatttcattcgtgcctcaagtttccaacaaag

SEQ ID NO: 139836 - DNA, 1850 bp, Cannabis sativa
  modified_base (355)..(357): a, c, t, g, unknown or other
  modified_base (1289)..(1289): a, c, t, g, unknown or other
agagagagagagagagaggtttaacgatttaggttttgtgaggataaagtctaattattctttgtcttattctaaataaatcagtcataaaataagtaaaaaacttctaaggaattctattagttcaacatatgtaaaaaaatagaaaaactactaaaatgcccttatcatcacactaaagcaatctttataacactcttatgaagtgttttaaaccattacccattctgacggttccaaattatcgagaataaaggtgttagaatattagttgtcaagaaattagggtaacctgtattttagtagtttcctatttgtatatagtagtttcccatttagtctcctagctttgtannnaaatatatactattctatgaaatacatacacaattcgattcattatcctctacatggtatcagagccatacttagaattgtgatttgaaattcgaaactccaaattagggttcataaaaaaaaagattagggtttgagtttagggtttcattttttttcaaaaactctagttagagtgtgagttctttctcaccgcccacatagacggattacccactcgtcgatctgcaaaaccccaaagttcggcagtcagaatcaccgcgcgtgggccccacgcgccgaccatctccaccgcctcgactcccatgcgccggcgcgtggcaatgttccaggccaccaatttataggctcattgttctcctcgacctcccctgtggtttcgttgtccatttcaattaaatatgtgttatacgcttcactgatttgtgcatgagaagtttggtggaacgaacatatttgtaatggcttttggtagaccaattcttggttctacagatgaatatgccaaattcttacagtttcaagagtctcttaagtattcatcttcttctatcactactattgctgatttaggtaaacaaaattcgtgtctcctttcctcgtcttccaaatggatcattgattctggtgctacagatcatatgacaggtaattctagcttcttttctaatcttcaaccccacgcttccacttctagtgttacgttagctgatgggtcaccatctcgtgttcttgggtctggtagaattactcctactccaatgcttcctttgtcgtccgtcttacatttacctaatatttattttaatttgatctctattagtcaacttactcgtgatcttaactgttgtatttttttttattctgatcattgcgtattttaggatcttatgatgaagcaaattattggtaaaggacatgaatctggaggnctttacattcttgatacaccaatacctaaatcaattgcttgttctggtgtacaataccccttcaaggcacattgtaggttgggccacccatctcttcctctgcttaaaaagctttgtccacaatatagtaagttgtcttcgttagattgtgcatcatgtcaatttgctaaacatcatcgccttagttcaagtcctagagtccataaacgtgctagtatttcttttgaattagtccattctgatgtttggtgtccctcttccatcatgtctaaacttggttttcgttattttgttacttttatggatgattattctcgtgtcacttggttttttttaatgaagaatcattttgaattgttctctattttttgtgccttttgtgctgaaattcaaaatcattttaatgtgtctattcgtactttgagaagtgataatgcaaaagagtataaatttggtttatttcaatcttatatggctcaaaatggcatgcttcatgaaacttcctgtgttgatactccatctaaaaatgatgtagccgaacgaaaaaatacacctgatcaa

SEQ ID NO: 139837 - DNA, 743 bp, Cannabis sativa
ttcattgcactttgttatgaagtcagctagcacttgtccttttatagaagtgcgcggtatgtagtgtatgtcgaattggcttaactccatagaacacttgaggagacttccggatgcttctggcttctacaggacttgtaagagcgggtggtttgtcaataccttgattgggtgagcttggaagtagggtcttaactttcttgaagccatcaggaggtaaaaaactagcttttcaatcactggataccgtatctccgcccctatcatacgcttgctgacatagtacaaagagtgttgagttttttcctcttcccggactaaggctgcgctgaccgcattcgcggagacggcccactatagtaacaagtcctctcccagaactggctttgacaggatcggaggtttggccatgtgctcttttaattttttgaatgcctcctcgcattcttctgtccattcaaatttttggcatttcttcagaatgttgaagaatggaatgcatttgtcaatggaacgggaaataaaacggttcagggtagcaaccttcccggtcaagttttgcacatctttatgcttcttgggagaaggcatgtttagtaaagactgaattttttccagatttgcctctattcctctttggcggacgataaatcccagagactttcatgatttgaccccgaaaatgcacttattcggggtgagtttcattccatacctccggactgttggaattattttaccag

SEQ ID NO: 139838 - DNA, 1058 bp, Cannabis sativa
tttttttttttttttggaaagggattattgtagctctttttgtgaataatttgtaagcatattttttcttattaatatatttttacaagttgggggaaaggtccttagtatcctttgggccaacgcaagtccattgtaaagattgggctgtaggtattagggaaatttaaatggtatattaatttttactatttttttttttataaaaatactatcaggcggtattttttattttttactatgttttttataagtttcatactgcagaatactgtgttaagttttcactattgttctactggtgttttttagttgttctactattgttttgagttattctgttttgtgatctactggtgttttacaaaaatactgtatttttaaaaagatttccgtgtgacagtattttttgtaaaagttaacctaaattctagtatttttgtaagtttctcaagtattatgaggaaattagattgtatacctatttttttatatatgttttaatttttaccttcaaatctatattcttttaaatatacccacttttatagatgatgtctctattatgtattaaacttaagtagagggtgagacaaatcaccgtcaccagaaaagaagtcaccgtcgctggaaaaaaaaagtccatggaaaagtcaccagaagtaaatgtattggatataaataaagatagaactggttctataacataatgaatacaaataaataatacaaaataactcaaatcggttataattgaaataaaaccggttctgtaacataataaataaaaataaataacacaaaataacttaaaacagttataattaaaatagaactgattttataatagtgttataatgaataaaaacaaataatatgaaataactcaaaccggttataactaaaataaaaccagttatataacataatgaatgagtatttttggggtagatatggtatgcgtttaattatttggtaggttggagcatgttgaatggatgtttttgtttgaattattttatttaactagtttatgtgtgtgagtttttatcttagtt

SEQ ID NO: 139839 - DNA, 849 bp, Cannabis sativa
  modified_base (466)..(467): a, c, t, g, unknown or other
  modified_base (542)..(544): a, c, t, g, unknown or other
accccagagtaaccaccatctctactaggttatgagttggtgtagatataatgattctaatatacacccttaccatctaatatataggtcactttcagtgatctttcttgattgtctcctaatgttccttgtttgattacaacttatatggctcccactcaatagtagaagtatggttaaatcggtacacaagagtacatttattctcttactattggttctcagggacatcttgttgtgacatatttgtcttagtctaaaactataagttccttcaagactcagtcatcaacatagcattctagtattaacaataatgtaaaatacttgcttaagattaagtaatcattaaagataccaaaaaaaattttcatgaggattaggtatttttcccaagtcgaatagacatagcaaaattctcctatcttatcctcagaattctcataagttatttctatccatatgnntggttagatttactttcttagttatatttaaagttcctatcatgatcataacatagtaatctatcactagtgtcnnncaaataaagatggactagaattttaaaattctcctactcaaataaggtactgtgatactatgtccaagaactttactagtatcaatttctattactacagtaacatattggttgaaacaattacaggatcaagaataagttctaataattttctaatttgttcattatattacatccatgtctaatcaaaatatgtatgtcataaagatattgtggtgtattgagtatagtctagagttcaaattgaactacatatgtcaatagctttttccacccctaaatgttatagagatcctgtggagtta

SEQ ID NO: 139840 - DNA, 667 bp, Cannabis sativa
tggcaccccgtacccttatctagtgtcagatggtccctaattgcaggctgtaggaggatggtctccgggttcatgcgcatggtccccaattgtaggttgcaggaggatggtctccgggtacatgcacatggtccccaactgcacgcgaggtggtcctcgggtataggatgttgaagagtggttgcagcgtacccttagttgggtcttcaggccttgcaggtcatttgtcgccactacttgtacctccttgtcctcggtcttcagaaggcgtggtggtacgatattctcttgcacgccttgtcctttcatttctttccaccaatatcattcttgtcgttatgcatatgttctttcccttatcctcatggcccttcccaaaacatactcattccatgcacaccacggcgcgcatgagagccccgcatgggctcgcatgcgacccccatctcttccccttcacggctcgcgtgcgagccccatgggcttccatgcgtaccctcatccttcgcaccatgtcaaccccatactcccgcttcgtgccaactcttatcgccactactcaccctaaggcatctccacacaattcaaaaaacggctcgcatgcgaggccccccatgggctcacatgcgagcccccaaccatcaacacacaacacacacacacacac

SEQ ID NO: 139841 - DNA, 1118 bp, Cannabis sativa
  modified_base (552)..(571): a, c, t, g, unknown or other
ttttagtcacaacaagtattgtaactaaaaatatatttaattagttacaataaattgtaatttttatgactaatacttttagtcatggaccttccactcacgacataggaattatgatttataattagtcacaagttttgttgtgactaaaaataaaaaataaaaaaaattgtagtacaaatatctattctatatatgaaattttttgttaaagggaaaaaaactaagaaagacaaaaaatgtggaatggaaaggaaaaaaaaaaagagaaaagagttaacggagtggattttgtttttattattattaaaaaagttcatagctattagattattttcaattaataataatataattagtctaaattttataattttattctaattgttgggataatttgcacacgcatgtcactacaaaaaaaattacctttagtgacaattttttaatccgaataaaaaaattttgtgactaaatgtcttttattcacaacaaaaaatttctttgtgacttataaacatagtatttagaaacaagttgtcactaatttannnnnnnnnnnnnnnnnnnntgtgactaaaaacatatttagttacaataaattgtgattttcgtgactaatacttttagccatgaattttttagtcacaacgtaagaatcacaatttataattagtcataacttttttacttttagtcacaagttttgctgtgactaaaagtaagactttttgtagtgagtgtacgtatcgttaacaagtaataaactcactaagagtgaagtcgatcccacagggattgtagttaagtactttaaaattaaccttttacttctatttggttgaataaaaattaagaagaaaattaaaataagaaaactagtggaagtaggaagcaaataaataaaagaaattaacaattaataaaaattagggtttcgatttcagctgtttctattgattatagcgtaatatggttatcttcttattatcaatttttattcaatagaagatttactaaggtaatttatagtcttcttagatatataaatctcaattacatgtaaattttctactctcgtgataaattaaacatgtaataggcattaaacacagaaa

SEQ ID NO: 139842 - DNA, 921 bp, Cannabis sativa
attttaatctacacttattatattataaaataatataacaataacaacaaataaaaataaaaatatataagatgctaataaaattatattatgtcaacaaataaaagtgaatgtggatggtgctatttttgcggaggaacacaagtatggctttggttgtgtggcccgtggtgctgatgagagattaattgaggccatttatagcagtcgattgggtgttgtggggcatgagattgctgaaattatcgagatgaaagaggctttgagttggattaaacgcaaaggatggacgaaggtggagattgagacggacgcgctagtggtggtgcaggctgtcctaggctcaaaccaaatgccatctcaatttggttttttggtacaaaattgtcgtagcttattgtcttgtattaatcatgtgtctttacattttgttaaacagtctgctaatagggtggctcattgtgttgcaagagcgtcttgtttccattcagatcgtatcttttgtgagtgaaatgctcctcgtgaacttatgtctattgttgatgttgaaagtttctgaataaataaatcatcttttgttcttaaaaaaaagtataatggaaaatacaacttaaatattattttaaaaaaataatactttataataaaaaatacatataccattcaccaaaatatatatactaataataataataaaatatatattacactaatatatatatatactaactaaattatataccacaattaaaatatatataccatgacaataaaattatataccaccattgtatataataaaatagaaattgattaactattactgaaaataaataatatatcatataattaaaatatataaaaagaataattaaatatatgtagtatgtcaataatattatatatatgggtatgctctta

SEQ ID NO: 139843 - DNA, 620 bp, Cannabis sativa
  modified_base (41)..(46): a, c, t, g, unknown or other
  modified_base (84)..(88): a, c, t, g, unknown or other
ctcttccgatctactattttagaaaatacagggttcatttnnnnnnttaacaaaatagatggtccaattagtaacttttgcaannnnnagagtccaaaatagtatttactttctgtaacgagtcatttaagttgcatttaataatgcaatttaataatacaattattgagctgattaatattcctcctaaattatacgtgtcagcttctggttgatagtcaaattttgggtataacacaatatgcatttatctagagatttttaaatggataagaacatgaagaagtgggaagatgattggcaaaaattgccttatgtttatccctatgaatatgcaatttatcttcctcccaaggatgatgaataagataaatgggtagttgtaattttacacgagtttttgcatattttggctctgataaagacagagagggagaatgtattgtgctttggagagtatttgggtataagatacaggttaagaaggcacttctttatcatccagctatcttctatttgtcaagtaagatgaagaaagaagaagaaaaaggaaaaaaaaaattattttaaatagttattttttttattttttaatttttaatatttaaattattaatatt

SEQ ID NO: 139844 - DNA, 1333 bp, Cannabis sativa
ttttggtaagtatgaacatgtactgtatttggtaaatttttgatgagtttcctcttaaaatttgatttcttattctttatattttgtttaattgttgaccatgatttttttttcagatctcaattttttttttagaaaatcttggtttctttttgtctttgacacttatagataaacaaaaagggggaatattcggggttttaattttgattgtataatcaattgtctagggggagttgaggtttgtgtttgtgttcaacttttgtcaaagttagcttttttattttggttaaatattgcgcttctgagggagagtacatggttgttctgctaactttgttttgcaggttcttgtttattaaacatatttttattatctaaagtgtcaaaaaaggagattgttagatccttttttggcaatttattgagcatttaaattatttttattacatttattttgtgtctctaattactcttttcttctaaggaatgatttcttctctgctggtctctttttggtttagaaaacttcttgtaagagaaggaattctcttatggaaagttgtctaactttaggaaacttgacttttcctttttttaattgatgatttcggtttttcctttattaaaacaaatcaaataaactttatttgaaagatttgaagtctaaattagtaatattggttcaatttaaaaagtttcttttctggtcctgatctgcagctacaaaacccaattctgatgctgtaaatcaagaattttttaagaaagttttgtacagctggaaaattgtttttgtggctgtctctagggttgctatgtaataggacctagagagcagccagacgattttatctcttctagtctcatattttcatatctttctttgtgagaagagtgtttcttttgtaaggagtgttcaactagattttggttttcttattatgatctcattcatagtatagattgaagagaagctttgaaaaagcgtgggtgtttcggagaagacttttccaagtcttattttgggagaaagtgagcatatatattcgggagaagatttgtttaagccttactttgagaggaagtaagcacacatcaatagctgaagggagttcactacttggtgtgtttcagagatcaaattagcaaggtggattacaaagggttgcggcaaatcactagaggaagtctaaattttttttgtaatctttgataatactaattgatttcattctctaggcgtggctctgtgtgttagactttttatttgggcttacattaacttttattggttttattaaaacttgggttgattggatagttctttgct

SEQ ID NO: 139845 - DNA, 893 bp, Cannabis sativa
acctggaatgaaggcactttgattttcagagatgatggaatccatgaacggtttcattctgttaaccatgacttttgtgatgattttgaacaagacattgcataatgctataggccgaagatcagacatacgttctgggttcctcgtctttggaatgagaacaacattagcatctccacaatgatcaacaagagttccatgttcaaagaaatcacgcacattttccacaactttatctcccacaatcggccagcatttttgaaagaaagcaggagtcatcccgtcaggtcccgggctcttgtcagggtgcatttggaagactgcttttcgaacctcctcttcagtaactgcttgacaaagttcaaaattaacaccatccgacactgtagttgatacacaatcgaccacttcagtacaaacactacccgaagatgtgaataaattgttgaaatactcggctacaacagattgcaaacccgagtcccatgaaacccaatttccattagcgtcacgaagctcattcagttgattattcttttttctattactagcagccttatgaaaataactgctattttgatccccttctcgtaaccaaaactgtttcgccctttgcttccaataactttctctttggtcaagtgcttcataaagcttctttttaatctcggcatacctctgaactgaaatggagtctcgcaagccttgtagttttttcaaatcagccttaatgacgcctaattcgttgattgatagaacccgttaattccttaccccagatagagagtctctcggcacaaagcttgagtttatgggagatactttcattttgttcttgggaccagacatcacgcacgatttccaagcacaaaggctcctttaaccatgaattt

SEQ ID NO: 139846 - DNA, 1032 bp, Cannabis sativa
  modified_base (737)..(744): a, c, t, g, unknown or other
ccttccaaaaaggtgaaaaccgaggaaccccccattacattcacagaggaagacgagaagaacgtgaggtatcctcacgtcgatccactggtcatagctatccaactcgccaataagaggatcaagagagtgttaatcgataatgggagcttgataaatatcatttataaggagactctaaagaaaatggggctaaaaaaggcgaagttaaggccttgtatgttgaatatctacggattcaccggagatagcatcgccagccttggaataatcgagctcgcattgaccgtaggcgaggtgcctttaagtgctactgttatgaaagacttcttggttgtcgacctgccctcagcttacaacatattgttgggtcgcccagcactgatcggactaggggcaatcagctcgatcaagcacttgtctctaaagttccataccccagatggtgtgcgagttgtgcgtggcgaccagatgctggctcacgattgttatcgcatagagctacatcataggaaggtcgatcattaactgatgtcaatcttggcagaagaacacgagaagaaaaatgaagatcttgattctcgagttcatgatgaaagaaacttactgaaaccaattgaagaattggaggaggttattctcgacccaggaaatcccacaaaatgtgtgtacattgggaagaacctggacgagcagcacaaatagcaattaataagctttttgaaggcgaaccaggnnnnnnnngcctggagtcacggggatatgatagagatcaaccctaagattatctgccatcacttaaatgttgatcccaactacccaacaaagagacaaaaaaggaggccctcggattccgagaggcaaagggcactaaaacaagaagttgacaagttgttggtcaatgattttatacgcgaggtattttgtccttcgtgcatagccaatcctgttctcgtcccaaaacctaactgaacttggagaacttgtattgatttctccgatctgaacaaggcgtgcccgaaagactatttt

SEQ ID NO: 139847 - DNA, 512 bp, Cannabis sativa
attgtttggtttcagattttttttattttcttaaaaatgtttttgcttcagttcataaccgaagcaaaaaataaattagcgtcggtacactagttttttgcttcatttatgaactgaagcaaaaacttctttttttgcttcggttcataaccgatgcaaaaaaccaattagcgtcctttcataactgaagcaaaaaaatcagtatttgcgtctatggttatagcgtcagttacactaaccgacgcaaatttttacatgtcacttaaaaactaaagcaaaaagtcatttttgtagtagtgaatagtcaagttgacaagaggatgagatgagagcatcatgttcgttttatagtgtttcaactagggttgagggctgaattatatggattaaaaaagaataaaaaattggacaaaaataacacgagggtcaaccacttaaactgccaatctctagttacgattttgtcactttttcaaccactttttcttctttcaataataccatattttcca

SEQ ID NO: 139848 - DNA, 853 bp, Cannabis sativa
gtaaaataatttccaacagaggctctctatccaaggcagctgggggtaggaatgaatggaagaaagtgacgggtcgtgatttaccttgtcacaagcagggcgtgatgaagaaatgggtgcaaaagggcagttcgggtgagcgtgctacaaactatgccgttaatagtaatgaggttggcttgagtttgaattgtgggggaaagaatactgtgtcttttccctatttggagacctcgaatgtgttattgaagcctagagaaccgttggtcaaaggtggcttatgtactgatgttgaattattgggagttgggccgagtaaagacaagtgtggaatgggtcatgatgttattgggccgggtattgaaggttctatgtgtcatgggcctggaaagctttgtaataaggttattgaaggtgagggtgatgtgagtggtgggccaggccgtgttgaagctttggaaagtaaatgggctgctgggtccaatgacttagtgaggccgaaagaggttaaggctttaaatggcaaggagagaaatgaggttaatggtgggccacgtgggaatgagtgtgatttggtggaagagaataagacccaggagtcttttgctagtgggaccgagcatcaaggtgatgaggagagggctctaactcattttcttaaagcccaagaaaagttactttatgaccttaagcattttgggaagttggacttgtatgaaattaagaaaattggcagtgacattggagtgaagccaacgtcggaaactaacgagtgtaccacacctttcaagaagaggaaatttgagggctccgcttcactctgcacccgtcctaacaaaatcgttagacgtca

SEQ ID NO: 139849 - DNA, 1497 bp, Cannabis sativa
aggaactgctttagtgagctcctcgatgacataatctactccttcaaccaagactttgccctccgtagacaccagcttcccggcctcgttataccctccaaagtttggaggttcagcctcctcttcctcctcggcttcggaaaggctgtcacgacagacgtcgtcctgctcctcaatttcctagacctcaatgtccccctcgtgatctccctcctcttggatgggcagatcttgttcggcgctcggtaatgtggcgagctaggccacatgagagtcagatgcattgaccttctacatcgtctgctttgttcaagccatcatcctaccactggacggacactggtgcaaatgccgggcaaccgtaacgacaggaacagcaattggaatgccgaagttccttgaacttggacaagcaataggaagagtatcaccaatacctggccagacaatatatgtccagttggatgacagataatgcctccaacctttcttcaattcccaaattaagcggttgtacccctctccagcgatctgctcggagtaatgatggtgttgcactacgggttctagagtaagagaacgatcattactcacctcccactgttcaaagcttgaattagaaagtctatcactcgaagaggacagactggcccgaagatgaggttgatcctcgtacagaagttgaagcaagtcctggtcgattcggtgttcgcttccccaaaactcactagggttcatctaaaaaagacaacacacgagatgagtgtttggtcaggatatcgaacagtaaacaggcaaatatgttgaccaagagtactcaacagattaaaaggataaaaatgtacagaaataggtcaaaacccaaaagcttaaaatttttgggtttaggtttaaatttcacgaagcttcgaatatgcaaggtgaaagacgaacaatgcgtgatcaaaggcaaatgtcatgaaccgtgatgttttatagactattacagagaaaatcacaaagttttaagcctagattttctatttatcttctacaacaagttgaaaacgcatgtataaaacccaaattaaacatgaaaagtaaaaagagaagaagattgaaaacttactcactgctcgacgtctaagttcaatccagacgaggctgctctaacgcttttggtgaggatctcacgacagacttgaagtaaaaaccctttttgatctaagtgtgtttagtggaaaagtttgtaaaagtagatttgtgaggaaaactcagccttatttataggctgagaggtgaaaagggaaattatttcaaaatgcctttagacgcatcggttccctaccaaaagcaaatatcaagaaatcaaatgtaatcaagtgtaactgtcaaacgtgaggagaaaaaaccagggtttgaggcactaattaagtcagagcattaattagctaaaaaattgaagagacgcctggtcagcctcacatcgaatcatgaacagacgcgcctaacacgtat

SEQ ID NO: 139850 - DNA, 1159 bp, Cannabis sativa
  modified_base (890)..(891): a, c, t, g, unknown or other
actgtctaaaccctaatatttaccaagatatagtttagccctacaaattactaaaaccaaatgagatgacaacgatacgtataaaaaaggtagcaactaaatccagaaatacacataataaacatgggagatattaaggagaaaagccacttactgtttgaagttggggtttgagatgatgagtggctctacaatctgcgaatccctgaatgtcgtgaatatctcttcgagtgcttgaagtcgaaaattaaatcagatgaaactcgcagaaaaaatgtcagtgacagagagggcatacaaattttcgaacaactttggtgatggtttttcgacggagaagctcaaatttttttcacagtttcaaaaatggcaaggatagtgcaaaggaggttccttttttcattatataccctcaggttaatctccgttagattaaaaagatgattaatcctacgggtaaaatttgaaagaggagtagaaaagatggttattaattgctgatgtccctcgaaacaacaaaacaaccaatattagaggacatgcatttttttaaaagggattatgacaaatataccctttataatcattaaaaagcactttttattaaaaagaaccttttaagaggcaattgttataccaaaaatttgggtagcacttcaaaggatgacacgtgtcaaactgggaaaaatacgattcaacaaatgcaattacaattatatttgaaaatggaattgttaacacagattttttgttaacaaaatttgagcctcacagttataattcaacacacaaatactaaaagctatagaaaaataaaatatgaacaccgagtgtttttacgtggttttgcatttaaaattctgcatatcttattcagatttctgagtatnnttttagggcctcttgcataagaaatttttcgtcccatttttgagattgtttgtcactatttacagttgcatagtggtagttaattacaaagctggccaaaatatgattacagtcattatccctaaaatcgtgggatctgattacatattacaaaatgtttatgcggtgtatgattttgaaattcatatagctttgattttcccactttcactgggtcaaaaatatcgtgtattaaacacgtctttaattgttaaatctagagatgtct

SEQ ID NO: 139851 - DNA, 558 bp, Cannabis sativa
ggaatcacccaagtaatcaaagtttgccttgggattagcctttcggaagtcataaaaaatcttgaggcccgccgtctctatggaatttaccttccctctgagccttgccacctcagctctctactgctcagcctttgccttgtgcgtctcaacctcagctctctactgcttagccttagccttatagttttcaacctcaacagcaagctcctcctccatagacttcttctgcgcttccaacctgcggaagatagttcaaagaacctccctttattcttggaggttgttcacttctttggacagggaggtcatggcagcttcaagttgattagaagcctctaaatctttggtcagctcacccactttcttctcgacagccagacgttttttgttgacttcacacagttctattaggacggctccaagttgaacactggctccatcatcatccttcttggccaagtctacttctgccctcatggtattagacatggcagcattcttagaggcatccgacttagcccaggaataagcataagccatcttcagactggtctg

SEQ ID NO: 139852 - DNA, 749 bp, Cannabis sativa
  modified_base (332)..(334): a, c, t, g, unknown or other
  modified_base (485)..(490): a, c, t, g, unknown or other
tttatacacaataaaaatcaaacctattgttcataagatgaaatctaaactactactggcatctgccacgaataaatatcagtcatagatatttggtaatacataaccattataccaataatagaattcatataaattatttatatatatgttacctcataaagtaaccatctttataacatcatgttgcctaatcaagcaagtcgatgctttaatatgataattctgtattgcattgcctaatcaggcaagcctgtgccatagcctagcacccatatgcataactgcatcacctaatcaggtgagactgtgccaaaaacctgcacccatannncatataattgcatcacctaatcaaatgagcccgtgccataacttgacaccaatatatcgcatcgtctaatcagacgagcccgtacctacggccgttacttattatatgtcactgacgctcgtatctacacgtcgccaggaggaaaccctannnnnntttcattctatgccataacctaacaattttcatatcactaacgtcgtatctacacgtcgccaggaggatcacataacctaatcaggtgagtctgtatctacgttcggtactcttatgtcactaatgcccgtaccgacgtccggtacgtcgccaagaatatcgcatcacctaattaggtgagcccatatatcacatttatagtatcattacattatcattgcttaactaatcaatttttttttattattatataacaata

SEQ ID NO: 139853 - DNA, 727 bp, Cannabis sativa
  modified_base (70)..(72): a, c, t, g, unknown or other
acccacatcaaccagttttctttgcagatcaaagcttatgtgggactaaagctcaagaatcaatggctgnnngtatttcgatccttattcatagtgtatatatgtttgatctaaagcaccgcacttaatacttaaacatatacatttcagtttatatatataaatgtctaacataataaatatattagctctttttatatattgtcctttgccacataaaaaaatcaataatttttttttatattttttttaagaattagaagtaaattatttaaaaatcatggtatatctatattagttttgttaaaaaatatatatttttaaagttatgtcaatttttaaaaaatttatgggttgttgtgggttgttggtatataaattttgttatacaatatatttctattgtattgtatgacatattattattcttagatgatatttattttttattttactatgtacaatactggtatataattttttcaacatgatataaatataaaattttattgggatgctacataaatttaattattatttttatatattttaattgtaagatatattatttattttaaataatatttaattagcttctattttattatatattgttgatctcgcttctaaccaacgacagtgagtcaaataataaagcgattgaataatataattaaaagagaacaaaaataataaggtgaagtgaacaccatattttaaagaggtt

SEQ ID NO: 139854 - DNA, 1381 bp, Cannabis sativa
  modified_base (1253)..(1263): a, c, t, g, unknown or other
ccttagcatcgcccaagtagtcgaagttggcccgaggattagccttccaaaaatcaaagaagagctcgagatcggctgtctctaaggcattgaccttctcgttcaacctgtccacctggccgaaagctccccctccttggcttccttttcctcctcatctgatgaagaactgctcgaagagaagtcctctcgtcctgaagattgttcacctcagcagataaggtctcgatggtctcctcaaaacggtcagcagcatcgagatccttagtcaacacagtgattttcttccgagtagcaaaatactccttgttagcttcacctagttccaaccgaacagctccagcttctgccctggcttcttcagcatccttcctggccaagtctgcctacacccttagggtgtcagatagagccgcgttcttcgaagcagcagacttagcccgagagtaagtgtaagccaacttcagaccggcctgcacaaaaagaaaaactttagcatattgagctaagtatggaagattaaggggaagtatcaagaaaggcttaccctggtgaactccttcaagactccgcccaccagcaaatctaaagaagagtcattgtcagcaccagtcagttgctcactgtcctcaggaaccagccggttcatgtaatgggccagcatccccttgccctttttagccctggaagcactggcaaaggtggagtaggtgcccgcacccgttcaggatcactcctgaccagttcagacccaaccgttagtggtctagtttccttagacttgacagtttttggggtagaggggtttgtagcagtcagctcctcggaaagatcaacgaccaccccgaaaggccgcttttccttagtagaagacacctcgccgcccttaggcttcttggctggaggagaggcgctagagcttacacccattctcttcttcaaagcctcaaacattggccgagacatgtctgcacagaaaaaaaaaacagtgtggttagaagacacccatcaaaaacacaaggcatgaaagtcaaaaagctcaaaacaagataaagtaatatgcaaggtgactgcccaaaacaagactcagaagtccatcgtcatctgacatcgatcttatttcagacatggcagctttccctttttttgaacatgggaggggatggccgaacatgtgaaatgggctcccttatgcgaatcgcatgtttcttcttcctcttcagaggagtcacctgctcttcctcagcttcatnnnnnnnnnnnaagggctcctgagcatactgcttggctcttggacctcccttcaacttagcttcgcgcctaagttaaatgagttcattcttctaatgagctcgttcagtccggccagcaccagatttcc

SEQ ID NO: 139855 - DNA, 1444 bp, Cannabis sativa
  modified_base (1408)..(1413): a, c, t, g, unknown or other
catttgggttgaaaaatgttggggaaacatatcaatgacttgtgaatgaaatgttctcaaaataaattggacggaacatggaggtctacgtcgacgatatgctggtaaagtaggtaaagagtggaattcatactacagacctcgcagagtgcttcaaaatattaaggaagtacaatatgaagcataacccaaaaaagtgttcctttggagtttcctccggagagtttctgtgattcatagtcaacgcgaggggcattgaagcaaaccctgagaaaattaaggctttaatagatatgacatcaccaaccaagccaaaagaagttcaggccctaataggaaggatgactgcacttaacagattcatttcgaagtcaactgataagtgtctaccattttttaatgtattgcgaggcaataagaaattcaaatggacagaggaatgcgaggaggcctttaagagcattaaaaggcatttgtcgacacctccaattttggtgaaaccagtaactggagagacattgctcctctacttggctgtctcgaaaaacacaattagtgcagcaatagtgcgagaagagggaaagcacccgcaacctatttactacgtaagtaaaaggttactgggcacaaaatcgaggtattctacgcatctcgcaagctacggccttacttccaggcacatccaattaaagtgttaactgatcaacccctgagacaagttttatcaaaaccatatgcttctggaagattgataaaatagtcaactgaactgtggcaatttgaaatagcttatcacccacgaacatccatcaagggccaagctttggcagacttcctgatagaaggaataactccaaagggaaatctgcttgttcagcgagacacgaatacttggagattattcgtggatggtgcatccaacgagcagggctcgggtgcaagtgtaatattaattttgccagaaggctttaagtttcattatgccttgatattccaattcgacgtgtcaaacaacgaggctgagtatgaagccttgatcgctggtttgaggatagttgaagcgttgaaggtcaaaaatctcatatgtcatagtgattcgcaactgatcgtagtatctagagaaagttcggaagaacttggaaaagtttaattatttcaaaatcgagcaaatcccaagagaacaaaactctaacgccgatgccttagcaaaactggcctcgcagaatgacttggatgaactaaactttgttctggtggaaatgttaaacaagccaagtatatgcaaaaaggaagatgtcgagatgatagatagctcgcccacgtggatgactcctataatcaattatctactcaacgaccaacttccaactgacaagaacgaggcatgaaaatgttgggttttatgccnnnnnnaaaactctatttcaatgtaatccagattatt

SEQ ID NO: 139856 - DNA, 617 bp, Cannabis sativa
  modified_base (563)..(587): a, c, t, g, unknown or other
tgccgctcgtttggctcagtgtttcgacgctgcgccttttccagacggcatcttaggtggaggctttccatttcataaggtctttctcccacagattaggcacctccacggttgagctcttcatccctctccttcccacactgagttctcctcgaatgtgtcatccgtgtactagggccaacgttgggttgatttctctgaggacgtgtagtccgagcactgggaccatcctcaagttgggccctcctgaaacgggtggtccttctggacagcagattagttgatcttctagagcccataggatttattcaagaatgacggttagtttcctcatgtggggttttaatattctctagatttttagccataaaggagaagatttttctttgaaagaaaggaaggcttttttggagtttttttatagaggctctcaatgaaagaattaaacgcagagatttttgttaaccgaatttgagcctcacgattatgattcaacacataaataataaaactatagaaaaataaagatatgaacaccagatttttacgtggttttgcagttnnnnnnnnnnnnnnnnnnnnnnnnnatcttattcagatttctgagtatgttttct

SEQ ID NO: 139857 - DNA, 603 bp, Cannabis sativa
agcggggtggggcggggcagatccttacatgatctggatcaggtcggatcatagccggatcagatccgacccgacccatttacactccttataaattagtgatgacaacttgtaactaaagactatattttaatcacaagtaacattttgttgtgactaaaagtcacatttactcacaaaaaaaattatgctttgtttaaaaacttgtcactaaaagtactaattttttgtagtgtgtgtcaaattttaattaatttatataactcagtatgagataccactttttaatagtagattttgattctaaagaatttatatcagtgtaaagtcatcttcatttttcttcatttataatttatttatttatttttctataccttaatgtaattaatttgataatttattcgctgcttgcagaagctgtaaatatatattccatttcaaatattacagctacctatctttgtctgcacctattattttgaaatatataccttctattatgtccttgatattccttaaattaatattcaagacatagttttcttcttttttaatttatgtgtatctatataaaaagagtatttattattcaatatcaat

SEQ ID NO: 139858 - DNA, 770 bp, Cannabis sativa
tgtccaaagaaactacctaaatcatgttcctattaaatgctgtgaaggattttgcctcaagagaataagacatgcaagttctaagctattcaatcagtcttaccacaaaccacaataaaataattataccatatttcacagattgtcaaattgcatccatacacaggctttacaagcatccaaaataatccaaagagtaaaaaaaaattaagcacacaatttttaaaatttcaggacattttacaatcaacagcaggatacaactatcttcagcttatttcctaatcataaagataaaataaactaaactaaaactccccaaactgaaattcacattgtcccgaatgtgcaaagaaaacttaagggaaagagacttacctgagacccccatcagaaggggttcggtggaggcggctgatcatatggatgaaatcgaggaggtggcgccagataattggggtctttgatcccaatgttcatgcgagtgattagagagttaagttgagtgacttgactctcatcatttatactcctcttaaccatgtaatttttcatatggttgttttgttgactgatgtagttcaattgtgcatgtgtgtactgcattgccggatcaattgggccaggcaattgttgtggcacattctcctcctcctctgcactttgttcaccagggcgccttctaccttgtggttgagtttctggtggtggctgcccatagggatgaggctccttgagcctattgaccatgctcacatccatctttctct

SEQ ID NO: 139859 - DNA, 540 bp, Cannabis sativa
cacctgctgcagttcctcctcctgctgcatcagttcttgcctccactccaaccggtccttcaactcgaactcgtgcccaacaagcttctgtcgagaaggaacttcgatcatctcgaagttgtgataagccagtgccaccagccaagaagaagcttaggaccaatcctccttcggtttcttcgagttcagaagaagaagaaccaatggaagtctcctctgccaaatctgtttctctccattccgagaaggagattccagaggacatgggagtttcctcagacagtgaggacattgaactcgagcaacagcctcaattgacaaaatctgctccaactcctgctcgttcttcttcagcagcaaaggcttctgctgctgccaaaggcaagtagccaatgaaggaatcctctcctggtaacgttcctacaaccctttatcactttcctctattttattatcgtgataatgagcgtgattggaatttgtatgctacccgtaagtttgagagtgagaggaattacgatttgcatgctcatcgggtat

SEQ ID NO: 139860 - DNA, 507 bp, Cannabis sativa
aaccacaatccatgtctcattcttctccaaagcttctatctcagagtccatggcattgtcccagactgggattccttttgcttgctgaaaactaacaggttcatgcatggttgaaatggcaaacactagagccttgaattttgaagagagtttggagtagtcaagcacctggtgtagaggatatgcagtgactgccctactgtcctgagaaacaacagacagattattagaagacagaaaacagtgatagtcattcaaataagatggcttggtgatgttcctaacaggcctgctgtgaggaagggatgaagcagtattgtgaagttgttcagatctgtcttgatgaatagaatcagtaacagtaggaggtgaagagtgagatggaaattcatgatcaatataagattggggcaaggaaaagaaactttgatattcaagaggcaaactgctagagttaacaaaagggaaaatagtctcatgaaaaacaacatccctagaatagaaaat

SEQ ID NO: 139861 - DNA, 960 bp, Cannabis sativa
ttcctacttgctaagtgctaataatttctgaatgtgtataattttgtattaaaccttgtttgatttctatttattgatatttgtagtacccaatatgactgtgaacaacctcatagtgtcactgttgactgacaataagctctctggagctaactttgtcaaatggaaagagaacattaatattgctctcataaataaaaatgccctatttatgttgactgaagaggcttcagagcagccaggtgagaatgcaaccaaggcagtgtaggaaaagtttgagcattggcagaattctaacaacaaagcttgatactttatgctgtctagcatggtcgacaccttgaaaacaaggtttgtaattactctcacggctgcagatatcatgaaccagttaactgaactctttgggatggcatcagatcaagctcatttggaggcgacgaagaattttatcaatgcacggatgaaacctcatcaaaacgtgcgtgatcacctgctctagatgactagttacttccaagaggttgagaatcatggagctatagattagacaactgaagtgagtttgatcttcaatagtttgactccagcttttctgctctttacatcaaattatgtcacgaacaagttgacttttgacttccacgagttaatcaacaaccttcagacatttgaaaatttaattggaggaccacaaaaaggaggaactaaagctcctagttctggcactggtaatggtacgactaaggttgaggcaaacattgcctctatttgaaaacccaaaaagaagaagtggaagaatagcaagaagcctagatcaaccgaataagttggtacatgcccacgcatagtaagttggtattccatcatagtgtgtaagattgtgaagaatccaatcaactgaaggagaattgggctcagatcttggtgatactattctacagaaaggatacaagggtt

SEQ ID NO: 139862 - DNA, 513 bp, Cannabis sativa
cttccttcttcctgcagtcagttgttgcgtgccccagtcccttgcaatgtgcacatatcaaaggcttccactcataagtaatcgacaaattgacattgggaccatattcatcttcaaaagatatgttggcgggaaagtcttgatgtatcgagacctcaatgagaactcgaggaaaattgagtttattcctttccttcgtggcagcatccacttggagaggatttcccaattgtccaatagtagaaacatgtaaatgaataagttgactaatggatttaagaatgcttacattgaaactattcggattccaagccacaattattctccctcttttgtgccatgcaatattgatgtgaaacaccaacctttaaacatactaagatataaagcccaaactttctgggctttaacccttgtctcgagaaaaccaacaagaccacttttctgtcgaagaatcaaatccttcactgtactctgcttatgttggtcgttgattcctcggacattccaact

SEQ ID NO: 139863 - DNA, 858 bp, Cannabis sativa
gagtcatcgcatgaacagaatgcaagccccaggaagatccagtattggggcccctggcttgacagaccttggatgggcaacaatcgatcactccctaaccaggttgatgaggatggcgcttacgacccaactagatacataccaatcgtggaattagaaaactacaatcttaggcatcgattgggggaagtaaaccagcgtaatgctgagttggagcgtgaaataactgcagtaaaggcagagcgggaagatggtacccaaaatcaacctgaccttgggaaaagagattcacaaggcaaacctcacggttcgcagaccaaggggcagagaataacccagagatatactcagaaccctcaagaaatgcaacctgagggaactgaggaaaacctggagacacagcctgagatacatggaacatcagacgagaatcgccaacccactattcaaactcataagagtgaaactcgtgcaaaccctcataggaagaaaaaggtgagtcaaaccatgagagcaagggcaaggtccgaccacaatcatgacaagagtgatctacgagaacatctgaacatgaagaagcctgacctccgtcaacaactcgtttcaaggaaaaatgattcattccatttgcgaatgagtgagttggaggataagttcagagtgcatcaagtcacgaaacccaggagacaaccggggcatgatattgttggaaaacctgatttagaggcctcgggatcaaagaaaaaagatgattctaaaaggctcctcaaggataagaagcccaacaagtatatccctctttatgccgaatataccgagctcaatgaaactcgagaaaaaatctacctcgcacatgta

SEQ ID NO: 139864 - DNA, 1048 bp, Cannabis sativa
aaagcgtcctcgcgcaaagtgttctgctgctcctcctgcaggatcttcttcagggcctccacctcagcatgtccccgactgaactcgtccatgtcatatttatgtttggcaatgcggagcatctgcctttcctcgtcggcagggaccggggtgagcacaatgtcgtgcggcacagtatactccttcgcttcggaaggaatcccggagtcattgataacagccggagtgtccttcctccagggtcgcttggaaggctcagtctcaaccactttgcccttccgcttgcgctcaagggcggccgcaacctcaccctcatcctccttgacttccccctcctcgtctatcaagacaattgtgcctaaagtggcactggacgaggacctcccgggggtcaccagttgggatggggccagaggcagagaagcgttagggctataggcctcggcaagggtagccagaagatcttccataggcctggctgctacaacaaagaaataaatgaagtgttagaataaccatgagaaaggcgtgcgcccaacaagaaagcaataaaattaatcctaacctgactctctaattcagccctagcaaagtcttgaactagaatgttggcttcgtcatccccaagaaagctgtccgaggggagaaaccagctggaggacaaatgggctgaatggtccaggggaatgggcaccggaggcccagagcccatccgggaccgacccaagaaatggcccaaatgggaaaaatagtattccttggcgtgattcccccaccgggtggaaggcattctaaacttacaaaggcgctcatcgaatcctatgggtatacactaggtatactcgaggggacatggcgaataactaaaggaaacttaccacaacctgaagtattggcatctcgggcaccagtgttgggaaccgggaccaaaggcttgggcctggagggcctccgttccggggcagcttccagacaaagggtcctcccggccgcagcctgggccttgatgtaagccagctcctgttccctcctgaagagatacttctga

SEQ ID NO: 139865 - DNA, 972 bp, Cannabis sativa
agtctggtcagatcgtgatcaagtgaaaacttactaatgtcgcttatttggaaattaaaacatgtgcatattctattatcaggctactaacatgcttcctaacaaacttttcttaagtcatactataaaaataaactactaaagcaataaaagcttactgaactgtgaaacgagctaattgctgatgatgattgcacatgtcatgacgatcttcggaagacaacctgggagctctgataccaaattgtaacaccctaactaacttaggcatgttagcgtgatttttaacgtactggtgcagctcgttgctaatcaaggagattaacgaaaaatgtgattaattaaaatttgcttatttaattagaaacataaagtaatatatttataaaatcccaggatcccatttacaaaagtttgctatccatatacaaaagtttagtcgcctagcgactatacagcaaaaagccctgatgtcccaaagatcgtacgctcgaggactaaccacctcgacatgtacaatcttcacctgctcgctctcacgactccttagctttagccttccccttacctcaattcagaattcaagtgtgatggccaacatgagtggaacaactactcggcaaattacaggctcctttacttagatcctcttaaatctgctagaaaccacaacaatttatagcgcaaaaatcagaaacctagctgttctatagggttcgaacaagagagagttttgagagagagagttcatttttcaactttgtatattttgtaaaaatgattttaatgaattgattttattttattaataaaatatcagcataaaacataaataaaaatctgattattaaagttaactaacttcactaaaagacaaatcaaagattggcaaaatgaccatttttcccctcccacacaaaaaccataaaagatcacttaggggtatatttgtcaactctaaaatctcgacta

SEQ ID NO: 139866 - DNA, 755 bp, Cannabis sativa
  modified_base (657)..(672): a, c, t, g, unknown or other
cattgtactaactaagtatcacagctggaagaacctaagtgacggatagcgaggcatccatctcgctatatgagggcatactcatggtaccttcactaatcagctccagaaatctttcaatgagatccactgctctatcgagtcagctttctcagatagaagctgacattaaaatgatgttgactactgaagttcaccttgtcaccaagatctgcgattttcaggtggagcgttatgtcttcaatcgcagaaacgactagatttaaattatcaacttcggaaagacatgggaaaagctccaactcgctgccaggattattgttcctattcaagttcccagtgagatgccccagcgagatacactttgcagcgtatctaaatccacgtcaatattgacccggtaaaagcggataaatcacagctgtatgattttcaaataataactgcatttatttacgtggtgtgaaattaaagcccacaatttcggggaaatattattgtggaatttgactctgattgtaatttgctgccatcctatattactataaataggggcagaatgcactgagaaacgggcgaaaaatccttaagaaaaaagaaccctagtttgtatcagaataatctgtataagattgatgttggaattattttaccagnnnnnnnnnnnnnnnncaagtatgttattaacatcctaaacatgaacttcaaaaacgatataaaataaatacatataaagtatcaggaaccttacagtg

SEQ ID NO: 139867 - DNA, 616 bp, Cannabis sativa
  modified_base (182)..(183): a, c, t, g, unknown or other
atttgttgattttatttaagttaagttcgggttcaaagctgagatcgagggttgggtccgagtttagagtcggggccatggttcgtttgggtttcaaggtttaagctggagtactcagagtttaaaatattgatcaagaaaaaaaattgtttaaaatatttaaaagtgattttttttttttnntgtttttaaaattttgattcttaattaaaaatttgaaaagtgaaaataattttataaacatgattttaaaaaatattttcacaaatctaattttaaaaataaaaaatatattaaaaaagtattaacaaaccaccatatgttaaaataggagttaacattaacatatatcaagcgtctatttatttatttattttatgggtaaaaaataaaatatggttatactatcgtaaattataaaaattataagcattttctaaaaaatattacataaaaaaaaataagaaacaatgttggaaaaattttcatattacacaacccaataagagagagtagtataaggcttctcgaaaataggacactaaaattttaaaaataatgaagttttgacacaaaatgttatcctattatatatgtgggagtctatagtgtccca

SEQ ID NO: 139868 - DNA, 630 bp, Cannabis sativa
gtgcatcagggaacacgatctccaaagcacgaacaatgctttgatgcctatccgacacgaagactaagttctcaacattaccaatcgcttctttctattttctcataaaataggtctaataattgtggtttttattgtcaactacagcgaaagctatcagaaaaatatggttgcctgcatggtgtaccccgaactaggtgtagtgtcttctctctgcacctccaagcctttcataactcatttggatcccgtaatccttgtacatatctttccttatattagaggccaaattatctgagccatcagttgcgaacttatacttaattagagtggcaattatcaaaggtgatgcttggcggttatcttttcctcaaagattaagggaacatgtatgtacattttgaaatgtagtcacctcaaacatgttaaaaagtatgttcttcttcgctcttaatctccaccgaaaatctgtatccttacatgtaacataccaaacagtattaccgaacttcctaataaagtggtcaaaccctttcttcattgcatacaagacaacaaccatctttaaatgctttttgtttctaaaaaactttcctagatgtaactctccacctggtgtgccacccatag

SEQ ID NO: 139869 - DNA, 906 bp, Cannabis sativa
  modified_base (27)..(48): a, c, t, g, unknown or other
  modified_base (76)..(97): a, c, t, g, unknown or other
gacttaaaatgatttgtgtgtgatttnnnnnnnnnnnnnnnnnnnnnnaaaatgatttgtgtgtgatttggatggnnnnnnnnnnnnnnnnnnnnnntatgatgattgattgatgcttgtgaaattttatgaaaagaaattaaattttcgtttctggagttattttttttttcgatagtttggaaaaaattaagcaattcacttttttacagaacttaattttgattttatttgaattaggtatgattttttgaagttttgaaaaaagatagggtgatgaattgaattagttatgattttttgaagttttcaaaaaagataggttgatgacacaccctcacgcgcgcgaacctgagcttcactcggtcagcagcgtgttcggacagcccctgtccgaagaaacacgctgagggatgtctgaaatcccttcctccgcacgcggataggctgcgtgcagcctctagtgccgaggttcctcagctgtgtcacccagtgagcgcgcgcacaactctaactattaatttcatgctttttcatgctttttcatggaattaacttctgattttttgtgtaattttgtattttgatttttacattttatatttcaaatctaactatcataattaaattaattagtattttttaaaattaatttaagatattagtgtaatttgaatttgaaattggtaaaaatctatcttttttgcttaattaattattttattttaaaatttgattattttgtcttatttttaaatttaaggtcagatattaatattttttaaattattatatcttttttaaataaattgacctcatttaaatttaaaagatgaatatttttatcatgatattttgaatagaaataggatattatgctaacttttaaattttatttttttattt

SEQ ID NO: 139870 - DNA, 510 bp, Cannabis sativa
  modified_base (376)..(378): a, c, t, g, unknown or other
actaccatgtccttaatctatatttcacgagaagatccattggttgactttaatgaacacattgaagaacataaataatacaattgaactagaacctaaccatctcaagattgagatcatttgatctaagattcactatgtgattttgaattagatagatattacggtaagtttattagtttgggattttattccctattttttatattattgcagacaattccttttattttggagaattttataataaagttttctattttgaaaatgaattgcatttatttttatttatttattttttttttttgaaaaaaaatgaattgcatttataaattgagttttatttactttatcttgtgtatgccagtaccaattnnntttatatgttttaatgtttgtatgtgttcgtgtttttattattgatacatattctatagtatattcaactctgcaaagagttaatactacataaacacttagaatcttaattctatgtttatgaataattgt

SEQ ID NO: 139871 - DNA, 552 bp, Cannabis sativa
tttttttttttttttgagatgacttctaggagtcgttagttaggagatgttactttggtaaagtttgtgttgtgttggtgggacttgtatcttttcatttccatgatagctgactgtgtaacaattatataaaaactactttataatatcataatttatttttatataacaaagtaatttgttgagatttcatatgttggctgaacacaccaccaatacaattaatattttttatttatttatttatttcaaacacagtgatattgatgtttaattatttatttatttaataataatatttgtttgcaccaaagtctcaattcaaattggataaaacgtcgatatattggacggtgtggggcttgctttcatgtacccaacggcttaaacaataaacaacccacctataatatcaaatatatacttcacttattttttttatattaagttaaactcaaaaatttaccaatatattttactttaattatactggtatacatactatatggtttttttttttttaggagtaaccgatacaggttaaaataacaa

SEQ ID NO: 139872 - DNA, 811 bp, Cannabis sativa
  modified_base (288)..(290): a, c, t, g, unknown or other
tttttattatttttaatttaagtttttaaattaattgaataatttgatttttttttccaaacaataatttaaatttcttcaatattttttcattattattagtataaaacaattttatactataataatttaaagtttgtaattattgtggtgggaaatcttcaattttttttgttaatatatatatgggtaaataccattttagacaccgtgttttacaaaagttaccaattagaccctctgttttattaaatgacaaaatagaccctatattttttaaaattgtannnataggaccctgaattgattttttatcaaaataaaacttaatgataattcgatctagagatattatgataaatctggttacattttatgatctagtgatattagggtttagggtttggaacaattttaatattataaattttttaaaatttataattattgtggtggaaattcttaaatttttatttgttaatatatatatatatattgataattgtattacataaagtataatagtgaacaataaaataacacatgaaataataataataaaatgaaaaattttgtcaaacaaaaaattgaatataaattttgtcaaataaaaatacataataaatatagatgaaaagttttgcactaaaaaatatctgaacgatctcaattactgtcgatctcatctaaatttggtagtctatgacaactttggataattataaaacgtgtggtaagacattaatatcatccaaatataatagtttattgttgtaaaatttatttactatgtaagtacacacagtggtaa

SEQ ID NO: 139873 - DNA, 1716 bp, Cannabis sativa
  modified_base (462)..(466): a, c, t, g, unknown or other
gcacagctagatgaactaaaaaaatatgtttcaaggcttggccggacagagaaacaatgatctcaaattggaccgagcacgcggaacccccttctatcccgagatcaatctcctagcgttgccccacaagtttaaaatgccaacttggataatatacataggaagagaagatcctctttcccacctcaagtatttcgagatgcaattggatttgtaagggatacgaggagatatgtgttgcagaatctttcttgctaccctctcggaagctgcccagtaattgtatttcaagctggcccctggaaagttcaactcatggaaagccttctcttcggaattttatgcacaattctcctcctctcgccaacttccgttgcatctgggagacctggtcaaagtcaagcaaagaccaagcgagcctctccaagcatacatcagcagattcatgacggaggcgaccannnnntcacgggtaactgaagatggaaagttgtccgcgatacatgggggcattgaagtcctcggtgaacattggaaggacataaggaagaatggccccgtagactcaatgagtgattttcttgaccgtgctgaaggcttcatcaaactcgaagaagcaattaaacgagcagaaggtgagcaaaagcctggcaagtcaaaagctccttccactggaacgtccgcccaactcccccactaccaaaataattcaagctcgaatggtaaatgttccaacaacaacaacaggcaagggaatgggaagaagggaaagttcaccagcaaaaccgagcaagctccccgggaaaatcaagcaaagtacactgcatttaccatcttgactgaagatatagaaagtgtctacatggccactcaatcgctagccccgtataagaagctcgcgcccatgaagaaaaatgtcagcaagagagacatgacaaagttttgtcgattccacggagactacggccacaacactaacgaatgcaacaacctgaagcaggaaattgaattcctgataaggaaaaataacccacacttacagaagtatgtcaagactgattagagtcagaggaacgacaataaccaagacttgctacctccaccggtagacgtacatctgcaagtcattattggaggcccgcacatagctggagattcatgcaaagctcgggagaggtatgcccgaacggcgtagcacgagcaagaggaagttatcctggccgtagaagaaaggaagcccgaaattccacgagcaggatggcctaccataaccttgaacgacgaagatgctgtcaaaatcaaatttccacacaatgacccgttagtcgtggaggtccagatagccaacaaaatggtggccagaaccatgattgataatggagcctcttccaatatattgttcgaaactgcttatgaaaagatgggactccagctcaaggacttagccccatgtctccagcctgtctacagtttctccagccaaggagtcgcacttttaggacaaattcgtctacccctcactgttggacaagctctaatgagcatgactatcatggcacaattcctggtataagatgttccttcaggctttaacgtgatgttaggccgaccagcattgtatgacttaaaggctgtcacatcgatattccattcgtgcctaaagtttccaacaaagaatggggtagggtgtctgagaggaaaccaacagactgctcg

SEQ ID NO: 139874 - DNA, 1643 bp, Cannabis sativa
  modified_base (292)..(299): a, c, t, g, unknown or other
  modified_base (1588)..(1595): a, c, t, g, unknown or other
agataagaaaatgtttgtttcaacaaatactacttttctaagaatgtgactaaatctaaaaacaaagtagcaaagtagaggagatactttttattttcaatcccaaagtgttcaatcatcttattccatataagatggtcccactgcctctattatattgacataaccgatgaggacaatactattatgttcctagacagaaagtctcggtacctcatcatagtgggagggttttaaggaactcaccctgttatgacttagaagacacttgtgataaaaatctattgttagnnnnnnnnagtaatggatagtcagaataaggagctaagaatcaaagccaagaaaactatgattaaaaccatttgtatggagtaaccaaaagttttctattacaaggacaagaaggaaaattttgataataagtctattcaatggacttaacaaaacttctcgatcctagtatcataggtttgagattatctaaacctatggcctgtggtatacttggtaatttacttactctagtacaagcaacttactttagtaagatgctagagcatttttctaatgaataattctaaaggaagtcttttggatccttgatatagatcttatttatgtaaggaacagttttaactattccagaaaagataaaaagtcatgaaaagaattccttaagcatcaacaatgagaggtctcatgtatgttctggtatgcattagatttgacacctactattgagtgggagttatgagtaggtatcaatttaatccaggaaatgaacattggaagataatcaagtaaatcttaagatcaaaagaggaactatatgttagtcgataagggtggtattttaatactcttaggctacaccaaatcaggtttctagacttgcgttaatgctagaaagtctacttatgagatggtgattactctggaatggagtagggatttttggagaaatgtaaaaactaatctggagtctataactctaccagtaagactgaatgttaaagtggcctagaaggttgctagataatttttcagcctattgaaagttctatccagttttttggcgttattccagtcatggattaactgctagtgttacttcatcactaacacagatatagttgccaaatagtaaagaattcagtaccctaagaggagtaaacatacagacaggagtttcacaatatcaaggattttgtgactaaggagatggaatggtggagaaagtttgtattacatataatctattagatcttattacaaagataatactacatactactgtaacgccctgaaacttaggcacgctacaatgattttttaattacagtgccatctttgctaatcaaagaaattttcttgaaaattgtgtctaattaaaattttagatttaactaataaatttagaaacttttcgtaattatacttttacaaaatattcaaaatatatttagtcaggtcgcacaacgactacaaaataaaatccccagatgtctcgagaccgaacactccatgtcgcgccgccatgacatggacaatatcatcgtagctcgaagctcactcctgttcagccttnnnnnnnnctttacctacacatgaaagtagagttgtgagtcgacaaactcagtaag

SEQ ID NO: 139875 - DNA, 1294 bp, Cannabis sativa
agaactggttaaccattttcccaaacaggaccctaggaatctatttaccgttttgggaattcagtttaccagttttagcagttttagaaccctaatttttcatattttatcgatatttagggtattaccacgttaataatcgatggagtaacttttagtttcaagtttaagtctccaaaagtgatttagcggatcacttaccagttttacgtaaattgtgacttagggccttaaatcatcgagcaactatctccactcagagttatcgacatacttgcattcagaatcaagttaagattaatataatagttgtatatatgtagacatatttagcatgcatgttagttgccattagaataatatatcatggtatcagtgaggtgtacatagagttacatcgagatgccaacagatttatgttaggaaaatcagtagccatcagatttgcataccaggatattggtgaaatgtacgtagagttacactgagatatcaatagatatatgctaggcttctatagtatgaactaattgctaccacatcagtacgactagagtactaagtataggttggatttgtggttagtcatacttttgtcaagaacgttcctgaccaagttacgttatttggtatatgggcgcctagttagaatatggatatatatttatgtttatgattaaacttttcttattgagtctgtctactcacaattataacgtgtatgtgcaggtaagaactagaactgaactgggatgagtctaaagctaagggtaaagattgtacatatcaagacagttagacttggagtgttcagagtctacgagacaatttagggtcacttttaatagtcgctagacgacaacttttgtagtacaaatatcatgcaaacttttgtaactttcaaaaagggatcccgaattatctaatttatttatatttaagattcaaattaattatgaaatttttaattaatctcgttttttaataaattttttgattaacaaaggagtgcacagtaaattaaaatcatgataacgtacttaatttaatagggccttacaataggtgtcgtggatctgcatatacggcccctatgcttcgattattattgttttggttattagcaaataaccaaagcggtaagaatccttttgcctttagttttttttttaccccttttgtttttcctggagtgcctttaacactactacaaaagtggtttttcctgatatttttaaacagtcgtttaaagtattcacgtcagtttctataatcgtcgcctatacgatcgtcg

SEQ ID NO: 139876 - DNA, 637 bp, Cannabis sativa
aaaataaggaaataaaataaaatccaaaaaataaatttttggaatttaaatttttcttaattttccttccctttttttttaactgtcaaataaagcaaattgaggctatatgtggccgtccatgaccaggtccttctgtgcatgggtccaatgaattcataggaaaacaagtttccttatattgatattaatggtttaaggccaacatcaaacagaaactcaaaaattaaaagatttatgaatctagtttgcattaaaaaacttgaataaatcaaactttaattctgaaaattctttctagttatgaacatataccaaaatttcagcccgacctcttgcttgggttgtttagacccattttcctgcaacgctggtcacacggacccgactaaagacccggtcagaatttacaattctaacgaccaaaattcatgtttttaattccaaaaagatctaaatgaaataattaagagatccacgtaattttagaaaatgaaaacatgtaaaagttgaactttaatttcaataaaaatagctcgggtccgaatgtgttcttcaaaaaaatttccagattttgatggttttcaaaaccttttcatgtatagattaaatgtataacatcatatgaaaatgataa

SEQ ID NO: 139877 - DNA, 512 bp, Cannabis sativa
taaaagtgggataaaaagttgtaacatatcttttatcccacttttttatttttgttaaggataaaaagtgggataaaaggtctcctttcttgtaatgtaaatttaagagaaattatagagacaaagtggtcttctatattttaaaatcaagttattgtcttgataatgaaatgtgaaagtgtgggggtggatactccaatatgagaaagtttagacatacttagtgtctaaaattaaaatatgagaatttagaaatgtttggtgtctaaattaatgtataattttgatatgtttggtatcaaaattattgagaattgagtaagtgtgaaaattaatattttataattaagttttcaatgcttaagtatagttaaggacaaaagtgaccatgtaataatggacactaattttggctagcatgattcgcttggaattaaaaagtgtgcggttataacagatcgcttaatctccgtacaagattaaatcatggattttcgagggatgggacctaa

SEQ ID NO: 139878 - DNA, 644 bp, Cannabis sativa
  modified_base (570)..(593): a, c, t, g, unknown or other
gtttctttactgtttttttttttttttctgttttgtgctttttgttaatatttggttatttaattgtttttgtttcatttttttattgtgtttgattacgatgttcgttaaagattaaaaatatatgtcctgctgatgaagagaggcaaaagcttcaacttgaaggtttatttcttgatgaatctattgatgaccgcagtatatctaaacaaacatttgagagtggttcatctttaaagaaatctgattcagatgacattgatttgatgaaatctaagttggagctagtcatttcgaatcaagaatccttggctgaagacttcatttccttgaggtgttttgttgatcttaatttcaagcttgtaatgactgtaattaaggatattcaacagaaggttaatgccattcatcgtcgtccttctgatgaggtatttaattatactttattgtttctgtttttacatgctttgtttttagtttctttactgttttaagttgcatttgtgttgtatgaatcagggaaagtcatctgatgacttcgtaacacaagattctgatgatgatgatgannnnnnnnnnnnnnnnnnnnnnnntgatgatgatgatgatgatgctgaagatgatgagaaggaactgcctgatcc

SEQ ID NO: 139879 - DNA, 627 bp, Cannabis sativa
  modified_base (230)..(236): a, c, t, g, unknown or other
tccgacattccgataacccatgttcaataagcttgaacaacatacctctctccactaatgttgacaattcttgctcggaatcaaaaggtcttttttggtaataatagcatagcttaggtaaaacgggtagatgagaagtcatttaggctacattataccataagtacaattatacccaacaagcaccctcaattatccatttttcatcccaaagaagatagtaagagatnnnnnnntttttctatgtgcctacctcattgttcacatttgattctcaagaagaattcatcacatttattgtttttcttttgtttgttttttttttctcttcttttcttctttcttttttctacaatagagaaacaacacatataacaactattattattttttttaatctcttattctcaaaattattcccccacttccaacaattacattcccccgaaacttgagtaaaagcttatggtataataaggtttgttgaagatgaaagtagttaaagataacaaattaaccttggttaaatggtgagaattttaaaacaggttaaggctcaactttgggtatactaaggataaaactttttaggtaagctcgaaaggctcaatcgatccaaagaaaact

SEQ ID NO: 139880 - DNA, 557 bp, Cannabis sativa
catactgacacgactcgacacgacccatgttactaactttagtttatcactagagtcaattcgtacacaaaatttataatttttaggaaaatataataatttcagatacagaaattaaaattctaaatgtttatttttcacatgtagagaaaaattaagacgtatgcaacatattttttgatcattaaatttgtcactgtaaattatttcgacttttttaagaatttacaaaatacaaaatagattataattcttattttttttttttgaaaaatcatatgaatataataatttatgccaaaattaaagttaaatatatattatataaagactttttggaccttgctacaacaagtttgttatgactacaataaaatcaataaaaaaagggatatttacataatacatcattttttataaaaaaaattatatttttacgtttaaaaaacttttctttatatttttacggtctcccatagaaagtaaaataacacgaaaataacaaaaaaactacataaaaataacatgaaaataacgtctaaataacatcaaaacaa

SEQ ID NO: 139881 - DNA, 809 bp, Cannabis sativa
gaatttaaattctaagtgtttatgtggtattatctctttgcagagattattataccatagattttgtatcaataataaaatacaaagcatataaaacatgataaacatataaatataatttggtattggcatacaagttaaagaatatgaagctcaattttataatagcaatttataatgaaatctttttaaagaaaaaaatattatattaatattctcaaaaatatcataatgaattgtgtacaataatatgaaattgagaataaaatttccatactaataattgaaactaaattgttcaataactaaaataattaattcaaaaattaaagaagaaaaacgagcttcatcttcaacttggacaatctccacccttctgtccaactatctgtctcaactcactaagataacaatccaagtttaagcagctggagctgaaataagaagaacataaacatggttaatcgatctagaactaataacccaaggggataatgattctctaaaatacatgaatttacaacacagttagaaataccttgtttctttgccaaaaacataggacactgggtttctagtggcccttttcgttgcaatagaaacattttcctttgcctttggattagcatccttcttacccttattagctatgttaacagctttaagaggcttctttctattcttcttttaattctttgtgggttttgaagtagaggtaatgtttgcctcgggctttgctgtactagtcgtagcattactagaacttggagctttgtttcctcctttctgcggtcctccaatcaaatttt

SEQ ID NO: 139882 - DNA, 575 bp, Cannabis sativa
cttattaaattttattcattcttatttatgttctcattcttattcctattttttatgtttttattccttctaatcaaacaatttagtgtaaaacccatgatagcttctaaagttgaagaaaaagtagagcaaggtttaatattactagaatttaccttttgtttctctaatcttgagttcttaatcatagcaacatgaaggaaaactccaatctaaaatagcttttatcaatactagatttgtattataagaatccatttcatgttgaatcaaatacaagcttaaataccatattttgctactttatggctaaattagattagacaacattgtgagccatgtctatttattttatattaagattcccgcttaaccctacaatattcggggaccagaaaactataacaattgctatgtaggtaccctcgagcctcaaactttgtgagagtaaaccacattgcatgaacaaatctatttatacattatgtaccagattttcatgtcattgtggtattgatatcataaatttctaagaaaacgactcgagaaagttgcgaaaaagttagttaaaaatc

SEQ ID NO: 139883 - DNA, 725 bp, Cannabis sativa
  modified_base (69)..(72): a, c, t, g, unknown or other
aaaattggaaaaagtccttaaatccaacaatctcaatagttcaaggtgcatttttaacgaccttaaaannnnagggggcatgatttggtacatgttgaagtttaggtggccaaaatcctaattaaccttttaaaattgttgtcatcaccgtatctcacttatagatgacattatatttaaagtcgttatgttatcttttttcttttaaagaagttatgttatcaatatatcttacttatagttgtcactatattctcaataagtttgccctatatacataaagtacaattataataatgaaataaagatgaagagaaagtatgaacaaatggatataatttgatggtccaaattgaatttttgaaatcaaaaaggaaaatttgacatgaaaaaaaaaaataagatggagaaaaaaaaatatgtatataacaaacatatgtatggttatgatggttagattgagatgtatggagagagtgtgtgagtaaatggagaaaaaattctgtaataaaacaatataataacacaacttaatataatttgttgcaaaaataataaaacaaaagaattacaccatgtacaaaaattaagaacaatgtgaaagcatccatattgacctattgtattaagggcttttttcataaatgtataacaaaaacaacataattacaaaaaatgtgaaaaaaaaaattattttaaaaatttatatattttgaaaacttatt

SEQ ID NO: 139884 - DNA, 501 bp, Cannabis sativa
taaaattcaaagccctcacacctcacaccaagcaccaagtttattattatttgtttttttttttttttactctcggcagccacaacaaaagtgccctgcttcttttcaattcgacactactccagcaacaataccaaaacttctaacaatgatccgtctaaaagccaccacactgccaatactacactaaatttccaatacaactcaaataatgataaccaggcagttcattgttcaaaaccacaggagaacttcaatatcccaccacaattgattaccaattcaaagtgaaaattctcacaccaacactcagcatctattcatcatggcaccctttttaatgcacaaaaagcacataaaaaattgttttcaacattactccactcagctgaaccctcccaacaactccaaaatatcaatattacccaaattgcaacatccacacctcaaactatatacggcagccaataatttgttcaaaaaaaaaacaaaattaaaaat

SEQ ID NO: 139885 - DNA, 530 bp, Cannabis sativa
gcagaaaaaataatatctaaccgaataaattaatttttttttgataagtggcgtctcaaaagagcagccaaacaacaacaggataaaaaccactaaaaaaatagtcaatatataacaccagaactacgcacagcagcctataagcaaaataaagaaaagactaggtgtaaacttaaaaaaaacagtagtaaattatgaaaagccaaaaacaaaaatcagtttaaaaaaaataattttttttttaaaaaaataaataccaatataaaaataattcaaagtaactttaaaaaaaaataataataattcaaaataaaaattaataaaatttttaattattaatattattatttaaaaaataaatatcattaaatattattataataggtataaagtttaatcgtatacaagcagtcctatcgtaagagtatacaccttacatcataataattacatgatctaaaatcaatggtttaaaaaagttccctaccggtaggaaacttttgctaggtcctaccatagtcttgtcctat

SEQ ID NO: 139886 - DNA, 528 bp, Cannabis sativa
atatataaaaaaatatttaaacataaaaatagtgcttatgtaattatcccttgataatgcaactactatttcactagcttcttattgtgaagacctgaaaattatcctgtaggtataaaactaaatgaaacaaaagaaattagaaatctccattacgcttctccccaaataaacccactctattgggcttggagtttcagccttctggcccatcaaacttctaattcaggcaccacattcgcatcctttcgttaaacatgaaaaaaaaaaaaaatagataatacactattttcttaaaaaaaaattatatttttaggtttaatcttttttttttttatatttatacagtatttaataaaaataatatcaaaataataaaaaaaaattaaataaaaataataaaaaataatatcaaaataacaccaaaaaataacatataaataataaaaaaatagcaacagtacaccataaaaatatatcaaaagactctattttttgtaaataaaattataaaaatttatttaaaat

SEQ ID NO: 139887 - DNA, 1080 bp, Cannabis sativa
atctaggagagttaattttgcaaccttctgaagtggcgacaataattgatactacacaaaatttgaatgttaatcaggcttatgaaaatgttgtagatggtgacgttgatgacgtaatagctgatgaaggtgacgagttgctaattgatcaatgtgaagaagacgatattgtttctgaaaatgatgagtgtgatagtgactattagtttacttatgtttttaattttttgtaataatattataaatgatgaatttgatgatgttaattgtaattcaaactataaatatttttttatttacattcatagtaatttagtcatataacttttcttttaaagagtcataatgtcagccgatgtagcttcttctcaagggggagatggtgatggtttcgatccaccagatcctagtagggtaccctcaacttgcgaggcagcaccaccgcccaaaaagaaaaggtcgtggtgttgctagtaatataccattagagactcgcaggcgagcaaatcaagggccattgctacttacgcttgatcctgcaacgggaaaagttgttggcttggagaactaagctttcatccgacagttgggtgtcgaagtgagcacattattgtcggggaactacttagattttagtgatgtacctcaacattttaacgaacaagttgtgcagagaatgaaggtaatcaattgatgaacataataaattttattcataaataatcaaacaactaactaataatttaattcttcaatttttttaaaaaaaatcatatcatacattgttttgattcgtggagctccagatctatttgatacagatctacattgcatgaatctgggttttcgattttagagggagttattttgaacgattaaaaccgaaatcaaatgtttaatttcagtttttttccagtttttctggtttctttttcataattttctgtttagatcattgcagttcttctttttcaataaatttttgctgaaattgatggttgcattaccctcgttttggttttattctggttgtgttgctgatttgaacgatggaggtatgttcatcttcttcgttcattc

SEQ ID NO: 139888 - DNA, 3114 bp, Cannabis sativa
  modified_base (65)..(73): a, c, t, g, unknown or other
cacgcccacgcagccccaagtgcgcccatggacagtatgccaagctcacaattttttcgtttttnnnnnnnnnttcatgctttttcatggaattaacctagattgggaccaaaaaccagaccagaactgagacgtggacccagaatcgggatagagacctaggcaacagaactaggaccgggacccaagagccgaccccaaacccagacttgaacataggacccagctcgtgacctggcacccgaaatggaaccagacctgaacccagagcaggaaccaaacttagacccggacccaaacccagtcctagacacaaacatggacccaaaacccgtaccctgtgacccaaaattggaactgaaaccacaagtagatcgagacccaggaacgggaccggaacaaggagttggacctcgaaccgtaaccaaacatagagctagacctaaaaccgtaaccggaccaggccccggactccaacacagacctaggcccgaacctggatcccaacccatacctcgactcggtgccaaacctggacccgaactaagacccaaacatggaacctaactcgggatacagaattggggtcgggacctagaaccgcaccccagtcttggtcccgaagccaaactcagaactgggtcccatgacttgaaccggaaccagaccgggacaagtgacaaggatccagatctgggactcagaccaggacccgaacccggactaggacccaaacccggaccctgatctaaacctaagacccaaaactggaacctgaacaagaactgcaagaccaggaccctcgaacaagactaggaccgtgacaaggacccaggcccattcctagaaacgaactcagacctagccccaaacccaaactgagaccagaactcgagcccagaaacggtcgtgtacccagaccgagaccgagacgcgaacccgaaccttgacctagatttgggacacgatcccaaacccaaacttggacctagattggtatctgaatacaaacctggactcaaacccagaccgagatcaaaactcgggacctagatccggacagagaccctatcccagaacaagacctaaacctgcacttgggacccaaacccagacatagacccgaacataaacccacaccgggatttatacctagactcagacccggacccaaacttagaccaggattcaaacctcaacccagactcagacccaaacccgaacccaaacactgaatggaaattgaaactgggactaggacccaaacacgaacatggacccagaccaagacctatgacccaaacctggatgggagacctggaccttggcctcggaacccaaacccagaccaaaacttaggacttggacctgaacttggagctagactcgaaccctgatctggacccagaccgagatcggaacctgaatctagactcgaaccaagacttgaaccccgatcgggtcctggactcggaccgagacctaggactcagacctagacccgggacacgggcatcagaactgggactgagacccaatatattaacttggacccggaccttgacctaggacccagaccaggacctgggaccccaagtggaactagactaggactcgagactgtgatccaaatctagaccagggcttggacctgacccgtagtcagtgtttggatctaggacccatatctggagtcaaacccagacccggagtcagaccaagaccctggcccagacccggacccgtaccccagaccagggtccgagtctgggtttgaatctaagaactagaatctgactaggacccagacccagacccggatcgggacgcggacccgaatcaggatgcagatctgaatcaaaactcagatcgggactcggaacacgaactcgaaccgagacacggacttggacctagacccgaacctaggacctggaccaggatgggagactcagacctgcacccaggaccaagacctagattggggacccaaactcaaaattagaaccagaatcaagactcaggactaggactgagaccaaagacccaaccccgttctcggacacggacatagactgggacccaggatccgaatggaaatgagactgggacccaagattgggatccgaatcttgacccacgacctggggctttgacccgacccgtagttggtgtctagatcttgaaatcgtaccaagacccgccaaacctggaacaatttctagactaggacacaaacccaaactcggaccccaagacccgaaataggaataagaaccagaataaggaccatggaacaggaattggaccttgatccaaaaccggatcaatacacggaaccgaacacagaccaggacccagactgggatcaataccaggacctaggcccgaacgcggacccagacttgcgccaggaactgggacctgggacccgtgacccgagacttggaccagaacccattcccgtaccacaactcgaacatagacccagacccagaccaagacccagacacagacaaggaccgaaaaataggcccagacccaaactcagacctagacctggacccaaacccggactcgtacccaaactcagactcaaacccgaacatagatcaggactcgaacttagacccagagtaggaccgagacctgaaattggactagaactagaactcagactgggaccgggaccaggacccgatactcaaacgcgagacctcaaaaccgaaccgttaaataaacccagaccaggccaagacccgagacaaagaccatttccgaacatggaccgggacctgcactcggactgggaccctaacctagatcgggacctaggaccctgacctgaattggggacccggacccatgacttaggcccaagacccaaacctagacccaaacttggacataagacccagaccaggacccaagacatgagctagaactggaccatgatctagatttagccttggactggacccaagacccgaggcttggactcgacccatattcggtgtctaaatctggtaattagacctaggctcagacctagactcagaccagaactcgaacccgtaccaaaactcgaaactagactcgacatgtggtttgttt

SEQ ID NO: 139889 - DNA, 935 bp, Cannabis sativa
ttttttttttataccatatttttataaaaaaagatggaaatcccatatttgtaaataataataagtttttccagaaaattcgttggcatgggaaaagtcaccggtgccgaaaaagtcgctgaaaaagtcattagcgcccgaaaagtaatcgaaaaagtcacggtcgctcagaaaagtcaccgtcgctggaaaagttgctgaaaaagtcaccagaagtagatgtcttaaatataaacaaaaatcgaaccggttctataatataataaatgaaaataaataacaccaaaaaactcaaaccggttataattgaaatataaccggttttgtaacataaagagtaaaaacaaataaaataaaataaccaaactaattataattaaattagaaccggatctataacataatgaatgaaaataaataacacaaaataactcaaaccgattataattaaaatataaccggttttgtaacataaaaaataaaaactaataaaacaaaataactcaaactaattataattaaattagaaccagttttataacaatgttataatgaataaaaacaaataacacgaaataactcaaaccggttataactaatgtagaaccggctataaagacataatgaatgagtatttttgaggtagatatgatatgggtgtaattatttagtgcattggaacatgttgaatggatttttttatttaagcaattttatttaactgatttttgtttgtgagtttttttcttagttgccttacggaaccagtttttttgtcttaaatttttaactagttgataaatataaacaatttctttatcttatatttgagttattgtgtgttattatttgtgtttatttattttgttatagaattggctcttttcatatttatgcctcaatattttctaaaattgatctctattttttttttt

SEQ ID NO: 139890 - DNA, 520 bp, Cannabis sativa
gcagtggagtgcaccttagggtcttgggggactctggctgttggtggagctcctatccctcctacatcaggctttagtaggggaggtagtggctcagccactgattagaaaagaaaagcacctactgcatcgagttgctcaggtaagaacaagaggttccgagggaaccagggtcgaggcaatagccaaggtggcaccaaaactgatacacttacccagagtgccctacttctaaaaagcatcatctgggggactgtaaatggcagggctgtttcaaatgtggtatgttggggcattataaaagggattgtccccaactcaagactgaagcactgaagactgcagcgaaacccgctctagcaagggtgttcgcgataactctggctgatgcagaagttagcttttcagtggttacaggtcagctctcgatcaacaactcttatttctctgtgttgtttgactatggggccactcattcttatgtggtggccagaagttttagtaaattggataaatcgca

SEQ ID NO: 139891 - DNA, 633 bp, Cannabis sativa
ttatctctgccataatctcaaaagcaaaaataattgaaagagaaaaggaagagagcaaacacaaaagaatagacactcaaacacgatgaaggcaatagtatcaaaccacataatgctaagaaccgctagagaccgatgcaaggaggacgaggaagtaccaagagtgtgacgggcatcgactgtcaccggagaagatgccggatctgccctcacgcaccggcacgtggggccgcgcggggtgaatctagatgccgaaatttggggttttgtagatcgacggttggcaatatttttgagtaggcactgagaacaaattatcactctaaagattgtttccaaaaaagaaccctaattgaaaaacccaaatttgtgaggaaccctaatttcaaattttgaattctcaatcctaaaatcagctctgaaaccatatagaaaatagtgaatcaaattgtgtgttgtattccataaaatactatatctttatatacaaaactaggaaactaaatgggaaactactaaatacaagttaccctaattttcaacaactaatattctaagagatctcaagagtgttatttgtgttctttaagttgttagtcaaagcctaccattttgtttgggtcacacgtacag

SEQ ID NO: 139892 - DNA, 802 bp, Cannabis sativa
aaaataccctttagtacccttttatgttattttagtgtggaggggtgaaatagtcattttgctccattgatattttgtcctttagtggacttagaaatattttattccgcatttattggtaatttgtggttgagataattaattaaatgctatgttgtttattttatcaaagtttaaaggaaaaaggaaatttttcaaaaaaacaccattttctctcaaactctctctctagtttcgaccctctttgagcagcaagaagctgggcatttttctttgataattcaagttattttctcaaggattagtgatctctaattgttggtaaggttcttacaactttcttctatgttcttgaagatttttaaggaaaaatagtaggttgcatgcttagttttggtttgttattgccagtggcggaacttggcaccactttaaggaggggccaagtataaagatttttttttttacaaaaaaaaaaaataataattaagtatgtatagtacacttatatttttgttggctctctatttgttcgacattttagagtatttttcaaactatatattttttaatgatcatgtaagttgtagttatttcggctcaccggtaaatttttagaaaactttgaatagtttacaatgccaaaaataagttttaaaaattttatagcaatcatgactattttttctatatctttagtaaacaactatttaaactttattttcgacaatacaaacaatttaaaatgttttgaaaatttacaagtgatcctaaatatctacaatgtacactatcataaaaa

SEQ ID NO: 139893 - DNA, 1271 bp, Cannabis sativa
atcctgattaggggattagggttccataagtattttgggtagcgtgcctaataatttagggcgttagaaaaagagtatgaggctgaggaagagcagatgactccgctcaaaaggaggaagaaacttcctgccgagcgcaggcctgttgaacatgcaattcgaaacctgctcggccatccactcctatacttggaaaggggaaagccgtcctggcagagataagagacttgtcaggtgatgagccttcaagtcttgctcaggcaaatgctttgcaaaatacaatgtcttgtttttaatcttcttgattattatgctttcatacttctagtgcttttctcttaaccatgttgcttttatctcgtgcagatccgggctcctaccccacctccatcactgcatccggaaaccaaaagatgcaaggagatgctcacccattacatgaatcggtcggtccctgaagtgaatgagctgctggtcggagctgacaacgagccttccctagagctgttgatgggaggagtcctgaaggagtttacgagggtgagtctttcccgacagtttcctttaatcctcctttacttgactcagattctaacgtttttcctctgtgcagactggtttgaagttggcttacacttattctcgaactaagtctgctgcctccaagaatgctgccatgtccaacaccataagggcggaagtggacgtggccaggaaggacgctgatgaagccatggttcaacttggagccgtctaaatggaattgggtgaagtcaacaaaaaacttcttgctgccgagaagaaagtggccgagctagccaaagatttggaggcttctgatcaacttgaggctgccatgacctccttgtccaaagaagtgaccaacctccaggaagaaagggaggttcttcgaactattttccgtaggttggaagcagagaagaagtccaaggaggaggagcttaacgctgaggtcgagaggctcaaagggaaggtgaatgccttagagacagccggtcacgagattttttatgacttttggaaggctaacccttaggcgaattttgattacctgggcgaggccaaagacatgtatcttgagtactgtgcttcccaagtggcctatggagagttcgaggcaaccacttctacctccagtctgaacattaacatgccccccgcctagacaacagatcctccagctcctgtcggcccagaagacccatacaaagagcctgggactccagccgtctgaacacttatctttttat

SEQ ID NO: 139894 - DNA, 853 bp, Cannabis sativa
ctacaaggctttaatgaggatgctttgatgccaatggggaagatccaactccctatcaccctcaaaggagaaaataatgtttgtgctttcaagcattatacttttaaggtggtagatttccccatgacatacaacgaaatactaggacatctagtcttaattgattttggagcagtaacttccacaaggcatctatgtatgaagtttccctatgataatggatgtgtaggagtagtcaggggtgaccagaagagtgcaagaagttgttacaatgtctctacgtgttcatggtccgggaagagatacctattgctcctgaaatagagattcaagtagaagttgaagtcgtttggcaggactttgaagatgagttagacccccgtgtggggtttaaaagaatggtcgaactaattgaggatgtggaggaggtcaaaatttgtaatgtagaccccaccaaaaccatcaaagtgggaagaaacctacctttaatggcaaaagaaaatattataagtactatcaaaaggaatcaggatgtgctagcatgaagccattctgatatgaataggatcaattgttatatcatctaccatgctttgaacatcaatgaagatgcaacacaagttcaccagaagtagagacccttaaacccagttgggcaaaagcgatgaaagcagaagtggataagctgatcacgaacgagatcctctaggaagctttgtatcccatatggaggatgtgcattgacttcacaaacctcaacaaggcctatactaaagtttgcttccctcttttgcagatagattagatggtggacgccacctctgggtaccagttgctcagcttcatggatgct

SEQ ID NO: 139895 - DNA, 2672 bp, Cannabis sativa
gagtagccatggttttaaaggtcctgaagactggttgagtatgtacatttgctgcaaagacaggtcgactcatggtatagtaagtgtatatgttattttctattgccttacttgcttagacaattatagtgtatgatggaaagaagtagcgtactgactatctatactaagaatatgtgtatggtaaacgcatattgatattgatatctgtctgagtttcaagtgtttgaaagatgtggattaaatatgtgacaagttatacagtaagggcaattgaattgcttgattagctagttgtctgggctcggggcaaatggtaaggaaaagaatcctttattgtcgtaatactggaaacatgtaaatttctctatgcaggatgtgattagacaacaaggggaagcaaatatgagaattgggaaaacaacaggctcgtcttgtgtctattcttgtactactgacacttcctgttgtaccactggatgtggtgaaacatatgaacccaacttatgagcagatcagtaggtagaaactaaatgaaccacaaattatgggatagaacgaaaggttctagggtgaccaggatagcgatcaaagtgagaataagaaatgacgactttatcctgagtgtttaagatgtaaaaaggagctgtttgggctaatgtagagccaaatcttgttattatggggtagtgggtcatctgaaaagaacctgtccacagttaagaaagactaatgttaaagaaaaaaagtgtacgagtcatgccgaagtcctaattattattcaaggggacctgggtatcggtccttcgactggctaatgttagaattttatgggtaagattatagtttatgtttgaattaatatcgatatcaaacattgtacactcaatgaggggatatcaaaatatatgaatgggcagtgtgtgtgtatgttatttagtgacaactcatctaacagggtagacaaattaaaaaaaatggcaatatgagttaaatttgctgatattccgaagtggaaatataggatatgagtagttaatgggagtattcatgtaattgatttggataatagaatcttttgatataaagtgatctactattagtataagtaggataatttatgagtattgtctgaaaccctaactgaattaaaggaaatgattatgagggttgatttattcactaccaaaagacatgagtcaagctatgacgattagaacatcgtgagctgcaaggaaaatactagtagatgtacaatcccacatcgcctgacggaaggtcgtatatgtagtgattttgagattatgtaggcatgggactacatagtgttgaggacttgaatgaattgtttgggactgcctatattaacaagaagtatactattttggtagcccaccatgaaggaactccatagttaagtgtccttgacttggggtgattacatttaggaagtttccccatgaagcgtgcgagttagaataaagcacgttgaaaacacttggatcggtctgtagggccagtcgtcagtctaggaagtagctaaagtgatgcactcttgtataagagtcattattttgtgggtgtaaggggcctaatgtaggcttaaagcggggacattactagggtaacgtataaaagaatgtactaaggcaaggaaaattacctgtattacatatggtgatatggtaatgatatggaatatacttttatgtttttgagaccagatggtcaatctggtatataaggagactatagagattttgggaaatgattaccttaataagcaatgattgaaagacatactcacccagattgggggaaaggcttataaattgagatgcaatttaacagacatgtattcgagtgattggtgaatgttgggtcacaaagttggttgtttattaaacaatggactacatatttaaggataaaatgagttttagaatgattaacaaagtatgaagacaatgatgattgcaaggaagcaatagtaacgtacgaatcatggagtaaaacctttgtggtaataacgaaaaaagaatataagagtcctaggtgttgatgaatcaacaccatcgatgagagactcactacaagttggagtggtagtttgccaagggattgtcaataaaacatagaatatacttgaggtatttctaagtgtattaaaaggagaattttaagatttctaccgaacacagatacgaagctttgagatcaaggaatgatcttttatcaattgttattagctaagaactcatgagatggatgcaagttaaaatgagtggagatggataagattcaaatttataataagattaaactttcttaagcataagtgaataaaatcgacgaggaactgtaagagggtaatgaagggagtgatagaaattagatttaaataacggaaggacagaaaaataagaaatataagtaagaacgaaaaagaagcatctagtttttgataacccaccatgagcttatcttggagttaagcatacttaacttaaggtaatatcaaggtgggaatctttcgaggagtcatctcggaaagcgtacaagtgaggacaaaagtacgctataaagattcttattaggatgcataatcaatcgtcgttccagagattaccaagaggaaaggatgcgttaataagtaaagatttacaaggtat

SEQ ID NO: 139896 - DNA, 902 bp, Cannabis sativa
catggaggaaggttcagcaaaagatgtccaagcgactgtccactttgatcaagctttacagggcataagtgtttctttatttttgactttttgttggacatagtttcatttctacttgtctttggcccttagataaacaaaaagggggattaatagtttttaatttcttgatttcttcctttgtttttctcaactctagaccttttttccagggggagttgagattggtacctgtgttaaactttggtttaaaagttagctttacatttcagttttatgttgtgtttcttagggggagttttgtttggtatgactatcttttttttgcaggtacttttctattaaaaaaaatattttgattatctaaagtgccaaagggggagactgtaaagtctttttttggcaatttagatgccaaaatatttttatttatggtgcaattttttagcttttataaaaccgattttctcaccttaattaaatgtatttattgttcttttgtatcataggaaagattctatattcaactgtctttttctttatttggaaacttcttgtaagagaaaaaattttcttatggaaagtttgctttttatggaaactttgaccatgattaattctctttattatgtttgattgtgtcttgataagatcaaatcaagcacgctatttttggcaggtatcaagtccaaatacatggtcagacacatttttggtaagtttcctttttctggtctagtttgctgcagctaaacctatctctgatgctccataataggattttcttttaggaaagcgtgtacagctatagaatcaactttgtggctgtctctagattttctatgttctataaatagaacctagagagcacccattcgattcatctcttctagctttcattt

SEQ ID NO: 139897 - DNA, 650 bp, Cannabis sativa
ctacggaaaaactgttttcagtactagtttcattattcctcatttaattaatcacttaattaaataatcaaactgggaatattaaaatacggaatttcatatattaagaataatatttaaaattatataaatatttttctaatattgtgtacttatcattttatagggtgcaaatagaactcatggaaacctataaatttaattttgactctataaaaaaataatgtgacaaacttaaaataaaaaaaaaatgataaaacacaacaaaaaaatgaagcaaccccagtaaaatagagttgcccaaaaaaacacaaaaatcaaactaagtattgtaattataatattcagtatcatattatagaaaatctttttataaggcaactataaattaaaagaaaaatatcaagacatcaatcttgttaaaatatacaaatcattcataaattaactctcaataaactacaaaacatcaaaaaaaatatactatttttattaatcatgtaaaagatagaaaaatataggagtgctcttaatatttttgtaagtgagaaaaacagtgttaaaaaatgagatataaaaatgtacacttattatatatatttttatatatacaaagataaaaaaatttagtttgagaaaaaaattaaaaa

SEQ ID NO: 139898 - DNA, 795 bp, Cannabis sativa
aagttcttatttaggatgttaataaacatacttgtgagtaggtctaagatcctggtaaaataatttccaacagtataaaccagaattcaaataacaaaaattttaacctaacctttggaaagcctaaaaaggattaatctaatttaatcttttctcttaaaatattatagaattgttcttgcacatgtgttgagaattcaacaagaacttcatatatattttatcctactagcccacactagtccttgtgtgtagttaaagattcggaagatcaaggtgtgagtttgatgtcatcgttcaaatgatacaacatacgaaaaagactcaaggataccctaataggctttgagaggtaaaatatcttttcatctattttactttcagatttaatatacgtacatatggtgatcttggggatatggtacgatgataataaaaaaatttatttcgttgcgtacttgatttagtaccataaaattaacatttattatggtctggtcatcaaacttagtctagtcaagaaaagaacgtttgagactcagttatacgcgttggatgcgggttatagagtcatggtaattaggtgtatgggcgcctaattacaggttggttatatgcttatattttatgtttttcttacggagtctatcgactcatagatatattttctatttgtaggtaaaggtaaggcaaaagctgaacaacaacgagtctggagtgttagacttttatttgggcttacattaaattttattggttttattaaaacttgggttgattggatagttctttgct

SEQ ID NO: 139899 - DNA, 1191 bp, Cannabis sativa
gctaattttattagtaatcccaattaggggattagggtttcataagtatcttgggtagcgtgcctaattatttagggtgttacagtaatcatggaattaataagtaagaattatttgattgatgagtctcaataaataatctagtttattggagcttagaattataggtctatggtccttgaatcgccaccttaaaatactgtcaaggttatagataaagagtagtataaagttgttcagaaaaatctattttgaattgacaaagtagtaattatttatttttgtaataaataaataatttttttttcaaattaattaaacagggaaaagacgaaattgttaagacaaaattggtcaagacaacatttgttgagacaaaagttgtcaagacaaaagaaccaaccttgtcctaaacaacaaggtaggcgcctagcatatcctgtccctatggggtttgtgtttttgagttaattaattgtaaatttctagtttataaagtgattatagatatttcaaggttgttgaaatatcctctcaagtagttgagagattccctcataaatatcagtaatcgtgttcagttatagatattatttatttaaacaattaaatatgatttaattaaagagatttaactactataaatagaagcctgatttaagaaatcaatactcacttcctgaacacttaatttttgaaattatagagagaaaaaggaaattgatttttcactcatttgttcttgctcatatgttgagaaatcaacaagaaaaaagctatacactttatcctaatagcccacactattccttgtgtgtggtggaataatttggaagacactagtatgagtctaattgtaatttcctctagattaagggatacaacatacgaaaagttttgaggatacccttttaggcttcaggaggtatattctaaactatttttgtttttgatttaatgtacatacatttggatgagatccattagaatatggaacaataataattagataatacgaaactctttcgctgcgtacctgctgatttagtaccataaaaccaatagaagtaagcactcacacatcaaaagacaatataatttcgatgtttgatggtgttcaaaaatcatattggcaaagtaaattacaaaggattgcgacaaagctttagagggagtctaaacttgtttaag

SEQ ID NO: 139900 - DNA, 1210 bp, Cannabis sativa
  modified_base (773)..(776): a, c, t, g, unknown or other
acattatttcttgacttttttgttgaagtattttgtgtctcggtgttggtatcctgcgttggtgatttgcgactcagttcatttttcctcaagtagatccaaggataatttcgaaatttcctggttttcttcttaattataaaactctcttctgtgagtcgatatgttcacttcaacaggaagtattgcttcggagccaaatgctagcaagaaaggagtgtttcccgtcattgtcttctcggtagctctgtgggcccagagtacctgaggtagctcgccaacccatctgcctttggcagtgtttagcttcttcttgatagtatccttttaggttttattaacagcttccacttgtccatttgccagagtcctagatactgacgagaagcttttgataattttgttcctctcgcagaattcagtgaacaagtcgccatcaaattgggtttcattatcggatagcgtcttcatgggaattccaaacctacagataatgttcttaacgacaaagtcaaggattttcttgcaggttatggaaacaaggggctcgaactccgtccatttagtgaagaagtgaaccgctactaccgcatacttagctcctcctcgcccagtgggtaatgcctcaattaagtaaattccccatatagcaaacggatagggcgaggtcatcattcttagttctgttggcggcatgcgaggtatatgtgaaaacctctgacatttatcacatttcttgacaaactcatgggtgtccttattgatcgttggcnnnnaatatccttgtctaatgatcttttcaaacaagctttgccaacccgcatgatccccacaaaagccttcatgaatctgtttaatgatttcattcacttctgcacggagaacacaccgaactatgggcatcgagtaccctcttctatgtagtttgccttcaattattgtgtagcgaggcactgaatacaatagtttttgcaccttgtttttgtcatttggaagttgttcgtcgagtaagtaattgataataggagtcatccatgtaggagagacatctatcatctcgacgtcttccgtttcacgtatacttgtgtaaggccctaattaattaggcccgctacccaagatacttatgaaaccctaatccactaactgggattactaataaaattagtgcggaaattaaactttatttataaacaaaattaaaataaaa

SEQ ID NO: 139901 - DNA, 505 bp, Cannabis sativa
tattccaaagaacctgaaaacatagaaaataagcgtaattccatcccaacacattgaaaaacacacataaaatagatccaaaatataggctaaaaatagcctaacagttttttcattcattggtgttgtgcccaatgttgttgtggtgctcgcatcttttattgggatccctccgggagctatccttgtacagaggaggcggcattcggtagtgcgtatcgtattttgactggtagcaaaatacacatgctcttgtgagtccgtcagctccatgtactgggtgtactggggagtgtaccaccttttctgccgtttgtcctccgtgcggttgctaccttttgaagatcttttgctctgagagccttgagaaggaccgactaagcttgtggctggagcggagtgtgacggggcttgtccattcatccctgagggattcccaaagggagaagatgtaggggccaaggcttggccttgactatatccaggagtagcagagaattgtatg

SEQ ID NO: 139902 - DNA, 1077 bp, Cannabis sativa
  modified_base (1032)..(1051): a, c, t, g, unknown or other
aggaaaaactactactcacatgcatgcttttattatataatgtaacttgatcaattccaacaataatattattaattataacataccacaccataatttttttcgttttctctcaaatagtcaaattaatcttcttcttccttccttaataatttaattatttgattaattattaatttgcttatctcttaatctgtccatacttataattaatacaaggtaactgttatccttgcttttttctaaaaaaaaaatagaaaaagataaattaggtgtatgatttttaaatgttattacactaaaaagcattgtgaacggttttttttttttttttaaaaaaaaatattgtctaaatttttaaaaatttaagaaaaatactgtataaaataaagtaatcaagaaaaattatttagtcattgttatttattatgattgtaagaattaaattatataaatttttataacaattatttagaaaataaaaattaaataaacaaaaatataaatgaaatagataatgagagccaagcacatgcatttgcacgtgccaacctcacctagttaacataaaaagttatatcttcttttatctttggaaaaaaatatcttttatatcttatctctatatattaaaatcacgtttgactggaggtaataaaacaggatagaataaaaaaaataattttttttttggttatattttgaagtattagaatgacgtttctattattttagtggaataactattctatttttaaattaaaggaataacaattatctaatgcaagataaaaaataatttgatatttttttatcaatttttttatttattatagatttaattccattcaatatttattcacattctcattcctatacttatacttttattcctccaaccaaacgcttctagtattgatttgataataatactttttttttttttttgaaattaaaatgaacaatttgacaaatatatatgtacatatatgtatactagtaatttctaaaagtagttagcaaattttgaannnnnnnnnnnnnnnnnnnnaacctaatttttcaaaattataggtt

SEQ ID NO: 139903 - DNA, 1155 bp, Cannabis sativa
tctattgggccacatttaatatttttacgcttatttaggcctgatttgattatatattggatgttggaacagttggattttgccaaccaatccgatctaattgatttcaatctttcgaactattaatctaatccaataaaatattggattggatcgattccttctattagatgtatttcatgtatattttttagatttgatcagtttcttccacattatatattttaagtatatctattagattagttcatatttaccataatgttttaaatctaatattttttgaacggatcgggtctacctaatattttaaatccaatacttattatattggattagatatccaattcaagaaaaataaaataataatatgtaaaattttaatccttatctttatagatttaagtataaaaatataaaatttaattatttatctaaattaaaatactaattactttaattatatataagattgtattaaaatttttgaacacctcatctaacgtttgaattgatttgattaaatattcaaaaataatattcgatctgtatagtctcatgtgtggttaaaaaaatgataaaaaaaaaaaattcaattaacgtaaaaatgtaatttttttacaaaaaatagtatcttatgtaattatttccaaaaaaaccgaaatatttaaattaattttaaaaagtcacttaacatttttaattttttaacattatttgatgttaattttaatagttacttaaaaaaatcatatatatttgcttttttctaataaaacttcattttattttatcttactttttttggtcttcatatttaaaatatattttatttttaattaatatgtatatttttttttttttttgagaatataattagaaaaaaaaaattagtataaattaaagatatattttctttaaaaaataaaaattgttaaaaataggatatctttataaaattttgggatatcaaataaaactgagattaattaacaacaacatcctagttacaaaacctcctaaaaacagtggaaaaaaatcttaattttctcaaaattataaaggtcgtaattaaaccatattacaattaataatatattcaagtaatattatatctttgaagatatatatatattatataaattatatatatat

SEQ ID NO: 139904 - DNA, 668 bp, Cannabis sativa
  modified_base (531)..(531): a, c, t, g, unknown or other
aaagtctttttgatgaacttacaaaaaaaattgaaattttaaaacttgacattaatgatataagaggacaagagtatgataatagatctaacatgaaaggaaagtacaaaggtgtacaaaaaagattattagatataaatcctcgagcattttatacacattgtggttttcataatcttaatttagtgatttgtgatgttgctaattcttgtgttaaagttatatcattttttggtgttttacaacgcatatattcattattctcttcttcaaccaaactatggacaatattaaaaaataatataactaatttgactgtgaaatcattgtctcaaactcgttgggaaagtcaaattgaaagtgttaaggtattatatcacaaactctaaacatacgagatgctttgtttgaactttcagaaataagtgaagatctaaaaataaaaagtgaggctacaagtctagtaaattatgaattagagaattttgaattttgaatttttattgggcatgaccatttggtatgacattntatttcctataaattcaataagtaaacatttacaaagtaaaatatggacattgacaaggctataaaagatttaaataatcgcatttcttattttgaagattataggaaaaatagatttgtaactgctatgaattcaa

SEQ ID NO: 139905 - DNA, 897 bp, Cannabis sativa
aaagagatattgctgtggtgcacgataacccatggtcctatatctattgtgcccaaattcaggatagaaaaatgtgaatggattcatgaactgatgctgtgcctttttagaagggaatttaaaaaataaaattaatttacataaatatagtaaaaaaacttaaaaaaaaatatggtatttaaataaaaacttaatatatatagtatagtataggatatgccacctttaattactataaaaaatattaaaattcttttcatattttttttttaaaaaaataaaacaaataaaattacagtgattgtcagaagtcaccggagtttgctgtcggtgtcgaaaaagtcgtgggagtagctgtcgctatccgaaaaagttggcggagttgcttccgaaaaaattgtcggaattggtattgttgcggaaaaaatcactaaatgaagaaactggttcctcatcaggaaaccatgaggaaaccagttttttggtaattttttcggtaatttttcggcaataatgccaattctgacaacttttctagagtttgctctcggtactgaaaaagtcgtcggagtagctgccggtgtcaaaattcgtcggagtttcatcaagaaactggtttcttcatcaaaaaaccgaactggttcttcaccaatttcttggtattttttcggtgattttttttgtgataataccaattttgatgatttttctgacaccagcaacaactccgacgaattttccgacacctacagctacttcgatgatttttctagtgctggcaacaaacttcgacgaattttccgacaccagtgacagataaaactgcctaaaaacaaataaaaatattaaatatgggctttgaaaacctaattacatatagaggaaattacactctat

SEQ ID NO: 139906 - DNA, 750 bp, Cannabis sativa
agcaaataactactccccctgagtaacacaatcgaaaaccacaaataacaaaataatcaagctaacttttaaaccaaagatgttcacaagtactaaacgcaactccccctggaaaacgggtccagagttggtctaaacaaacagattcaaaatcaatattactccccctttttgtttatcggagggccaaagtaaaaaagaaagaaaaaagaaatatgtccaatcaaaagcaaagaagaaaaaaaaacttagtctcggtagagtttgaccaaggaggtcaactgcttggacatctcttgctgaagttcctccatggcagcaagtcgattgttcactagctgaacttcattcttgacatcctggatttctgtagcagcagaacttgaacttgcagcagcagcaacagctccagctttaagcctcttttgaaacacaccataaaagtactccgagggttggaatgttggtctagtgatcgaaggctcaagtaattcatgagattgggccacatttttctgagaggataaaaccttaaagattagatttggaaaaacaagcttaaaggttggctttttacctcttcgaaatgaaacgatttggttcaaaatgtgggaggccaagtcaattaaagctccagaggtgatgcgatataggaacgaggccacatcttgagacaccaaggtcttgttggagtttggaacccaattgctaagagcaaaccgcataagagatgcatgagcaaatgtgaga

SEQ ID NO: 139907 - DNA, 586 bp, Cannabis sativa
ggaggacacgtgtcaaggtaaaggcaatgtgaatcggtgcaatatcttttacggaataactcattaattacgtaagtatcaaagtacatttgttacccgctgactgtaaagtcttaggcgaggaatcaatgtacaaactggcacttagtgtattgacgagaaaccatatgtcgctaaaggtgaatagcaaggcaccggagaaaagtgacacataccttagcttgcaatgagcaaactaagtgtaaaagtcagatcggctcgaagaacaagtatgcgagatgaccatctcgctatgaggaaacttcctacaatttcatccaactaacaggagcgaggctcataaaccaggcaagtcagaagatttttgtatacctgcgatcgacgtaagacatacattgtcgacctcgaaaagaagaatggtcctaactcgctattgggatcactacaatcaagtttttgtcgagacatctccaaattcaggaattaaagacgtgtttaatacacgatattcttgacctagttaaagcgagaaaatcacagctatacgattttcaaaatcatacaccgcatttacattttgtgatat

SEQ ID NO: 139908 - DNA, 709 bp, Cannabis sativa
  modified_base (42)..(82): a, c, t, g, unknown or other
aactttatatgtgtttactttcattgttttagaaattcatannnnnnnnnnnnnnnnnnnnnnnnnnnnnnnnnnnnnnnnnctggtaaaacatattccaacatgacatacttactgtttgaagtcaaaaagttgagtagtggaaaatcctgtaaacggagacgggatgaacgacgtgatgaattctttgaacacctgagatcaaaaagaaaatttgagtagattcacagaaagaatgtcaaagataaagagggtatgcaaggttttagtcaaggtcggatgaaaattctcaaaaagcttgagtttttgaaaagacgaaaatggtgaaaaatagattttgtactgttttatactttgaacctagtaaccgtaagatcaaaatatagaagatctaatggatagaaatggaggagaagtggaaaagatggatcattaatgttaatgatgtccctcgaaaccacaaaactgccaaaatcaatggcatgcatattttcaaaatagattatgataaaaaataccctcagtgatcatttaaaaagcaccttttattaaaaggggactttttaagggacaattgttacacccgaaatccagaagatgacacgtgttaatgtcagagaatatgaaccggcaaatataatggcaattatattattaaatgcaaaatggaataactcattaaatgcagaattaatagagtatatttata

SEQ ID NO: 139909 - DNA, 780 bp, Cannabis sativa
  modified_base (33)..(42): a, c, t, g, unknown or other
aagttcaggaggcatgatttagtatatgtcaannnnnnnnnngaaaaattactaattagccttttgaaaaatcatatgcttaaaaataatcttcttactataaaattgtttccggccaaataatagtttataattatttttttatgaatcaaatcaattgtaatttataattaaaaaaatgctacgcgattaataattatttatttatttttttttaaaaaaaaaaactacgaaaatatctaccaacgtaacaatataagttctttcactttcattcagccgcttggaaaataaaatcaaaactggatgaaagagaacaagtttgctcctattgtcattcacattttttttttatttaagattgtaaaatttttatctatcttatcttattattaatatatatgaatgcatctctattgttgtatcattcgaaatatttctgaaagagaatgagaatatataaatatgtaagtacttcatgacatgtaaactataaacgtagacttatggtaaaaatatttgacacttattgattattaatgttgtttttttttcagttgttatgaatttttttactatatttaaatttacttttggaataaacataaaaaaaaaataattatttatattattaaaaaaaatatcaaaaaaattgaaatttgatatctcactaaacaaagtgaataagagtaagaatagagaaaaagataagtatggtattatattgtagcaaataaaaaataggctaattaggattttttttttccccgaactttgaca

SEQ ID NO: 139910 - DNA, 603 bp, Cannabis sativa
atccaatatcttgtaacccaaaaccttcaaccatttagaattcaaacaatatcaacatcaatatgcatgctattcacacactacttcttcttatcatacattataattgtcaaaataggtaaggcaatagcaaataacataaacacttactataccatgagtcgacctgtcttcgcagcacatgtacatattcgaccagtcttcagaacctttaaaaccatggctactctgataccaagttgtaatgtcctaatccataggaacgccacgtgtgtgattttataaaactactttaatactaatatattaattaattaataaaaactgataaaaactgtaaaaataataaaaacttgactaaaataaaatactaaaaacgaacattaaaacggctgtaaaaaggagttccaaggatccctgttattaaagatttatccaaaagacgatgtacaacaacaattcaaaatacagcagacacacccactttaaagtaactcaacacgcaggctggtagggtcaatatgtacattgctggagaagaccgccatctcatggttgttctaactttgccttgcccttacctgcaccacaaagcactcgtga

SEQ ID NO: 139911 - DNA, 690 bp, Cannabis sativa
ttgattgttttgcttggtcaatctatcatttgtttatatctaatatccatatgttttaggtcatgttgtgagatggtttggcttttttctttgatgttgtgatagatactttgacatttctttgcaatgaggagtctttgttgcattttctgtcgccattcagggggagctctttgataaacttttaattttcttagggggagcaattggtttaggaccatattattattggcgtagattatgctcaatgaagggggagaaattatacttatcctttgtgtaaatggttgcgattgttgtttggttgtttaaagtgtttattgctgtcattgaccataatttgtcaagggggagattgtaagaaccaatattttttgtagtgaaaaattatgtctagttgcatctgggattcgtagtgttttgtctagagttcgtactgttagtgttagtccacgttagcaaagttattttgggttttaattgttcagatggtaacaactgtctatttcgagattcttggtttagctgggtataaatacaactccttggtattatgttgaaaaaaaaaagctttttgattggagattagggattacgtgttgtcctcaaaagtaagtgttttaatatttatactcgcaagtgcacgaatcgtttcggaatatagtgttcatgtaagtgcaaggtcgaacc

SEQ ID NO: 139912 - DNA, 943 bp, Cannabis sativa
ctccggtgacgatgagaactccaacgacttttccagtgagtttttcggcgacaatgctgatttcagcaacttttccagcacctacaacaactccggttattttttcgacaccgattgtaactccagtaacttttcctgcaccgacaataactccggcgacttttccggcaccaatgacaacttcgacaatcactatagtttcatttgttttttaaaaaagaaatatgaggagaattttaatattttttatggtaatacaaatagcatattccatatattttaagtttttttttttaaaaaaaaaaaatttaaataccatgttttgtcctattaagtttccttaccatatttatgtaaactaggtttctttttctcatatttatataaatagcctagcttaaattcaatccaatctacaaaagtacagattcgatcgattattttgaattggttactttttatattaaattatttaatatttatgaaaaaatatattttttatcacataactagaaacaaaataaaataaattattgtaattttatgtctcaaacaaaaaattaaagtaaataaaataacaaataacaaattcaaagaaagaaaaaaatgtatgtataaaaaaatatttaattttgttttaaattgtatgtaaaaaagaaaattatatataagaatggaatataaatttgatctattaagtttttaaatatatttgtgttatatgtattcaatttttaaattactatttttttttatatttaaatgttaattgtatatataattttttaattttttttttataaatatgagtagattgaattggatcgattacttttacaggtaaatcaatatccaacccgcataagtgcatattttgaattttctaatccaatccaatccgcacaagtgcggatatccgcactttgtggattagattagattg

SEQ ID NO: 139913 - DNA, 808 bp, Cannabis sativa
atatgccatctgagtttggtttgtcagtgaatgattgtcggattattttatcttctttgagtcatgttgttattcagtttgttgaacgatctgtgaacaaagccgaccattatttgaaaggacagcaatagggttatgggagaaacttgcttcaattcatttgaagaagtctttagcaaacaaactttacttgaagaagaagctatacacattgaagatggatgatacaaagaacctcagaaaccatcttgatgaattcaacagaatcattcttgatctcagcaacataggtgtcaagatcgaagatgaggatcaagggattctgttgttgagttccttgccaaaatgttatgaacattttgtagacaccatactatatgggaaagaaaccttgacaatgtcagaggttaaagttgctctgaattcaaaggaaattcagaagaaatcagaagaaagacttgacaacaatggtgtaggaatgtttgcaagaagcaaaacagagtccagggataccaagaatggcaatcacaagtcaagaaacaagggtaacattcaaagggcagtagcaatggtcaaagactaagatcgaattccagcacaaacccaaaggcgtgaaaacaatgctactattaagaaggagggtcatttcagagatgagtgcagggctctcaaagcaaaactcagcaaagaaaagaagaaaggttatggagatgcaggctgtgttcttgatggatatgagtatgctgatgctcttgtggcatcaagtcaagccactggtgatgagtggattcttgactcaggttgttct

SEQ ID NO: 139914 - DNA, 950 bp, Cannabis sativa
tcatcaagggatcaacaactcaagaccctattcaaaagaggtcttcaaaatctcaaagtcaaaagtcaacctgaaactcaaagtaaaagtctactctcaggaaaagtacactttttggatatcaaaacatataaaaaaatcaagctagaaagctcatctacatcaacactacacaaaatcaaatggtataaatttacttcagtcttcttaaagtgatttgcatagcacagtagggtttataagtacaaattttggcccactcactaacttgtgcagtaagttttcctcacttgatggtttcaaaaaaaaaattaattgaatttctaaatcacattttgtttaactaagagaacaaaattagaatttttaaaaatagataatcgagtaaagagttatccacgttatagtgtcgaaaaatgcatgttttgaaactgcctgattttcggcctaccttttttcaaaaaggtagtccgtttttcacagaataggtattctgttttaaaaatagaagtctatttttcccaagatttattttgaaatgcgtgctaacggctataaacggctacttttcacaccaacactatataaacttgatttttactcaaaaataggagttaaatgagcatttatatcatatacctaacatattcatgtgagattaatgagcttccaagtttaaaatccaacaaacacttttcacatactttgagcgaaaatttttgtttatcaatctaggtttctattgtattatcataattcaagagtgattttgtttgtaatttcaaacacaatttcatattgtgattgaggtgaggttggcacttgtattgtaaataactcagttatagcgagattgtcactacaacaatctgagaaagaggttaatagtccttggcgttgtaaaactattgtaagaggtttggaaacaccttggtgaaaatttcctgatt

SEQ ID NO: 139915 - DNA, 837 bp, Cannabis sativa
atgaaacctatagctgttactatttgtatcgtaaaatcttcaaactccattgtcttcttcttcttatgtgtgttcaaagattatagtggaaatatatatatttgaacaagagtttaatgatatgaagtaaagatatggttcagcaaaacaatgtaacaattacaattaagacttgtggagattgtctcacatagattaaatggtagagaattgaactatatataagaacattggttactcattgccaattagttttgagatagaacctcatgattctcaacaaaggttgttgtgtttgtaaaaacaggtttatttgaggatcgatattgtcaccctcatttttacacttcacactaatttttctttacatttgtatgaaaattcatataacaatctaaattagagtaatttgtgatataaactccataagtaatttgtggtataacaatctaaattagtgtttagttaagtgtcacgttggactatccatatgtacacactgtgttgtctacgtagacattttgtacacatagaaaaattttattagcccacgtaaataactatttaaaacattaaaaaataaaataaagtaatttaaaaataaaaaaatataaaaatataaaatataaaacaaattataaattagaaataaaaaacataaaacaattctaattccctaaaaaacattaaaaaaaattaaaaaattaatttttaaaaaaatataaattaacaaaaatcataattccctaagaaattctttctcttcttctcgttctctctctctctcattgccctaattccttagctgccatccccgtcgaagccaccatcaccatc

SEQ ID NO: 139916 - DNA, 1594 bp, Cannabis sativa
  modified_base (242)..(255): a, c, t, g, unknown or other
ttgttggatttaaggacttttttcaattttagtaaaaaaatctaacatggatgaaaatttagagggcataatttagtacatatcgaaattcgagggtcacaatttgatagatatcaaagtctaagtagcataatttaatacataaacaattactgagatagtaaaattgaatgaaattagacaaaaatccttaaatccaacgatcttaatagttcatgggatatttttaacgaccttaaaannnnnnnnnnnnnnaattggtacatgtcaaagttcaagggccaaaaatcataattaataaataaataagagataaccataataagaatcatgagatttgattttcttatttaagaaaaagaagaacctagcacataacatctttggaaaaattacaaattaaaattgacgaagacaagactatgagtcataatttggtgaaaacttaactgaaatgatgaaaatgacattcacctactatcagtaatattgctagtaaacatggtccaattccacacttcaataaaagaaatgaagaaatggaactttaacgaaattagaaatcctaaatcaaaattttcaagtaacttgactatattagttgctagatttcaacaacccaactcctacattcacattatatgtgtcgtcttaaatattcattgatttgttcagttgttttagaaccaaattttgctgttacaattccattgccaacacttccatttgttcaacttattataattttaacatgattcaaagttcattttacattttttttttcttttcatttttaaaaggatttgcccttccaaacttcgtatagagttttaggaaatatttagcttcataatttaaaaattgttttcagttttaaaaaacaaaaaacagtttttaaaaactaatagaggtcgttattagccaaattttttaaaaatagttttttaaaaactcagttttaaaaaattagaaaacaaaaattattaaaatgttgttttcaattttaaaaaataattttttttgtctaacatattatattttatatttatgctcacatactcagaacctagacttggaactagacccgaacccggaccccagactcagactcggactcggaccccgacccaaatctccaccctagaccaagacaccgaacttgaactaggaccccagacccaagaccccggaccctaaccccgacctcgacccggaacctaactcgaacctcagaccctaaactcgggcccgggtcccggtccagaacttggatgcctacccctagaccccggacccagacccagatcctagaccccgaccggacccagacccaaattctggacccaaacccggacctagacaccggacccaaaccctagaccctggacccagactcgaactccaaactcagaccaggtcccgaacctcggactcagacccagacttggacctggaccctagacccagacccgaaccccaaacctcgaacctcagacattgttaggattttatgccctaaataaaacctacatcaatataatctgatttgttatcaatagcagattagaagtcatttatgtttacatgtggtttt

SEQ ID NO: 139917 - DNA, 808 bp, Cannabis sativa
aaaagttacacattaatacattaattacaatttaataagagtatagtaatttagaaattaaaaaaattattaagacatacctcaagtctatcctaaagtgcattgatgtaagctctactgacatcttcccatttgaatttattaatggggatagacattcgagtcatccatttagccatattgttgatttttttttctgtttttgccgatgggggtgcatacatatatatacacatatatgcatacatatttacatacatacatacatcaatatgcacatacaaagacatgcatacatatatatacacacccacatacacatacacatacacataaatacatacacacatacatacatatacacacatatatatacacacccacatacacatacacatacacatacatacacatatatatacataatccaacatatacatacatgtatttatacaaacacgtacatttatacccacattaaaaaaaattaaaattaaaaaaatttaaaataccttatataaattggaggaggtggggcttggtggtctgcggtggtggctgtcatagctcggctgtcgtcgataggaacggtgaccgacggtggtgggggcggtggtggcgacggaggtggtggtggtggtttttttgaagaaaaaaagagggtgattgagaggattgagatgtattgagttagagattgagagagattgatagagggtttgagagaatcagagagggattgagagaaggggctgagaggtattttttttttttcagaaatggaaaaatgaaaatggggaagaagggg

SEQ ID NO: 139918 - DNA, 652 bp, Cannabis sativa
  modified_base (471)..(472): a, c, t, g, unknown or other
tatatatagtttgttggtgggtcccctataagttggaattaaagccaactcttataactaacaacaactttctctagattcatttgatgagcatatagatggacttactgacttgacaagttaagtgagtttaatgccaacaattccacctgattagactcacttaatctctgatccaaaagaaatgattgaggacactagatgtcttgaatgctcaataagtttagacagtgcctaaacttgtctagagttacacttttagtaaaaatatctgcagggttatcatgtgtgcttattttcttcacttataccttcttggatgatacaataccccttatgaagtgtaacttgatattaatgtgctttgacctctcatgaaacattagatttttcatgagatgcaaaacactttgattgtcataataaactgtgatatccacagattttgaaacctaactcctctgttaaccnnttaagccatatagcctctttgatggcttctgtagcagccatgcattcagcttctattgatgataaggctactactttctgtaggttagatttccatctgatgcagccctcaagattagtgaacacaaaccctgttaggctccttctagtgtctaattttgttgcaaaatctgagtccaca

SEQ ID NO: 139919 - DNA, 1129 bp, Cannabis sativa
taaacttttggccatggaggaagctaaagattttagtacaatgaaggtgtaagaattaatgggttccttgcgtactttgagttgaatcaactaatcaaacaaaaggataaacccaaatctattactgataaaggtaaaattatccctttaaaaagttactgaacaagaaaaatttctaataatgaatgtgatgatgaaattactttattaacaaagaatttttaaaaatatatgaaagatgtgggtaataaaaagaataactcgaagttttcaaaaggaaatacatctttaaccctggactaataaaaagggaattcagtaaggatttgggcatattcaatctgagtgtgcaaacactttgaaaaagaataagtttaatgtcacttggagtgatgatgaaactgagagtgatgaagaaaattctgagaatgttgctttaacttctgttatgactaatgtgttgtgtgatgcacaggttaaaggcagactggtatgtttgaataataccactgaaaaagaagagtctgattctgaaatctgtgaagaatctcttgctgaatcatacaaagtcatgtatgaaaagtggattcaagttacttctgaaaatagagccttgactaaaatgattaaaaaactgtctcatcaaattgaaacttttgaattaaaaataaaagatcatgagactaacttttgtgttaaagatgaaaaaattactcttttaaagaaggaacttgaaaatttcaagaaaaatgtccaaatgcttaatcctggatcttctatttttgaagaagctcagaatgcaggtcaaagaggttttgctggcattggatcagatggtattggaagttctgaaatcactaaatttgtaaaatctagtgttccaacaaactatcctgatgttgcaaatttgaaggttgatggagcagattcaaagactatcactacagatgctgtatttgtagaagcaacgtctttaggaactacaaaaagagtaagatcacaggtaaggagatttttgtctatttgtcatttttgtggtaggaagggtcatatcagacctaaatgtttcaccttgcagaatatgtacaaaataaattattttggaaattttgaaaaatctcaaaagaaa

SEQ ID NO: 139920 - DNA, 1494 bp, Cannabis sativa
gaaaggcgaaagctgaacaggagtgagcctgagctgagatgaggttgtacatgtcaaagcagcgcgacttggagtgttcagtctcgagacacctgggaatattattttgtagtcgttgtgcgaccagtaacgtattttggtattttgtgtatgaaaggttttaaacgggatcatggtacttgtaaatagttttgtaatttattaagtttaataattaatataatttttttttcaaaaaaattatttgattagcaaagacagcactgtaattgaaaaaacattgtagcgtgccttagcattagggcgttacaatttttggtatcagagtcgtctagttgtctaccgaagcttgccaagacatgtacaatcttcatcatagaaggctcggttcacggttcagtaagcccatacttgtttagtattttaaatgattattaaagcatgttaggaagcatattatattataattatttgttttatgtgtgttgcctttaagtccataaaagcggtatttagttttatgatcgctgtctaatttgcctggcttaacagtttccaggctaagtcctataaaatggatgcccagcgaaatacaagaagtccgggtaatatggttgagaccggaggcggtcagggaaatcaaaatccctagaatcctcgtggtcgcggccgtggccatggcagagctcagggtggtcgtcttgtaaatccaccacaagctcctccagattgggagcagaggtttgcgaaaatgcaagatcgaatccgccaacaagatgaagaaatttagatattaaggtagcagggtgttcctaccatgcctcctcagcaagctcaggccgttgcatcttcagcgatgccagcagaatagcctgttgttggcaaccgtatggagccgttatatgaaaggtttcgtaagcaagcaccaccagtgtttttgggaggtcctgatgtaatgaaggctgagcagtggctcacagtgattgagcgaattttgaattttatggtggtggttggaaatgatcaggtgacctgcgccacatttccattctaggaggatgctctcgtgtggtgggagttgataacccacactcaggacgtcactgttatgacctgggaagaattttgggaattattcaacgccaaatattataatgaagctgttcgtagtgctaagaggaaggagatcactgaattagttcaggctgagggaatgtcagtcactgagtatactacaaagtttgatcgtttggccaagcttgccgtgggtattgtgcaaactgaattcagtaagaaagaaaagtacctggtcggtttgaatgtgaagattaggcataatctggtgatcgctaccaatgaagcaaccacttatgcggagatggttgagaaagctctgagagccaagggcgtggtaaagtttcttcaagagcaccgagtgactccgagtgttggtgggtcccccacccttcctactcctgtttatggtagggatgg

SEQ ID NO: 139921 - DNA, 543 bp, Cannabis sativa
aaaaggttgaggtgggcaaaaattactgacttcctttgccggcgcatttgttgacttgcgccgacaaatgtcaactaatgccggcgcaattaaccaatagtgctggaaaaagttggcattcttgtagtgtattttgtccaaacaattgagttttcatcgttaccgagcaaaaataataaaaatattaattttcacatatagcatacacttagagtttaataaaatttgcagaattaagaaattataaccctatttcctatttcataagaaaggacccatagtaatatagtcacatataatcctatagtataaataattaatgttaattgtctctctaatccatattctaaggatgcagtcatcatagagggagaaggaggaggtgatagtggttgctctccgtttgaacgagagagcgaggagggtgaaagaggaggtggcagtgattgcgccactactacaatgtaagcctttagcttccctttttcaacccaatttataaaaagggaagctaaagggggtgaaaatatctgcattgacatt

SEQ ID NO: 139922 - DNA, 895 bp, Cannabis sativa
ttactaatccacattactagagcggtcattacacatgcggtctatccaatgagtggccccagagtcaaacaacacagagaaataagagttgtttgcctagagctgacctgttacccctgaagggctggcttctgcatcaacctgagttattgcgaacacccttgcaggagtgggtttcgcagtagtcttttgtactttaggctttagtttcggacaatcccttttgtaatgccctagcataccacactgaaaacaccttgccctttacactcccccagatgatgcttcttacaactggggcactctgggtaagtgtatcgggtttcagagctacactagcgatttcctcgaccctagttccctcggaacctcttgttctgacatgagccactagatgcagtaggtgcctttcttttctgatcagtggccgagccgctacctcccctactaaagcctgacgtaggaggagtaggagccccaccaacaatcagagtccctcgagactctaaggtgcactcaactgcgccctcagctcgcagtgccttacccaccatatcaacataggtggtgttatcatcggtagtgatcattaagtcgtgtctgatcttcgcattcaacccatccaggtatttctctttcttgctgaaaccagttggcacaatccccgaggccaatcttgccaagcgatcaaactaagtcgtgtattcaataacactcatgttttccttctgagtcagttcggtgaattcttttctttttacgcttctaactgcctcattgtaataatttgcattaaacagttcctagaacttctcccaggtcatcgtggttaggggtgttcattggatcacatccaatggatttgaacccatccgatccaatctaattatttatt

SEQ ID NO: 139923 - DNA, 802 bp, Cannabis sativa
  modified_base (512)..(526): a, c, t, g, unknown or other
acaaaagaggtcactttggcgacatattgtttcaattaatttactcaaaatattagtcataaaccaataccaaaaatttgaattaaattgtttacaccaaaattcatatttacgaaactatactgtcatatatatattatacagtactgaaatatatataccaaacgtaaatgacgaatcacatatatatagcatcacacatatattatgcagcaaaagcctttcaatcgtataaacatatattatatgcacagtgagaagccatatatacagtaatcaacacatgtacactagaagccatatatcgattggatcaatatatagtatgcataatattataaataaaaaaaattaaaaaaaaaactaaactactgaagccgaaaacgaataatatttattctatataaagtgtgcctatataaagtgtgcctatatctattctattaaaaattcatagtgactttttatttatattaaaaataaaatgatttatgagaaattcatgggtcacnnnnnnnnnnnnnnnaataaaataaataaaataaataacttaatttattctctccttaattttctcatatttttaattttttattaaattaataaatattaatcaattaattaatttactaatattaaaatatctactaaattttttaaagtttagcattactaattaataaaaacatgaaaatatcgtccatcctatttcatatatatacaaaatctttcttgaaaaattaaaatatatctaactcatttaatattataaaaattaattaattaagtaaatagtaggatg

SEQ ID NO: 139924 - DNA, 535 bp, Cannabis sativa
  modified_base (495)..(500): a, c, t, g, unknown or other
atttaatttaaaataatatttaaaatttaactaattttaaatatcaaaatttgaaaataatttttaataatgaaataaacaatatgaacaaattcattagatggattaattatatttaggtttaactagactttttacgtggcaacatttaataatttgttatttttttttatttgataaaatagtcattcaataatttttcataaaccaagaattacgtggcaacatttaataatttgttatttttttatttaaaaaaaaatcacccaataattttttataaactaagaattctgttatatagccacattttaaatagaataaatatttaaaatgcataattaatatatatgaaaaaaaaaattagggagggctaccacctcccttattctcttgaactggctctgttagtgtgtgtcatttcttattgtaaagaggttcgacactcttcttttttaagattatgccaaaaacagggccggccctaggcatagnnnnnntaggcccgtgcctagggcccacacttttcgggggc

SEQ ID NO: 139925 - DNA, 603 bp, Cannabis sativa
gtcccactaaaaatagtgggacactatagactcccacatatataggatagcatttagtgttctattggaccaattttgtgtccagactccattatatttaggattttattgtcccattggagaagcccttagcttggaccgatactaattcgccattcctaactttgagcttcaactctcctggatttagataatctcaagtttcatttacaaagacatgtaaaaggtgaggattgggggtggattgttcatttttgacactacatatatcaataaacagaaataaatcatttggttcaattaaattcatgcatatgttcagaaaataccaaaataaaacatattcatttattttccaaggtttccaacaaactgatacagtgtcctatttaggcgagagtcaaagatataatttattgaatagagtagttagctcatctaaaatgaataacattctaccaaccttttattcgatcaaaaagggaatctgactttgtcccgttaaggtgagagagtcaaagtcattattatttcataagcttctaccattgttccataccttgtaagtcttactcttaccaaccactattggggtggacgtta

SEQ ID NO: 139926 - DNA, 576 bp, Cannabis sativa
atataatacaatacaatacgatttaatacgacgctccaaacgagctcttaagtaatagagaaagagggtgatgggtgaattttcaatccaagaagtgtttgctaccatgcttagtgcgagagagaaagtagcacaagactacgcgaagatatgcatagtatgaaaagtctatagctacaaataaaggggtgtttatctttgtaactaaattagaaaaattgtatgggtgaaattttttaaaaacagttttaaaaaattaaaaattaaataatattaaaatgttgtgttttttttaaaaaaaaaataacttttatttttttgtctatcatatttatgagtctgggtttggccgagatgtgggattgagattgggggtttcaatctagggtttgaggtgcagagtatggggtttaaagtctagggtcgaacttgggatctggcgggtctacgtctgtgttgcctgagaccagggttgaggactaatttggggtggggctaaattcatatcgtagtatggtgttaaatattaattattttttttagtaaaaaaaaatcttaaaataatttttagaaaat

SEQ ID NO: 139927 - DNA, 532 bp, Cannabis sativa
aaacaataaaatagaaaaaatatttttgtttcttaaataatcactattgtgatacagttacctattacaattacaaatatatatatcttttatttttttaaaaaaaaaaaattaacaaagtatataatatttctaaaaagattaaaaaaatatattataaaattaaaagtattatgcctaaattaaaattaaaattaataataaattttaaatattattatatgttctttgatttattataattgatcatcattttttttagtgataaaagtatataaataaagataataatatataaatacaaatgttgtattgtacataaacaaattgtaaaaaaaaatacatatatctgatataataaataattcttattttgttttatttttgtaaaataatatataaaaatctcgtgctcaattaaatattataatttaaggctagttataattttagctccctgaacttgatatgtactaaattatgctccttgaacttttaagttcgttaaaaatacccctgaactattgagatt

SEQ ID NO: 139928 - DNA, 519 bp, Cannabis sativa
caccgactacgggttttgtccaagccctgggtccagatcacgatcccaatctcgggtcccagtctggatccttttctggtgcctggtcacaagctgggacctaggttcaaattccggtctgggtcgggtactaggtcccggtcctagttctgttttccacgtctctatcctgattctgggtccaggtcccagttattgtgtgtgtttgggtcccggtctaggttcaggtttcagtcctagtctcggttcgggtttaggtgtcggtctgggttttgatatgggttcgagtttgggtttatttcctggcccttgtcctagtcctatccggttctaaatccatttgcgattcgaagtttgagtttgggtttgagttcgggtcggagtttgagtcctagtctttgtttttgttcgagttcggatttcagtataggtcctgatcaggctccaggtgtaggttcgcgtcctgggtcttggtctaggttgggtccgagtcaaaagttccaatcacgatatgagtct

SEQ ID NO: 139929 - DNA, 502 bp, Cannabis sativa
tcttaactttcatagatgatttttcagatttgtttggatacacatattgaaaaataagaatgatgcctttgcaaagtttaaagaacttagagtaatgctggaaactcaaactgaaagaaagattaagaaattaaggactgacaatggacttgagttttgtgcagatgtgtttactgaatactgtaagaaagcaggtattggtaggcacaagacagtccccagaaaccctcaacaaaatggtcttgcagaaagaatgaacaggaccattttggaaagggtaagatgtatgctaatctattctggtttgcctaaaagcttttggggagaggctgcaaacacagcttgttatttgattaacagatgtccatcatctgcaatcaatttcaagacacctatggaagcttggacaggacacttgtctagctatggtcatctgaggatctttggatgtctagcttatgctcacataagacaagacaaactagaacctagagctagaaag

SEQ ID NO: 139930 - DNA, 928 bp, Cannabis sativa
acaattttggtatcagagcctccaggtttgtctaccgaagcttgccaagacatgtacaatcctcattagagaaagctcggctcacgatccaataagcccctacttgtttagaattaaatgtggttattaaagcatgttagtaagcatattagattgtggttatttattttaaatgtgttgcctttgaatccataagtgttgtagtaagtttgtaattgggtcgttgcctgaccagactgacttactaattggcaggtttgtcctatagaatggacacctggtgcaatatggagagtcaggataatgtggtcagggctagtaacggttggagagaatggagtctaagttctccctataatcaaggtgaaatcccttggagggtttctgacgggagtgatggtcatccgtcacaagctccgttggatttggagcaaaggttcgcagaaatggaagctatgattcaacgacatgatgaggagattcagaggttgaaacaacaaagatctcctgttgtacctttacctcatatgccaaccattcttgatttggtattaccagaggagcgtagtatggctggtaaccaagtggaaacatttcatgagaaaatttggatgcatgaacctacagtcctttaggaagattaagatatgaagaatgttctttggactgtaagccctaaagaatttattttaagacctcaaaaggttatggcaggagatcaggataccacttgccatatttccatttatggcggaggtggtaggggctccgtggttgagcagaagaggaaaccactactacaaaagggctattctcaacgatttataactgccttttatattattttccaacggttcctaaaaccgttggctatgtgggtgtcataaaaatgcgaaactttaaatgacggtttataactgtggcaaaa

SEQ ID NO: 139931 - DNA, 680 bp, Cannabis sativa
atttattaatccgttcaaaaaactttgttaagtactataagttggatttgccacatcgtacacaaatattgtaataccctgagattaagaaaatagattagcaaaccctaactaattaatgtgtgttcattatggaattatattattatatttaattacatgcagatttttagctcaatgtttggagcttagctagtatgttgttaatctgaatttttgatgaatgttggttgaagtttaagcatgaaatatgtgttttggtgctctgttttattacctattaatctttggagtaattttgaggtttatgcatgattggagtgaattagggtgtgtttgagcatgaattttcgagactgagtttagggtttcctgggtttgaaacccaggggccgcgtccctgctctttgggcactgcggcccgccccctgttggtgacatgggattcgaacccaggtgtcgcggcccacccctttgtttttgggcagattcgtgcttattttcgaatgttcataactttttgattcggactccgtttcgagagttccgtaaattgttggaaagctcattccaagctctatgtgattatccagaatttgaatgccaattttatattttgtagaagtggatttagggattaaccctatacttgtgaatcccaaaaattgtgactaggatta

SEQ ID NO: 139932 - DNA, 743 bp, Cannabis sativa
gccacaagtcctgcaccttgcatcatactttgacccttccaaagaaaggctcggcatattgcttcaagttcagtaattacttcccttggaagtttcatgatttgattccaataggtatgtatggagagtaagaccgagttgatgagtacaactcttcctgcaaatgagatgtttctagtactccaagttttaattctagctgccatcttttctgcaagtagactacattctttccctgaaatctttttagcacatataggaattcccaagtacttgaaaggaagaacttgcctaccaaatccagttgcattgattatcctctgaatttcagcttcttgcataccactacaatagaacactgactttgatgggttcggttgaagtcccaatgtgagagagaataattttaagccttgcatcatgaagtacacactcttaaagtcgccatgacaaaagaggagaacatcatctgcaaagttcaaatggttgagttgtagacttccacatctttcatggaacttgaattcctgcttctggccaatcttagtcataatccttgagagatactccattcccaacacaaatagcaaaggggaaagtgaatccccctgccttaatcctcttttagattaaaaaaattcatgtattgttccattgaacattagagaaaattttggagtcctaacacagttcataatgagagttatgaacttattaggaaacttaaaagccctcaacatctc

SEQ ID NO: 139933 - DNA, 893 bp, Cannabis sativa
attttaaaatataattaatcttcattaatgttttataaggaaataaattattaggtgactattaggttataagttaattattatttatttttatttaatttctaaagtaatcacaaacattcaatagtatttaatgactaaaaaaatgtaaccatgatggttatatatttaatgtaactattgaaacttcctccatatatacaataagggaagtgaaaagttttgagaattaattttttaaattaatatataggggttattattattattaaatatgaaaaatttaacaaaaataaaataatattggaaaaataaaaaaaaaatgagaaaacaaagaaaaataagaataattaatataagtcgccacatcatctgaccaaacaataggataacgtaggtatatagatagcaaattttttttaaaagaaaaatgttaacaatattatgtaacagaatttttatacttacgtaatcttattgtttggttaatttttttttttttaaaagaaaaatgttaacaataaacttcatataagttgccacgtgaaatgttttaaatatttctttatatatatctattctatataaagtgtagttatataacataatttttagtttaacagtgtttttttaattttttacgttaactttaacagaacatcattattacttaacgaaatattctttattaattttataatattattgtacatatttaaaaataaaaattatgtagatattatatataaaaaaattaattttattatatatagttaaaaataaaaattacatctatgtatataatcacatctatatataatatatatatatagggcaagactatggtaggatctagcaaaagttctctaccggtagggttctttttttaacca

SEQ ID NO: 139934 - DNA, 636 bp, Cannabis sativa
agccatgaattttcaaaacggaaatatttatttctagccaccacaacttgattgacagtacttaaaagtaaaggagtatggtcagatgtagaagcttctaaattaaaaagcttagctgagggaaaaaagtctaaccacgattgagtcactaaagctctatcaattcgaacctccacccaatccacagtacttcggcatcgctcccaagtgtaaggataaccaaataactcaaggtcatgaagtccacacgtggccaaagtatcattgaacccgtcaattaaccatctcggataaggattgccacctctcttatcatcatgagaagtaacattattaagatccccaattatacaccatggcaaacttgacttacttttcagctcacaaaaaagatccaaagttctcctcctcaaatttcggttcggttcaccataaatgcctgtcaaacgccaatgtccttgatcactaccactaatcacaacatcaatgtaagataccccatattccaacaccttaacctcttcttcaactttccataaaagagccactcccccactctttccaactgaatccacagcaagcgcaccatcaaatccaatagccaccctcaaccgttcaatgacctcttttttagct

SEQ ID NO: 139935 - DNA, 714 bp, Cannabis sativa
  modified_base (672)..(675): a, c, t, g, unknown or other
tcttaattttgcaaaagtgacaaaaataatttcaattcctcatttcagccaaaactaagaattcaaaatcaatataattcaattaattaatccacataaagacaaaacactaaaaggcaaaaagaccaaaatgcccttgcccacacaaaactaatttaaaggattctaagggtattttggaaaattataaattcccgatcaatcccgacattcccaatgtctaataaactgccccaatatactaaaatactaaaattgtaattctactgagccatacaccgagttctatgttgccgggcaccgaaaatacaaaattatgaaatttcactatatgacataaaaatacattctcaattcaaaaataacaacataaataattatttaaatgtctataaatagttttcataattaaatcttaattaactgctaatttccaaattaaactaagcggtcttcacaaccaccttgattggaagaacctgtataaagctctgcttgcttttggttatggagatagacgtaatcttatttacaagtctatctcatctattagcttctctatcctccttaatagaggcacactcagatagtttcacccgtcttgtgggatccgccagggagaccccctctcaccatacttattcacaatttaacgctgcaatctgatctgtnnnnaagaataaaagtcgctcagatgagggatccagagttagt

SEQ ID NO: 139936 - DNA, 532 bp, Cannabis sativa
ttaatataaaattaagcatgcgtgccttgcacgtagcttttttctaatatatgtataaacacatatattttttttttgaaaaatttttcattatcaattttaagtgaataaaaaagagtaaaatatcacaaaagtgatatgcccaatcaaatcaacactttttacaagcttaaaatataataaaattggttacaataaatgttgaacggctaaattttaacaaaatgacacaatttttttaataaaaatacagtatataatataataataatatggcagtaaaaatataatttcatacatataacaataaaattgtagaaaaagaaattgggaaatacagtaccgaatgtaaatttctctttaaaaaaaaaggaaaacaaagaatttgaattaatttttacaaaaatactgtcacacgaattttttttaaaaaatactgtgtttttaaaatatacatgtaaaacacaaagcagaacaacttaaaacaaagtagaacaactaaaaaacaccagcgaaaacttaacacagtata

SEQ ID NO: 139937 - DNA, 549 bp, Cannabis sativa
agaaagaaatgcaaactcccttaaacacagaaccagagacagagagatagagagagagacaaagaaatacctcaacaaagaaatgcaaactcccttcagcacctcaccgtcgacacctgagacaaaatggaactattaagtacacgaaaatggaaaaataccacattcccttgaaaaatatatatatatatatttttctgtgaataaggaaatgtatgtaaagtagaacggagtaatgtacaacccaccgtcgacacccccctgtaacaactccaacaatggcagactttgagtaatgtacaccacggtgaacaaaatgtacaatatgggttttaccacctcaaacgaaaatagaaaatggaaaaacaaaatggaaaatgaaaaagaaaatagaaaaggaagaactttggttttgccccagcagagacgaaaatggaaaaacgaatgagaaaatgaaaaataaaaaaaatgaaagtgaagaagtggcggagtacgacggttgattagagttgattgatggatgtcacttttcacttttctatttttaat

SEQ ID NO: 139938 - DNA, 633 bp, Cannabis sativa
tattatttttttattaaaatatatccacttttttaagtgaattgcctcactcactctctacctaaatctagcatataatttacgggtcttatgggaacatcatctataaagtaggtatatctaaaaaaatatgaaaatgaaggtaaaaattaaaacaagtaaagtaaagtgggtatacaatgtaatttcctctatagggcctgattcacatatatcataggaataattacataagacaccactttttgtaaaataattatatttttacgttcaaaattttttttttttacacttttacggttttccaaaaaataacactaaaacaacttaaaatcaacaacaaattaacaagattacaatataaaaagaccgtattttctgtaaataaaattaaaaaaatcctaaaaatatttaaaatttcgtaaaaccgtatttttgtaatttttttattgtttttatgtttttgtgaaataatccctatatcatagctcacttttggtagtgaactgattgggtgtgtactctggtacctacccgattttgagttgaaatgggccatagacaaaaaaaattgggcctttactataaaggtaaatggtatttttaaaaattattaaaaatatatgtatattt

SEQ ID NO: 139939 - DNA, 643 bp, Cannabis sativa
tctcggcccaagttgctgctcccggttctcaacactggggctcctgatgccagcacctccagatccggtaagtctcccttagttattcatcgtatcccttctgctgaagattattctcgatgtagacctatagagtttgacgaacgtctccttagatttaagatgcctcctactcgatggatgccaagggcttttatttttcaaacctaggtcattttttaggccggtcctggatggggtctgggcctcccgcacctatccttctagatcattcagcctatctatcttccagctggtttctcccctcagacagctttcttggggatgacaaagcaagtattgtagtgcaggactttgctagggctgaattagattttttgggtaggattagttttactgctttgtccttatgtgcataatttctcgtgatcattctgacacttgtttgtttgtttcttgaaatagctaggccaatggacgagcctttggctacccttgcccagacttacagtcccaaacccgccttgtctcaagcacctaacctgacggtaacctcaaggaggtcttcgtcgagcgttcccttaggccaaatcgtcttgatcgatgaggacggggaggctgaagaggaagaagagggcgagat

SEQ ID NO: 139940 - DNA, 844 bp, Cannabis sativa
aaaatttaaatcaaagacaaaaagagttatacaagttttatgatgtcgagcttcttagttataacaatgagcaggacaaggtggtagccatcaatcaattcacaatgtggttaaacactatgactcaagtagggcaatatttttttataccatggaacatagggtaagaatcacacatctatttcactttcgctataatatatatgtttatattaatataacattgttactttttcagtaatcattggatgttgattatagcaatgacatcgggaagagttgtattcttaaacccgcttaaatctaaaatcctgtcagtcattgctgagatgataaagacgtaagtttagaactttaagttattcattctaatataatcatcaattattaaattccaaattcttaacttgtaattttttttaatgtctttaacagtgcatatgcaaatattagttcaaatactgttgtatttggcacaaagggaccgtagatatttccctttgcttgtccaaagcaaccatacaattacgaatgtggttactgtgtactaacttacattcgtgatatgctttaacattcaacttctattacagtcatgaaagaaaaagtgagtatatactcgtttttactataaatacaaacacataaaagtactattttcttaattagttttatttttttaaatttgacagtttggcggcctatcccaatattctgaggacaatcatctcttactgctttgacaacagtggttaagtcaattgcttcccatgatatataaaaattaattagtagtcttttattgtatttttttagacactgtgtagtattttagagatttatg

SEQ ID NO: 139941 - DNA, 1520 bp, Cannabis sativa
  modified_base (1153)..(1155): a, c, t, g, unknown or other
  modified_base (1218)..(1218): a, c, t, g, unknown or other
caaaattaagggcaacatttactcccaagtcttgtttggtgcaaagtaaacgaggcttgccaggtgcctccggctgtctcattaatttcctagcgcgtgcttcgggcgcgtgggctgcatttatgacagtcatcattaaaatttattgctttttgcaggcaacgattcgcttcccgtccattaatgatctgtcgcatttaattggtgtcagacaaatactcaagcatttccagccgccttgaggagcatttatcccaaccgttagatcagctgaatgcgaattgattcgattcccaccgttcgatgacgcctgatcatagctgcttcgtacccgttctggcctataaaagcatgtctttctccttcatttagttacttcccctactttgccattttttttgcaagaacactttagagaagaaaaatttaagacaccatagatttcttgtgcttttcctccgccgttgtcaatctgctttataccgtcgatcaacgccgacccctagctctcaactttcatgtaaattttctcgacactttgtgccttttaccgtttgtttgcatgttaggatagaacttcttggttgagcgttggatttttgggaagtaactctgactgaatctattgcgtgatgcatataatcttctttatttgtgtctttgttattttcctcccttcttctttagaatcaacccctctttcgaaagactgtttaaggcatggggcgatttgtgttcccacattcagcgtttttcgcttttcttctgctttagctgcctttgggatttttgcactcaatgtttgctaaggaaaatctttgagtttccatttttggcaaacatccggtgggggcctctttctagcggttaggggacccccattcccttttttaacatcagggtttggtttggggtctaactgctggattctttctttttttcagaacaaaaatatctacccctgcgtcaggatccaagtcttctaagaagggggcggctgctttggccaccctggaggaggtcatgaagggactggttgcccatgagaactacacttgtccttctaatggctgggaagcagatgaactctgctccaccctaatttacgctcatcagttggagaagatcgtgactgtagctggcattaagccgnnngcgtctggggtctttcatcgcttatctcgggatgaagagacgcccaatcacaactacaggggntttggagcctggagccagacccatcttatgtccggagccatgcttccctttcaggattacttcattaatttccttgtttttgttggccttgcgccttaccaacttattccccaagcttaccgcctgctctcaggcttgtttattttttatgtagcccgaggctgggcttcacttagcctggctaaaattttgtatttttatgaacttgggggacaagtttaaggacggttttttcactctccgggcccatcctactaacgagggcccgatccctttttattttcaaaagaatgttaaggagt

SEQ ID NO: 139942 - DNA, 621 bp, Cannabis sativa
gtttacatctagggcttaggattttttaacttgatacatattttttctaactagagctaagttaaattcaaaatacaaaataataataaaataatattctaaaacaaatatcttcaaaaaatgataacttgtagtgtatagtaaaccgtacttagcagtttcatattaaagattctcattactttattatattaccgacttgttttattcatatcatataatcttaattctcttgtacattcttacaatattgtatcttatccatatgaataaggaattttcagatcttaaataattatactattataattaatgtatcatttatctcataattgtatttcatatattctctaatatattatctattaattacttacttttagggcataaatctcaacaaaactacccaaatctttaagctttgggggtagtttcttttacaagatagcacaacactcctcagtaagtgatacagtctcatagtcttcttccaatctcttttttttataagatttcctttataaactttacataacttggcatctgttcaagtgcttcggcaaaaggtatgttaatgtgaagcttccagaaaatattaagaaacttcaaaaactgcttgtc

SEQ ID NO: 139943 - DNA, 618 bp, Cannabis sativa
aaaaaaaaaaaaaaagaattgcatgctcccttaaattatgtttttaatattatacttaaaattgattttatttacaaaaatacctttaagaaaattatttgtacaaataccgttaagccaagtcagcatacataccgaaattcaaaataattaccgaaaatgaaaaaaaatagaaaaatctcgtttctataaattttcgcttttaggagttttgaaaaaagcaaccatttagttgcttttaatgtgaataagatatcaattggttacttttccattaaaaattatttcagaattttacacatatataaataataaaataactattttaatatgtgagaaacatatatttttctatgtccaaaaaaggaccagtaatattaaaagaaacttttttgtttctttttcttatatttttaggctattatgttattttattgcttaagatactttaaggttactttttatttcttttttttttctaatgtaactcatatgatgtttcagatattatttaagttatttataaattattttacaaacttattaaaatagttttataaaaataagtgttgaccgagattttcgacaactatcaaaatatgattataataaagagct

SEQ ID NO: 139944 - DNA, 542 bp, Cannabis sativa
taatcccgcagataaaactgaagcagtaaattattaaagaacggattaggtgtgcatgctcttcaaatgaataattaacttgtttggctagatatgaatatccttatttttagttaggtgtatagtattattttgattatcctggcaagaatagtattttttttatgaacattagatgtgtagtatttataactagtctgtatgacgttattatatttttgataaatttattcattgttaaaaaaaaaacaccaaaattttaaatttcatttgaaattacgagcttattatagagaaaattgtattgtatacccactttactttacttattttactttttacctttattttcttattctttaatatatactcacttttatagatgatgtccctattatatctcttagattaatgtaaattatgtgctatacttaagtagaggagcgagggtatgttaggcaatctattcacaaaagtgggtaaattttaataaaatataatataagaatattttttattaatgaatacaaaaaaaaaaaaaa

SEQ ID NO: 139945 - DNA, 553 bp, Cannabis sativa
aaccaaacgccaccttagtgttgagagactcccacattttataaaactctaataattctctttcaattatctggattattatttaagccatacaaaaatactctatcatagaaaaatttgaagtaataaaaaaactataaaattattaagtaaagaaaattattaaaaaattcataagaatagtttaaaatataaaataaaataatattacagtagtttaaaataatttaaaatattaaatttttaaataaccacaacggcatatgatttgaaaagagtctatttgcaaaaatctatatgcataacctactaatatttaatatttaattcagtattatagctttattttcttaaaaaaaaattaaaatcaaaacttatggattctttttaaaaaaaatatttttttttttgaaaagtttaaaaaaatatattagtatgtacggtttgtttaaaaaaattaggattttgtatagttagtgttttaattttttttgtttttttgttttaaaaatattgctaaaaattagatatagttttgggaaaaaaacaaaaa

SEQ ID NO: 139946 - DNA, 535 bp, Cannabis sativa
atacttgtgagtggatctaagatcctggtaaaataacttccaacagtactgtgggacaataccacattcctctaggaatttagcaaatggtcctggagattttcacctgagccatcatactggttgtagtactcaccaccacaagaattgacgttcttaatctttttgttaagttgattctcaacttcagctttgtcagctttaaacacgtccacatactcagatttttcatgaatgagatataggtacccataacgtgagtaatcgtctatgaatgatataaaatattgttcatcattccaagatgccgtagggaatggcccacaaatatctgtgtgaatcaattctcagacttctgaagctctattggcacctaatctcttagttttggttttatttccttgatacaatctatacatacattaaaatctacaaagtcaagagcctctaaaatgtcgtcagacacaaaatgctcaattctacctcttgagatataaccttagcgtttatgccataattgttggaaatattttac

SEQ ID NO: 139947 - DNA, 1119 bp, Cannabis sativa
ttgcagtggctcgtttttcttcgatttcatcaagtgattctgctaggagtatgtgattggtaccttgattgtacgtcaatcttctgtggcatggtggctcgagtttgatggccagcatagcttcatatccgtacgccattgcgaatggtgtctatctggttgtcattttctcggttggacaatatgacccaagaacttcaggaagctcttctggccagtttcctttggtatcttcgagttttttcttcagtgtatccttcaaggttttgttgactgcttcaacttgaccatctgcttgaggatacgccactacagaaaaacttttgatgataccatggttcgcacagaaatcggtgaaggattggctgtcgaactgcttgccattgtctgaaactatcttgtacggtagtccgaaccggtagattatattcttcacaataaagtcttgaactttctttgatataatggttgcgagtagttcgtctttagtccactaagtgaagtaatcaaccgctaccactgcatactgcactcctccttatctttgggtaattgtccgatcaggttaattccccagatggcaaagagccactgactttgcatctgtgttaactcgttgggtggagctcatggtatctttgaaaatctctggcatttgtcacacttcttgacataggcttttgagttttcagtgatcgttggccagaagtaaccttgccttagaattttcttggataagctctgcctggcggcatgatttccacagaatccgtcgtgcacttcacataagagccgtgcagcttcttcttgagtgacacatctgaacaatggcattgagaatcctcttctgtacataattccctttactatgatataccgtgcaactttccttctcattttttgaccttcatttcagttatttgagagtttccccgagtcgcggtaggctgctattggtgtcatccagtttggggatgtatcaatcatttccatttcttctgtgctagtgatgctaggctcttcgcggaactgaataggcaccaagttggccttgtcacttacattactgcttgccaatcgagctaacgcgtctacagttgtattttcttctcttggaat

SEQ ID NO: 139948 - DNA, 611 bp, Cannabis sativa
  modified_base (93)..(97): a, c, t, g, unknown or other
atcttatatagaataagatgatagcacactttggaaacaagataaaaaaatatcttctatactttgcgactttatttttagacttagtcattnnnnnagaaaaatagtatttgttgaaacaaacactttcttatcttaatgaccatgggatggtccacccctaatcacttagaatttctatcaaacatgcaaatcttagttaacagttctagcttttcttaagttcgcgatcaggacatccatgaatctagtaatggtctacactaagtacacaaccattttatcattctgaaatttttctatcacaagggtatatccttagaaggacttgagaaattgttagtaactaatcatagaccttatattttcatcaatatgcaaatcaaatttttggggaggtaagtttgaatacaattcaaagttcaacttaatgatctttaaactgcatatccaaatatttccatccttatcagttcgcaagatctttaaccacttatctcacactactacaatttagcattttagtgacactatttagtgactcgacaaaaatgcacgtcactaaagagttaggagtaacttttagtgacatgcacaatcaaactctaaat

SEQ ID NO: 139949 - DNA, 1343 bp, Cannabis sativa
  modified_base (733)..(733): a, c, t, g, unknown or other
  modified_base (1302)..(1314): a, c, t, g, unknown or other
atgccgccaaatcttcaaagaaaaaactattgcggcaagttctagatcatgagtctggtatcgctgctcatactctttcaactgatgagaggcctaggcaataacctaatcggcctgtattagtacacaccccagaccctgtctggatgcatcacaataaaccacgaacttctctttatcagaaggtagggctaaaactggagctgtgattaatctatttttcaactcctaaaaacttgcttcacacttatccgtccacacaaaatgctgattctttttagtaagcttggttaagggtgttaaaattttagagaacccttctacgaaccgacggtaataaccagccagacccaagaaacttttaacttctgtaactgctttcggtcttggccagtccctgacggattctatctttctcgaatccaccttgatcccgtctttgctaacaatatgcccaaggaaggacacctgagacagccaaaatttgcagttcttgaatttggcgtacaacttatgttctcaaagctgttgtagaaccatccgaagatgttgctcatgctcctcttctcattgagagtacacaaggatgtcatcgataacacaataatacaaatatcgagaaaatacttgaataccctattcgtcagatccataaaagctacaggagcattggttagtccaaaaggcattaccgaaaattcataatgcccatacctagtacggaaagccgtcnttggaatgtcctcctctcggattctcaattgatgatagcccgatcagagatcaatctttgataagaccgttttcccttgaagttgatcgaaaagttcgtcgatcctaggtaaaggatatttattcttgattgttagtttattcaattcccggtagtcaatgcatattcacaaagacccatctttcttcttgacaaacaatacgggagctccccagggtgatacattaggccgtgaaaaccctatgtcaagcaacccctggagttgaatttttagttctttaagttctgctggagccattctattaggggccttataaaccgattctgctctgggtgccaaatcaatgacaaaatcaatttctctctacggcggtaaacttagaagttcatcagggaatacatctaagaacagatcccaagtggtatccaataccacggctagaaactctagacatccatctcataataattccctggttgttagtactgaaattactgggatccgtgatccttgaactgacccaacaaaaacaaacggttctttgccttctagttggaagattaccatnnnnnnnnnnnnntcaatactggctgagtacttggacaagaa

SEQ ID NO: 139950 - DNA, 596 bp, Cannabis sativa
tccattcctttccatttcattacctctaaccaaacgccaccttaatattagcatgtgtgtttaattgatttttttattttttatttacttatttaactgttatgggttgtaaattgataaggtttattttttaactttttatttccttattaacagttttttttaaaaaaatatatgattatgatatagtgacacacaatgtgtgttggtacacatttactgagtcacgcttagcgtgtcactataggccagcattttttaaattaataaaaataaaaaaaaaaattgggttttactttttagtgacactccatatatatagtgacatgcattaaaggagattaacgttagacatttagagtttgattgtgcatgtcactaaaagttactcctactctttagtgacgcgcatttttgtcgagtcacgaaatagtgtcactaaaaggctaaattgtagtagtgtaagataattggttaaagatcttgcgaactgatacggatggaaatatttggatgtgcagtttaaagatcattaagttgaactttgaattgtattcaaacttacctccccaaaaatttgatttgcatattgatga

SEQ ID NO: 139951 - DNA, 1037 bp, Cannabis sativa
gatacacaagcttcccattgcttctggataattacattacaattagaatcacgcagccaagcattctcaaatagaaacaccctcctagaagctgcctagaaccgaaacgatggatccaaaaatagaggacaatgatccgatgtggaaaagaccatgttaatcaaccgtgcattaggaaacaaactcatccaagaaggggaagctagcgctctatccaacctcacttcgatccaactgtccgtgcccctaatcttctcccaagtaaacggagagctatcatgcattaccaccatatctatatgattttgcgaatacctgaccatctcaacatcatccttatccttccataacattgctaatccaccccctcccctgagcatcaaccgaaaaaagaccctcataaccaagttgtgatgctagaagttccaaccgagctttcaaacataacgtctcacaaagaaaaataaacatgttcttcttttgataaatcatatctttaaggaattaaatagtctttgagttcccaagcccacgacaattctaacttagagtacttataatgactggcgagcccgccaaattgacatttttttgaaacattagcaagagcatcccccatacacacagcaacaccctccttcggcccaacatgcctaatagaaacttccttactagtccgtttacatttagagtccaaaaagaccattcccacctcttccaaatttgaattactatcccctaccgcctcccatcttttactcccattattgtcgctcaaaatagctggagaaaaaataagcccacaattttctccatgattcgtgacaaccgggttgacagcaccacccgatccctaaaaaaccggccatgtactcattgtcgactgcctaggcttagccaccaacagtggatgagctaggtgccccagatcgaagctatttagcccccatctcaaactgagtttgttggggcattgccttcatgaacgtgccataaggttgaacgattgatgtggttggttgaataaacaatcgaga

SEQ ID NO: 139952 - DNA, 739 bp, Cannabis sativa
tacatgttaaaatttagggggtaaaaatctaattagccttttaaaaataatagaaaaaaatatcattcataaaaaattaaaagaaaagaataaaaaaaaaaagcattgttatcgatgactcaattaaagaaagttgaggtataagacccctataactaactaacacatggtctctaaaattgtcacaaaatgactgaagttgtagaaaagaatctgcaatatgtaattctcttaattttgcataaaacataaaaaaaaaaaaaaataacaaataaataaaattttaaaaaataaattaaataacaaataacaaataaataaaaaaataactataaaaaaaaaataaaaagataacaattaaaaaaaatcacaaaaataaaataataaataaataatacataaacattaaaaaaaaaggagatcacaaatgaaaaaaacaagtcattttttgtttggtagtgaacatcaattttttttattaatgttattgattattgatataacaattatatatatatatatataaatatatatttattttattattagaattaattattgttttatttttttgcaatagtgaatgataaaaataataatgttaatccaacaatgataattagttaatttttttcttacatgtataaaaagagtgaatacatatactattgatccaaaacgtcaaccaaaacggtgcgtttttattactttccaagagtagtttggtatagagtgatcc

SEQ ID NO: 139953 - DNA, 599 bp, Cannabis sativa
atctaagatcctgataaaataaattccaacaattacaactttacaacaactaaaagcaacaaaaaatgttactacaaaacaccagttttcgattgcatgtaaagcatgaggcttctgtcatacttgattattaatagtgagtagaacttttttaattttataatgtagttgtatgtgtgttgttgcatattaataatgtagttgtatctgtcgtttgaattatataactattttgttggtgtactacaattatgcgagaaaaattaattaaatatacaacaaaaataaaactagaaaataacactaattaaatatgtaaattaattagacatcaaaatatattggtgacaaccttaaaaaaatataagcacaacacaaaaacgattataatacaagtactcatgaaaaaaaaaaactaaacatttcaatttttctactatttgcacaactaataacaacacacaaatatgtataacgatccgacttaatatacatcaccatgttgcgacaacaaaaataaaaactgtaaaacaacacactaatatctcacaaatataataataataatataatagaaactttaaaacaactacaaaata

SEQ ID NO: 139954 - DNA, 635 bp, Cannabis sativa
gatgagaaggaactgcctaatcctgaaaatattgattccgactccgatgatggtgatgagttggttaaagatggtggtgatgctgatgatgctgataaggttcctccttctgaagtgaatccatctgaggttgttggaggcagtgatgagagggctaaggatgttgagaagccaaagggcaatgagtctggattaaagggggacgatttttttgatgggttaagccagcttgaaattgatgatgatcaagttgtgttggctggcttagaggctgttcgtaaaatccatgtatgtgtatcttaatttgtttgcaagaaaattatgttttattttggttgcttaacagttttctgtttgttttgcaacttttaatttcagactttgttttcttaggtcccccaacccaatgcagatgttgttggtcaaaagtcagttgccattcatactgatgaagaaactgaggaaactatttctgatactcctccgttggataagagaaagcgtgctccgacattgaaatgtccttttgttgatttcgggttggctgatgtggggagcactccaatggaggtaatgtcctcaggttctcaatcagctggggatgatagggattttaaaatggttacttatgtgaa

SEQ ID NO: 139955 - DNA, 718 bp, Cannabis sativa
ctcgaacagtcactggcttcaccataggactaaaggtgtcttcataatcaatccctggagtttgaagatagcctttggcaaccaatcttgatttacatctgtccagtgagccatctttattgagcttgactctatgaacccatttgctggtaatcacctgcatatcttttgtaaagggaaccaatgtccatgttttttggtttgtaagggctttgaactcagtgttcatggttgcaagccatttaggatcactaagagcagctttgagggactttggttcagtgggaatgagagattcagggagagggtgtcttgtagcaagatatgcttttggtttagtaattccactttgagatctggttttcatttggtgagtacggcctactgaaggagttggtatgacatttgttttatctaatggaatagtggtagaagtaggatcattgggaagtgaagatgggacactaggatttattggtaaaccatcagaggaggttggcaagggaatagacaagtcattgtttggagaaaaggtggaggaagggacacgagtatcattgtttgtagagtttataggtatagtacaaggtggtacagggataggcatggacatgtcattgttgggagataaagtggatgaaggagccgttggaatagtgacatgtgatgagtcatgtctaggtaggggtggttgttggaaattattttaccaggctct

SEQ ID NO: 139956 - DNA, 1490 bp, Cannabis sativa
ttatgggtcccgtgacacatagtaggtcaccaagttagctgtggtgtaccagagtcactattctcctaacgaactcactgaatctagtacaaccacggatctactgggtgatgtcgatgcactatgacagaagtcgcactatcaatgtagctggtttgggcagagtatgtactcagttcattagtagtgtaccggagtcactattctcctaactttactaccggagtcactttgtgtctcataatactattgtattcacaacattaaactgttttttattacatatctatatttgtatagtattcaaaaaattattataatctttattccaacgattaatacgtttatgtaatcttaaaaaaaattattttaatatttaatcaaatttaaaataatatttttaatgaaatcttaaaatcatattttataaaaatattgagttttcattattagtaaacatcataatttaatttcttattcatttgggcacacatgtttatttggacataatattaggatatatgttgctacatgtgacaagtttatgtggccattgttgttgtttagggatgggaacaaaatttcacttatttaaacacataatttttctaatcaaagtcaaccaaaccctaacgaaaccgatcatttggttggttcaaattacgtcttccaaggaaaatttaatagttggttaggtttgttcaacttacatttttcaagggattgaaaaaatcagatttatattggggttatatcaccccttctttactcataccagttgtattaattatgattttttaatttttgacaagactacacaacacagtcacacccacaagtactatatatagccctctacctctccttactccttcacacctcaatttagtattgttttctttgctagagaagtcactccttatttgtagacgtatgtatagggataatatataaaaataatgtatgtattgttgttgcactcaagtgaagatgtgtaaacagaaggattggtatgcactacaaccgtgtgttgtagctgcatcaaggaaatttcagcaatccaataaatcatctcataaaaaaattgagtaataactcatcttaaaaattttatgtctgtactatatgtatattcaggaaatattgacaaaggcttcgaatgggtggattaggctggatggaactacttccaacaccgccaaatgtgccatccaattgagcctcaacctcccgcagtccacaaggccaccgtgggatgagtgttatcatatttgacacaaccaccggtgcgccagacacaggaacaaaatcgagacgcgggaggaaatcgtcagcgtttgtacagtcttatgtcaaattacttcctcatgtaataacagtggtgatattatagtatacgtacaaattcatctcactacaatctatatttacagtgtcaaataaagcatcctaattaaatacctcaaatcaaacatcacgtaactttgcac

SEQ ID NO: 139957 - DNA, 801 bp, Cannabis sativa
gaccggcactatgttcgtgccgctatgatagcatcaatagcatccaaaagtataattggccatgatatcactcttaaccagtacaatgcctgattgctgaactgacataatggttctgttgctatgatagcgccaattaatattttctaaggtgcatatcattcttaaccagtacgattcccgtactgctgaagtgacacaatggttgtgtcgctatgatatcacccaaacatatatatcataaacacaacatgcacatatatcacacatacatacattcgcatatatacaatatgttctatgctattcttacctcattttcgaattcaagtgatttggccaacctaaacggaaaacttcgtgctagatggatgcccaattacataacataaatgggtaaacaatgcaccaaaaccctaatatgggaaactcaaacctttaacttaaggttctgccattaataattgatatcccaataccctaagtatcaaggaaataaccaactataacactgtaaataacacaaattgacaacacaaaaaattcgggaaacctaaccctgatccggttaaccgattttacagggcctgtaaaaccagttaaccgatttgcaccaggtaacccaaaaaatttgaaaccatgcctaaaccaatccaaagtttccaaaacacctgtaccaaccctaaacaatatattccaagaaataacagcaagatacaacccatgaatccaatttcaccattaaatgagccaagtatgagctcacaagctcaaacttgctcattccacaaataaaccagc

SEQ ID NO: 139958 - DNA, 734 bp, Cannabis sativa
  modified_base (458)..(470): a, c, t, g, unknown or other
  modified_base (504)..(506): a, c, t, g, unknown or other
gggtctgagttcaggttcaagttctggtcccgagtccatgtttgggttgggatccaggtcaggctcccaattcgagtctaggtttgatttggagttcgggtcattgtgtggttacggttctggatctacgtccaatttcagttgtgattccaagaccaagatctaattccagtcccactcaacttctggttttgattccaattttgtgttacagggtacgcgttcgtgtccatttttgggtttgcgactgggttcaggtctgggtgtgggtttgggtccagggctaggtcccaaatccagacaccgactacgggttttgtccaagccctgggtcctgatccggatcccaatctcaggtcgcagtcttgttccatttcttgtggcgagtcacgaggtgggtcctaggttcatgttcgggtctgggtcgggtacaaggtcccggtcctagttctgtttcnnnnnnnnnnnnnctgattctaggtccaggtcccagttattgtgtgnnnttgggtcccgatctaggttcgggttcgaatcctagtcttgatcgggtttaggtctttgtttgacttttgatctgggttcgggtttgggtttagttcctggtccatgtcctagtcctacttcagttctagttccatttgcaaatctgagttcgagtttaggtttaagttcgagtcggagttcaagtcctggtctcagtttgggttcgggtccagatttcagtctaggtc

SEQ ID NO: 139959 - DNA, 961 bp, Cannabis sativa
aaaaaaaactagaacgcaaccacacaaaacaacagtttaaaaacacccagacataaacaacctaaaagatgaacaaccgggaaaaaaaatattaacaacaatctgcaaaacagaaattactaaaacaaattgttaactgtgaaataaaattaaacaacactaaaactactaaaaataaacattaaaataactgtttagaaaaagtcaatagaacactaaaagaacaatcaaacaacgaattaaaaataagaaaaaaatgttatgaaaacacaaaaccttcgtacaaaaaatgagaataaaaaaaaacaataaatcttaaaaaaaaaacacatttaaaacttaaaaataactaataagaaaactcaaattgagaaatagaaaaagggtgtagtttggttaaataatgctaaaaactatttaatagcagtaacaaaaccaaaaaaaaaaaactaaaaaacaaaaaatgagataaaaaaaaaataaaaaacaacggttgattaaaaatttcaacttaaaaaaatgaaaaatttcaaggtaaacaaccctttggcttaactttaggcttcacttccaaatcaggaacttcatcctcgaagtcagaatcagagagaacctaaaacattatgggaaaaaaattgaaacacaaaacagcaaacgaaaaaaaaaataacaacaaaaaaactaaaaaaaaaatcgaaaaacaacagaacccaacttacatccttgacagatttcgaagatttggttctctttgccttagagattcaatcttagctggaagaggtctttttttagaaccagatggctctatagcatcacccattcccttcttcgcaatgtctttcaaccaattttaggatcagctttagaggactttgaaggaggttttttagtattttttgaaatttttttagcaggtgaaagggacttggaaccagacctagtggtggccatttataga

SEQ ID NO: 139960 - DNA, 548 bp, Cannabis sativa
  modified_base (325)..(332): a, c, t, g, unknown or other
aatgaagcattaagtcttcaaaaaaagacgaaacaaggtgtacatcatcgatctcaggaagataggggtgaaaagctccagctcgctatcaaggtcattggaaccaagttcctgtcgagacatcccaaaatgctaaaattaaagacgtgtttaaatacacgattattttgacccagtaaaatcgggaaaatcacagctttgtgattctcaaataataaccgcaattatactacgtgatatgtaatcaaaccccgttatttcaggagaaaaagattgtaaagattacagtcaactttgtaattaactgcctactatgtgattatannnnnnnncaagtaagatcaaaaaagggacgaaaaaaaatcatacgaaagaggccctaaaaatctatctgaaatctaataagattgactcttggactatgcagaatttaaatgcaaaaacacgtaaaaaatcccttgtgttcatacctcttactttactgctttcaatttttctgtgtgaaattatatcactgttaggctcaaattttggttaatgaaaatacg

SEQ ID NO: 139961 - DNA, 726 bp, Cannabis sativa
aaataatatatttaaaatgtataaaaaaataaaaataaaacttattttttaaattaaaaaaattacaaaattaaaaaacacataaacttaaaatctaattaatattaaaaatcatacaaaactaaaatctcgttcttctcccccttctcttgcgattcagggtttcttctccctcatcatcttctgggaacaagggatgcgaaccaggggtcatcactcttcaccctcatcagcgtcaacctgcgaacagcccccatcgtcatcgtcttcttcctcctcaccatcaatagccctatttcaccacatctcatcctctttttcttcctttttctctttgtatccaaattgtaaaaaattaaaaaacccaaaatctctcatcactcgagatctaccggtgagtgaccacgggatcaaagttagaaacatgtggggttgaaagggttagcaaattttggcgtcgacctgcgaacaaccccctcatcggcgtcgacctgcgaacatctcccttaatgtttacaggtttgagcttgaatttgggcatttggatttgtggtctttgttctatttctgggtttgagtttttaattctgggtttgttcaagatattatagatgaggatttttgtgggagaaatttattaggtgtatttttttttttcaattttgggaggagacgatttgaggttctgggttttgttcttttttgtaattttagcgtgaaataggg

SEQ ID NO: 139962 - DNA, 516 bp, Cannabis sativa
gcatctatatgctgcatataaaggttagagaaagcagttagacaacaaaatatattaattgtagattagttgtaaagtaaagtaaaattataaattagtttacgtacgtcatctgtaagcaattcctgtagtgtcaacagcttccaaaagaacgatggaccgtaatcaccacttttcaaatcccgaagcgggtggttggaatgagtccagaacaccactttcggaaagtatccaacaatcgctcatctggtggcgccaggggatcaaatgtcgaagaaggtctctgtttcttcttcatctcagtgtagtcacggaaccagacagggggatttctcttcctcttccgactcttaacccctgcaggttgtgcctctatcgccaaaatttcaccctgagactcactgtctggtatacagataacacatgcactgataggagtagctggagctccctcataaggatcatacccgtcaggaaagacctcctcctcttgtagtgggggtgatgcagctggta

SEQ ID NO: 139963 - DNA, 602 bp, Cannabis sativa
ttataagaaaacaacaccatataaaactttaaagattttcttcatatattttgacattgattagaacagaacaaacctacacgatttcattgatgtgaaaatgacaaaaagactaaagagaacttaactctaatcttattaaagagaacaagataaaagaatgccagaataaaccttacctccggtgctgagaagaagatgagagcaggccgaaaatagtctcatttaatatcactaaaatgaaaaataattaaggacgccaatattgatataacagtatacaatagaaattagaaaatgtagaagtgttcactttacaaacatctttgattagtcatgacataacaaaaaaataaatatatggtgccaagaaacaaaacaaagttttgaaaatgataaaacaaaatctctatatctatcatccgttaccaaaaataatttattatatacctccaaaatctaatctaaataaaagaatacaaatctaaagtggagagccaagaggaggactgcttgttgctttgaaaaacatggagaaccggatgaactatgataatagtgctactgagattgatttaatttaattgctttaacactgactg

SEQ ID NO: 139964 - DNA, 554 bp, Cannabis sativa
  modified_base (31)..(51): a, c, t, g, unknown or other
tttaaatatattacaagtttattttcagtcnnnnnnnnnnnnnnnnnnnnnttctgcgctattttaattagtaatcccgattaggggaatagggtttcataatcagttttgggtagcatgcctaattatttagggcgttaagaaagcttgatggtaccctggtttgctgattatgtcaacttcttggctgccaatgtcactcctccagagatgtctcgtcaacaattgaaaatgttcttttcagaggtaaaacattactattgggaagattcgattctctacaagcactgcgccgatcagataataagaagatgtgtgcctgtagaagagatgtattctatcttgaaccactgtcatgccttacaatgtggggggcatttcagtggcacaagaactgttgcgaaggttcttcaaagtgtattcttttggcctactcttttcaaagatgctaatttctttgtgaaggcatgtgatcgttgtcagagaacgggcaacatttctagaagaaacgaaatgcctttgacaggtatcttggaggtggagttgtttgatgt

SEQ ID NO: 139965 - DNA, 623 bp, Cannabis sativa
taactaagcgggctttacatgggtagtcgctatcctcttcttcttcagacactgggatctgctgccaagtcggttacttgtggtccttaaaatccatggcacactgatccttttttagaagaccacaggacctataattgttgtcatggagcaagaaatctcccactcgcaaactaatgggtaggttcaccaggatttaatgtcgcctttgaactacttgtgttaggattgctctctttaaagcagctaaagatgagaaataaaagaacaaggaattagttaagatatccaaccatgaaaattcaaactctaaaccaacattttgggaatgatagatacttacgtaaaattctaaactagattgtatttattgggtgaagtcctgttgtccaaaagaatttattcttaaactccttcttattgggaataacaatgattttataatcattggaatgggtgcccaaatagtagaagccacatgaacaattcttcctcacagggcatactttagttgcataaaagcatgtaatctcaaagggggttggacactcccaccctaagatatgataaagttactttagacatgcgaggatcctataagaatttggggcgagctaaaaggc

SEQ ID NO: 139966 - DNA, 1376 bp, Cannabis sativa
ctagtgaattaatggtactaaagagtaaagaagtaattagaagaataaaatggtaatttaaccaaaactaattacgaacacatggagggctaattactgaaattgatatattaacggacactgtagtataactcagtaaatataaatctataattactaagagttcaattttatatttttagtaatataattctataattactaagagttcaattccatacttttagtggaggaatcatagaattaataaacaaaaattatttggttgatgagactcaataaataatagcttattgtagcttataattataggtccatggtccccgaatcgccaccttgaaacactgtcaggaaatggaggagtagtatagtatcgttctaaaaaaatctattttggattaaaaaatagtaattatttatttttgtgataattaaataatttttcaaattaattaaataatgaaaagacaaaaattattaagacaaaatttgtcaagattatatttgttgagacaaaagttatcacgacaaaagacatcatccttgtcctaaacagacaagggtacgcgcctatgccctatgcaggtttgtcttgttaagtaattattgaattaattcaattagattaatatttgaattttaaaagtggttatagatatttcaaagttgttgagatattctctcaagtagttgagagattccctcataattgtaagtaaccaaattcggttatagatatttatttattcaaataactaaatatgatttaattaaaaagttttaactactataacaagaaacttgatttgagaaatcaaagcactcgtttacactattattttcaaaatatacagaggagaatagaaattattttctctctcaactattcttgcttacgtgttgagaactcaacaagaataatgttatacactttatcctaatagcccacactattttttatgtgtggtggatcaatttggaagacactggtgtgagtccaattgcattatcctcataatctgaattaagggatacaacatacaagaagttttgaggatactctgatagtcttcaagatgtatatattctaaacttgctattttatattttaatttaatgtacacacatctgaagatctattagactatggtacaatgataatcattaatacaaaaccctttcgccacgtatttgatttagtaccataaaaaccaacaagtagtgtaattgagtgggagcgttaatcatagatttagaatctgtagcttctacaatcacataaaagtaaaatgatagtgttgcccctgattttgcccaaaatacttggaccaaccggatgatgacacgtagatggaaagggtttagcgtttaaataa

SEQ ID NO: 139967 - DNA, 532 bp, Cannabis sativa
ggaatcttgaggagaaagctttccatgaggagaattgtgcaacagaagttggcgagaggaggagaattgtccatggaatcttgaggagaaagctttccttgtaccctctgcagatccatttgcatttcgaatcacttgagatgggaaagaggatcttctcttccagtgtacatcttccagattggcattttaaacttgtggggcagcgccaggagattgatctcgggagagaaaggggttccccgtgctcggttcaactcgagatcattgtttctctgtctggccatgccttcaaagatattctttagttcgtttagctgtgcttgcatagctggaataacctgttcggcattttggctgatctgagtcacgtcagtatctttctgagcaggaattatagcatgggttccaggttgcacgattgttgtgtgatttactgcttcatctgcactgagaacacatctcagccgactagtgcttgggttccccgaaccagggtaaattcatctactaattctcaaaggttcatatt

SEQ ID NO: 139968 - DNA, 1181 bp, Cannabis sativa
  modified_base (1108)..(1116): a, c, t, g, unknown or other
atgattgtttttgtgttgtgtttatatttttttaaggttgtcaccaatatattttgatgtctaattaatttacatatttaattagtgttgttttctagttgcatttttgctatatatttaattaatttttctcgcaaaattgtagtacaccaacaaaataactatacaattcaaacgacagatacaactacattattaatatgcaacaacacacatacaactacattatcaagttgaaaagctctactcactattaaaaatcaagtatgacagaagcctcatgctttacatgcaatcaaaaactaatgttttgtagtaacattgtttgttgctttatagttgttgtaaagttgtaatcacgttgtttgatttcattacttttttaaacacgttgttttcatgttgtttatatgttgaacttcagtagttaaaatttgtagaatctttaaattttatatactcttgttttcatgtttttatatagatgtattaaatagatgttaacaattataacaaagaattactaaagtttatgtatcaagtattagtttaattgtaatagttaatgtttgtttataaaaaatacaatagttatgtaatagttaaaatttaagaaatttttgaattttaacaactaaaatcaaacgtaaaaacaacatgaaagcaacatattttaaaataaataaaagcatacatcgtgtttacaactctacaacaactactaaacaactttttttatttgatactaattttcaactgcatgtaaactatgagggttatgacatcctcgattttcaatggtggtaattaatgtttttttttctttataatttaaattaagatctgtataaaaaataattatctaattttgttaataaatttaaataattatttaagttatatttgataaataaattaaatttagatatttaaaactattttattttttaaaaaaaaaataataattaattgattgatttaaagttgttaattttaaccgttaactttaatggtaaaataaaaatgaaccattaagccaacaattttcatgatatagctattagaaaaattaatataaaccccaaatcaatttgtatataacatagannnnnnnnntaatatataataattaggtatgcgtacctgattgatccataacaattacctcaattcgatccata

SEQ ID NO: 139969 - DNA, 684 bp, Cannabis sativa
ttctttattgatattgaataaaatggattacattgaaatagagttttatgcggggcataaaacccaacagtcccatactcgcacccagacccagacacaaacccgaacccgaacccgaacccagacccaagactcaagactcgacctcggacctagacttgggaccttgacctggacctaagacccgaactggaaccaaactaggatccgagaccaaaatctagatgtagatctaaacctgtgactagggaccttgggtttcgacccaacctatagtccatgtctatattgggacccagacccagaactaaacctgaactaggacccggaccctgacccggtccggtcttaagtcctagtctcagttttaggtctcgagtcctggtttgggtctaggtgtggatctccaatcaaggtctggatcttgggtctgggtttgggtctaggtctgggtccaagttcgggttcgggtttgggttcaggacacgagtctcggtccgagtttggatctaggtccagatcccaatttgggttgggtccgagttcgggtcctagtctggttccaagtcttggtttgggtctgggtcttgctataggttacagattcatagaccgactataggttgggtccaagcctcagactcgggtctagatctgaatctcagtccggttgtatttcaggtc

SEQ ID NO: 139970 - DNA, 798 bp, Cannabis sativa
  modified_base (489)..(490): a, c, t, g, unknown or other
  modified_base (651)..(651): a, c, t, g, unknown or other
tttacatttatatgggtttttaatgcaatatttttgtaaaaaaaaagtgaaaatctaatatttgtaaaacaacaataagttttgtcggaaaaatcaccggcatcagaaaagtcgccgaaaaagtcacagaaaaagttagtgttaccgcaatgtcgtcgaaaaagtcgtcgtcgtcagaaaagttatcagaaaagtcatcgaaaaagtcaacagaaaagtcaccgtcaccgaaaaagtcactggagaagttaccaaaagtaaatgtctcagatataactaaaaatataaccggttctttgaataaaaactaataactcaagctggttatgattgaaatatgaccggctctgtaacataataaataaaaataaataacataaaataattcaaaccagttataattaaaatagaactgattctataacagtgttataatgaataaaaactaataacacgaaataactcaaaatcggttataactaaaatagnnccggttatataacataatgaataccaacaagtaacacacaataattcaaaccgattacaattaaaaaataaagggaaatcagctcctaaaacactgaaacatcaattaaaaacaaaactagttctacaataaaaaaacctcataacacataatacctcatnaaaccgattataattttttttttaaaaaaaactagagatccatttcaaaaaatattgatgcagaaatatgaaaaaaaccaattccataacaaaataaataaacacgaataataacacacaataactcaaatataatataacgaaacc

SEQ ID NO: 139971 - DNA, 590 bp, Cannabis sativa
ctctgcctcattcatgacattatccaaatttggaacatcaacttctaaggccctttctatatgggaaaatgtactttaaaagacaaaaccatcttattcaaataattgaaaagacaaactatcctatcgcaagtgcttagaaaggaacacgccttctttaaaataaacttagtactcacttagaatatacaaaaataaaagaagtaaagtacacagaaagagtaatatgagttttaatacacctttcctgaatcatcttactaaattgataccttaatcgatacgctcacccaaaaatttgaaaatatggcctcaacagatatgaagattatagtttctcttgttcctctaagatagacagatggaggaaatcgaagagaggtccaacgacgacttgaatttgggtttcaatgatatcgatatgcagaggacaaaacaccttttctattcgattctatctaacaaatcgttttttttttgggatccggtttcaatttacacggaacaaaccattgcttttaattttttttattcaattagaaaaacttaacagattgttaagatgattatttttagtttcgataggtggc

SEQ ID NO: 139972 - DNA, 1022 bp, Cannabis sativa
acctagaagccatagaagcttggattaatttcttgcttttctttagcaatttaaaaggttattggtgagaaaatccttagggataggaagcaacagctcttggtaagcaagttatcttctcttcctttgaattttgtaattttaagtttaagtgttcatgcatatttgaggttacggtattgtaggtgtaattcaagtttagttttgacttctgaggttaattgtaagttatttaagctgagttaggttatctttgttgcttggtgttgtggatgagcaaggtttgagctttagagctcaaactttcctcttcaatggtggattatgttgtagagggaattgtgtggctttattgcttggattaagtttattgtggccttattaggtggtctggaagtttgggtatgttttggggttgaattgaggtatttttgtggtttttggagattcctctactgaatcggtcggttggtcagttcagtatggacctgtaagaactagaattccgattcatccctaggtagatccctcaaaacaggttatccgattggaaatcggtctacaagttggggcagtttagggcaccctaaattttcccctttttacgatatttagggtattgtcatgttatccatcgatatggaaacttttagttttaattttaaaacctcaaaaagtgatttagcgtgtcacttacgagtattgtgacttaagggcctgttagtcatcaagtagcagttccactcaggttgaccgacacacttgaattaggaaacgagataagattagtataatgatatgcatatgtgattccatgtttaacgtgcatgtttataaagccagttagattacattgaaatagcagtattgatatacatagagttgtattggatatcgataaatgatcacattggtatgacaagagtactgagtatagattgatattatggtcaatagtattgtcgtacgaacattctagactcagtattgtgtaggatgcgaggatagggttatggttgggt

SEQ ID NO: 139973 - DNA, 520 bp, Cannabis sativa
  modified_base (48)..(66): a, c, t, g, unknown or other
atcgttttagaaagttcatatttgggatgtttaaacaacatacttgtnnnnnnnnnnnnnnnnnnngtaaaataattcccaacagaaacatctttatctttttttttcttttgagaataaaatcttttaaagctttttagctattttatttattttttgcttaaaaaaagattaattttggctaataaacaattacattgtatttgtttttttttatataataatgttagtgtttggaatatatataatgttctacttttgtaaaaatggttgagtagagttgaaagcttaacatttgaattgatgtagttggattggtctagccgcctttttttgaactcaaaatttagcaatcagacacgattttaagtgagaactattctctttttcataaaggtttatagatgtttgcttttagggcccaaacagctgaacaatgttatatgacctgaataatggtgtatgcaaatagcatactatgaaaatgtaataatgatatttcttttatttttgtactatt

SEQ ID NO: 139974 - DNA, 891 bp, Cannabis sativa
  modified_base (844)..(848): a, c, t, g, unknown or other
tgcactgtttgtttttctggtttattctggagttacagaattgtcttctgtagctacagaaaaactgtttcagtaccagttttattattctgcacttaattaaataataaaattagaaatattaaatacggaatttcagttcacgtgatttgttttatgattatatgtttaatgtataaattctattaaatccagaacatataattattctggattatagttttgtcaaaacagtggaatataatcatgattatatgtttcaaagttaaagtcccataatttgtcagtacactggattacactgacatgataatctgtgataaagtttacttacaccatggataagtgttatgtcctttccaagacattagaaaaatatgctaggatcatatgtatggagtatacatcgaacaagaccaatattgacattagataagatattataaacttactgttatatttatctaagtcaatatcacttagttgatctcaggtcaatagatcttaatcctgagatggttaggttctagcttaaatgtattatttatgttctttgagttgttcgttagagctgaccaattggatcgacctaatactcacatcttaggaacatagtagtacacctgagtgggagcgctaatcatagatatagaatctatagcatctataacttctagaagtgaaatgataatttcctttgagcttggcttaacgcgataaatgattgaggtctcatttcagtaattattttagtttattgaaatatcatttacaattaggtaagtgttaaaaggataaaatatattgaagggtagagcgataaatttgtccctattcgatgtannnnntctatagaagatctttgactatttcaattataacaatggataa

SEQ ID NO: 139975 - DNA, 585 bp, Cannabis sativa
tttacatgggaagtcagaatgcgtacaaccaaacatacaagcaacacccaaacttggcatacataagtcaaggggctggtactagcaattcagctatgcctcctagatccaacttaacacatgatttttctcaacaagccttttaacaaagagctcaacaaggtgtccaaacaagttctcttaagagtatgatgtgcgatttcatggtcaagacaaaaaatttaatgacaagaactgagaattatatggcaaaaaatgacagtgcgatccaaagtcaagaaacctctatgagaactctaggaaatttagttggacaactagctaatgagcttcgaaataggccacaaggtactttgtctagtgatattgaaaatccaagaagagatggcaaggagcattgcaaggcagtaaccttaaggagtggtaaagatctggagtcaaatgaggaagaggctaaggatcaaaataatcccacttcaatctaaagtcgagtggaaaaagaaaaaaatgttgaacgttctaatatggcaaaagagcaacttgaagaaaatgctacagcaattcctcatcaaaatgcagcagaaa

SEQ ID NO: 139976 - DNA, 515 bp, Cannabis sativa
  modified_base (277)..(278): a, c, t, g, unknown or other
tcattttgttaatatattttgggtgtgttcggtaactattttaaaaattattttttgtttttaaaatttaaaatatgaaaatacaaataaaaattgtgttcggtaactctattttattttttgtttttaaaattaaaaaaaaaatagaatggagtgaattttaaaaataaattttgaatgattttaaaaaattttaaaaatacttttatcacttgtgcttctctctcgttaattacccttcaaaagagtttccatggcttcatcttcaccattacanntaaatctcttcctctctttatctctatatctctctctatatatttatatagctctctgttccactctctatatatctcgcctctctctctatctccctatatctaactaaggaaccgtgtagaaattcggttatttcaagacatgagtatgtaatggaagtgttgcatggtcacgatagtaggtgttatgatttattcagaatggataaggacgtcttcaaactattttgtggtgtt

SEQ ID NO: 139977 - DNA, 713 bp, Cannabis sativa
tggtgtgccacccatagatatataatgactatgatccttgatgtcttctcttgtaaatattttttctttgaatttaccgtaacttttcgaagaagaaaatggatctctaaatccaatctcaatggtcccttgagcatcactaggaccaatagcatcattggtctctctagcattattagaacctgtattgtcaatggttcctctagcattactggtttcgcttggacgactactactagtaccaggtgtttcacaattttctctacggggtattcttttccgtgtcagtggcctgggtggcattttgtacgatagtggagccaagttcaaagctacagcagcagggacctctatatctcgatcatctcttacgtcatcagtgccctcaacacagcattcagggtctgcaccatcataaaaaccatcaatgaagggcatttgcgctataatatccgcacttgacatcatagtgtttaattcaagtaacacatcgtcaaccaacacatctggatttgtttctggaacaaaactcccaaccttgctacgagtttccttaaagaacttggtatgagactaggatcgacacaaacattcttttttaacaaattctcaaataagggagtaaattcatctggcttcttcgcaagtgtagacaaaaagaaccttgcacgcttatcatttccaataagttcaaggtgatacattaagccttt

SEQ ID NO: 139978 - DNA, 931 bp, Cannabis sativa
ttatctccaaaagtcggattaggttgaagccggttagagtagaaaatagtgagttgagtactgacctagtagaactaaaattagtggagttcaatgtcattctagggatggatttcctgtccaagtattcgaccagcattgattgtaagcgaaaaatggtaacttttcagtcggagggcgaagttccatttgtctatgttggatctgttcaggggtctaaaatcccaattatttcagttttaagagctaaagattttctatacaatggatgcgtaggattttttgcgattgtgtttaactccagcagacctgaaacatttgggcttgaagtagtcagaattgtaaaagaatttctcgacatatttcccgaggagttaccgagattaccgcacaacgagaaatagattctataactaatttggcacttggtgtgggacttgtttcaaaagcgctatacaggatggtttcagcaaaacttaaggagttaaaatacaacttcaagggattcttgatttagggtttacccgacccagtgtatagccttggagagatctagttttgttgtgaaaaagaaggatggttcccttcaaatgtgtattgacaatcgagaactaaacaagttaacgatcaataatatgtatttgttgcccatgatatatgatttgtttaattagcttcatgtaagtctgaattttctaagattaacttgcgacctggttattattagctcaaaatttgggaagaagataatctaagaatttcattttagaccaattatagtcattatgagtttttggtaattgtattcaaattgataaattctctagcggcctctacggatctcatgaatagagtattcatgaatttcctcaataatcgtactatagtggttatcgatgacatccttgtgtactctcagatagaggaagag

SEQ ID NO: 139979 - DNA, 658 bp, Cannabis sativa
  modified_base (592)..(632): a, c, t, g, unknown or other
agtaattaatttacaacgacacgtcaattgtgaaatgataaaaaacaactaaagctaacaaaagtactatatttttgtaaataaaagagttcacaaaattttatcattatgatgtacattttagaatatacaatttggtagtatcataaattttggagataaagtaataattattttttgaactagttgtgcttaaatatttttaggagcacacacatgcgaagcatgtgagacgccactagttcttttaaaaataaaaacccctaaatcccactacactcaaataggacacgcgggacataaaattattccttaactctttgtattttttgttttttgaaaaagtataaaaagaaaaaatatatatagaagattaaagaaactcccaatacactatcacattttgccctattttctctctttcttttgaacgagaccaaagaaccaaactaccaaaagtgaggagagcagaccttcctctccaatctccaccattcttctattgcaatttctagactcttttattttaaaagttatttccttgaattgcttggtttgattttgaggtgggcatctgttggaaattattttnnnnnnnnnnnnnnnnnnnnnnnnnnnnnnnnnnnnnnnnncctaaatatgaactttttaaaacaat

SEQ ID NO: 139980 - DNA, 630 bp, Cannabis sativa
  modified_base (591)..(604): a, c, t, g, unknown or other
aaaaaaaaaaacataaaaacaaaacacaacataaaaatgaacaatattaattacaattttacgaaatcatatttaaaaattcgtacatttctaatttttttttattaaatatgaaatgcgttatattttttttttagatatttataaaatacctatctaattcaattcccacagttcaatttaattcaatccgcaaaatatggatatgtgcatttgtgcggaatggattggattgaaaaatctaaattcgtacttgtaaatgttgattgatatgtaaaaataactgatttaatctaatccacacatatttagatatatatttttttaaaattatatatgtaactaatatttaaattaaaaaaatctaataaaatatatttcaaaatataataaatcaaatgtatattccattcttatttataaggaaaatataatctaaaacaaaatttaacttttctctatatgtataattttttttttctaattactttaaatttgttatttatttgtttcatttatttatttttttgaaaactttgtttcatttattttaatttattgttagaaacataaaacaataatatttttttnnnnnnnnnnnnnntaatttaatattaaaaaataatcaat

SEQ ID NO: 139981 - DNA, 587 bp, Cannabis sativa
  modified_base (368)..(369): a, c, t, g, unknown or other
caagttgaagcagtcaataagaccttgaaggatacactaaagaatagactcaaagatgccaaaggaaattggccggaagaacttcttgaagttttatagtcatatcgaacaacttagaaaacggcaaccggacagactccatttgccatggcatatggatatgaagctatgttgcctgtagaactcgagccaccttcccacaggagactggcatacaaccaagatatcaatcacgtactcctgggcgaatcacttgataaattcaaagagaagcgaaccacgacaaacttaaagttgatagcccatcaacaaaaagcagctcggtatttcactaaacaagtgaaggctcggaaattctttgtgggagnnatggtcctaagaagggtatttctaaacaccaaagacagtacaataggtgtactcggacctaactgggaaggaccatatcaggtggtcgaagtcctcgaatccggaggatataaattcgataagtatgatgaaaaaatgcaacttgttctagtaccacggtattggaatggggaacatttaagaaaatactaccaacaaagtaccaagtcggacgacca

SEQ ID NO: 139982 - DNA, 509 bp, Cannabis sativa
  modified_base (484)..(484): a, c, t, g, unknown or other
actaaaaaaggaacaaaaaaaattctaaaatagacacttcatcataataaaactagggcaaagaaagaacaatcctatgtatgtattttgtttggaactttgaacctagtgtatgtggcttgatttcattgactatcatcaaatgatgatttaagaaagagcattgctattaatcactagttgagtggtgcttagtactttctagacgtgtcgtcttacaattagctagcgataatctctaaaaattattacattaaactatataagacatgatatttaattgcacaaatagtgatattcacataaaaatgtgctaggtactactagaacattttaacatttctcgtgatgaaaacaaattgatcatttatactttttattagctttctttagaaaatttatttggcccctcttaaattttctttttgcaatttggccacccaaatatcactacaaaaaaatttatttttagtcacaataaaanttgtgactaaaagtaaaaaaattat

SEQ ID NO: 139983 - DNA, 719 bp, Cannabis sativa
aattcttggtgagaatatgaactttagtagtcaacatcatttgaatgtcggcttctatctgagagagatgactcgatagagcagtggatctcattgaaaaatgtatggagctgattagtgccatgagtatgccttcctatagcgagatggatgcctcgctattcgtcacttaggttcttccagctgtgatacttagttagtacaatgtatattatacgctaagtgttctaacagtcaacatgactcgtcatcacctttttatacgcagcgaggttggtgcctcgctatgcattattgatgtcatccttatgattgtgtcttctaacgcgaaatgatttctcgtcaatgcgtgaatcaatagttcgtacatccttgtctcgcttaagactatacagtcaacaagttatagatatgttctattaactcttaatttaatgagttattccattttaatatgttttgatataattaccattatattcgttgacacgtgtcatcctctgaagtgccagtcgaatttcgtgtataacagatatatatattttaacaactgactttgtagaaatatatgtgtataataaataaattaatcaataattataatatttttttttttgaaatgaaactttattaaacaacaccaacaaacttacaaagaattggagaggtcagccttacaaactatagctaaccaatccggaaaagaattgtaaaaagaa

SEQ ID NO: 139984 - DNA, 952 bp, Cannabis sativa
tcttggtggtgctaggatgcaaggcgtatggagtggtatgagcctcttcaagaatctcatttctaagctctgtactacttggaacacaaaccctggtcttaaataacaacatctcactatctgaaactgtaaaatctctgacttgaccagttgaaacctcttccctgatctttactaattatggatcagttaactgagcaactttaattcgttgtaacaaatcaaattgtagcgtcaagttatgaagtttacctacaacaaactcgatgcttgattggaccatgtcctctgctaactaatgtgaaatctgaatcatactagtatctgcccgggacccttcctgcttagggcatcagctactacattagccttcctaagatggtaaaggatttaaatctttctgagtaaaaagaaatatttgaggctcctatggtcagtataaatttcacctctctctatagagataatgctgccaaatctttaaagtaaacactaccgcgacaagttctaggccatgagtcgggtaccgctgttcataatctttcaattgacaagaggcataggcaatatcccgatcgacctgtatcaatacacaccccagaccctgtctggatgcatcacaataaaccacgaacttttccttatcaaaaggtagggctaacactggaactgtgattaatctctgttttagctcctaaaagcttgcttcgcacttatccttccacacaaaatcactgattctttttattgagctcggataagggtgttgaaattttagaaaacccttctacgaaccgacagtaataaccagccagacccaagaaacttctaatttctgtaactattttcactctcgaccaatccctaacggattctattttccccggatccactttaattccatctttgctaacaatgtgtccaaggaaggacacttgagatagccaaaact

SEQ ID NO: 139985 - DNA, 557 bp, Cannabis sativa
  modified_base (78)..(80): a, c, t, g, unknown or other
gatattaaagagtatacaaatggtcccaacaatggttgcgagaatgagtcaaaaaagtcaaaagggtgagaatagaannnaaaacaagctcagcaagaacaacaagaacaactttaatctttttcttcttaaaaagattaagaagatgattaagtatgtacactcaattacaagaccagacccatttatagtcacaaccgaaatacttcctggataaataaaagggagcccataaagtgtccaaacaagacaatttataagtgtagccaagtatggcacaactaagtattggtccattgattttcttttccatatttgaataaatgttgccctataattaataataataattatttaataagctacattattaaccacctttatatttgttcatcattattatgacataataatgagggccggccctgaaaaaatgggggcctaagacgatataaaattttggcctcttaataaataagtgggccaagtaatacgattcaacaataaatcaaatgataagaaaaattgcataaactccacactcttagtagtaatta

SEQ ID NO: 139986 - DNA, 895 bp, Cannabis sativa
tccactttcgaaattcatagaatcaaatcaatgaggaaagatcctcaacacatattataaataaataaggaggcaatggatctccttgtctgatgccacaagttagaaagatatgccccatctatctaccaccatgataatagtataagacactgaagtgacacaagtaagaatcaaatcaacccatcttttcgtgaatcccatttgaagcaaaattgcacgaagataaccccattccaccctgtcatatgccttactcacatccaacttaagagccacactaccctcccgacctttcctttttcttttcaagtagtgcatgacttcaaaaaagaccataatattgttagagattagacgagccagaataaacacactttgagtatcagacacaataacatccaacaaccctttcattctactggaaaacaccttagtaatcactttgaccaacacattacataaagaaataggccgcaaatcccccatcatagaagggttcttcttcttgggaatgagaaccacattagttgcattaagaccctccgagagaacaccacaattagaaaaatctcgaaccatcctcaccatatcatgaccaaatatctcctaatgtttttggaaaaaaggagaatccataccatccggtcccaagctcttgtctaggtgcatttggaacagaggatgcttcactatctttatacttgattaatcactttaaaattcattttagcctcaattatgcaatccaatttttagtaaacaacctactttgtgatccagcattcactaatcactcaaatacatgtccattagattgcatcttaatttataagcctttctcccaagctagggcttaattgtgaagaaaagagattctagagtttatttgtta

SEQ ID NO: 139987 - DNA, 555 bp, Cannabis sativa
  modified_base (26)..(27): a, c, t, g, unknown or other
  modified_base (489)..(492): a, c, t, g, unknown or other
atggtttgatatttttaaaattaatnnttatagttaaatttgtttagtaatcattcatgggtaatatccattaaaaagtgttctccatatatatattttatatgtacaataaaataataaatttcattgttatacctatcttatacgtattatattgacctctgtattaaggattatattatttgaaattattttgataaaatttgagtttgtttcaaaatacattttatgtattatgtataaacatatatttttaaaaaataataatagtgatagataaattcttataatttgtagttaggagagtgcaattataataaagtgtacaaattattaaaaacatatatattattaattaattttttttgaacaatattattaattattttaaaataaaaggtttatcatgaaattaagatttaaatacagtagaatctctatccaagaatgtactagggaccaagaaaataatattctaattgagaggtnnnnactaaatagagttacacttgaaaaaaaatatcaatgtaacaaaaataccaataaacaattctt

SEQ ID NO: 139988 - DNA, 649 bp, Cannabis sativa
  modified_base (178)..(182): a, c, t, g, unknown or other
  modified_base (275)..(278): a, c, t, g, unknown or other
ttttttttttatcaaaaatataattttttttaaaatttagtataattttttgacttaattattttaaaataaaatacaaccgcacgcaaagcgcgatttatttcctagtttatataatatatgaaacacattttaaatggttattaatagttaataaataaatttaattataaatatnnnnnttaaaaatattaaattattagattttaaatttaattcattaatgaataataaaagaaaaatttacatttatatgcttaatttaactacttaannnnaaaaaaattaaaaaaatatctcttttttacattatatcaaaaataagtttatttattattttttttgaaaaacttttttcttaattttttttagtcgatggaacaaccctaaccatcctagggtctcccatttatcccaataaaaagctatccaaccacaccagtcccactcctcgaagggaacccaaactgcatccaaccagccacaccatttatcccaataaatagctatccaaccacaccagtcccaatcctcgaagggaacccaaactacatccaaccagccacaagggtcgcaggctctccctaccttgcccaggatgttggatttattttaccaggatctagatttactaacaagtatgtctcat

SEQ ID NO: 139989 - DNA, 1698 bp, Cannabis sativa
  modified_base (280)..(284): a, c, t, g, unknown or other
  modified_base (368)..(374): a, c, t, g, unknown or other
  modified_base (1268)..(1274): a, c, t, g, unknown or other
actctcacacaaggcccaaagaaaaggaatttaaccttaagttaaataattgttattcattgaataagcccaatactaattggacataaataaactatcaaaaatgatatttcattttagcaacctaatccgtttaaatatctagaaataaatgagcttcttaaatgcatctaagcttaaaagcaaacatataggctcacacaagtcaaattgatttggatgggccctatcacgtttctaggtttacacagatgaaaaaaatacaaaatttacctgttannnnntatttataagatctattgacaataggactatgattaaaatcagataattggaactgtcaataagttaatcatagcaatttagannnnnnnaataataggtttgttaattttttttaataaataaataaaacaaacatgcaacaaatatctagaaagtaggttaagatatctactttaaaataatatatttaaaaaatgtcttaactagaatttaaatttaagttgttagacaaatatttgaaaatatttaaaagctaacaaatctcctaaatatctaaaattcaaagatgaaaatcaaatatccaattaattttcgcattttttaatttatttaaataatttaaagtagttaaatatctaataagataatataatataatatcttaatttgaaaattgagatatttctcatattatatttctaatcttataatttaataaaataaatttaacaaaataaataaaattgaaaataagatattttgacggttaggatattatcaatcttatttaataaaaataaaataaaataccctaagtttgaaaatttaatggttggaaaatcctaaaatatttattcaaaccaaaattaacaacttttcaaaatttcatgttattttcacaaaaaaaatataaaattttaattaaaataaatatccaataagataaaatgtcaaaactaacatttttctaatcttataatttaatttaataaaaaaatattttaaaaataacaaattttataaatctgatatggttagtaaatttaaaattctaactagattatttctaagttttattagtatcttaatatcaaaataagatcattttaaattttaataataaaatagaaaatatctgatcttataatttaaaaaaataaaacaaacagaaaataataaaaaaaaatcaaaattaaccatacggctagtttgtggaaaaatcaaattttcaaactcaaatgctactaatatctaaaactaannnnnnntaattaaaaattaataaaaattaattttattttgagaattaggtttttatttaaaaatttggtttctacacaaaattctaccaaaatttaaattttatttcattgaaaaataatttttgaaactcaaaatatcacaaaaacaagtttggcacagggagtatgcatatgcgcgccaaagggagcaaatggggtgaaatgaggctgcatgcagccttcttgaggggaaaaactatgttagttggggcttaggacagcccttgtccaagaaactcggtcatgggcttgtctgaagccgtgtgaaggccgagtgatgcttgtccgcacacgcacatgtgcaacaggtttgagatatttttattcaaacttcaaaacatcataactaattcaataaaaattcaaattgagttctgtaaaagcctaaatt

SEQ ID NO: 139990 - DNA, 612 bp, Cannabis sativa
ttatttgtttcggtatttagaaaagtttttagtgaatttttttttatgattaattatatacgttttagttatttaagattacgtgtaaacttttagaaaatttcaaatagtttacagtgtcaaaaataagattcaaacagttacttattaattaccacacatataaaaaaaaaatggtcatgcgtacaataaaatatttaaatcttattttcagcattgtaaactatttagaattttttttaaatctacttgtggtcaaataattataacgtacactatcattaaaaaaagacttagaagctcttgtggaagccaaaacaaataacaggtctattgaaacatttattttagtgggtttactaacttactctataatattgtaagaaattgtaaatttcggtatgtatgagagttttatagtttaatttttttcctaatcctgtatcttgctgtttttaaagtttacagtatcgaaaataaagtttaaataattacttaccacacgtataataaaaaataattacgtatggaacaaaatatttaaaccttattatcattattgtaaactattcgaattttttaaaaaatttacatgtaactctaaataaatat

SEQ ID NO: 139991 - DNA, 735 bp, Cannabis sativa
tttttaaataaaggataagctgatatttatcaaattaaacttattttattcttcatttttacaaaaatagaaaaattagacataaacacttatctctctctttcaacctctctctccttcgaaccccctagactagctagggttcttgattttcctcttcaatccagttatttccagcagctcatagtgtaatccaagccaaggtaaagtctctagcaacctcctctttgatttcttgaattgtaagaaaaggaatttttgcatgaagtgaggttttagttgttgttctcactgttgttgtttgtttttgttttcagaggttaaattatgtttagataggttgaattgagcatgttttagtggctgtgagtaggtttcatcaagttttgagttttagaactcaaacttggagctttaatggtgtttttcaattctgagcttgggtagttgtgttattgcttgaaaaatatttattggggtataatatgcaggtctagaaggtttggttaagtttggaatcaatttaattatggtttaaagttttttgggttttctgggtaaaactggctaaccggttttacaatacctgtaaaaccggttacccggattttgcagcaggatttcccaaaaaattcagctcgtcgattcgttcaagtttcaggtttctggttggttaattccctgctagtttagggtatttccatattaagttgcagtagataggtttttggttta

SEQ ID NO: 139992 - DNA, 580 bp, Cannabis sativa
ggtctccgatggtttcggggctgcccaaattttcaaggccttggctgagctctccaaaggaaaagaactctcggtgaagccagtatgggaaagagaaagacttgtgggaacacccatcaaggagcctctcaagctcagcacgtgtcctcctgccaagtcaccttacatgccctcttctgacattgtagatgagatcttttacttgaagagtgattgcttgaaaagactcaaagaggagatcatcagtggtggttcttctaataatgttactacatttgaaatacttgccgccttcgtttggaaagccaagttgagagctttagagctcaatcatgatgggaaaacatgtctgtatttcgctacagggctgaggaaactcatagatcctcctctgcctgaagggtattatgggaatgcatttttgacatctgcagtggaactcacgggtggagaactagaagagaaatctctatctgaaatcgtgaatatgataaaagagaagaagaaagacgttttggacaacaactacatcaaaaagtctattgatatttgtgagacaaaattagctcacggtgataat

SEQ ID NO: 139993 - DNA, 771 bp, Cannabis sativa
aaaaaaaaaaaaaactttaatttacgggcatcactattatggactatcagtgattttccaacatatgcgaacttatcaggataaggcacaaaaggaaaatatgcatgcacatgttgtcatcaagacacttattctttgtggttgaagtacagtaaaaaaatattgctatatgggtcactgtcgttggttagaaaataaccactcatttagaaacgatgaaaagtattttgatggtacaaaatagaaaagaatggctccaacacttttaattggtttaatgatattggatatatatgttagaaggctactaaattaaatttgggaaaacagttgttaatccttaattgccatatggttggaagaaaaggagtatattttttgaattaccatattagaaggataatgtattaagatacaatcttgatgtgatgcatattgaaaagaatgtatgtgaatgtttgattgagactttattgagtttagattcaaaaaataaagataatttgaatgtgcatcttgatttaaaagttatgggtattaaatctaaactttatccaaaggagagtgaatctaagagaactatcataccgcctgcttgttttacattaagcaaaaataaaaataaaaataaaaattatcttttgtcaatttttagagacaattaaggtcctaaatgaatacgctgccaatatttctagatgtgttaatgtaaaacaacaaaaaattcatgggctcaaaagtcatgattttcatattattatgactcaatta

SEQ ID NO: 139994 - DNA, 959 bp, Cannabis sativa
  modified_base (834)..(838): a, c, t, g, unknown or other
gagttttatttagggcacaatgcccaacataggctattaccgaactgcttagggtcgaacctctataaaactcttgtgtctttatttattttgttatattacatatatactatactacttgtcgcttacaatcaagactcactgtcgttggccaaaagcgaggtcaacacaaatatactctgatacttacgtaattaatgagttattccataaaaagatattgcatcgattcacattccctttatcttgacacgtgtcctccaaccgaattttggatataacacaacgtatcaatgattggtaaacaaaatgttcgcaaaccaaacagggcaaaatatggaggtttacgtcgatgatatgttagtaaaattaattaaagtagggatcatacctcagacttgcgaaatgctttaagatactaaagaagtataatatgaaactaaactcgaaaaaaatgttcctttagagtttccccaggaaagtttttgggattcattgttaatgcgaggggtattgaagcaaatcctgaaaagatcaatgcgttaatagacatgccatcaccgacaaagcctaaggaagtacaagccctgacaggaagaatggctgcacttaacatattcatttcgaagtcaactaataagtgtgtaccattcttcaatgtattgcgaggcaacaaaaaatttgagtggacagaagcgtgcgaagaggccttttagaacataaaaagccacctagcgacgcctccagttttggcaaaaccaataactagagaaacgttgttcgtctattagccatctcagaagatgcgattagtgcagctatagtgcaagaagnnnnnaagcaccagcaacctatttactatgtaaataaaaggttagtaggggtagaatccagatatccccctctagaaaaactcgcgttgtacctagtccatgcgtctcgtaaactacgaccatact

SEQ ID NO: 139995 - DNA, 1060 bp, Cannabis sativa
gattagattgaaatgggttttatttagggcataaaatcccaacactaacttgtccatcttggaagaagtcttgtggaatgatagttgagtctggaagagagttcctagatgactatcatgtccactccgagttcagtctttaggatagatagccctcctttggaaaggagtttcggacagctaattatttttcttagaaggcagttctagatagtcgattccagctggctctatcatatttgaaagcctcttcaacgagtgcctttggtctgtgatcccgaaagctcgtatatattctcgggcatactaagactaatgtcgacgtggagatctcactcataggagagttggttaagttagttattgtctaactaacttaacaacttcgtttcttgtagccactgactttaggatcttgatcctaaggctataaataccatccacacttaatcattttggaggagaaaaaaaggtcaagtgatttagattgagattgagagttagagagagaaagagattgagaggtagagagagaggtactgagaagaaagagagattgtgtttgggttttgtatgaagaatcttctatagatgaagaaattcttatgtaagagtgtgaggattgaaacactttgagagaactcaacaaggaatttgtcttgactgtaatgtacctgttcttgctcaatcaattaaggagatttggtggtgctctagaactggagtagagccatagatcacatcgatctatcggacttgaaccagtatatatcttgatgttgatttctttatgttctacatttattgtttctagtttttaatactctatttgcatttgtttttcatccgattattattcttgaattgttaatcgtgtttttgctaattgtctaaatgttaaagttttattgatttatttttgcactgttagttgtaattttcctacataaattaaggagaaagagttagagtttcctgcaaactgctgtaaatttatcaatattgccttttgaggctaatagactaggggtgttcacaaagtatccgatccaatccaatc

SEQ ID NO: 139996 - DNA, 638 bp, Cannabis sativa
atttagggcacaaaattcaacactatatacccttttgaagcttgcgacaagctcaatgatatggtatatggtatatgtatttgtattacagggttcggtaggaaactctaagttgtcttttacaattgttaagcagtattttggaataaatacttattggtttatcattgttatgacatagtgcccaggatcatcgatcgttctccaagaaggtcggccaacatacctgagccggaacttgaggtaagaaaagtataatgtaccacatgttatgacaggttatgtaattgtcgattacccgattaggtattgatgatgtgataataccatggatataatatatgggctcaacttattaggtgatgcgttatacctggctgagtttgtgtgtctcacgggtgttttatggtgcaggtaagggcaaggaaaagttagagcagctatgactctctctagaaatgtacatattgaccccacaggactatgtgccaagttgctaggagttgttaggactgactgtatttgttgtgtattttgattttgtgttttgcactgtcgtcgtatatagtcttttgtaaactttttataacatggatccatataacacctttttattgtcgttatgatgtccgttttta

SEQ ID NO: 139997 - DNA, 1589 bp, Cannabis sativa
aagtaatattttgttgtaattaaaagtcacatttagtcacaaaaaaatcatgttgtgactaaaaagttgtcaccaaaagtagcagttttttgtagtgcgacatggaacaaaagcgctatgtgtggcacttattacctttgagagaaaaggctttagtctgttgattaaaacttttgagatgattttatataggacattgcataagcttatcggtcgaaaatcactgacggatgttggttcctttattttgggaataagagttactattgtagaattaatcaatgataaatcttcatttctctcaatacaatctatcacggtcctggttaccaatggtcctattatatcccaatactcctggtaaaattttgcattcataccatcaggtcttggactttaatctgtagacatggaaaacacagcctttcttatctcttcgactgcaaacggttttcttagtgttgagttcatttcttctgttactacaggtttaactacttgaagtaactcctcaattgttggtaaagatggggttcctgttgtgaacaattgtccataaaaatctgtgataatcttggtcatatctttaactttcgagcaccattcattattcctatttaaaaattaaaaggcctaccatgaaaacaaatattaaaacttaaggaaacaaaattaatgttacatagttttttaaactttctcaattcacaaacgccaaaactatatacaatccgagaatcctaccaaaatataaaatttattttttccataaggttcaccaaatattaaagtacattactagttgaaaacaaaacagtaatgtaatttatttacattattcttcattgaatttttattagcaaaataatctttaaaatttcaaagacaatttgaattaaattcacgaaaagcttaatcttgtggcaataaaatttttctaggaaaatttaaattggtcattttatgtgtttagagtggaaacacaaactggtgtcataatttgtaaaataatacccattgaaacaaattttataaacattaatttataatacaactagatttaaaattttagatccaataactatttttatgattacactagctttatcaaattgtagacaattatttttttattttattattgttttaatagttgtattcagttttatcaaaattgtgtatataactgcatataatttaaaatatttcctttttaattttatgttataaatactaacacctggatacaaactttaactttaatttattatttaattaattaattctatagcccatgatttagtttagcatattttttctattgaaaagaattatgcttgttttcaagtagttgttacacaaattacaagattgacttcataaaatacaaaaactaaaatgaattaactgaacataaattcacttttaataaaaactaattttgatattaattccaaactatacctatccacattattaataatattataacattcatcctcttttttattcaaacccatccctttaatttcaaaatttatcaagacattctaacacaaaaactagtatttccaaattgtaattctata

SEQ ID NO: 139998 - DNA, 607 bp, Cannabis sativa
agagagagagagagtgagtgagttagggagaggacgatatgggggattctatttttatatatatacatatattttattataattatttatttattattatatatatttcttttgactcggtcaaaaccgagcctttacattctctcctttttaaagaaattttcttccgaaatttcaaagtacaacctcaagttgaaaacttaaacaagtgaggatactttatatacatctcagactctaactctgaagtagcttcgtcttctttgtgatttttccataagaccttgactattggaatctctctattccttaacacttttagctctcgccaagattttgactagttgttcttcataaatcatatcttcctgaagagggatagcctcataataaggatcggccctgagtagaaattggccatatataaaaaaaaattgggctcttatactataaagataaatgagaaattctatggtagtgactatggttttgttcctatatactatgcacacatctttttagccattgttttatatgacttttaaaagtcaagattgtataagatgtatatgtttgtaggttatcaaaatttctttttttttttttt

SEQ ID NO: 139999 - DNA, 513 bp, Cannabis sativa
gaaaaaggccactggaaaccccaatgtcttaagtttttggcaaagaaacaaggtatttctatcaatgctataaactcatgtgttttaaagaattttatcctctttggttatcgattctgaatctaataaccaagtttattttcttcttatttcagctccagctgtttaaacttggattgatatcctagcgagttgagtcggatggttggacagagggtggagattgtccaggattgaagatgaagctcgaaatcttctttaatttttgatttaattgttttaatttatgaacaatttagtttaaattattaatttgggattttatttcctatttcatatttatgcagacaattcattatgacatttttgagaattttaataaaattttctctttaagaaattttttaatgaattaagctttatgttaactttatcttgtatatgccaataccaattatattttatgtttattatgttaaaatgcgtttgtattttattattgatgcaaaatct

SEQ ID NO: 140000 - DNA, 655 bp, Cannabis sativa
gacacaaaacgacatgtcgttttgagacagataccagaagctaaaaacgacacgtcgttttgaggaaaaaccgaaagccaaaaacgacacgtcctttttttgatgttcccgtagccttgaaaacgacacgtcgttttttgactgttcccgaaggctgaaaaacgacacgtcgtttttcttcgtccctttcgcccagaaaattcccgtgggtctgaaactcgggtcacgtgacccagttcgtgacccggccataactcccacatccggtcaccaaattcgacgccgtttgaggcgttttgtcctatttttaatcctctatcatttttcaatatccatttactcaacaaacacagaataatacatcataaaatgatgaatctaaaaatgggtttttccattgttaaaactcatgtatttctcaatggaaaaagtaaaagattgtttccatgacatatatgaacacatttagaggataatactcatattcacacaaccttaaacacattaatccgaaaaaaaacaatacaaattgcagatttgaaaaaaaaaattgtgaaaaaattttgagccctaaaatcaataactttggctcttgataccaattgttaataatgattactcataatcattaaagccaagatttagtatttattta

SEQ ID NO: 140001 - DNA, 515 bp, Cannabis sativa
aattgttaatttacacatataactcatataagagtaatcgtaatagaattattgctattataatgttatttttttttttttgagtgaacattattgctattataatgtttatgtataacaaaattaccctttgttacatggaagggtataggtaagtagggctggccttaagtataggtgcgctaagcaaatgccaaggggctcaaaataaaaataaaaaagtcttattatacttatatttaagtaaaattaagtatattgtaaacaacaaatattcataatttagttaattgggttgtattttagtctcatgattctttttttataatatttgtatatatatatatttctgaaagtgaatgtcccaaaatttaaatggcggtcggtcctgagtataggggcttaatagtaaattattagtagtgtttagtttagcataaatatgtaaagtcatttcacaaatggataaggaatgaaatgaacgaaaattagaagttatatatcctattggagtt

SEQ ID NO: 140002 - DNA, 757 bp, Cannabis sativa
aggggagtgaggtgcctagaggttgatctttaaccaacaaggattgggagtgggtggaaacacccaaaacaaaaatttcaaaagtgaaattactcacttcagacagttggacccaccaaactccagtaattggtgtgctctactctatgtcaacacacaagctccacctgtaggaattaattttaccaggatcttagatctactcacaagtatgttatagtacatctgaagtactttgagatccatagagatctcctacgagtatctagagatgtgtgatgccgaatctttccaacaactctagttgaaatagcccaacaattgtatttcaagatggccccaggaagattaaattcttgggaagtgcactcttgagagttctgtattcagttctctacttcaagacaaatacctgcccgattggatgatcttgtcaaaataaagaaaagacaagatgaacccttgaaggactacgttcaatttttcatggctgaggccaccaaggtcacaggcctgacagaaaaggctgatatacagccattcttggaggccactatctcaatgaacaataaagaggagttccttgagcgagttgatggcttcacaaagttgggagaagctgtctgacaagtcaagacaagaaatcaggataatgacaaacaaacacaaggcctcatagaaccctaaacattgcccagcatgctagcagcacataagatctctatcaattctcaaacaatgagaatggtggaggcaa

SEQ ID NO: 140003 - DNA, 599 bp, Cannabis sativa
aataattttattttagtatgtctattaaaaacttcttttttaataaaattttgattttttgaagattaattttatatttaattttagatttgtttccttttaaacctaataaatgtaataatttatattgaaaataaaattaatatatatacatacaattaagcatataacatatataaatccttttttaaaagattatttatttattaaatacttttttttatctaattattttcaggattaaaaatatagttatttttcttaaaattcttggcttaaaattcttggctaaaaatttaaactttaaaataattttcttatttaaaatttatatatataataataatctaccttattatttatgtgctaagagcagcttcaaggagactgcatatatcttatatgccatgtatgtgtggtccaaggaggttgcatttcttgtagcatttttgtagttttatctaaagtgcacggcatatatgccgtactggcatagcttttttatatatatataatttagttaatatttatattattgtatttgtaaaactaagaattattttttgagaaatttgacaatacacatttttaaaagtgat

SEQ ID NO: 140004 - DNA, 1020 bp, Cannabis sativa
acttaagtggagggtgagggtataatgggcaacccactcacaaaagtggatatattttaatgaaatataatatgaaaatatttttgattaatggatgtaaaaaagaggtattcctctcaacttatcccaaaataggggtttttacaaaaatactagatttttgaacaaaaatttacaattttactgtcacacggaattttttataaaaataaggttgtcttttaataaagcaacctaaaataattgtaaaacaacaaaatagaacaattaaaagtaacagtagaacaactaaaaaataaccgtggaataacagtgaaaacttaacatagtatacagtatttttgaaaaaaaaaatctccctcacaataaaaaagaaaaaaaaaataaaaatttcagcatagtgtggaaaaatctcataaaaatattatgtgtcttttctattatatttttaaatatttgtatatattttatattatattatttgagaactcgctaatttacgtgagtatgtttatttattttttgttcaaatgacctttgaatactttataatttagtgttaagaattccttcgataacaatatatttcttttttatcgtataatattcttagatcatatttattttatattgttatttataatatatatatatatatatttcaatataagtatatgaaatgctacatattttaactaggggtgttcatgaattggtttagtccgaatttttatagtttttgaaccaaaccagtataacagtttttttgaatattagaaaccaaaccagaccaaaaaatttctcaaaccaaaccagtaagaacggtttggtttggttcgaaaccacggtttatgtagaattgataattattcatatttttttagtaattgtactatttttactaagtttttaattttaattttcaaaatataaattttacatgataagtaatagatctataacatataaataatgatataaaaatattctcaaaagtcaaacataacataaaaatctaaa

SEQ ID NO: 140005 - DNA, 735 bp, Cannabis sativa
ttttatggtgtatatttttagttaattccacacatttttttgttgtatatatgtgtatttattttattatttttatgttgttttttagttttcttttaaaaggttcttaaaatattttttttattaaatagttagtttttagttgttttttaattcatatatatttttttatggtgtatatttttaatttcttccttacaattttcttagttgtatgtgtcttgttttgtagtttaaatacatatatttaatttattttcttaacacattttattaaaatacaatgataagattttttttttcattttttaattgacacaatgtacagtaatagatatttacatattatatattacccatgatattatataccccattttgaaattataaaattttattatttatgttattaatgtaattatttatttaatttttaaaaaataaattatcttttcattatcactaattcaaaaagaaaaagagaaaaaaattgaaagtatgattccatgaaaaaaaaaatatatagtagtataaaaagataaattaagttgtcaaaaataagtaaaaaaaaaaaaaatcgtaaaacaaaaacttattgaagagttgatattattttgcctattgcaattttattttgttattttttttgttgttttgtagttatctttatgttattttatagttattttcatgtgtaatgttaaattgttctagagttattttttagttattttt

SEQ ID NO: 140006 - DNA, 771 bp, Cannabis sativa
gagtcaatgcatttcttcacatcaggcagacagtcattatgaaccacttcgttgcgtgtcctccaaatggtgtcgactacaattgaagcataaagaaagacctcttcaacttgtataccgctatccttaatactccaaataaacttaacccagtcccacatgcgaatgccgttatcacaaactgagtaaataccccaaggcgaagatctccaaacatgaaacgccaaatcacaggtaagaaataggtgttcaatagattcctcccttaatccacacagtgggcaactcatgttctcaatttgaaatctgcttccaattataacagggagtgcattggaaaggatgctccaccacagaatcttatgtcactccaaaattttgctattccatagtttattccaaaaagatggagccacctcacaatgaggcgctcttttcaaagcttgagttaaataagccgttttagagaatttcccattactctctaaggtccaaatccatctgtcctttccttgacccgaaggattgccaccttttaaactaccagagacaatgtcatgatcaaaaaggctttttaacttattaacatcccatctgccacatgctaacaagaggtcggccacatagatgtgactcggagtaccattacctattggttttggaatgaaaccttttaaatgaggaatccagggatccctccaaatgctagtatccctcccattggcaaccaacttacaagcccctttccttaagattgcattggctttcaca

SEQ ID NO: 140007 - DNA, 781 bp, Cannabis sativa
aattaaaattaaaaaaaaaatgaagaggaaggaaaacaaaaaagatatattattactagggtttttttatttttacactttaaaacaattattaaattagttagaatggtattattgtaataaaagtataatattatgactaattattaagtaaaactaaacattgtttaaaagatgatcaaattagatagagagtacaaaagaaggtgtgatagagagtgttcttatcactcctctatagtttaagtatcacatagggagtatcgctagtcaatcgcaatgggacatgtttagaattagatcacatctaatagatttggacacaaccaatccaatagatatttgattttgttattcgatccaatccaatcgaattgagacatccgatccgatccaatgaatgtattgaattggatcggtttctaccattggatgcattaattggctttctattagattagattgaatccatccaatctattttagctaccatttaagttgattttattaaaaagaaaaaaatatataaaaaacataatttaaaacctaataacccaacatatataataaacattagtttagtccaacctaattctcataatttcataataaatccgccaaaaaataaaacttaatcaataacattgacaattttattggcgtttagaaaaataaaaattaataatttagatctaaagttttttttctttaatctcatgtgttaaatgtatattaaatcaattaatatatttttttaaaataaaatattttaaatatataa

SEQ ID NO: 140008 - DNA, 1907 bp, Cannabis sativa
  modified_base (1097)..(1102): a, c, t, g, unknown or other
tcgagacagctatcaaaaacaaagtaaaattgcagtcagaaaaactagaataaaaggcatggattaatttaaccaagtctaatgcaaataattacttacgaattatacggaaggtgattgtgccgatgggagaaaggtcgaccgtctagaagaattcatccttgaaaaaagttttattgggcaaatccacgatgatcttgcgattgcatgtgtgagtcccaagatagtagaaaccccctgccgcattcttcctcgctggaacagccttatcaaaatagagatattctatttctagggggtgggacactcccaattcaggattttgtatagaaccttcaaacttacaaggattttgtaggacaagggatttagttgaaacggggcaagcccaaggttatttatgaagtccttaaagtaatcttgtagggggattttagctccagccctgatgtgctcaaggctctaagcgcctataccagtcgagccacttatactggttccctcagaggtttcgcgagtaagtcgcactggtgggtaacaactgaaatttccggccgcattgacctaacccagaagtctcgcttgtatttaataccacaagtccgcagttagtcacctacataacctgcgatggctcgcaccttcgactctattaactgtgcctcaaaagtgacattggggtcttggggagtctatgatttcagtggcttaggagacattatttcaaaatctaagtcacctagttcaaaagtaattatgaccttgggtaaaaattgaggctcagccaaaggaatagaggacacactgggaggttcgggccaagcagcttcacgcaagaaacggcatttgccttcagtaatctcttgcaagaagcgtctgtggcaactagcaatgtcttcttggtgaattttcactagatgatccctaattctggcatcatttacctctaatttggatttgggttttgaaatctttgatttgtaggggatggcaaattcagtaggatgctcaatttctaaattttctgcacgataaacttctgaactggattgggacattgctacaaggagaaagcaatcccaattactggaagaaannnnnnaaaccagaagttggtaaattggagaatctagaaaacttagttactgtctaaaccctaacatttacccagatacagttcagccctaaaaattgctaaaaccaaatgagatgacaacgatgcagaccaataaattggtaattacacccagaattacaacataacaaacttgtaagaaaataaggagaaaagtcacttactgtttgaagttgatttttgggatgatgaacgactctgcaatttgtgaatcaacgaacgacgtgaagatccctccgaatgcttgaagtcaaaaattaaatcagatgaaactcgtagaaaaaatgttaatgatagagatgacatgcaaattttcgagcaaatcaggtaatggttttttgacgaaaaagcttaaaaaattctcaagtttctaaaatggcagaggtaatggaaatatggtccctttttccattttatactcttgggttaatctccgttagatcatggagataattgatcctacgggtagaatttgaaaaagaagtagaaaagatggttattaaatgctgatgtacctcgaaacgacaaaaccgccaaaatcagaggacgtgtgttttttcaaaagggattatgacaaatataccctctgtaataatttaaaaagtactttttaatgggcaattgttataccctaaaatcggctgatacttcatagaagtgttgggattttatgccctaaataaaacccattacaatctaatctgatttgttgtcaataaaagattagaagtcatttatgtttacatgttgtttttcatgtttatggtttaat

SEQ ID NO: 140009 - DNA, 1121 bp, Cannabis sativa
tggacggaggaatgtgaaaaagcttttcaagagctaaaaatgcaactcgcaaaacctcctgtactctcgaaacctgtagacgaagaagaaattaagatatacctagcagtaacggagcatgccatgagtgttatactgatcagagaggaaaacaacatacaacatcttgtctattacattagcaaaagactcattgaggccgaaggccgatacccattgatagagaaactcacctactgcttgattctagcaataagaaagttaaggccctattttcaatctcatcctatttgggtgtacactgaccaaccgttacgccaaaaattgcaaaagtcgaacgcctctggacggatactcaagtgggcagtagaactgggtaagtatgaaattactttccatccccgaacaacaatcaaaggctaggccttagcagactttgtggtagaatgcacaggcaaggaagaaagcatatccgaaggcaaccttgagccagtacaaataccacagccaagtaatagtgaagacaagccgacttagaaactacatgtcgacgggtcagctatagatcaacggtcgggcacaggaatcacccttgtcacacctggggggcaacacctgcacgctacagccaagtttggatttaaagcatccaataatgaagtcgaatatgaagctttcatcgatggactaaaactagcccgggagatgaaggctgaacataattaaatctgcagtgatgcacaggtggtagtaaatcacgtatttggaaaatatgaggctcagggagaaaagatgatagcatatttgagcaaaatacacaattttctcacacagttcaaaacctacgctgtcaaacaaactccaagggaagaaaacacgactgctgacgcattagctcggcttgcgagtagtaatgtaagtgatagagtgaatttggttcctatccagtttctcgaagaacctagcatcattggcacggaagagattgaaatgattgatacttccccaaacttgatgacgtcaatagaaccctacctcaacattggggaactccaagataatcgaaatgaatctcaaaagatgagaaggaaggttgaacggtacatcatagtagagggaat

SEQ ID NO: 140010 - DNA, 643 bp, Cannabis sativa
gttgatttagagtggtttgttatattaagtaataaaaaatctcagagatttttattaaataaatgggctgagatatttaataaaataaatttttaattcatttattcaaaaataagaaaaaacttggaaaaggaagcattacactctcaaattctctctctcattttcgaaccccctagatcagctagggttttgatttttattcttcaaatccttgcaaattccaggagcttttagttaaatccaagccaaggtaacctctttacaactctttctttgatttcttgaattgtaaaataatggattatgcatgttttgaggagttggttgttgttgttgctggtggtgtttatttatgttttctgaagtttaaatatgtcaagttatgttgatttgagcatgttttggtaggtagtttgttgtttgagcaagctttgagtttaaaactcaagcttggctctttaatggtgaaattcgattctaagtatgggtagttgttttatcacttcgaaaatgtttattggggtgtattatgcaggtctggaaggtttgaattggtttggaatcgttttgattaggggttgaagcttttcgagttttctggttttacaatgcttgtaaaaccggtcacccggattttgta

SEQ ID NO: 140011 - DNA, 667 bp, Cannabis sativa
  modified_base (36)..(40): a, c, t, g, unknown or other
ccactctttattacgatgcagatttgagtttatgtnnnnntgtaatttgcattttcttgatacttttgtgttttatcaaatttgtttagttaacttttttatgacgttgtttgatttactttgtcgtagatggtgataaccctattggataccgagagtgctctgcaatggtttgcgacaaatctgaccatggataatacaacagtggaaattagagactcgttgtcttctacaatgcataagaggtcacgttggaacacttgcctagagatggtatacacgtgtgtacatagtttgctgttgtattagtgtaattgcaataatctcagctgtaattgttttaatatttttgcagctgcaaactttggaccaattgtttgcctgtgtcaagccaggactacccaaatttagcgagttcataattatttcttctggcagtgactacccacaacaataaaatgggcacgattgtagaatttttgtaatgaagtacatggaatcaatggttgaggaaaatgaaacaatggcagaggtaatttaatgttgatttctgtcgtttagttgggatccagttaactaagtgtttataacgaaattgaggtatcaatctatgttgtgttgatttgtttctatgtatttcgttgtcatgtgtattactcaattggat

SEQ ID NO: 140012 - DNA, 507 bp, Cannabis sativa
ggaacgtccgcccaactcccccattacccaaataattcgagctcaaatggtaaatgttccaacaacaacaatatgcaagggaatgcgaagaagggaaagttcactggcaaaacggagcaggctcccgggagaatcaggcaaagtacactgcatttaccatcttgactacggatataggaagtgtttacatggccactcagtcgctagccccatataagaagcctgggcccatgaagaaggatgtcagcaagagagacatgacaaagtattgtcaattccacggagactacggccacgacaccaatgaatgcaacaatctgaagcgggaaattgaattactaataaggaaaaataacccgcatgtagagaaatatgtcaagtccgatcagaatcagaggaacgataataactaaaacttgctacctccaccggtagacggacatctgcaagtcatcattggaggcccgcacatagctagagattcgggcaaagctcaggagaggtatg

SEQ ID NO: 140013 - DNA, 802 bp, Cannabis sativa
agaaccagaaccggaccgagacacgtgatagggatctagatctaggactcaaaccaggaccctaacccaaactaggaccaaaactcggaccctaacccagacgcgagacttgaaattggaacctgaacaagaacttccagatgaggatactcgaacaagactaggaccgtgatcagaacccaaacttagacatggtacccaaaatcgggacctaggacccagacctggattggggacttagacatgtgcctcagaacccagacccagatcggaactcaaaactcgagactcggacccaaacctggacctagactcaaacccagatttggacccaaaacaagatcggataccgaacccgaactcagaccaagacttgagccccgacacacgcatgagaactaggattgagaccgacgacctaggactcagattgagacctaggactcggacttggatgggggacttggacctgggacacaggcatgagaactaggattgagaccgacgacccgaccccagacttggaccctgacctaggacccgaaccgagacctgggacctgaagtggaactatatagggacccgagaccgtgacccaaatctggacctggggcttggacctaacccgtagtcagtgtttggatatgggacccatacccaaactcaaacccaaacccggactgggacaaagaccctgacccacactaagacctgtaccccagacctgggtccgagtccaagtctaggtttgagtctaggaaccggaatctgactaggacccagacccagatctggaccggga

SEQ ID NO: 140014 - DNA, 1487 bp, Cannabis sativa
  modified_base (52)..(52): a, c, t, g, unknown or other
  modified_base (602)..(628): a, c, t, g, unknown or other
  modified_base (729)..(732): a, c, t, g, unknown or other
aaaaacaaaaatttgacttttattttgtgattaaaaaattaaaaagcaaaantgttaccaaacggcaccatagtatttaaatagaaattcttaccaatttaattttagtcacaacaaatattgtgactaaagacacatttagtcataataaattataatttttgtgactaataatacttttagccacaaattttttagtcacaacataagaagaataatttataattagttataattttttacttttactcacaagttttgttgtgactaaaagtaaaattttttgtagtgagaggaaaagatggaaattggagattaggggcactgatatttgtctttccaatattttatattaaataatctaactttttctaagtacacattaagtgatgtgtagactcaaaagtcatacaaaagaagggttaagaaaatatctctatgatataggaacaaaaccaatgtgcctaccataaaattattctaaaaagaggagtgctatcgtcaacctcctgttacaacctcttagtcaacctccacacccgaaaacatatggaatattttttttttcatatttttttcacgggggtgttcgttatgcttannnnnnnnnnnnnnnnnnnnnnnnnnnaatttcgaataatttacagtgtcgaaaatacgtttgaaattttctgaacgcgcgtggtaaactggagtatcaggaactctgttttcggtactgtaaactannnnaaaaatttcaaaaatttacagggatgatactgtaattataacgaatactgctatgaaaagaaaaatgaaaaaaatatttcgacatgtgatttcagacgtgaaggttgactaagaggttgtaataggaggttgtaattagcattcctcttctataaaataattgatatataaaaatagtagtttgttatattacatgacaattcattaattttgaatttttaataagctacctaaatctattttaaattataatctactataatataatttagaaataactaatcagttactaagatgtacatataaataagttttaagagagtaaccaaaatgtatctcaaattatatgatataaaaatattttttttttatataaaggtaactaattggtttcttatgaacactgttagtaactaaaaagttacttttaaaaatgcatgaaaattaaaaaaaaaatcaaaataaaaaaacgtcaaaaaatatcaaaaactttagatttggtaacgttgataattattaacgttattattgtaaattagataaaaaaaaatatatattattgtaaactttaaaatttatcaaatttatcatatgaccggccaattttaatgtttttttatatttagttaatagcaattaaatttgaattaataagggaattttgattttatatacttaaaaaattaaaaaattttattattaaaccaaaacctaaaccctaaaaaaactatacattttttttcaaaaccccaaaa

SEQ ID NO: 140015 - DNA, 562 bp, Cannabis sativa
cagaacacaccaccacagaaaggttagcttatgtccattttgacctttgggggccatctaggattccaaccaaaggtggagcacactactttatgggtatttttgatcattacagtaggaaagtctgggtgtatttgttgaaaagcaaagatgaggctctaagaacttttactacgtacatggaagaggctactagaaaactagtctgggaacaaaattaaggtactaagaactgacaatggtcttgagtactgctcaaatgaattcaagggattgtgtgccacagtgggaatcaagagacatagaactgtgatcgaaacccctcagcaaaatggtgtttctaaaaggatgaatagaactttgattgagagggttagatgcatgttactagaagttggtttagatagaacctttcggggagaagctcttaaaatagcctgttatctatcagtagatcaccatctgtgccaaataacttcaagaccccacaagagttatggacaggtaaacccccaaacttagatcacttgaaagtgtttggatgtactgcatttgtgcatgt

SEQ ID NO: 140016 - DNA, 655 bp, Cannabis sativa
aatttaattttaattattagtttaggattttattctctatttcatatttatgcagacaattcattatgacatttttaagaatgttaataaaattttctgttttagaaattttcattatgaattgtatttatgaaattgagcttcatatttactttaacttgtatgctgataccaattatatttatgtgtttatcatgttgtatgtgtttgtgttttattattgatacaaaatctatggtatattattctctgaaaagagatataccacataaacacttagatttaaattcaatgtttatgaataattgttatttcttaagcaattattaatttttttttttaataaaaagatcttttaatctgatagaggtggaagaagttagaagtaatatatgcagttcaacgatctcttatatcttttgaactctagattatatttataactccacaggatctctacaacacttaggggtgaaagaagctattgacatatgtagttcaaatacttttaactttgaactctagactatacttaatacaccacaatatctttgtgacacacatattttgattagacatggatataatataatgaacaaattagcaaattaatagagtttattattgatcctgtaattgttccaattaacatgtt

SEQ ID NO: 140017 - DNA, 1142 bp, Cannabis sativa
tatattaaatagtaagattttgaaagtgaaaagtgtaatagtcaaaattgacagctcacgtttttgtaatttctaatatttacatttccactttttcttaaatagtaagattttgaaggtgaaaaagtgtaatagtcaaaatttacaactcaggcctttgtattttccaatatttctatttccactttttcttatattgttaatgtaatgcttttaatatattaaatagtaagattttgaaggtgaaaaagtgtaagagtcaaaatacagctcacctgtttgtattttccaatattatattaaattgtatttattacattttaaacctctatttaattctctctcctaatatctctacaactttttcatttccactttttcattaatttaattctctcttgatatttctgcaagtttcctttcaaatgtttatctcttcctcttcttctctctctcattttctctgcaattactatgtacagttgggaaatgacgaacacaacaaataagaacacccattagatcaatgacaagagaaggcttacgacggcggccaccaccaccaccactgccgaattcataacgacgctcaatattgtcgacatccagacctccaccaggtatgtttattcatttcaaaatctctaatttttttgcccttctttctttccatctatacataaaaatgtaaaatcctaatttttttataagtgtttctcaatttttttttaatccctaattttttacccctttttctctatatctgtatatataaatgtcacatatgatgaaatttatctgcttttacacatattttaatttaagattttttgttttcgaatttcttggactgatgcatgtttgataattttgcccttaaaagaaaaagctaaaaaaaatatagataacttttttattcttttttttttaaaaaaaaaaacaaaaaaatacaactattagcttactcatcaaatacgtgttagtatactaaattttttatttttcatactatcaagtttttacaatttccgattatctattagtagagtttttaaaatatttgaagataaatctttggttttatcttacattttgctacgtgttgagctaattggtatattactgctgagtcattatatata

SEQ ID NO: 140018 - DNA, 773 bp, Cannabis sativa
ttatatgtgattattaaagcatgttaggaagcatattagattatggtcatttattttaaatgcattgccttaaaatccataagagtcgtactaagttttatgatcgctgtctaacctgcatggcttacgggttcgtaggctaagtcctattaaatggacgcccagtaaaatacaaaaagtcagggtaatagggttgagaccggaggcggtcagggaaatcaaattccccaaaatccccgtggtcgcagtctaggccgtggcagaatgcaagatcgtatcctccaacaagatgaagaaattctgagactaaggcagcagggttttcctgtcgtgcctccacaacaagctcaggtcgtcgtagttccagcggtgccagtagaacaacctgttgctggcaaccgtatggaaccgttatacgagaggtttcataagcaagcacctccaatgttcttgggaggtcctgatgtgatgaaggctaagcaatggctcactgtgatagggtaaattttaaatttcatgggggtggttggaaatgatagggtaacctgcgccacatttcagttctaggaagacgctcttgtgtggtgggagttagtgtccctcacccgagacgtcactataatgacctgggaagattttcgagagttattcaacgccaagtattataatgaagcaatcttcagtggtaagcagaaagaaatcattaagttggtgcagactgagggtatgtcagttactgagtatacaacaaagtttgaccgtttggccaagct

SEQ ID NO: 140019 - DNA, 519 bp, Cannabis sativa
catcattccagcccaattactccaagtctaagtttcatattatatctagtaacaattggccacgatcaagactatatccactcaagctatgtatatgggagtcccacctttgatgcacggagtcaccgcaagcgagacccagtcgcccatctctccccagttttctctcctgcatggtcccatgttctccaatgtgttcagctttttgagcaaaaatttctcactagctgatgcacgaaaaatatcagttattgagattattttggctctataaataggatcattatggaaagaaaaataatcagatttttacctagtgttattatatcaaaattttatctttttctttccttcttctttattttgctttattaattttggtgcaaaagacaatgccttttccaggctaatttctttggaaagactcaagtgtaagttcatgcaatttttattcttctaatatattgattctctttgttcttcattttcacatttgttatattaaatttatcttcttct

SEQ ID NO: 140020 - DNA, 568 bp, Cannabis sativa
  modified_base (29)..(38): a, c, t, g, unknown or other
tgtttaaacaacttacttgtgagtagatnnnnnnnnnnggtaaaataatttccaacacgacctccaacaaaaagcctgatagaattatgagcaacccacttgaaatcgtgcttcccttcacttgagaagatagccctatcgacattaattttaatcttcgaaaaattgggtttggtccaccgctcggaaccgacccttggcgcatcaccatgatgagtaagaatagaaaaactatcaaaaaatgatcaactaacagttgggtcatatagatctggtgctggccatatgtcacacaaatagaatgaaaaataaataaacacggagatttgttatagaggttcgcccccttgtgatagcaagtaatgacctactccccttttagttttatttataccgatggaaatactatccagatcattatatgtgggatctgctatagcaccattaggattacaaagtatgaatcagtaggcatatctcaagtgttgtacagcctagggtgttggacaacctagggtgcttgacagcccagggtgttggccaacctagggtgttggacagcctaggg

SEQ ID NO: 140021 - DNA, 540 bp, Cannabis sativa
gcctagtgcccaggttaacaatcagttacctggtgtgttgattttgaatgcttaaatgtcaaatctgattcgaccaatgaattaggattggttagaaacggggtaggagacctcgtcctcaagttcaagaaccttggaagtatcaattcccgggatctcaaaaatagggtacccaacgcccaggcatgacaaatggcctagtgcgctgggttctgcttatccgattctgattccattcgactgtctgtctaattttttttacaataactaagatcgtgaagtcagagaagtcaatttacaacttcgcatttctcatttccagcatggaaaactcactctgaaatgaagaatttcgacacactcatttctgcagaacagtactaacatctctgagaattggtgaccagcttcgccagaacacagtaacagactaagtggtgtcaaaatatcacttagacatcttaaattatatccctttgacgtttttatacttaccgatgggtcatgaatgtcttcagtaaaacagccataactcactca

SEQ ID NO: 140022 - DNA, 1160 bp, Cannabis sativa
gattcacgattcagtaagcccgtatttatttagtattttaaatgattattaaagtatgctaggaagcatattagattataattatttattttaagtgtgttacctttaagtccataagagaagtattgagctttatgaccgctgtctaacctgcctggcttatgggtctgcaggctaagtcctataaaatggacgctcagcgaaatacaagaagtcaggataatatggttgagaccggaggcagttagggaaatcaaattccctagaatccccgtggttgcagccgtggccgtggcagagcttagggtggtcgtcctataaatccaccacaagctctttcggaatgggagcagaggtttgcgaaaatgcaagatcgaatctacaaacaacatgaataaattctgaggttaaggcagcaggtcatcttgtcgtggctccacaacaggctcaggccgttgtagctccagcggtgccagtagaataacctgttgctggcaactgtatggagccgttatacgaaaggttccgtaagcaagcacctccagtttttctgggaggtccaaatgtgatgaaggctgagcagtggctcatagtgattgaatgaattttgaattttatgggggtggttggaaattatcaggtgacctgcgccacatttcagttctacgaggacgctctcgtgtggtgggagttggtgtccctcactcgggacgtcactgttatgacttgggaagagttccgagagctattcaactcaaaatattataatgaagtcatctgtagtgctaagcggaaagagttcactgaactagtacaaattgaggggatgtcagttatagaatatactacaaagtttgatcgattggctaaggtcgtcgtgggtattgtgccaacatatttcagcaaaaaagaaaagtacccggccggtttgaatgtgaagattagacatgatctggtgatcactaccaatgaagcaaccacttatgcggaaatggttaaaaaagctcggagagccaagggtgcggttaaattccttcacgagccccaagtgacttcgagtgttggtggaaaccccacttttcctactcctgcttatggtagggatggtggtgattccaccactgattagaagaggaaagttactcctgcatctggtggct

SEQ ID NO: 140023 - DNA, 1529 bp, Cannabis sativa
  modified_base (211)..(219): a, c, t, g, unknown or other
  modified_base (293)..(308): a, c, t, g, unknown or other
  modified_base (483)..(487): a, c, t, g, unknown or other
aataagcccaatactaattggactatggttaaaatcaaattattagatctgtcaacaagttaaccattataatttagatcaaacaataataggttttataaacaagttttaataataaacatgctaattaagatttttgccgcctaaactttaacatgtaccaaatcataaccccctgaacttttctggtcgttaaaaatttcccctgaannnnnnnnnttgttagatttaagaacttttttctaatttcattcaattttactatttaagtgattatttatgtactaaaccannnnnnnnnnnnnnnnatatctaccaaatcatacccctcgaactttggcatgtactaaattatgccccctgaactttcatccatgttagactttttttactataaaattggacaaaagtccttaaattcaataatctcaatagttcagggggcacttttaaggaccctaaaagttcagggggcatgatttnnnnnatgttaaagttcgggggaaaaaaaatcctaaatagcctaataaacaatatataaaacacacacatgcaacaaattcgatactttgatataggatttatttagtttaaattaattaattaattaaattaattttgtaaattctaaataataaaatattatttttgaaaataactaaattaaattaaataattaattttaaaattaagcttataaatttgaaattttttaacaaacctaaatatctattcaaaaatatctactaactttctaaaatttatgttatttttaaaaggaaataaaattaaatgtctaataaaacaaaatgataagcttggcccaccaagcgaaaccggtggttagttctgtttatacaccttatttttctaattatatcatttatataattttataatttagattttcaaaattttgctagattattttattaaatacatcttatttagattttaaattttaaataaggtcattttataaaattatttaaataatgtaaaatataaaatatctgacttaattataaaaaaaaataaaataataatcaaattttaaaaataagataaccaattaagaaaaataatagatttttatccatttgaggttcaaaatctactaatatctaaaattaatttttaaaaaaagtaattaattttaaactgataaatagattttacatttggaaaataaaaatctacattcaaaattacacaaaaaatttgaacttaattccttgaaaaaacatgaaaaaatgaaaagatcgaatttttttggattttgtgcagatggtatgcactgcataccatccgcgggccaaggggatgggcatcagctaagaaatctcggcgcaagaggctgatgaggcccccttttcaaacaaaaaatgcccaaatgggcgaggacctcggataacacccctgtccaaattgcatgcactcccgtgtttcatggggtatctgttgggttttgtgccctaaataaaactcattttaatataatcatatttagttattaataaagatcagaa

SEQ ID NO: 140024 - DNA, 618 bp, Cannabis sativa
aaagtggcaggagagagacctgtgtagactgggattgcctctttaagcgtttcccatagttgcagagccattttagtagagagagagagagagagagaaagatacgggacctaactcagaaaagaggaaaaggaagattgattttctatttttctatttttctttgccttttctaacaacttttccggtttaggtcttaatttctttttcaaaaaagaaaaaaaaaaggataaatatcattaaaacaataattttgtatgaggtaaacgatgacgtcaagaaagaaacaaaggtagggtgggggaagtgcttgaggattaataaaacatgcgctaattaggttttttagcccctaaaattcgatatgtactaaatcatgtcctttgaacttttaaagtttaaaaatatttcctgaactattaagattattgatgtttcaaaaaaaaaatattgagattattggatttaaagacttttatccaattttagtacaaaagtaacatgtatgaaagttcaggaggcatggtttagtacatatcaaagttccacgggcataatttgatagatatcaaagtctggggagcattgtttagtacataaacaatcactgaaatagta

SEQ ID NO: 140025 - DNA, 635 bp, Cannabis sativa
  modified_base (26)..(36): a, c, t, g, unknown or other
  modified_base (479)..(500): a, c, t, g, unknown or other
ataaacatacttgtgagtaaatctannnnnnnnnnnaaataaattccaacagatttaccatacaatgccttaacttggattttttgagccccattttctttagagtctccttataaaggatatttaccgagctcccattgtctattaacactatcttgatccttttattagcgagttgaatggttatcaccagtggatcgacgtgaggttacctcatgtttttctcatcttcctccgtgaatacaatgggaggttcctcagtttttaccttcttggaaggttctggggcaaaggctgattgctcgttctttatttctttcacatatcttttctgggcgttattgctttctcctgcgatatgtggccctcccgaaataaccaggatgtctttcaataggaataggttgtaacccctggttatttgggttattgggcatactgggatggttgtatccctagccctgtcttttcacgtactnnnnnnnnnnnnnnnnnnnnnngagactttctatctcgtctttcaattgatgacattcgtcggtcgtatgcccaatatccttatggaattgacaataattgttaggatctcttttgctcagcgaattcctcataggctcgggtttgccgaaggctac

SEQ ID NO: 140026 - DNA, 706 bp, Cannabis sativa
taagcttttattgttatgtgtgacacgttttgatttgtgttattaatcatatatatacaccccaattttagtttgcattgttttgttgattttatttgcgtacaagtatatatagaatatattcatttttgtactaaatgaaattaaccaaagttataacaataataataaaggagctttattacttatattaatatgggaaaatttcttgcatcattactgtataacatattaacaacgttgtgatctaaacacaataagtggcaattattatgttaattaattaaattgtaactcataataataaaatgaagttatgaagaatttaccaaaaataaaattgtaacatgaactttgattgccacaataatttattgaattttctgtttagattctgtttttttatcattggtgttttcattatatttttataatgagtaaatcaaaaagaatttcattgatgatggaattgtgtgaatgaaattacagcaaaaggtctaatgtataatttaggggtatacgtcggtcgatttggttggtttatgttacaatttattcaacacaatgtatagatttgtttacaaaaatctaagtgtaacccacccaaataaggataaaaaaaaattcaatccgttcaatgaaaattggtcaatttagtcgggttaacgcgcccaaactaagcactaatgtttattttttttcacat

SEQ ID NO: 140027 - DNA, 643 bp, Cannabis sativa
aaaaaaaaaaaaaaagcaaaaccctaacatgtcttcccaacacaacttctcccacgccctttcttcttcacattctctctcttcctttctccttcttcttagccaagctgcagtgcagcctctctccgtcgtcagccaaagttctttcctcatcgctggccgatggagctcttctccctcttctcttgcgattcaggggtttcttctccctcatcatcttctgggaacaagggatgcaaactagaggtcaccacccttcaccctcatcgacgtcaacctacgaacagcccccatcatcatcgtcttcttcctcctcaacaaccctaacatctcatcctctttttcttcctttttctctttgtatccaaattgtaaaaaattaaaaaaccccaaatctctcatcactcgagatctatcggtgagtgaccacatgatcaaagtcagaggcattggggttgaaagggttagcaaatttcgacatcgacctgcgaacaaccccctcatcggcgtcgacatgcgaaaaaccccctcaatgtttacaagtctgaacttgaatttgggcatttggatttgtggtctttgttctatttctgggtttgagtttttaattttgggtttgttcaagatattatagatgaggatt

SEQ ID NO: 140028 - DNA, 731 bp, Cannabis sativa
cttttgatctgataggggtggaagaagttaagaagtaatatatccagtttaacgatcttttatattatattcataattccacaggatctctgtaacacttaggggtggaagaagctattaacatatgcagttcaaatacttttgattttgaactctagattatactcaataagccacagtatctctatgacacacatattttgattagacatggatgtaatataatgaaaaaattaggaaattattagaacttattcttgatcctaatattgttccaattaatatgttacggtagtaatagaaattgacaccaataaagttcttggacatagtatcacaataccttattcgagtgggagaatttcaaaaccccaagcccatctttatttggatgacactagtgatagattactatgttaggatcatgatgggaactttaaatgtaacagagaaagtaaatctaaccattcatatggatagaaataacttatcatcattttgaggataagataggagaattttgctaagtctattcgaatgacttcgacaaaaatacctaatcctcatgaaatgttttatggtatctctaatgattacttaatcttaagcaagtatttcacattaatgttattactagaacactatgttgatgacttagtctagaaggaacttatagtttcagactaagacaatatgtcacaacaagatgtccctgagaaccaatagtaaga

SEQ ID NO: 140029 - DNA, 711 bp, Cannabis sativa
atataaaaaaattaattaaaattataaaaagttataaggtaaataagtaagaaaaattataagtttggggtcagctttggagtattgttagttggatctaaattaatatttgaaattaattataaataaataaatattaattatggtgtagtttccaagagttaatttaagccatttgattaaatcaatggctgtaaatcattatacatattaataggtaaatattacaatatctattgtattagctccttttatatatatacttgatgggaccccatacttgattaatattatatataatacacgtatatttaaatgtacatatacttaattataattagtattatttataaaaaaaatataacaatattcaaaatttattattaattataattttaatttaattacctattctataatacttttcattgtttttaaaatatcgtacactttttctatttttttaaataataatagtagaaatatatttttagttaaaaaaatgataataaaaatatattttttaaaatatgtgttatgagtttaaatttaaattttaatattaaaaaaaactttaaattaaatacacattttatatgtccatatccagttcatccttcggaaccatatcacatcccggatctgatgaaataggatgaattgagacggtattttgtaaatacgtaattatcttgaatatattaactattt

SEQ ID NO: 140030 - DNA, 656 bp, Cannabis sativa
tttcgtaaaaatacaaaaaaaattgttttgaagtgtaaaaataaaaaagttcaaatttaatatttgttaattggtttaatattttaattaagtttttttaataatttgtaaaattaaattttttaataaaaaggaattttttttgcattaatcaaacttgaaggggtaataaaaatgttaattttttaacggtaaatagaaaacctaatacaaagacataattatgtaactgttatattttagaggaaatttttaacaagtctatgttttaagggataagattagctaatatcaaaaatccaagaacaaaaatactaattattttatttttaataacatatatataaagccatctctaataagaaatgttaaatttgaccaatattttccacacaaaaatatctctctaaactcttaaaatagagacattcctatctctatgatagaattttcctatataatgaaacgacttttcataagtcaattattttgtaatattagtcgaccttcatattcatgaactgatgtatagttggccaaattagaagacatagaaaaatctaaggtcacctttagtaattataaatatgtatttatgtattaatttaactacttgaccacttgtgatgtgtttgttcttgttactaaacaaacca

SEQ ID NO: 140031 - DNA, 796 bp, Cannabis sativa
  modified_base (755)..(768): a, c, t, g, unknown or other
aacttaatttcaattttatttgaattagctatgaatttttaaaaattgaaaaaaaaaaaaatcaggagcggcatcacctccttacgcgcgcggacaccccgtgtcacttggggttcacgcgggttggagaaggccctatttgagttttgtcagtcgtgataagcaaatctagtctgaatggggcttgtgcgtgcgcggacaggctgcgtacagtctccaactccgagatttcttgactgatcctcatcccctgcgcgcagggatggtatgcagtgcataccatctgcaccaaatcctaatttttttttttcattttttcatgatttttcaaggaattaattttaattttttttgtgtgtgtagatttttatctttgtgtaattttatatgtagattttgtgtgtaattttgtatgtatatttttatctttcatatttcaaatttaattatcaatttgaaattaattaatttttttaattaattagtaaatttcgaacttgaaaaatataatatctacatcatttttttgtttaattggttatctttttttttaaaaaaaaaaaaaaatgattattttatctcattttaaatttaagatgagatatttcatatttttcattatttaaataattttataaaatgaccttatttaaaatttgaaataaaatatatattttttaataaaataatctagataatttttgaaaaaccaaccaaatattctatcaacttttaaaattttgttattttatttnnnnnnnnnnnnnnaattagataaataatatttatttatcat

SEQ ID NO: 140032 - DNA, 728 bp, Cannabis sativa
cccctcctgggcgacgggacccaccatcacttcttccatggtcgccaaacgctttcctcccttcttggaccacttggaaccgtatgtagacattttggttctgaaaaagagtaaaaactctagcagtcaggccccataccaaaccctaaatcaaaaaagggaatgggggtcccctccggacgcttgtcaacaagaaagccttagaaggatttcctggacaaaagtcgggtgcaagaatctcacagatattgacattacacataagagaagaaaggaaaagaaagagaaagggcagaaatcgagaaagacaaagccttctctgtccccttgaaggccatcacgcaaaaagtaaatgggcctttacaaaaaaaactaatgtaatgtgcaaaataagagtgactcaaacaccagagacaagaaatctaagcgtattacgcaaaaactcaaggcgaaacattcccagaaacttcaaacattaaacccagaaacacagatgaacagtaaagcatgccatgaacacaaatagtaatgtgaggggtgcgaaaaacttacataaggtgttggaactgggggttgctgttgatcgacgaagaaatgtagactgacagtaacgaacaaaggatgataagaaacctgtaagtgtttgaaggttttctggtctaagggtttctttctctctcaaaaactcgaagaaatttggcgaaaggatgaaagtaaccaaatgaagg

SEQ ID NO: 140033 - DNA, 588 bp, Cannabis sativa
aaatacaataagctgccataaaatagctgcgactactgggtttaaaaacccaagaaaatgcatccaaaaacaccaattttcatgcttaactagcccacaatcatagtaaccttttacctagcataaatccaataattagagaagaattacacctaattcactctccaacaacaccaaaaaccagcaacacaaaatcagcccaaacacacctaaagccaaccaaaacatgcttcaatccagcataacctcttacacaattaaacaaccataatagggagttaaaccaaaattataaagctcaaaatacagtccacatgcacataaattcagattcaaacaacataaaaccaaagctccaaacttgagcataatataaacaaattcaagctcacactccttgaatcttcaaatcccaaaacataaactcaaacacaacactaaaattagagctgtattacagattaaaaacacttataaaatccctaaaattatcccgacaacattactcaagcatcgtacatcaatttctaactcaatcaagcataagatgtaaagattacaccaatatcatcatactgttgggttttg

SEQ ID NO: 140034 - DNA, 601 bp, Cannabis sativa
gaaaatgatattgaaaatatctatttgcttattttcagatcatttatcttattagatatttaatttgatttgatagtagaattcaaataaaatctagatattttaaaattagtttgtttttttaattttaaaaagatatttaaggttgttttaacagcctaaaatttttaaaatctagtcggttagttgaatgataatttaattatatatttagtaaatatcttatttcacatttgttacatggataatgtttgttttatttgaattatttattcaaaacttttttctaacaaacctattatttatttaatctaaattgctatgattaacttgttgacagatctaatgatctaattttaatcatagtctaattatcaatagatcttataaataatttgtaacagataaattttgtatttctctcatttgtgtaaacctagaaacatgataggactcatccatatcaatttgacttgtgtgagcctatatgtttgtttttaggcttagatacatataggaagaacatttatttttagatatataaatggactaggttgataaaatgaaatatcaattttgatagtttaatttaggcccaatt

SEQ ID NO: 140035 - DNA, 642 bp, Cannabis sativa
tattatgacatacatcatatcaagttacatattattttaacaaaaacaatgtacaaacacatcacattttaaatttttaataatttcattactaaaaaattacattactaaataattatttttcaaatttcaaaaattatatacctaaatcagatttattagactaagaaaaaaaaaatcttatattgttaaaaacatacctttcacaaatataaatttgtgcatactactcatccaataagctacaaaatatcccaaaaaaaaaaaaattctcccaaatcttaaaaaacataaaattagaatcaaataataaatacataaagcattgagattattattataaattacatctatataatcatataaataaatgcatacacatatataacataaatataatattgaaaaatattaactttttaaaattttttagtcgtacatatatatacacacttaatcaaaccatgtatattttaaagattcatactaaaaataatcaaatatataactattttattaaaaaaaattataagttttaaggaaaaaagagatgaaaaaactgacctactaaaaaatatgcatcagtcgtgcacttttggtttcagccaatagtggttgagatagtagagaccttaacaatat

SEQ ID NO: 140036 - DNA, 1044 bp, Cannabis sativa
gctactattttttgatggtaacaaaatatgaattgttcgatgtacgcattttactacattatttgtagtagaaaaatatttcttctctcaatcaatgcttagcaattattttctcttgtataaaaatattatttaacacttttttattttatatttaataaaatataatattttgttacttactaatttattatagtaaaaataatattattatttctaatattttcatactaaatattagaaaatacagtaaataattgactttttttttactataataaaaacattatttttaatgtttgtccaatgaacttaaattatttatgtaattttgtaattaattttagtgaaatggttttattctttttcttatctgtatttatcacctaaattattaatttggtaaatatatacaatttgcatgtatttttaaaaaaattaaaattaattataattaggttggcacctaatacagactgtattactagatattattttaaaaataaaaaattttaaagaggagaattataaatttctcacaaaataaacttatatcattccctcattaaaacttctaaagagtgttgaaaaataatttagaaaagaaaaaagataaactaaaatgttaatatatacaaataaaataaaatgataatatataaattaaataattaaggaatatagtatgattcatttgttcaataaaaatgaataaaaaatttggtaaaatattaaattaattctatgaatgcatcagcccactctattcaaattttatcaatttcttcatttgtgtaattctccattctattgtagcactgaaaaaaaatattaataaatattagtgaacttaaataatatatatatatatattgaaaaagatgcatatatcatatacattagtatttaactaattgagaggtctagaatccatgcataagtctcgcatgtatttcattacataatatctacattcaaagtttgatggttgtcgaggacactgcacatttatatagatgtgtaagaatctcttaaaataaataa

SEQ ID NO: 140037 - DNA, 835 bp, Cannabis sativa
  modified_base (345)..(349): a, c, t, g, unknown or other
  modified_base (767)..(800): a, c, t, g, unknown or other
caacacatggagggctaatcactggaattgattatatcaattgacactggagtaaaactcagtaaatataattctataattactaagagtccaatttcatattttcagtagagtaatcacagaattaataaacaaagataatttcgttgatgaggcttaataaataatctagtttattggagcttagaattataggtccatggttcccgaattgtcagctgaaaacactgtcaagggaatgaataaagagtagtataatgtcgttcgaatatagattggaaaaatagtaattatttattttttgtaataaataaataattttcaaattaattaaatagggaaaannnnnaaattgttaagacaaaatttgtcaagataatatttgttgagacaaaagttgtaggacaaaagacaccatccttgtcttaaacagacaagggtaggcgcctacatctttataggtttgtctttttgggtgggttagttagttaattaattcaattagacaaatatttaaagttaaaaagtagttaaagatatttcaaagtttttgagatattctctcaagtagttgagaaactccctcataaataggagtaaccaatctcagttatagatatttatttatgtaaataataaaatatgattttgtttaccgagatttttggaaactaaatattttagaactaaagaaatagcaaaatacagaaatgaagaaacaaatattttatacgtggtggaggtgtgtgttgggttttgtgccctannnnnnnnnnnnnnnnnnnnnnnnnnnnnnnnnnattaataaaagatcataaatcattctatgttgcat

SEQ ID NO: 140038 - DNA, 1486 bp, Cannabis sativa
  modified_base (1359)..(1375): a, c, t, g, unknown or other
agtatagtttagtagtaattaatcaaattcccagtggttcgacctcacttgcgtgagcatactacttgattgcgtgcacttgcgtagtaattaataatttttaacaataaggatctattcagttttaaatatataccaattagtattttcgatttcaaatgtatacctgatagtatctattacttgtttttttttgttctatatatacagttttaaatatagattaactagtatgtatattttcaaatatatacctaattgtatctattactttttagtatatatataattttaaatatgtactaattagtatgtataattttaatcttacttgttaatagtaactattattatatattcttaacatatactaattagtatatacgatttcgaatatatatttattaatatatattattttttagtattgattacttgttatttgttaataatacttattaatatttaagaatattaaaagtgttaaaaatataataagaaatgaatattatatttcacatactaattagtaaaataaataaataaacattgaaagttatctatttccaaaaaaaagaaaattaatgtagaaaaaataaataataatataaataatttatactttaataaaatatatatatataatatatataagagaataagttatatatatttatatgtaaaggcatatttatgttatacctctaaatatttttaaaaaataaaataaatatcttgaaggaaatatataatttatagaaactaattttaaattaagcacaaactaatatttagttgtttttttatttattacgttactaatgataataacaactattttttggtatgatcatttaacaatttgaaaaaaataaggtataaatgtaaagaaaaaaaatatacgttataattataattatttacaaaaatgtgtatatagatgtaatttttccttaataaaatgtatgataaattgtaaatgaatttttatgcacaattaagttctataacataactaaatttaaattttcctttttttttttgaaaacttacaaaaatactgaaatttaagttaacttttacaaaaatactgtcacacataaatcttttaaaaaaaaattgtatttttttataaaacaacatatttttttataaaacaacaatgaaacacaaaatagaataactaaaaacaacattgtaacaactaaaaaacaaacggtagaataacaatgaaaacttaatacagtacacagtacttttgaaaaaaaattcgctccacagtataaaagtaaaaaagttagaattttcagtacgtggtgtaattatcttttcttgggaaaacttacaaaaatactggannnnnnnnnnnnnnnnncaaaaatactatcacacgaaaaatcttttcaaaaatactgtgtttatataaaacaacagtggaacacaaaacaaaacaactaaaaataacagtgaaaatttaacacagtac

SEQ ID NO: 140039 - DNA, 644 bp, Cannabis sativa
  modified_base (509)..(517): a, c, t, g, unknown or other
aatattttattttaattttagggtttgaaaattggaaaaatccgaaattgggaaaaaatcccacaaaattcaaaaattgggtgcgtcttgcagctaggctacaagtgcagccccaggaggctgcaaaactggccttacgcgcgcggaagtgagggtgacgctgagaaaactcggcgctagcagcatctggttgggcgggattgcagggtcacatgggcatgtgtagcgtgcatgaccgaggcttcagacaatacctgtttgaaggacgcgcgcggatggggttccttgtccgagtgcctagtgcactcgatgcacccactcaacaaccatgcatccagaatttccaaaattcataacttcctcaatttttatcggaatcgagttccgttaaaaacaaaattgctaatttttcacaaggaatccaaataaaatattttcagaaatagaaaaaatattttttatggaaaaaattttgtataacacatacattcatcaaataagcacataannnnnnnnnaaaccatccaaatcaacacaaataatcgttttaattcatatttcatgaaagtaaattattaccatggctatgaggcaagttgtaggaaaatattttacgaggatctagatttactaacaggtatgtt

SEQ ID NO: 140040 - DNA, 2049 bp, Cannabis sativa
aacaaatgagtaagaacgttctttactagggtacaaccactgtaccacatacactacgtaccaacattatacaagtgttggtagggtttgttttgtcccctgagtaccactaagttatataccacacacaccatgtactttcccgtacttgtactggtaacaccgtaatgtactctttaaacaatatacactataccaatacactccgtaccatttctgtacaagtgttggtagtgtaccaccataataagcatgcatatatatatatatatatatatttcacacatacatttgcatatatatatatatatgtatcacatgttttacgctattcctaccttgtttctaaattcaagtgagttagctgacctgaacgaaaaatctcattctggatgaatgccctaatcacaaaatataattgggtaaattaacacgccaaaaccctaatccgggaaaatccaaacctctaacctaaggttctgctattaataactaaaactacaataccctaagaaacatggaatcaccaaaccaaggctctgaaatggacacgaatcgacgaaatgaattgttcggggaactttcccagaactagctaactagttttataggtcctggcaaaccggttaaccgatttgcaccaggttttccccaaacaattcaaaacatgtccaaatcttaccaaactttccagtttacctatattgacttcccacaacatattacaatcaatagaatccagaaatactcacaaaatcaaaacatgccatggacgaaccaagcttgagatttcaaactcaaacttgtgcatccaccacacctaacaacaaaactagctgcaagaacctatttctaacttaaattaaacataaaactaattccaactcatacaaaccctaacagcccctaaacttcaaaattgcataatcaagctaaacttcaagttaaaaattaaagaactagggtgctagcgcttacctccacttggaaacactaagatttcttgctaaatttccagaaaagatgaaggaattgggtgagctccttctggttttggtggtgcatgagcaaagagagagaaagagaaaagagttttctctatttttggtttttctttgttttttcctaagtgaataaaggcataattgattaatcctttgctgaaataaaattggctaggtgtcaagccctaaaacaaccacatatcccccacttgccaaattaccagaatacccatggtgcttaaacttaagctaattcaagcctaggggtaaatggttaaaaaccatacccccgctcaaacccggtattctatttatctctaatattatcccactaagaaaaagcttctaaacttacccatgtgattcaaatggccatccatcgcatttttcgtcatcgccgagtaaaaatcataaaatttgcatatttcatatataatacaaataatacatctagtttaataagttcttcaaaattgagaaattataactctaatgcccatttctaaaaatgggacccacaattaaataaattaataaatatttagagaattatcaataattaatgttaattgcctttactaatccatattctaaaatgtgatcattacaattatctccccttttaaaggatttcgtcctcaaaatctaacctcaatatctctggatattgagtcttcatgtcagactctaactcccaggtggcttcctccaccttgctgttcctccagagcactttgaccaaggctatggtcttgttccaaagaaccttttcatttgtatcaaggatctgaactggctttttttcgtaggacaagtcttactatagttcaagggcttcataactcaagacatgagtcgggtctgaaacatatttcctcaacattgaaatatgaaatacattatggacagccgataacactggtggtaaggctagccgatacgctgcctgcctgaccgagtatttgaaatggcccaatgaacctagggcttaacttgcccctcttcccgaagcgtctaataccctattggaatttattttaccagg

SEQ ID NO: 140041 - DNA, 774 bp, Cannabis sativa
attcattttttatcttgttgtttttgctactgtagttgaatgcaagaacttgatttctagtgatgatgtacttaaatgttgatcgtaatagccttgtcatctatttctatttctttgatagaatgaagtgagttacatacattgaaagtgtacacgaaaatgttccaatcttccaagaagtttcagctattgtgcatggattttgttatgcattgaagagcaacattttttttaagaaacattcctttgttgttaattttacatatatcttgcacgtgatattgaacattataattttatttaagttgtttatatattttagtacagcgaaaaataactattattatacttttaatttatacattaagtatttatataattatgtttgtcttcttttttttagaaaaaagacaataattgttagtagttttttttagctattaataatatatagctactatataaaaatataaaaataattgtatatataatttaaggaatctacaaattttaattactgtaatttaaagtgcaaacaacgtgaaatcaacatgtttaaaaaataacaaaattaaacaacgtgtttacaattttaaaacaactgtaaaacaacaaataatgttatttctaaatataagcaatttttcttcatatttacaatctatttctatttatgaccccacttgtttcaaaatcaacataatgtgtgttctcttattatttttcatatcttaatgtaagagataagataaatttttgttttaacatgtaaaa

SEQ ID NO: 140042 - DNA, 689 bp, Cannabis sativa
gcacatactctacgtgcaaactactgtcttacctattgtctcgcaataacagagattccaaacccctgggtgctcctgatcaggtgctggtaatcctaatcacataatctgagatttcacaaatagggttaatcaataatttcactttcacaaaatataaagttggcattcaaaatacagataatcataaagagctcggaataagctttccaacaatataaagaatgtcaaaaatggagtcccgagtcaaaagttatggtaaaaacaaaatcgggaaaaaggatggctctctgctaggtttatgaccgcggcgaccataaatctggccgcgaccactgggttcgaaaaacccagaaaaccatattttaaggtctaaaaatgctcactttttcatatattcgaaccttgatcaaaccatacccaaaattaacttcttgcagataaaaatcatcacaacaaatagctaataacatcaattccaacattaatcaacaacacccaaccaaagctccaaagcttgagcaaaatcaacaaaattccaagttcaagaacatgagttcaaatccaacacatccctattaaattccagtagcaaaacgctagtaaaatataaaattccaacctagaaaacatcataaaatctctgcccaaactcaacaatggaacatacaacaacaacaagctcaatt

SEQ ID NO: 140043 - DNA, 882 bp, Cannabis sativa
  modified_base (458)..(459): a, c, t, g, unknown or other
ttttcagtttcttattaataatgctttttttaaagcaaagaaagtatatatttattatgaatttaaggtcagaataaaattggtaaaattggggtgcaagagagaaaaacatatgatttggaaggtggtcaactctgaaacaaagaaatggacaaaaatgttgtgatttttgtatagtgctgatctgaaatttaatataaaacattcagactttgttgaattgtcattttgtctatgctcgggtccaatcaaattcagtgcactctcattgttttaagtcctgccttcacttctttaatgcaactctcttttatattttttttacatgtatctataatacaaaaaactaaagaaaacacttaattttgacactaattcattccaatttaatgtatgatgtcaaatgttagcaagttcattccaacacacaatttaatatctgaaaaacacaaaaacanntatttacaatcaaatatgtattctaatttttcaattatcaaatcaactattatgattacatcttttgatcaagttaattagacagattatgggacaaaaatgacctaattaactatgaaaaatgaaaaaaaaaaaaaaaaaaagagaaagttaaaatacctgagttgctgccgtttgcgatagagaagatgtgtttgtcgtttggttgaagatgccgtcggtgacttagggagaaggtggccggcgtcgtcaaatcgctgggcagcgaatcaccgtcgtcgtccactctctgagcagtgggcagcggcttcaaagagggatgaggtgcgagagagagagagagagatctgatgagatctagggttttgcttttttttgttaaattaaaaagggaaatttgattttctatacttagaaaatcaa

SEQ ID NO: 140044 - DNA, 719 bp, Cannabis sativa
atctgattatattgaaatgatttttatttagggcataaaacccaacaataccaccatcgacatctcatccacgatagagcccattcttaaactgtatcatcaacccccttgtcttgacggcagttgttaggttattcttagtattatttttaagttaatttttagtgtgtttttaatttagttctactctattttggagcaattttacgctttttatcttttatttttgcagatttaaaatcaaagaagattataaaatatcaaaggaataagatggaaaaaaagataaaaagatctcagaaaaagataatctataaaatagagaaaaattgtacaaaaaaataaagttgaaacttcaagcctgaattcgactatgttctaattagattttggaaaaataaaacataaaagttttagatctctctttcatctttccagaacatcttgaatcgtccaattccgagcaatatcgagagagttatggccaaaagataatcagtcgacgcagtagaaaactcactgccaaataaaaggggccgcgacccatgatttccatgcctaggcgcgccccccttgctgatgaatatattgatcttgatattgaagatgaagagggtcctactattgatgaacgacctattattgataagggacctatttgttggaatttattttaccaggatcttagatctacgaacaagtatgttgtttaacaccct

SEQ ID NO: 140045 - DNA, 607 bp, Cannabis sativa
  modified_base (370)..(381): a, c, t, g, unknown or other
gtgattttgcttccatgaacatgagtagctaaacacttgattagggtttagatggatgttgtttgacattgttttatggttttaatatgatttatattccctcaatttctaagtattctattttattcgtacttaattacttttaattgcctggccattaattaactattttatgatttcaatgtgaaatctgagaagtgagtgtcgattatgctatagtgaaatagagctaaatttcgatatagaacaagagtacctgtacggtttagataacttatagggtttctatgtttaatgcctgttacacgtttaattaatcacgatagtagaaaatttggatgtaatatttatatatctgagaagactatannnnnnnnnnnnaaacctgctattgcatagaaatttataataggaagataattatattaggccataatcaatagaaacaattaaaatcgaagccctagtttttattaactcactactagaaagacgggttttagtgacacacattgagtaactctaaaactatttagtgacacttcaacgcgcgtcactaatgagggtgactggaaagacagtttttagtgacacttcacacgtgtca

SEQ ID NO: 140046 - DNA, 734 bp, Cannabis sativa
tgaatcacatccaaatcacatattcatcgttttaaatccatatttcttgaaagtaaatcattaccatggctttgaggccagttgttcgattatattttactaaaatttagatttactaacaagtatgttgattaagaccctaaacatgaattctctaaaataatgtaattaaacacatataaagtttaggtaaacttacattgattgcagcagaataatatgtctgctcgcactcagatttctaacccttgttcctttttatcgcagagtattattaagatttgagcccgattctccttcaggtgttggattcttcatagtcctacacactatatgattgagtacttgacttgctaagggtgggcatgcactctttcactattggttcgaagtttatgaagaacaataaagggagattcgaacatagtagaggaaaggaggctctcaaagtttctagttatctgacataatgtaaactagattataagagttggatgagagatcatcctattccttttatactatttcacctaaggttaggatttaaattatatggattaaaaaaattataaaataacaacaaaattaaccctatagtggtcgaccatatagatgggctccactagttataattctgctattttttcaaccatttatcttttatttcataaataccatattttctaattttaatcctataaatgccaaacctatttatttaataattataatta

SEQ ID NO: 140047 - DNA, 537 bp, Cannabis sativa
aaaaaaagcttaaaaaaataatatatattgtaaaaaactcttatttataaataatcataatacataattccacctatttggaccccaaatctaaagccaaattttccgtttatgattatattgcattaataataaatgtttttggatcatttactataatttatttattaaatatgacttatcatatgatgttttatttaatttaagtgtgcatatatcattattcatcattatttttacagtaatattatagtgatattttcttaaaaaatattatttatcaaattaaaatatgatattaggtaggtccagttcaaaaaaataaagttgatattagatacatattgggactgtttggtaatgattttaaaattggatttttgttttttttaattaaaaaaataaaaacaaaactaaaaagtgtgttcggtagagtgattttgttttttatttttaaaattaaaaaataaaacttaataaattttaaaaacagatttttgttgattttaaaagttttaaaaacactttttctcagtt

SEQ ID NO: 140048 - DNA, 805 bp, Cannabis sativa
ttgtgagtagatataagatcctggtaaaattaattccaataagatgccctctggccccaattacctgccaacattgcaagaagcattttgacgatggagtcttcgtggcctggcagaccaatggccagaatctaaagcttgatttctaccccaagcctgaagagggccttgcctgcttgtgggaaaagaagaagaggctagatgcaatgttggaggagcgcaggggccctcgtcttccaccccgtattgattaaaccggttgttcaccaccaccattactatcattatcttctctttttttttgttacatattcaatccttctcccatcttcaagaaaatttattttctttttcataaggggagacacttatggcccgtccccaggccctttttttatctttttgaagcttttctttgggatccaaataatttatatttatgtttgaatatatagcttttaactttgttaaatttggtctgtttacatttgtccgtgtgatatgccttattacccccctgagtgacataaaaatcaatttttaggtcactcagttttacaaaattaagttagaggttgcatatatttgttcggtacaaatttactttacagacataaactttatttttcaactattggtaatggtaatactttaggaggtgaggtgatcgtgatcgacatcgacattccaggccctaggcaccatggttccatccatcctctttagcttgtaggtcctggagctaatttcgtccttaatttcatacggtccttcccaattcagcccaagtacccccactccgggt

SEQ ID NO: 140049 - DNA, 577 bp, Cannabis sativa
gcctctccaaacgggtctaaggaaaaatgtgcgtgtgaaataaattatcactatgtgataatacaaacaaaattgttctatcctatctttggtttgtaactaaagaaatcaattctggataagaatttcattttattctatattaaaatgtcttatggtatcttataatgtcttatgctattttatgtacctcctatgtacttttattaattttattattaattcaatattattttatgctattttttaatttcaaagtttccactctattaaaagttgaatgttattttaattcaaaaaattttcatttaaattatggtctttttaatttatcaaaacttaacttaattgatgaatttaacctattagtcataaacatagttttttctgtcacatcttttattatcttttcaattatctaatttctttaagttaacaatttgtgaaacattttaactaatttaaatgaattttttccaataaattaataagtttttaatttataaatttttaacctaataaattttctaattattatttaccaacaagtaaatttgtaacattttaaaattaccaa

SEQ ID NO: 140050 - DNA, 861 bp, Cannabis sativa
tggtaaaatatttccaacaggttgataccttgaaaacaaggtttgctaacactctcacggctgcagatatcttgaacttgttgactgaatgatacgggatggcatcaattcaatctcgctttgaagcgacaaggaatttcatcaatgcacggatgaaacctcatcagaacatgtgtgatcaccttctccaaatggcgagttacttccaggaagctcaaaatcatggagctgttatggatcaaacaactcttgtgagtctgatcttgaacaatttgactccagcctttctaccttatacttcaaattatgtcatgaacaagaaggaacaaggctttcacgagtttgtaaatgactttaagacatttgaaaatttgatgggaggaccacagaaaggaggatctaaagctcataattctaggaatgctaatggggcggctaaggctgaggcaaacttttcctctacttccaaacccaagaacaagaagaaatggaataatagcaaaaagcatgttcaaaatgtgaaaacagttaaaaagaaaaaggctgctactcccggtgataagccaaaaggaaaattcttctattgcaatgaaaagggccacttgaaaccccaattccctaagtttctagtaaagaaacaaggtatttctttctatgctataaacgtatgtgttttagagaactattaaacttagattgttaattttggacctactaaccatgtttattttcttcttattttagctccaacttcttgaactcagatgttatcctagcgagttgaatcggatggttggacagatgggtggagacagtccaagatgaagatggagctcagaatcttctatttttaaaattatt

SEQ ID NO: 140051 - DNA, 850 bp, Cannabis sativa
tttatatgtgttgaataacatttagacatattctaatttttatgatttgcaaattgtttgaaaaattaaaaacttaatctgcatatttttctggactgttctgttgcactaagtgccaaatatattttcgtacaaatttttatgcaggttatgatttttgagtttattcaaaatacatccattatgctaccagattttctaaaaaataaaaagaatatgttctttgttattcttattatttgtatgcttttggttatactgatgagagtcatgtttatcgtgatttgtgcatattattttttcacgacctagtctctgtgtcattatgagtagatcaggtgtgcactagcttgtataatcagtacagagagtgaattgaatctgatcctcaatattatggtggttattaggtgcgactacccagttttggatgtcatttcctatgattggtattgagcactaggggtctagtggacggtgtgatatgcatttgatgcttgattttgtgattatttgtggtctctctactttgtttatacctttcgataatggtgataagatattttattttaaaagataaccatgcaggaatttttattaaaccacgggtcctttgatattagttgttttcctactaggctttataagctcaccccctattttctcccattccaagaacttagtttgatgctagtggatgaggatggtaccgttgaggaagaaattcgttattagtttagtcttattctacttattgaacttccaatgaaactgatttttgtatttatgctagaatggatggtctggatgacttaattagttatgtactagttaaaaatgaggaatgatg

SEQ ID NO: 140052 - DNA, 547 bp, Cannabis sativa
atcaccgtatcttactaaaaaaaaattaacgacaaaaaaaaaatatgtgtaaaaatttaaaagctaaaaatcttaaaagttatatttaaattttaacgttattgttaaaaatatagaattgataaaaaaaaatgatatagatatggtatatgatggactccactaataaccaatagttaattagattatatattaaggtcgagtgtgttataattatcagataatgtttggtgtgtaattaataattgactatgacataacatagctagaaagatatattatgtcctatataataaataggtcatgtctcttgacatgtttgttgtctctctacattagagtgattctcttttttgtgtgtaattgcttactggtgattgtttgattgatcttctctgtaatggcttcatctagtggagtgaacaaggagatggaacaaaagtggaaaaatatatgtcttgatgatgaggaagataacgaggtggtttatgaagaggaggatgtggaagaactcgagtttgacgatcggtggtgccttgtcggtcga

SEQ ID NO: 140053 - DNA, 1343 bp, Cannabis sativa
gccgcttacgtagcaattttcagagaaatgctccatgagtttaaagaatacaaagtgggatgaatcccacgagaaaagaacgcttacgcagattgtctggccaagctagcctcggacaacaaaatagaaaaactaagggttgtacccatcgaacacctcacggagccaagcatcaaagccaaagaaacggtagctactaatgagtaaggaccaagttggatggactccatcatcaaatatgtaatgaaaggagaattgcctaaggaaagggttgtatccaggaggttacagtatcaggcacatcgatacgcaatgatggatatatcctttactggagagggctcagcatgccgtacttaagatgtgtatcggaccctgaagctagacggatcatgcaggaggtccatgaagggttctatggagatcacaccggaggtccgagtctctcaaagaaaatattaagacaaggttaattttgccaaacaatgatgaaagattgtgtagaatatgtcctaaaatgtgattcgtgccaaagatttgcaaacataccgagaaccccgcccaacgaaattaccataatgactagcccctggccctttgcagtgtgggggagatagatctcattggatccttaccaacgggaaagggaggggtaaagtatgccatagtggccgtggactatttcacaaaatggacagaggtcgagcctatgaagaccataactgctaagaaagcattagactttgttatcaaaaacatagtgtgtcgatacggcttgcctcataaaatagtctcagacaatggaaagcagtttgactgtgaagaattcacaaacttttgcaaccaaaagagagtcatgaaaagcttctccgcggttgcaaggccgcaaacaaatggacaggcagaagctgtcaacaaaatactaaaattcaccttaaagaaaaagttgttggcctggaaaaataactggcctgaagaactgccacgagtattatgggcctaccggaccaccccaagaaccacaactgcagactccccattctcaatggtgtacggatgtgaagctatggtaccagtggaaaccttattcccatcccacataggggcaacatatgatcctgcaacgaacgaagccttattacaagaagcaatggataaaatagacgagctccgggatgagtctcaagtacggatagcagcttatcaaagaaaggtgactaaatacttcaacgccaaggtcaaagatagaaaattcaccattggcgaactagtcctacgaatggtctttctaggcacccaagaacctggagtgggggtacttgggccaaattgggaaggaccgt

SEQ ID NO: 140054 - DNA, 683 bp, Cannabis sativa
  modified_base (410)..(417): a, c, t, g, unknown or other
atggtactctatcactatcggctcaaattggtcaagaacatcaagaggtgcgaaatcaatatagaaagagtctctcatctactagttgtctaacagagttaaaaaactaggtttttggttaagattgagttggatgagaataagagaatcatgttccttttatagtatttcaactaggatttaggatttaattatacagataaaaaaagaataaaataatgggtagaaatacacactagtggccgaccacttaatgggcctcactagttataattttgccactttatttcaactatttatccttctttcaataatgttatatttttcaatttcaatcctataaatgtcaaaactatttatttaatcattatcaaataaaattgttacttatattatttattaattagacnnnnnnnngtctcttaattaataaataaactccaaaacttcttttcttcacaattaagaccttgcttagtgaaaattcataaataagacaaaatctaattttagaattataattgattaattaaaactaattaattaagtctggaagcagtattattacaactagtctagggagaatgggactatataatcaagctcccaataagtagaactagaatttaccaagtaaattctctaactattaattccttcttgcgccactatagattcagaat

SEQ ID NO: 140055 - DNA, 916 bp, Cannabis sativa
tatacaatagtagaatctttcctaacggattgaatattagttccattataatattaattctaggagtgctaatagttggatccaaatctgtataagttaattaattgttcacattgaattaatggtacataaaaaatcaagagataattaaaaggataaaagagtaattttgaccaactctaattatgaactaataattagattgggactgcttgtattgattatatcaatggactataagaattctgtaaatataattttatattatcaaagagtgtaattctatatttatagtggagtaataataaaattaacaaactagattattctattgatgagagcgataataatcaactatttattagagttttgaattataggtctatggtcctcgagtcacctttatacaacactatataggggaagattttatttgatgagtaaaatttcaagtgagaattaatttttggcgaaaataaatttttaagggtaaaatagtaatttgtgagaatattgttttggttaattatgacaattatgaattgtataattaataatatttaactatttagttttattatataaaactatattaattacttaaatataatattgatcttaaataatattaaaagaaagaaaagttatttagaaaaaataatatatatttttttaattcttgtgaaataagagattaatgaaaattaattaattattatttgttagcaaaataaataataaatcttatttatgcaaaaattaaaaaaaaaaaaattaatttttgactttaaaatatggtccacatgtgtggcctagctgtaacgtcctaaataattaggcacgctacccaagatacttatgaaaccctaatcccctaaacgggattactaacaaaattagcgcaaaatttaaactt

SEQ ID NO: 140056 - DNA, 837 bp, Cannabis sativa
gcagtcgtgaccaagtccctaacattcaacctatccttgtcgtatgtggagaagaccttggcgtgttgaaggaaaaggttagtgggggcagtgcgatgcatcgggggaaccctaacccactcggtaagcagctctgggcgcttaatagcttggaagtcggaggagaagaaaaaccgatgacagtattccttaacattttttctggaaattaaaaggaaccggaccctcattagcaggatgggaccggagtgtgaaaaaaccatctttgagtttgtctcctttcttggtgacagataaaagttcacaaaaataaaggattttagctttggcaacataaaaaataaacaagcctgagagcaagcgataagcttgggggataagttggtaaggcgcaaagccaacaaaaactaagaaatttatgaaatagtcctggagcggtatcattgccccggacataagacggtgaaagactccggaagcagaaggcttgatcccggctaccgttacaatcttctccagttgatgggcgcaagttagagttgagtgcaactaatcagcctcccagccgattgatcggcaaatgtatttctcctagaccacaggtcccttcatcacctcctccggggtggacatggggttggatcctttgcctgaggatttcgcaccggtcgtagggactgacatgccttgagattagtaacattctgaaaaagagaaatccaacagttagcccccaaaccaaaccctaacataaaaggagggaatgaggctcccctaactgctagaaagaggccccctccggatgtctgccagaaatgaaaaatctagggattctcc

SEQ ID NO: 140057 - DNA, 632 bp, Cannabis sativa
cctccatctgaagaaaaagacagacattgaatgcatgaagggaaacgaagaagaaggagggccaaatgttgtctgaacaagtattaatggtagtctcggtaaagggaaaatgggggctgcactaaaaattaacaaatgattatattcaggatataattaaggtgcattaattaaagaaagagaagatgagggaaggaaaaacgacggttggaactggaaaaaccagaagaagagaccctagaacgttccagagcagggatttaatactaaaaatattttgaatattaaaagtacatataaatagcaaaaaatcactaatttttcatatatatatatatattccttgttaaaggagcaccacaattaagttaaaccttgtttctaattgagaatttagtccttatttcctcaatgtattattttttttgttgcatagatctctatgtgtatttttatagcagaccttcaaataaaaaggaaaatctatttaaaaaaatatataagagagaattatttatatataaattatgtatataacaaataaaaaatagtgatcaaagaatacttacttttaatataagattgatttgtgttgttctctatttatatacatactactttgcatgattaaa

SEQ ID NO: 140058 - DNA, 1065 bp, Cannabis sativa
ataacacgccaaaaccctaatccaagaaactcgaacctccaacttaaggttctgctattaataattgaaactacaataccctaagaaacagggaatctcccaaacaaggctctaaaatggacacgaatcaacgaaaaagaattattcggggaacctgccagaattggttaaccggttttacaggtcctggaaaaccagttaactggtttgcaccaggtttccccaaacaattccaaacctgctcaaatcgtgtctaaacttcaccaaaacttccaaaacacctatattgacctcccacaacatattccaagcaacagaatctagaaatatacataaaatcaaaacatgccatggatgaaccaagcttgagttttcaaactcaaacttgtgcatccatcaccccacaaccctaaaccagctactagaacatcattcaaacttaaattgaacataaaaattgaattccaactcatacaaacccgaacagtccctatacttcaaaattgcataataaaccaaaatcaaagcttcaaaaacaaaatattaagagttctaggggttaccattgcttaaaacctacttgaattcagctagttacctttcaattacaccagaaaaatcccaattctaagctagtcttgtggtggtcgagcaaggaagaaagagaaaagggtctttattttattttattttttgacttttttctaattttcattcaaaatgaaataaagcttgattaattaatctcatgctaaaagtatttggctaggtgtcaagccctaaaatagccacatatcccctcacttgccaaattactaaaatgctcatggtgcttaaacttgagctaaatcaagcccaggagtaaaatggtcaaaaattataaccccgctcaaactcggtattctatttttctccacatttaacttgctaaaaaaaaggttctagacttacccatgtgattcaaatggccatctattgcattttctatcgtcgccgagcaaaaattataaacatagcataattcatatataactcaaatattacttctagagtttaataaaatct

SEQ ID NO: 140059 - DNA, 725 bp, Cannabis sativa
  modified_base (497)..(502): a, c, t, g, unknown or other
gtaaaaggaagaggaaaaattaaaggtcttttgatgactatataaaaataaagttaagatcgtgtattcatatgaggttattagtatggttcagcttgcgtatggtgaagagaactaaggaataatactcgtagcgctattgtttcgctttaggctttccaaagatcattttccagttactcattttgaaatttgtttagggagtagtgatgagataacaaaggctttagcagtatgatttgaggtaagaaaattagatagttttgtacgtgtttatttgcataaatttaaattctttaagtattgaaatatgatttatgatttgttattatgaataagtatatagtactaagaatgtgtggtatggacacaatatgattttgtgaatttatatataaattacggttgttttaacttgtatatattgtatgttgtatttgtatattgtatgttgtatgttttaggttgtatgtgttgtatgctaacgtctcaggtannnnnngggaccatggtggggtatgatatggggtaaggccgttgaatgtagagataccttaccctgtatttttctgagacgtgtatgagattgttatggtggggtatgatatgggataagaccgtcctgtatttttctgagacatgtatgagattgctatgatggggtatgatacgggataaggccgttgaatgtagagataccctaccctacattttactgagtcgtg

SEQ ID NO: 140060 - DNA, 607 bp, Cannabis sativa
  modified_base (318)..(322): a, c, t, g, unknown or other
gttgaaaattaattattttaattaattttagaccaacttaaattaagtaaatttatcattaatgatttatataaaataaatagactaaaatgtattatatcgaattagaaaataaatagttagttaatgaaatatctagatagttattttctgtatagacttgtggtatttttctagatatatttaattaaatagaaaataatatttaagttgagtttattcaagacacttaaatatttgatatttttcttagaaatttaatgaaataagaaaattatatttgtgctgaaaataaatttattaattaattttggaccnnnnnaaattagaataattttttagaatttactttattttattttttataaatttcgaaaatgtatttttctaaatacattggattttgaatatagtcatatatttattagaaaattaaatttgagttgaaaattgattttgtaattaaatttggaccaccttcaattaggtaatttttcataatatttattgagaattaatactatgatgcaaaataattttgtttattttcatatcaatctaagtataattttataaatattaaattaaaatttgcatttagaatttt

SEQ ID NO: 140061 - DNA, 524 bp, Cannabis sativa
  modified_base (50)..(64): a, c, t, g, unknown or other
  modified_base (172)..(172): a, c, t, g, unknown or other
agaggtaaaaatgatagactttaaaaaagagggtaaaaataaaagaggannnnnnnnnnnnnnnatagagtgtaatttcctcaacattaaagggattatttttgggtttatttcataaatacacaaaaacaataaaaaaattataaaattacggtttcacagaattttaaanatttttacgattttttaattttatttacggtccttttatgttgtactcttgttaatttgttgttgattttttattatctgtatgttattttttgttgttgttttgatgttgttttgatgttatttttatgttattttcttgttgtttctatgaaaaccgtaaaaatgtataaaaaaattatttaaacgtaaaactgtaattttttttaccaaaaatggtattttatgtaattatttcattatttttttaacaaaaaaattacaaaaatatgattacgaaatttttaaatatttttacagtttttaagattttatttacataaaataaagttggtttgatattatttttctgt

SEQ ID NO: 140062 - DNA, 1086 bp, Cannabis sativa
tgggaaaacatgaaaatttgggctcgactaataatgtggatcattgaaattgaatcctcccttatgtttaaaacaatttatttacggataaaaaaattatatttttacatttaatttttattttacatttttacaattttttataaaaacaatatgaaaattataagaaacctacataaaataacagaaaaatagcatccaaataatatcaaaattacatataaataataaaaaatcaacaacaaattaataagaatacaacataaaaataccgtattttttgtaaataaaactataaaaatctttaaaatatttaaaattctgtacaactgtatttttgtaatttttttattatttttgtgtaattataaaataatctcatttatttatatactaattaataattttgttttgctacatatataacacgccaaatataacttatattgttataaactataaattaaattctttcaaaaacaaaaacgataaattaaattattcattccaaagttgaaaagaatttttttataaaaaaaaaaatccattactacttgtaaagtaatttttatttcaaaagatgaggtaatatattttatttagaaatattatatatattttaagaaatttatgaaagtttagaaagtatattaaacaagtttaagtaaagtaaaatatattattaataaataaagtgatatttaaaaaaaatcacaataaataaaacaagaagagttctatttgcaccccgcaaaataataagtacaactcaatatttaaaaatattaagcttaaaataatttttaaaaattattcttaatattttttaagaattttttttctcatattattttgtgttaaattcaacactataattttttttttaatttgttattttaattttttgttataatatttaaaatataatttatttttttattgatatattttttaagaatataaaataaaagagttaagaaaacaatataattaaatatttatataaaaattattaaaatagatgcacatataaatttttgggtgattctacaatgcaccccctaaaaattattaaaatagatgcac

SEQ ID NO: 140063 - DNA, 544 bp, Cannabis sativa
attaacagcggtgctgctaataattgtatatatatatacccaatcctgactttcgatacagctaatatttaaaaatattataaattttgaaataattttttataatttttaaataataatattaggtttaccaatataaatgtgctacgtgtacaagagtatacacataagtagtctatgttggcagttaactgtaaaaaatagatgacaccttaaatttattaagagtttagccgtttggagggttttattttgccacttaaatttaaacttgaaagattaagtacaaatacattaataattgaaaatagtaaaaagaaaatgactccttcaacttacttctctctttttttcttattttttattttttttttatgaaaagataactttttttatatttaagaagaataattattaagttggacacaaaaagaattatatttgaatagccatagaatttaatttttaaaaaaacaaaataagtattatttaattatttttgttggtagccttagaatagtaataaattaataattagtaattt

SEQ ID NO: 140064 - DNA, 694 bp, Cannabis sativa
acttattataaagaattattcattctttcattggagagagagcatggagaaatggctggcttgttattgacttggcccattttctttgaatctgttggttttgcatgttagcttcaagactttgaactataataattgatggtgaacaatgacattatggactaaaaaaattgggcttgggccattgtttcatgtttacaaaaataccaattatcgagttgggtttaacagctccaaacatgccactgtttcactaactcaaccctaaagttaacacaaaattaaaataaattaaatatttccaactataataattttacaattaaaatcatgaaaataattaattaaattaattttatggacgctgttaaacctttaaaatatataaatttgagccttaatcacaacccccaacttcagtcttaagatattttaaatgcaatgcttcttatttcatctactaagactctcattcaaaaattgagagaagatggatgggatgaattagtttatgaggtgaaatctttttgtgaacctgttactatacctgtcccaaattttaaggctcactatactacaaaaagagaaagaagtcgtggtcagcaaaatgcaattacagtggagcattattacagagttgatctttttaattcaatgatagactttcaactacaagaattaaacaacaaattca

SEQ ID NO: 140065 - DNA, 792 bp, Cannabis sativa
tccgaaactattttgtacgacaatacgaaccggcagattatgttcttcaaaaaaaagtcttgaactttcttagatgtaatggttgcgagttgttcggcttccgtccacttcgtgaagtaatcaagcgctaccactacgtactgcactcctcccttgcccttgggtaattgtctggtcaagtcaattccccatatggcaaaaggccatggactttgcatttgagttaactcgttgggcggggctcgaggtatcttcgaaaatctctggcatttgtcacatttcttaacataggcctttgaatcttcaatcattgtcggccagaaataaccttcccttaaaattttcttagatgaactctgcccggcggcatgatttccacaaaatccatcgtacacctcagataaaagtcttgaagctccttcttgagtaacacatctgagcaatggcatggagaaccctatctttacataattccctctactatgatatatcgtgcagccttccttctaatctttcaagcttcatttcgactatctgggagttcccagagttgaggtaggctgctattggtgtcatcaagtttggggaagtatcaatcattttgatctcttccgtgccagtaatgctaggctccttgaggaactggatagggaccaagttcgctttatcacttacattattgcttgacaattaagctaacgcgtctgcaattgtgttttcttcccttagaatttgtctgagaccatagcttttgaattgtgcgagcaggtcatgtattttgcttagatatgc

SEQ ID NO: 140066 - DNA, 998 bp, Cannabis sativa
  modified_base (715)..(715): a, c, t, g, unknown or other
aaattgactaaaaaattataattagtaatactaacaaaaggtaagtaggtagtttagtttgtagcacttaatttttatgtaaaatatttaggggcaaatattcttatcgttaagaatttattgcaatgtaatcatcaatgataaattaaattttaaacttagttaaaaagacgagtgctaccgtcaacttcctattataaccttttagtcaatctctacacccgaaaatatatgtcagaatattttttttttcaaatttttttcacgggggtgttcgttatgcttacaatatcatccctataaatttttaaaaaatttcgaataatttacagtgtcaagaatattggaaaagttctcattacaatactcaaaatacaaataaaagtatttcatcaagattacaagaaagctagagaagaagaagaataataataatacacaaaaagcttgactaaggcataagggccttttatcctaaaagtcatttcctccctaatatggacacttagggaaactctagaaatgctcttaaggacttatcaagccccatatgctcaacctagtgtctaaggatgagcatatttaaggatgagcatatcctcacaaggttctaaccacaaaaaaatgatttcaactacttctctttcaagtgaacaatatggcctctatttatagagttttcactctcatatgaatatgaatgaccaccataaancccttagatgttaccaatcataaattggacatttatggtattaattgggtgatttggagaacttttgggctattagaaagactctcaaactttcaaaaacatatgcaattgtatgctgaaaaaatagtaactagttactaattactagttactgttttttcagctttggccaatttttctccaaagtgtttcaaatcattcccacttgattttgaaccatttatacaccttataaatgaataaatcaagtctccaacagttatattttcaatagctatcattc

SEQ ID NO: 140067 - DNA, 592 bp, Cannabis sativa
tcaaagttcagggagcaaaaatcctaattagccttaaattaaatcaactgttacaagagaactaataaaatatggacaaccatcaaataaaatctcctaaaaaactatatgttattggaatcgggcctattgatccagtctatgacaattgtcgaatcactttcagtattggagatagaaaaatcgaattcccaagcaatacgcaaccccaaccttactgcaagcaacttcaccacattcacaccggactcttcggtcagccccactgcccaacacacccaaatttgtggattttttttgtttgctcaaatacgaccaagttaaaatttagtaaggtgtgttataaggtgcatatatggtatctatcttaaagtcaattgacaataaaataaataatttattcatgttataacttatatatgtcattttattttcacacaacacttactctaataataatacttatattaaattaaatgcatacaatttattgattcttttgtcacataataaacaaatacgtataagttaattggtgtatatatataatatactagcaaaaagttacgtgcgaggcacgtatattaaattt

SEQ ID NO: 140068 - DNA, 1045 bp, Cannabis sativa
cttgattactttccactactttccactgtgtagtgtgtagataacacagaacacagtaatcatgaataacaatgtgataaggatttagatgaatttataaatcaaacgaatgatcatgaaacaaacacgtgaaccaagcaacatattaaacaaataatacaataattatgtttcttcaatgataaatgaatatttaagattacattgaaatagagttttagttgggacataaaacccaacaaactcccacttgaactagcataaaacaattagtacatttcaattaatcctagattatttctatgtttttcaaatttagtctctgtcaaagtcttagtgaatggtcagttaggttgtcttcagtatcaacattttctactagtacgtctcctcttgccatatgttctctaatgatgtggtatttcctctcaatgtgtttacttttcttatggcttcgaggctctttactgttggctatagcaccagtgttgtaacaaagtaacactagtggtttttctattcctagaataacaccaagttctatgaagaactttcttagccagaccagttccatagcaacttcagcgacaactatgtatttggcctccatggtagagtcggatattgtagattgcttgacacttctccaaacagctgctccacccccgagagtgaataccatcccaaatgtagactttctatcatcaagacaagcttgaaaatttgacttggtatagcctaagggatttaaagcaccacccttgtagactaacacataatcccttgtcctctttaagtattttagaatatgcttaacttctgtctaatgttcctttttggggtttgactgatacctgctcacaattcccactgcataggaaatgcaggaaatgcctagtctagttagtctagtttatagcatagcatacattagacttccaactgctgaagcataaggaaattttctcatatctttaatctcttggggatcagtgggacactattccttagatagtcgcacaccatgtctagaaggcataactgc

SEQ ID NO: 140069 - DNA, 716 bp, Cannabis sativa
aagtaacttaaaataaaaaatatgcaataacatcataaagtggagcaaccccattatagaactctcaaaatatgtaaaaccagtttcgaacccttgaatccagtgaaacgagtttcaaatctatgaaaaaacataaaacataaatgataaacaatgaagtcaactgaaaccagtttcatcagtcaaccaaataaaaaaaaacacacatacacaaataaaaataaaaatattaatcacaaatataattaaaaataagacacaatataatttagcaaaaaaaatattacacgatgcacaatgcacaatgcacaacacataatgcaatattgcaaaaaaataaaaataaaacaacacataatgcactaatgaatttttatggagtctattaatttgaaattacatagtgatcaacattctatccgtagtcgatgcatttcagaacgaaaggtggggctcaaatgcaatattcgacaagcaagagcttagatgtcctctcgggaacagtctcttgaaatccgaactagttcctacatagcacctccactaatcatgtcctttgcatttacttctgtaatttaaaaaactaacatttaagaaactaagctatgagcaaataaaaataacatggtgttaatgcctagcaacactattttttcactttttttgagagagtgaggaagagaccaagggcaacacttgagagagagagagagaga

SEQ ID NO: 140070 - DNA, 534 bp, Cannabis sativa
  modified_base (160)..(171): a, c, t, g, unknown or other
acttcttcactaaatggacggacggtgagcccctcgtctccataacctgcaagaaagtccttgagtttgtcgtcaagaacattatctgtaggtttggaattcccatgttcccatgaagatagtatgcgataatagaacccaatttgatggcgacttgttnnnnnnnnnnnncgagaggaataaaattatcaaaagattctcgtcagtatccaggcctcaggcaaatggacaagtggaagccgttaataaaacccgaaaggatactatcaagaagaagctagacgctgccaaaggcagataggttaacgagctacctcaggtagtctaagcccatagaactaccgagaagacagctacgggacacactcctttctcgctagcatttggctcgaaagcaatgctgtctgttcaagtgaacatattcactcacagaagagagttttataatcaagaagaaaactaggaacttttaaaattgtccttggatctacttgaggaaaaatgaactgagtcgcaaatcaccaacgtagcata

SEQ ID NO: 140071 - DNA, 580 bp, Cannabis sativa
gttcttaatggtttggtttgagaaattttttggtccggtttgatttttaatattcaaaaaaccgttatattggtttggttcaaaaattatgaaaatctagatcaaaccaatccgtaaacacccctaatatcaatgatctattctattctgttttaagtcaatatgagattttggttgtacatcaacaattttccccttcaaacaaaggactacttacctcccctcaaacaattttccatccgttcactttctaccaactagtgtatacttcgctccaatgtctaagagcacacgctttacatggagcaccactactaccttaagagttcttgctctttttcaggccaattcctttattcagagaacataatctgtctaattgagcacatcaacgaatctcatagtgcatgatattatccaaactcatctcctttgatcaataaaaattactagccattggagcattatggccgtacgtggagtaggcaagtgacacattgtcatcttgttcgtgttatattattttataatataataaagtataaattaaaatgtgttaaatatatgtgaataatatata

SEQ ID NO: 140072 - DNA, 735 bp, Cannabis sativa
taatgttgtttgataattgaacaagtctttatatggtttaaagcgagcatctaggcaatggtttgaaaaattttctaatgctctaattgaggaaggatttcatcactctgccactgatcattctctcttcatgaagttctttggtactagtttcatcatcttacttgtctatgtagatgatgttattctagcatccaatgatctacaacacctggcaaaatcgaagaagagattgaatgacagatttaagttataagaccttggtgacttgaagtattttcttggactggaaatagctagggctgtcaagggaatttttgtgtcacaaaggcattatgcacttcaattgcttgaagacattagataccttagaacaaaacctgtcactacacctatggaggctaatctaaagctgagccaagataacaaggatgattctttagcaaatccaacactgtataggagaatcattggtaaacttcattacttaactatcactagacccgatttgtcctatgcagtaaacaaactaagtcagtttcttgttactcctaaaactagtcacatgacagcagcacaaagggtactgcagtatgtgaaaggcacacctggacagggagttttcttctcatccaaatcagagattaaactggaggcatacactgatttggattgggctgcatgtccagatactatgaggtcaactactggcttttgcatctttcttggaagctc

SEQ ID NO: 140073 - DNA, 1478 bp, Cannabis sativa
aatatctatattatcaacttatcatagtattcccataaattctatcaattaaaccggttatgacatttctagccccccatcgagtctcaaaggtcgccaaacctgaaaatatttttattacaccggtaactcatattgcattcacatatattatctaaatctctataatttataaattacgcttatttatccacttatagcaaaatttaaatttatgttgaactatattagtaggatcataatcccacttattatctaattaacccataatataattataaatcctaattacttaccattaggttatcgggatattacagtgatactcaaagaaatactaattctctcatttgaaatttaatatccatacgctttaaatcagtgtagcttttctgtgtactcaatgaagcgagtatacaactcgaactcttactatgattttataagttccttagaactttttggtccatcatgttattttaccacttgtgttattctagtgaacaagtacccaacatctttctcatatcacacttattaaagtaccatcaatggtacatataatcatcacttttagacaaacacttcgccagggaaaaagattattctaagataattttacttttgtcaattatgctcacagcagatttctaatattccattaatcttcccagattacctatctttcaataataaaatattatactatttttactttaatccccatagttctcaataatcttcattaactcttaacatcatagccaaggatatcaactttgagatttcacaagattagactattccttcgtatgaattccatatcctcatttatcgtatatattgtttgcactaatgatagcatattaactcggtatgtccaaccgttactacttggtcgaaaccataagatcccacaatacatagttcataattgtgtctttctgttcctcctatgggaccttctaaactggtctactgacttaacttattaacaagttaagtattcgttttcgatagatattcaattagagcatttcttatttctacttattaacatacactcatctcgataccttgtaaatctttactaattaacacatcccttcctcttgataacctcaagaacgactatcaattctatattctaatacaaatttttctagcgtactttgtcctcactcatacgcttttcgaaatgactctccgaaagatttcccatcttgagattaccccaagttaagtatgcttaactccaaagtaagttcatggagggtaattagaaagtagatgcttctttgtcgttcctacttgtatttcttatttttgtccttccgttatttaaatctaatttccatcactcccttcattatcctctttcaattcctcgtcaattttattcacttatgcttgaggaattttcatcttattgtaaacttgaatcttatccatctccactcattttaacttgcatccat

SEQ ID NO: 140074 - DNA, 502 bp, Cannabis sativa
gatacgcccaccatttgaaagacttaaccaatgttctcgcaataaaatatacatagtgtaaaatcctaaggtttaaaacaacgactataaataataaagtctttgtgaaacctaagcaaacatgcgagtattcgaagagttcatccaaatacccgcgtgtattcaaaagataaagatgcgattattcaaacattcttcctaaagttcacggttatgcaaatttcaggtcaatttttctgagattacccagttctatactgaaaaaacatagccctatgttcatttcctacaagcatgtattcctaaaatccctcaaaataccaaaacccagaaaaaaagcagttttgcatctcaaacagaaaccaaaaatgcattggaattcgcaactaacctttagttttggtaagctcctgcgattgccctcgatcacttctgagattgaagagattttagaaggagaggcaggaatctgggcagagtatgaaggtttctttgaaatctc

SEQ ID NO: 140075 - DNA, 552 bp, Cannabis sativa
agcccagttcacctgctcagccatattttcccgtgataggaaagggaaggccgtcctggcggaggcgagagacttatcaggtgatggtggactgtcgagtcttgttcagacaatcgctttgcaggatatttcaacttatttttaaaatctttgactatcatgctttatgcttctgatgccgtttttcctctaaccatgctattgttgtttcgtacagacatgtctcagaagatgctcgatgccctgaagaagagagttgggggaagctcaagctcatctccttcggccatgaaatctaaaggcggtgaggcaaccccttccaaggaaaaggcaccagttggagaggttatcgacctttccgaggagctaactgttgcggatccttctactctaaaagttgcaaagtccaaggattctcgaggaggaagctcggacaggcctgagcaatcaaagggcggtttcgagctggccaagagcggatctaagcaggtgcgggctcctagttcacctttgccggtgcttccagaggccaagaaaggtagagagatgctt

SEQ ID NO: 140076 - DNA, 715 bp, Cannabis sativa
  modified_base (369)..(374): a, c, t, g, unknown or other
  modified_base (680)..(681): a, c, t, g, unknown or other
acatacacaagtgaatgaaaaatacttctgttattttattgatattgaataatctagattacattgaaacagagttttatttaggacataaaacccaacaaatacacgatattctcgcacaattcaaaagctacggtctcagataaattccaagaaaagaaaatactactgcagacgcgctagctcgattggcaagcagcaatataagtgacaaggaaaacttggtccctatccagttccttgaagagcctagcatcactggcacgaaagaaatcaaaatgatcgacacatccccaaactggatgacaccaatagcggtttacctcaactctggggaactcccagataaccgaaatgaagctcggaaannnnnnagaaaggcagcacggtacatcatagtagaaggggtcatgaacagaagaggattctcgatgccattactcagatgtgtcacacaagatgaagctgcacggcttctatttgaagttcacgacagattctgtggaaatcacgcagccggaaagagtttatcaaagaaaattctaaggcaaggctacttttggccaacgatgattgatgattcgagagcctatgtccagaagttcgacaaatgccagagattttcaaagataccaagagctccgcccaatgagctgacacagatgcaaagtccgtggccnnttgccatttggggaattgacctaatcggacagtt

SEQ ID NO: 140077 - DNA, 555 bp, Cannabis sativa
cttcaagcttggcaagcgatgagtttgaaccaaagtcacctacaacataagactttggatgatgagcttgggagaagtctttcgtagatcgcagaggatataatatggtgttgatgaaatatatggattcattggtgatttattagtcaatatcattgataaagtcgaatcaatgatgtcatgtgcttcctcatcctccaatgtcacagtatttacttttttatctaacaacactttttcttgttgctcactttctacttggctatccatacccttacttgtgatttcatattcactgagtttctcttcaaaaggatcttgatcttcaattgtaggctcattatcttccttgtattcaactattatcccttcttcattgtaccaataactctcataactttcatcattggagttattacattctgaatcatatgggccattgaattatcgcataatgatctcaccatgtcagttaagcgattaatctcttatgaaagtgattgtagaagtgatagtagtttctcctctttctcagttggttggggtgagtttggg

SEQ ID NO: 140078 - DNA, 671 bp, Cannabis sativa
  modified_base (612)..(616): a, c, t, g, unknown or other
aataatttttttatataattatttgtaaaatattattcaaaagttatataaatgtaactaaagctttaaaatatacatataatttagtaattgaaaaaaatatacaaagtaaaagtacgaatttaagcccaaatatgaaaacaagctagcctttttaagaaatatgggccaacacgagcaaagcacgatacgaatctgaatacaatacgaaaatatcgagcctacgggccgtgtcgggcctactttttaaaaatgttggcacgacacagcttgacctatatttttctgtggtacagcatgactcggttttttgaaaaggacggatgaataggggtcagaccactacaaacacgaactcatagcactatttcccaatatattcccacataggagtgattttcaattttttatattttttattaaattaaaatatagattagtaaatattagtcaatatgcttggtgcccaacttaatggaccttaaaagtaagatttttataagggaaacttacaaaaatactagaatttgggttaacttttacaaaaatactgtcgcacagaaattttttcaaatatattgtttttctaagtagaacacaaaacagaacaannnnnaacaacagtggaacaactaaaaacaacagtggaacaactaaaaacaacagtggaa

SEQ ID NO: 140079 - DNA, 903 bp, Cannabis sativa
acaaccatttattctagtgagattaagaaaaaacagtaaaatcgacgtcaaatatataatcacaggaagataattgtaaaacaacactaaaacaaatcaaacaaaaagaaaggaaaaaatgattaaaaaaaactaacaatgttctgcacatcctcaataccagatgcaaaatagctatatttgcgaacccaatctttaaaaatcagaataaaaaaactactaaaacaacataaaaataaatgtaaaataataagcaaatataaccacttagaaatatataaaagaaccacacacctcaaaaccttttttctagtgagctcgtcaaatgtatttataggagaaccataataaaaaaaccctaaaataaccatagagaaggaagaagaaatgtagtttatagcctccatcttccacacacacggatagaaccaccacagaaccatgagaacacccaaaaaataatcattaattccagcaagatggagcaagaacaatgaaattgacgtcaagaaatatgaaagataaccgtaaaataacactaaactaaatcaaaaaaacaaaagaataaaaaattaattaaaaaaaactaaccatcttttgcacaacctcaacacagacaatagaagctatatttgcaagctcagttctaaaaaattagataaaaaactacttatctttctaaaaaatgtgactgaaaacttcaaaaattaaagaaaaaaaatgagaagaagatgaagaaaaagaactgaataagaaattaaattgggccaaaaaaataaagaagaagatgaacaggagatagagctcaaaaatagtgaaaaacatataatgtgtgtgtgtggttacccattaatttaagaggaatatatatatgtgggtacactcttaatgggtattacccat

SEQ ID NO: 140080 - DNA, 914 bp, Cannabis sativa
  modified_base (701)..(708): a, c, t, g, unknown or other
  modified_base (849)..(849): a, c, t, g, unknown or other
agtcccatacctgcactgtctcagaatcatcccacttgaccttccccaagcggtgtgggattgcacagcttacccggtgtttccccttacggatcatgggactaatgtctgtcacaaacaagtcttaagcatcgggatttgaggtaagaaaattagatagttttgtatgtgtttatctgcataaatttaaattctttatgtattgcaatatgatttatgatttgttattatgaatatgtatatagttttgagaatgtgtggtatggacacaatatgagtttgtgaatcgatacatagattatggttgtatgacttatatatggtgtatgttgtatttgtatgtttcaggttgtatgttgtatgttgtatttgtatgttgcatattgtacgttgtatgctaacatctcaagtaaagtgagggaccatggtggggtatgatacaggataaggccgttgaatgtagagataccctaccctgcattttactgagtcgtgtatgagattcttatggtggggtatgatacagtgatgttactattgaatatagagataccctatcctataacaatggtagggcttcataggcccaggttattatatgggcagattacgcccaggatattagggccaggctaggcccgggttatgtaagtaatggctatgatatgccaatgttatggtaatgacattattatttatannnnnnnnatgattatgttatgagtatgatattgaagttatgatctctgtatatatgtatggtgtgaacaattagtatggacctatacgataaaggtttccatgtatataattatttggttatggttataaaataaggtgtatgatatngctaaaacttaataaatacattaatggtatgtgtgatattatatggtattgtatgataagcattt

SEQ ID NO: 140081 - DNA, 548 bp, Cannabis sativa
atatgctaaaatagataagtttgcaatggtggataatattgcggtgacaaacgcttgtatggatcgtaaactaatgatggcaagattaatattctaactcttaccattgaaattcaattcttattggagaggtacttgatgaatatacagagtacaacgatatacctcagcaagtaaatgcacacacagaataaaataataataaaaaataaaacatcccatattatttcatctcaatatcaaaaacctactaaaaacagactattccacataagaaaaaggcaaagagagcaggtgatataagtaaagaggttcaagtctcaaccgaagttaataacaaattaattacttcaatcaaatttcacaactccaagtatacacgtagaagtatgatttcaattttctacttatgaacaacaactaataatcaaaataatcactttgttcttatttatattagctagctggtcataatttagcttctaatataaatattgttgtgaagacaaacaaattaaatcaattatcgatcattggctcttcctata

SEQ ID NO: 140082 - DNA, 1154 bp, Cannabis sativa
taagaccctagttagagatgtcaatttggtgcccaagttggctttcgatttgcgggttcgtgtaattatagctctcgaggcttggattaggttgctccatgcatgtgttcatggtacaaaatactgaaagatagtgagttggattcaagttattgaagtttaaacttccatcctagagtttccaaagtcagcctaggcacagggctaggaacccctcaggtcgacttgctatgactcgggactactcaactctgagatatcatctttcttttcatgtgtcaaacattgatgtccatgtcatcagggctacttttggtgtaagcatttgtgccccaagtcaactttgcacttgtgtgaggttgacttaatgacgtgaactaagcccgtttctcttgaaactaccaagtgggcatcaattttgaaaatcttggatatttattttctatttttcaagaaatcccactaaggcaggattttgattccacattccctattgagtagtaaaattcataattttaagttgatgacttcttaagtgatttcttttgattaagatattgtgaaatcatgtcatcattggaacgtcaacatttactctaatatttggctaatgtcttagcatttactgtcctatcacactgtctttttatgcaaatattgatgtagtctttgtcttctcttaggttgtagccttgaagttctttaacattcactcagctatgtttaagcaatggtagtcttgttcatctcctcagtttgataacagaggagtccttcattaactccttagctttgtagcataggaggccttcaacattccctcagctttgcagcagaggaggccttcaacatccccttggctttacagcggaggaggccttcatcatctcttcagatttacagcaaaggaggtctttgtcatctccttagcttcacagcgaaggaggtcttcataatcacctcagctttacagcagaggaggtcttcttaacgactatcaatgatgtgttgaagcagtcgttggtagttttttttgggtcaattaaggatgtgaccaactgttgggctttgtgccctaaataaactctatttcaatgttatcttttctattcaattatcaataaagaaacagatttattctcattacttattta

SEQ ID NO: 140083 - DNA, 1182 bp, Cannabis sativa
ccagaacattgaacatgactcgggaccgagaactggaccccagtctcggtcctggagctagacctaaacctagaccctgacctaggacatgaattgaattaagactaggacccgtgattgggatgcagatcttgtccaatgattagagaaccggggcttggacacgacccatagtcgatgtgttgatcatggactcggacaaggacccgaagctggaaaaggacctagacccagacccaaacctaggacccaaaacctaaacttgaaaaagaacgtgatcaggaccatggaacaggaccgggaccgtgacgtggaccttgactcggactcagaactagaccgaacctagcccagaactcgggttcagacccagtcctcgacccagactagcactcagactcgaaccagaacctgaacacgaagtcgggacacgatcccagacctggacgaagcccttaacctaaattggaattcaaaccttgacatggacacgaacccatacccgaacccaaataccgacgcagacctagaccgggattgaaacacgggacctaggcccaagacgcagacacagaccaaagacacgaacatgggacccagaaccaagacctgaacttggaccttgactcacatttggacccagacagagattcgaaaaacctgtactcggactcgaactaagactcagaccctgacaccaacttggacacagagccggacccggaaccaaactcggacctagaataaaaattggaaattatgactaggacccagacctaagacgataaccaaacccaaaccataagtcaaactcagaccaaaacctggaccgagaccttgactaggactgggacctgagacctaagacttgaacctcgacgaggaccgggatcgggacatggacctgacctggtcctaagccctcaccagatcctgacactcgcaacccaaacaaggatctagacccttaaaaggacccgaacctaaaccaagacaacgatagggatcgagacctggacctgaacacggaccgcgaccaggactaacaccaagactgaggacctgaacctgaaatttgaaccagactaggacctaggaaccggacttggatggggcacctagaccagggacctaggccccggaacccagaccatgatgtaaaattttagacttgaacctgaa

SEQ ID NO: 140084 - DNA, 994 bp, Cannabis sativa
gcatgcgcatttcattgcaaatatgtaaaataaagaaatgaagaacttactcactgatttgaagttttattgctctgctcggatgaaatcgttgaaggttttcctatgaatcttctcaaagaatttgggaagaaatttggccaaatatcttttgctctggtgtttaagagttaaaatggctaaaaggattgccagagatccttaatcctttttataagcaatctaaaaagagaattaatcatttcaaaatttaaatttctcgaattccccccccccaagtatacgttatgtgctcattgtaggaagtgtaaccgtcaaacacgcgcaagcatcgaaccctgattcgaggtacaattacttaaatggacagaaattgaagagatccctagtcagggttacaatgattcatcatccgacatcaaggacacgcatcacccatccggacaagactctaggctgagtgaagtccacgtgcaaccaagaaggtccgtacagacttatggagcaaatgttatcctattttttgcatcatgacttggcaatagaaatggatgacacatgtcccatattttagatacttggacggaggaaaatatccctagcagcccataaatgactactcaacatctgtaacattcagaaatccgagcaagatgattgaggagatgtccgaccaaggcgtagacatgtttatgccgagcgaagcatggaagatgacgattctagagattactctcgttgtgtctagatgcgaagacaatccctgtaattacgggattgagtcaagcaataacgacaacacattctagtttcctatttcttgtattgtaattatggaattaatgtagtttcctattttagtcattatgggtaaaagggaaaccatccctataaatagtagcttagcctcactatgaaagggatcgagaaaattgcttcagaaattcattcaagagagaaaagagtgatttaagagagaaagttactcagagat

SEQ ID NO: 140085 - DNA, 1061 bp, Cannabis sativa
  modified_base (580)..(581): a, c, t, g, unknown or other
  modified_base (1027)..(1029): a, c, t, g, unknown or other
aaatttcatatttttgcatgttcagtgcccagcaacatcggaacgcggtgtttggctattagaatcacatcttagtattttttgtatagtggggggttatagttagacattggaaatgtcgaggatagtcgggaatttagaatttttcccaaaatacccttagtacccttttatgttgttttagtgtgggaggggcaaaatggtcattttgccccctatgtattttgtcctttagtagacttagttacatttagtaatctgaattttgtttaattcttggctgattattttagataaaaccaaccttttgttaattcattttatgaaaaatcaaaatttggacaaaaaatttacatttcctctcaaactctctctctctctttcgaatccaccaaggggcagctagggtttgtcaattttcttcttcatttcaagcttaattcagcaaggtgttggtggtttcaagctttaggtaagcttctagtaactccctcatagttttcttgagtttgaagttatgaattttgcatgtttttaggaattgagctaagtagctgctgtgtgtgtgggtttgttttcnnaagcttgtttatgtttggttatgttgattcgagcatgttttagtgattgtggagtagtttaaccgagttttgagtttagaactcaaacttggagctttcatggcaaattttgagtttagaactcaaacttggagctttaatggcaagttttgattctgtgcttgtagatgtgttttgttgtttggaaaatgatctttaggatgcttagaacaggtctggaaggtttcatgtggattggggttgatttgaatgagttatgaaatttttagtctttcctgcactgaaccagaattccggttcagaggggcctgaaagaaccgaaattccggttggctcccgggaaaccccacagaactggaattccggttggggcaattttgggaaccctattttttcccatttttgtgttgtttatagtatttccatgttatttatcgataggaaannntttagtttcaagtttaagaccctggaaagtga

SEQ ID NO: 140086 - DNA, 950 bp, Cannabis sativa
aacatcacccttatcgactaacattgtaatgccctaatacttaggcgcgctacaatgatttttcaattacagttccacctttgctaatcaaaggatttttcttaatattgtgtcaaattaaaactttcaatttaattgctaaactttataaacttttaaacatttatttacaaaagccaggatcccataactaaacttttacaacattacaaaaatttatttagttttgttggacagggactaaaaaataaaatccctagatgtcccaagaccgaacactccaggtcgcaccgccatgacatgtacaaacaccatcctagctcgaagctcactcctgttcagccttagcatttcccttacctacacatggaaatagcaactgtgagtcgacagactcgataaaaaaagaaaataacaaatcatataatatcgacttgtatctaggtgcccatacacctatttataaggcttgacaattgagtaaaaacgttctttactaaggtacgacaactataccacatgcactacgtactactactatacgaattttggtagggtttgtcatgtaccacgagtaccactaagtgctataccacacacacctagtacttttctgtacttatgttggtaataccgtaacgtactctttaaccattgctcactataccaatgcactctgtaccacttccgtacaagtgttggtagtgtactaatcacaacaagcatgcatatatatatcacacatacatacgttcgcatatatatatatatcatatgttctacgctattcttacaatatttccaaatgcaagtaagttggccgacctgaacgaaaaacttcgtgctggatggatgccctaatcacataacataaatgggtgaacagagcaccataaccctaattcgaaaaacccaaacctttaaaataaggttctgctattgataactaa

SEQ ID NO: 140087 - DNA, 652 bp, Cannabis sativa
ttaaagacattaagacattatttttgaggaggaattgaattcaaattcagttcttactatcacttttgacaatgtataggcttctacaccagtcattgatcaagaaatgaatctagaacctcaacaagataatgttaaacaactcccaattcaagatgaggtaattgttccagaagaacaaatttaataccctcaagaaccagagataatagaacatgaggatgacaatagaatgatggaagattacctaatcaatttttatcagaccatgaaaagttctagttctcaaaagtggattgatgacatggatgaagagattaagtccatgcaagacaataaaatttgggaacttgtcccattaccataagaagaaaaaataaatttggagcttgagcagagactcgtactgataacgtattattaaataatataaactatataagaataaaaaaagaaaaagaagatgaaaagtaaaagaaaaactgaatgagaatttcttaattgtttattctaatgggatgaactcctttttatacaaaaatatgagtaaaagaataggaactaaatcaatctaataaaagaaaatacaatcaaacattaatggtgataaattaatttaataatttaaatattcataaataatatttcataa

SEQ ID NO: 140088 - DNA, 522 bp, Cannabis sativa
tccaactcagaagttagaagcacacacccctcaaactcttaaagcatcctctgagcatatgtaggcatgatctgtgaaagaattataagaaaattattaaatcaacagcaatacatagctgtcactacaatttagccattatgaaagttccacttttctttatcttgcaacagagagagatctacagcagtgagagaagttaaacataatataatatatagtactataaaatctcacctaaaaaatcagtaaattaatacagaacagagttggttctaaaataaaaaaagcatatatgcccctactttgatgcttctatttcgatgtatatgtttggtttagcagatgaacaagttcctacataccttaaaagtgaactacactaaacactatcaccaaataatccaaataatactgaaagataatacttcatgatatgcctgcaaagttaagaaacaaaactaattagtgcggaaaaatttatttatcgcttgaatagtaaatatatacctctaacatatt

SEQ ID NO: 140089 - DNA, 540 bp, Cannabis sativa
ttagggtgtaaattggaatttatggtaaaatataatccaacaagatccacattgggtctcacctactcagcccaatagatcaaattataccaccataaggaaccttaatgggtccagatcagtccgactcatcaataatgtaaggccctactaatttaggcacactatagtattttcttaattattgtgtacacttttgctgatcaaatggtttgttgaaaaatgtaattaatttaaactttttaaataacttaaactttaatagataaacctaatttacataactccaggttcccgttaaaagtttactattttcaaaatatattttatactaaacctatttcccaacgaccaacacaaagtgagcctgaactgtcccaaagacctgaacactctaggtctaaccatcttgatacgtacaatcttcacgcaactttaaactcattccggttcaattctagctcttacctggacatgcaaataataactgtgagtcgacaatcttaataagaaaagcataaatataaacatataaccaga

SEQ ID NO: 140090 - DNA, 779 bp, Cannabis sativa
gagtgggtttcgctgtagtctttggtgcttcagtcttgagttggggacaatcccttttataatgccctgacataccacactggaaacacccgtgtcctctacactcccccagatggtgccttttacaactggggcactctaggtaagtgtatcaggtctcagaactaccttgccgattgcctcgaccctggttcccccggaacctcttgttttgaactgaaccactagatgtagtaggcgcctttcttttctgatcattggccgagccactacctcccctaccaaagcctgatgtaggaagggtagaagccccgccaacaactggagtctctcgagattctaaggtgcacttcactgcaccctcagctcgtaatgctttatccaccatatcaacataggtggttttgtcatcggtagtaatcatcaggtcatgtctgatttttgcattcatcccgtccaggtacttttctttcttactgaaatcggttggcacaattcccaaggctaaccttgccaagtgatcaaactgcgttgtgtattctgtaacactcatgttctctttttgagtcaactgggtgaatttctttcttttagcacttctgactgcctcattatagtacttggcattgaacagctcctggaatttctcccaggtcattgggagtaacgttgtgaatcatggacaccatgtcccaccaaactagagcgtcttcttgaaattggaaagtggcacaggccaccctatcattaccggtgacgcccataaagttcaagatcct

SEQ ID NO: 140091 - DNA, 752 bp, Cannabis sativa
tgttagtaaatctagatcctcataaaatatttccaacaactaattctattatgtgtaagatattatttagtaactttatataaatttttatattaacatatcaaaattgttttattaaataaattttttattagtgtaccataacgtaacttttaaatataacataacgaaagactttatagtaatttataatgtacttgataagttgaattttataagtgtaaaaattttatgatttttgttaaaaagttatgaaaaaaacgaaaaagttacttaatgttagtcgtcctcagtaaaaaaaatatatacttcccacgtatattaattttattttattttttttaaaaaaaaaaactttatttcaagataattttgtcttaaacatatttggctacttatttcataattaactttaaagttatagttttaatttaaaatatttaagttatattatgctattttattgtttaagatatcttgtgttacttttttcaaacatcgtttacattaattttaaatataattaagaaataaataagttataataaagtataaaaaattattttaaagtttacaagtaaaattagtgtaattttttaatgaaactcatgtttaaattattttaaaagtgtctatcaaaattaatttataaaataagtttaagggacaattgcggcaaaagtccccaaaaacttgaggttgatgccgattagtcctcaacctcaaaaattggcggtgaaaatacctaaggt

SEQ ID NO: 140092 - DNA, 529 bp, Cannabis sativa
aaaaaaaatgcagacaataggagcaaggaaatctaaatatgaaacaaaagaaatagtttagcaaacagaagatataatccttcattaactgaaggggatatcatataccaaaaactatagtaccagagaaatacatggaaataattgaatacttaaaacacaaagatagaaaggagaggcaaatgcaagagtgcaaatgctatgtaaagcccaaaaagatatctctaactcgctgcgctaggaatagagaagaggtttacctaaaatccattgagcaaactgagaatcctagaaaaatcatttgagtaacttgaagaaaatataaagaccaaaaatcacaaagatatatgccaggtatagttcctgaaattaccaaaccaacatgaatgttaagaaaatgtaaaaccaaaaatatcaccaaaacctaatagaaagtctagaaaatagtagaaaactaagtcaagtcaactccctttcaaggttaaatatttatttagataaacatccgataaaaagttattgaaggcta

SEQ ID NO: 140093 - DNA, 1683 bp, Cannabis sativa
atagtggcacaaccattgtgtcggttcggcagtacgggcacagtactggttaagagtgctatcatggttaattatactcttgggtgctattgatgctatcatagcggtacgaacatagtgtcggtgccgcagtgcaattatagtgttggtagtgggtgatatcatggtcaatagcaccaactgttgagaatgttcttaaccatctggtgagctcggttgttgagctcaggacagcttaaacataaagtcgatgcagcattatttttatatatgttatgcatatcttactgagtctgtcgactcatcagtttgctaccttgtgtaggtgagggcaaagctaagctggaggaacagtgcgttggagcttggcagtgattgtacattcgcggcagtgcagcctggagggtgtctgtctttcaacattttggagtcatattgtatggttgcctgttctttgtaaaaaaaactatattacgaaactttatatatagaaaatgtaattttcaactatgttttaaatctcaggatcccgacttataaggttatataattatattataataacattaattttggttttgtaagttttcaaatacgggcattacagtttggtatgagagccaccaggttgttcactgaagaccgtcaagatatgtacaatcaagaccagtgtcgagctcaattcatggttctgtaagctttactttttgcaaattttttaagatgtattgcatatctgtgtaaattattgttaaaattgtaaatgcggtcttaaaaataccttgaccactgtctaacctacctacctagtgggttcgcaggctaagtcctaagcaatggatgtccagcaaaacgttagaggacagggcaaaatggttgagacaggagatggtcagggtgttagaaatccccaaaacccttgtggacgcggtagaggctgtgatcgtgctcctagaggtggcgaagagaatccaactcaggctccgtttgattgggagcaaaggtttgctaagatgcaggccataattactcagcaagaagaagagattcgaaggcttagacaatgggatgctcctattgagcctcccctgcaaccaccgtctgctgcggttcctatggtgctagtggaacaacctattgcatgcaaccgtatggagcccttatatgagagattcaggaatcaagcacccccagtgttattaggaggttctgatgttcttaaagtagagcaacgattgattgtgattgaaaggatattgaatttcatgggagttactagaaatgacagggtggcatgtgcaacgttttaattccaggaagatgccctggtgtggtgagagatggtgtccctttcaaaggatgttaccagaataacctgggaagaattttgggatttatttaatgctaaatattacaatgaggcagtccgaagtgcaaagccaaaagagtttgttgagttggtacagggcaagaacatgacagtgactgagtatacacccaagtttgatcgcttggccaagctaacctcagggattgtgccaacaaattttagcaaaaaggaaagtacttggcaaggttgaatgccaagattaagcatgatctggtcatcaccacaaatgatactacaacctatgctgagatggttggtaaggctcttcgagctgaatgagtagtaaagtttct

SEQ ID NO: 140094 - DNA, 1314 bp, Cannabis sativa
  modified_base (159)..(167): a, c, t, g, unknown or other
  modified_base (233)..(251): a, c, t, g, unknown or other
  modified_base (306)..(309): a, c, t, g, unknown or other
atatatatatttatatgatagaattcgaaattcaatgtattataaaaaagtacagttttcgaaattccattaaaataaaataaaataaaactgaaaaaattattcatatttatgtcggtctaaaattaaagaatttaattttcaacacaaatataattnnnnnnnnnaattaaatctcttatgaaaaatatcaaatctttaagtatcttgagtaaaatcaacttaaatattannnnnnnnnnnnnnnnnnntatatctagaaaaataccaaaagtctacctagaaatatctatctagataattcannnnctaattacttattttctaattaaaatataatatattttattctatttattttaaataaattattaataaaaattacttgatttaagttgatgtaaaactaattaataaattaattttcaactttaatctgattttcaaaattgatcaatttaaaaatatctacattaaaaataatgcatttcgaaatttaagtgggaaaatgattatcaaaataaaattaaatatactctgaaaattattctaattaagttgatctgaaattaataaattttcgacttaaatataattttctatttaattaaatcattaaaatagaaataattaagtatctagaataaaattaacttaattattaattctaatttgatatctaagaaaatattctaatttaagttggtccaaaattaaatgacatattaattttcaacttaaatatattttggttatcccaattattgcactctgacgtggcgtcgcacgatggtgacacgtggaataatttctatgtacctactcccaagaaatatgacgaacaaggcacctatatattcgctcggacgaggccctcttagctgggcagtgagcaagctgcgcagcatgccaacacttagcaaatttagcttttccatcgtgagtcactgaagaaatccctataactttgggattagatcacagagatatggctagctgactgaatcccacgattagcatattttgtatttattatgcaatatttccacttatatcaattgtaacaagaagggaaatacttccctcccaagcttatagccctataaatagtgattcatactcactggacaaagggtcgaaaaatctatctaagaattcatcttcagagatactattgtaagagctctaagaaaaggaactattctccttattctttagtcaatacaagcgaagtggattaagctattaccaaactgctcagggctgaacctctataaattcttttgtctttatttgctatatcatattacactc

SEQ ID NO: 140095 - DNA, 2383 bp, Cannabis sativa
  modified_base (1668)..(1673): a, c, t, g, unknown or other
  modified_base (1906)..(1908): a, c, t, g, unknown or other
gggtctgagttcgagtccgggtctggatctggatacgggtttggggtcttgggtcccagtctagggtcccgggtctgggtccgggtctgagtcggggtctgggtcccgggtcggggtccggagtctgggatcgggtcagggtccaggtatgggtgtgggtcggggtcggtctgggtcccgagtccaggtccgggtctcgaaccctagtttgggtcccgggtttgggtccgggtgtggggtcggggtccgggtcgggtccgagtttgggtcccatgtctggattagagattggtgttgaccccgaattctttgtaaatattgtaatacaagctaatacagaccatttgttatgtatttaataatacaacatacattgtattaataaataaattaatacaaataacatttctttatccaaacatagtgttatttattatttagtacaatacgacccttatacgacgtaccaaatgagcccatagtatattaattagcataacattattatttgagagttataattatatgtatgggtatattaatttttatattgatatatgagttgtataatatgataataacgttaatagtgatataataatattgtttattattattgatgtgaagattattattatttatattgtgaataaagaaaattagaaattcattttccaatagtaattttgggaaaagaaattgtgacttttgagaaattacttcctttggaataaaaagtgataattatttcattttaagagataggaaaagtgaactataagagttacacttatgagatttatcttgtcatagcaagaacaaatagattgaaagtagatctaaacttgtgaaatgagtcataaaaattgaaagaataattttagactcaaataaagtgaatcgacgtgaatttaaaaattgtgaaaagataacaaaattagagaagcaattgtgaatcttaaataatcaatgtagtgaacgaaattgataagaattttgttaaactttggtataattatgggctaatctcaatgaggagataattttaaaattatgggtaaaaataatcacattattttgtaagtagtaatgtgagtttggtattttaattttgttgagaaaactaagaatgtcaaataatatttttctaataataatctctaagagacattttagtaaaatgattaaattaaagttgtttaaataatgtcgagattatttagataactaatattggtaaaaagtgattcttataaatattggtagaaatgttggggtgagccacaaattaatcaaaatgtgttgagacattattgattaatttattttattttgaattcaaattctaaatcaattttggctatgtgcatatatgaaaattttaacatatttggtgtcaaatttcggtaaaaataattttaagaaaaaaattaaatttaagagaaattatagagacatagtggtcgtctatattttaaaatcaagatattatcttgataataaattgtgaaagtgtcggggtgcatactccaatatgagaaagtttagacatgcttagtgtctaaaactaaaatgtgtatatttgagacatgcttggtgctttaataaaagtgtaacttaatcatgtttggtgtctaaaattgttggaaaatattttaccaggatctnnnnnnactaacaagtatgtttattaacaccctaaatatgattttctaaaacaatggaatttaaacacatttaaagttgagaaaccttacattaattacagtgaactatatgactcttcccactcagatctctaacccttgttcctttctttcgcagagtattatcaagatctaagccttatactccttcaagttgttggattcttcacagtcctacacactatgattgagtactagannngctatgggtgggcatgcactcactcactttaggctcgaaatttgatgaagaacaataaaagagattcaaaatagaggaaggaagaagaaagtcaaagtctcaataactctaactctagctctagttgtctgacagaatgtaaactaggttattagaattgttagataatgagaccatcctattccttttatattatttcacttagggctaggattaaattatggaataaaaaatgataaaataatagaaaaattaagacttagcggccgaccatatagatgggccccactagttatatatttgccatttttttaaccattaatcttttatttcactttcacaaataccatattttctaattttaatcctatacatgctaaaactatttattaaataactataatttattatcaaatagaattatcatttatattatttattaattagactccacaaaatctcttaattaacaaat

SEQ ID NO: 140096 - DNA, 734 bp, Cannabis sativa
atttatttaataaattattaagtaaacactaaatgacatattaaattttgtatcaaaatttacaattatgtattaaagcacaataatataagttaatataaaaatattataaaactactttttgtggcaaatgtaacttaacttttacatctctcgtaagagataatttagccataccaaaaattacttatgataataaaaaataaataaagaactatttaattgtaaacggctccccacttttttttttgttatatttgttttaatagtattattatttttttttattttataaaattaatttatatttgaaaatttaaattataaaatattattaaaataattaaagcatctctaatggtagaattttggaggatgcttggtgaggtggacatattatgtggcaaaatattaagatgctatatcattggaaagaagagagagtcattctagaaattcgcatgaatgctatgttgtagcattaatgttattcattactttttaataaaaaaattgaagctaaaaagttattgtagttaaaaattaggatatatatattaaataataatgtgtcaaatcataattatagggtttctaaagaatgttatatattaaagtatttttagaattaagagtactaaaaatgatgtaaaagaaagataatataaaatattatatttttaaatgatgtgtaaatttttaacatttttacaaagagaaatgctaaaaggcac

SEQ ID NO: 140097 - DNA, 695 bp, Cannabis sativa
gatagtttagcaaacagagaaaaaaagtatcacaatagtccactccataggtttgagcataacccttggcaataagatggacctttaagagagcaattgttccatcttgattgaatttaaccgtaaacacccatttgcaccctatggcttgttttcctaaaggtaaattaaccaaaacccaaataccatttgcaactaaagcattcatctcttctatcattgcagcaagccaactaggatgagatattgcttcacgaatagttttaaaaatagtgacagaatcaagagaagcaataaaagaacaagaagaagaagagagatgattataagaaacaaaagaagaaataggaaaagcacattggcgtttacctttacgtagttcaatgggaagatcatctttgatttcgggatctaatgacaaagatgcaaatgcaagacatgagacaggaagtggaggagggggcgcctggtgtacactataggaggccgagggagtggtggaggtgaggcattgtgggagttatgaccgagagaggtgaaggaacaagagacttgtcagaacatgtatcacgcgtataggatgtgaccaaatataccaacaaatcatcatcatccccctgacaagtaggagtagttgaagatgaaaaataaggtgtattttccacaaaggtaacatcaaaagaaacaagatattt

SEQ ID NO: 140098 - DNA, 643 bp, Cannabis sativa
tttcatcttgaaggctattaacttttgcagataaggtgccgatggtgtcttcaagtcggtcagaagcctcgagatccttagtcaacttagttattcttttctgagcggcaaaaatcttcttgttgacttcacccagttctggtcggagagcttcgagctccaccctggcgtcatcagcatccttcttggccaagtccacctccgccctcgtggtggttgacaaagccacgttctgggaagcagcagacttagctcaggagtatgtgtaagccaacttcagacaagcctacactgagaaaaaactttaaggtctgaaccaaataaagaagaattaaaggaactccagggaagactcattatcagtactggccagctgctcacttaccttaggaaccaaccagttcatgtaatgggcaagcatctctctgcctttcttcgcctctggaagcaccggcaaaggtggactaggagcccacacttgctcagatctgctcttggccagcgcggatctgccatttaattgttcaggcgtgtctgagcttcctcctcgagaatccttggacttagaaacttttggagtagaaggatctgcaacagttagctcctcagaaaggtcgataagctctccggcttgtgccttttc

SEQ ID NO: 140099 - DNA, 540 bp, Cannabis sativa
aaaacgtggcagttaaatatctaaagaaaagtggtcaaatccatgccatacaccattcactattatcattattattattattatttattattaataggcaccataacaatactaggcggtgcatgatgtatactacatgcttggggtatcttttatacagtcctcatttaaccatagacgagtgaaaacgaaaaagcaaaagtatatatcttatacattatataaagagtttatttataagcaccatgcatattaataagctaatcttacaactttatgtcattttatatttttttaagtaagattatattattattattattttaataactgaataaaaataataatatgtgtacatatatgtatagtgagttattctaaagtatatattttttatatatataaacaattaaattaatatctgaccttagtacaaaactgttaaactgttaactattaattatgtatataaaaaaagccaaacattatgatgaaaatcgatattacatgataattacctactcaaaaaaaaaaaaaaaa

SEQ ID NO: 140100 - DNA, 759 bp, Cannabis sativa
  modified_base (164)..(166): a, c, t, g, unknown or other
  modified_base (481)..(487): a, c, t, g, unknown or other
agtttgctcgtatagacgttgaattgtaaatgtacgttgaaagagtatgatataccggtatgtataatctgttgtaatgaaatctgttatcactttccatagttttttttatctagtagcttttcttgctgggtcactgtgactcacgtgtgcttcgtggtgcnnntaaggaagttaggagctgtgttcgaccatgagttggagattttccagttatgtacatatcagctgtggtgtctgtggcttctgggaagcaggattgacttcttttctttatgtttggaaatgtaactttattttggtaataatagttttgaaatttgttataaggaaattttataaacaggggatcccacatactttagtagtattttaaagaaagaaaatttatatattatattttaaattatcaaattttatttaaaccacacttttcttaaagctagtagattagtgataataagattgtaaaagcacacannnnnnnttcctgaggttcagagcgttacaatgtctgtctagagtttgctaccaatgtggagctgcaggccatttcaagaataactgcccgcagttacaaaagcccgagactaagaaagagaatcctatggttcctgctagggtgtttcctttgaccaaagcaaatgctaatgctggcccttcgactgttacaggtgagatatctattggtggtattatgtttactattttgattgattctggtgccacacattcatatatttctagtagaatcattga

SEQ ID NO: 140101 - DNA, 1145 bp, Cannabis sativa
aaggttggaagaattaagtcaaattgaactgcttgtaatggtgaaaggattatcataccacaaaattgtggcaagtgcggtgccaaggggcacaataaaagcacttgcacataccgaggttaaaaatgaatttgtaatttacctgtactgggatgtgttatactattatgtattgttattgaattcatgttggacttttttaaacattataatttgtggtattttcttttttgataactattataatttgtggcatagttggaaggcctaaaattgttatgagctaataaaagaacataatcatgccaataaaagaaactagttacattgttatcttaataaatacatatatgttgatagatgaatatatatataaaaaaatataattgttcatgctaaattttggcaaaacaaatctacacactaccgctctctaaatttcttcatatcgtcattgttcacattaagaaacggaagatccagcattttatgctcgatgtgctttattacctacatcccgtcatcaccgctgtatgagacaataaaaagtaattaaataaaagtatgcaaattaaattcaagttaaataataaaaattaattgtaattaagttaccttgatttcgtctgtcgtacaatcctcccgtcgatgacttctgaactaaaatttctaacttggctctttaagacggtcaattgaggcatgacgatcatttcatgattctcgaataggcaggactgcagcatcaaagttaggaataactcttcccacaatgtcaagtgactcttcaattcatctggggaaatcgatccaaggctcgagccaaatatgctcaacatccaatgatcaaggtctgcctctaaagtcacccaatgctttgcactgtcaaagaagagggccatatatatattctctccttattcttccaactgtccaagtattgggcatcatccccttgaatcaaatccaatatgtcgtcatcccactaaaagttagagtggtcatcccccgcagcttgcaaccgacaattaactcctgataggaaaatgtgaggcaagatgacacatctatttggataaaagtgttgtcgcctcctcatcaaatgaaatgtcgcatccaaatgctaaaatatgaaaattaaatat

SEQ ID NO: 140102 - DNA, 1029 bp, Cannabis sativa
ctagtatgtatgttgataacaggtgtcctaccaagaaccgatttctggaaggaactgcaagctcgaagacctgaatcgttggtcgagttctttgccttggaagagccgcataagaggattgagaattctgtggctgggttagagaaggacaaagataaacgtaagtcactagtgctgcggtcacgatctcgcagtcctagagggaagagttctaaaggaaggagcccgagaagacgcagtccacagagacagcgaagttcgaaattagccaagtcccctccaaagaaggaatcctccccgaaaatgaaaggtggtccacgctttgtaaactatacagagttggcagtcccttgggaccatatctaggccattgaagaaaagaacggggtcttcaaaaagcctcccccaatcaggggaaaccgcgttaaaagacaccctaaaaacttctgtaagtaccacaaagatattggtcacactactcaggagtgttggtttttgcaggacgagatcgaagaactaatcaggaaaggaaaattcagcaaatacaagaaaaatgaggaaattcatccctgagcggatgacaaagaagaaaatcaaaatgcgatatccgagattccaggagattccaagaagttgcaggagcgatatccgagagaagccaaagataagccactcaccaatgtgaacaacttgagcgagcgggcggagaagctgttcagaagggagtgtgacgatatcacattcatggaaagtgatgcgagatgggtccaccacccacattctgacacgcaggtcatcgtcgcaaacattgggggagataatgtccaccgcatactcgtagacaatggaagttctgtgaatctcttgaatttccaggccttcaaacaaatagggttgcatgagaaggatctgcgacctgtgatatcaagtatatacggttttactggagatgtcatcgcattaaagggaatgatcaaactcccaatcactttgggaaccgcacccgtagtagctaagtcgatggctgac

SEQ ID NO: 140103 - DNA, 578 bp, Cannabis sativa
tattaatttatagttatctttttgatattttatatttatttttatgttgctgtttaagtattttatagttattttctgttatttttatgtattcttttgtacagttattatttagtttatgtgtatttttatggtgtgtacttttagtttattccacgcatttttttttgtggtatatgtgtacatttgttttgttatttttatgttattttatagttgtttttaaatagttttcaaaatatttttttgttcaactgttatttttgttattaatgtgtatttttatggtgtatatttttagtttcttcctaacaatttttttttagttgtatgtgtgtttctttgtagttaagatacatatatttagtttattttttgacatattttattataatataatgataagatcgattttttgttttttttagttgacacaatgtgcagttgtagaaccttccttcggaagggacaagctgcttttcatggggctggtgctgtggcatgggatgatgtatgccaacaaaaaagagatggaggattaggaattaaaagattagaggaatggaataaggctgcta

SEQ ID NO: 140104 - DNA, 812 bp, Cannabis sativa
agcataattggagctttacaatatttgagtagaccagaccaaatatctcttttgctgtgaataagttgagtcagttccttaaagctccaacgattgctcactggaatgcagctaagagagttctcaggtatttgaagggcataatgcatcataacattcacatctcactaggcactcaacttaatctggttggtttttctgatgttgattgggcttgctacccagatgatggaaaatccattgcagggtattgtgtatacatgggggattctctcatttcttgggcatcaaagaagcaatctgttattgctcaatcaaatactgagtccgagtacagagcactcgcacaacttgcctcagaactgtcatggttacaagagttattcaaagaaatgaaactgttccactctgctccctcaattatctggtgtgataacatgagtgccagtgctttggcttccaatccagtctaccatgcgagaactaagcatatagaactaaatgttcacttcatcagagacaaggttatgcaaaagaaattggaaattcattatataccctcacatgaccaagttgctgattgtctcaccaaaggtttgtcaccagccaggttccaatttttagttgacaaactcagagtgaaagagtcaccctatcgtttgagggtggtgtgaagaaatgatcaatgacctggctgcttactggtgcatgacttggttgcctacatggctcctcactttttggagatattgtcagaaggaatattctagaattgtacaaattctgttacaacaaatattgtgcactgtaat

SEQ ID NO: 140105 - DNA, 604 bp, Cannabis sativa
ttttttacatttatagtccctttttcccctctctaagacatttatattttttcttaaggggcgatatttaaggcccgtccccaggcccttagtattttttttagagcttttcgctaggtttgaacactttatatttatgcttaaatacatactttgcttttaactttgttaaacttttcgcctgttttacatttgtccgcgtggtatgccctactactccctgagtgacatgaaaattatttttagggcactcagttttacaaactttaatttagaggttgcacatacttgtccggtacaaatttactttacagagcataaacttatatttttcgactattggtaatacattcagaggtgatcagcattccaggccctaggtaccatggttccgtccattcttttgagcttgtaagtcctggagccgattttgtcctcgattttgtatggtccttcccaattaggcccaagtaccctcactccagattcctgagtggctgggaagacccatcttaggaccagatcaccaatagtaaatttcctatttttaaccttcgagttgaagtgtttagccaccttgttttgataagcttccattcgtatt

SEQ ID NO: 140106 - DNA, 816 bp, Cannabis sativa
  modified_base (45)..(65): a, c, t, g, unknown or other
cgttttagaaagttcatattttggatgttaaacaacatacttgtnnnnnnnnnnnnnnnnnnnnnaaaataaattccaacaaaaagaaggtaagaaatgggattactacaacccctgccaatcccagagaagccatggcagtcaagaaacatggacttcatagtaagatttccggaagtaaaagggttttggtccatcctggtggtagtgaatcgattctccaagtatggcatattcattcctatgcccaatgcttgtccagcggatgtggcagcagaactcattatgaagaatgtggtgaagtactttgggctagctgaagacatcataagttatcgggattccaaatttacgggaaggttttggacgacgttgttcaacatgttgggttcagacttgaagttctcaacagcaaaccatccccaaactgatggttagatggaaaggatgaatcagttactcaaaaagtacttatgacattatgtgacggcaagccagaggaactgggttgagttgctagatgtggcacgattttgctataacattcaacagtcctctgcaacaggaatgagtccggcagagattgtcttagggaggcagctgctgacaccacatgaagtggctaaacagaagtctcaaggtgtttgcccagcagcataccggtttgcaaaggatagaaccaattgctggaactagccagggacaacctagaaaaagctacaaggaggataaagaagtatgcaaacaagcatcgaaggacttagagttttttgtcaaagatcgagcgttgctgaaactcactccacagatttggaa

SEQ ID NO: 140107 - DNA, 821 bp, Cannabis sativa
  modified_base (27)..(31): a, c, t, g, unknown or other
actaatcagattgtaaagagttttatnnnnngcataaaacccaacaaaatgatctatttatgcttagttttagagaacaaactttttctaaatactcgaatcaagcaagtatcaagagtttttttttcttcttgctaatctaaatttctgtggttttaaatagtcttctggcagcaaaagagttataatgttgtgaatttaacagcattgtatggatcaacattccaaggatattttttagagatccataataatcattgttgtatttgtttgtttatttgttcattgaccctttattgtagttgttatgaatttgaatactaagttattatatcactacagaagaaaaattaaactctcattttagtacttggacaatgttctgtcagaattacaaagtagcatatgatttgtctttcaattttatctcaagaatttcatgtggaacaaattaaatggtagtatacttaaggagataggcaacacattttcctttaggtgagatgttatagtatatataaatatattgtgtaattgatgttcaattcctcttgctcttgtggattcctctctgctgcaagacattgcagagtggaattttgataaataaattgtagtgacagctatgttttgctgttgattcttatatttggtcatggttttgtctagtattttgtcttttagatagtccttttgtctcgggcaggctatttccattcagtaagtatttattttttctttattttacagtcatgtgttcttagacacagttttgaatttcgaaagaattagtagatatatttgttggaatatttatttta

SEQ ID NO: 140108 - DNA, 734 bp, Cannabis sativa
  modified_base (189)..(189): a, c, t, g, unknown or other
ccgcgcgaagcgcggattcattccttagtaatagctataaatgaaaatttttagtgtcccctaccataagtcattaaaagctctctttaatttttaatgtctttcccttaatgtgtaagacatgaaatggagtcacttaaagtgtatattgttgtagtataaagctcatttcaatataattagatttantaattaataaagatcagaaatcgccttttatgttacactgttctcatgattttaacgcccgtatttaaaatttactaaacttaaaggttaattttatagtatttaaaactttataatcatatgggtcgggatcccgaatttcaaaatactgtttaaagtatttttactaatataaagtttaatagtatatatatatatatatataaatttttacaacaacaggcaactaaattatatctcaaaatattgaaagaccgagaccctccaggttgcgctgccgcaatatgtacaatcattgtcgagcttcatctcactgttcctccagcttagcttttcctttacttacacatggtagcaaactgatgagtcaacagactcagtaagataagcaagacatatatataagcaatgctagaccgactttatgtttaagcggccctgagctcaacaacgagctcaccaaatggttaagaacgttcttaagggaagtacgaccattgtaccaaatgcactaaagtaccgaccctgtactcgtgttggtagag

SEQ ID NO: 140109 - DNA, 554 bp, Cannabis sativa
atatataatcaaatatatacaaatatatatatatataaatataaatctaaatttataattgtctatttcatcaatttaaaaataataatatttacttttttttttgagggaaaataataataatatttacttaaataaacatgttatatatattgagtacttaaaataaactatttttcattttgcaatgtcaatttttttttttttgttcagatagctattatatatttgtttctttttttttttttaataaaaagttatttgcgaagttttttgtatattattacaaaaaatatagtaattatcatgtaaattattcaaattttaaaaataactgctcattttttttttttttaatttttttattcaaatacctttattttaattttcttagtcctgctaaaaatgagagagcatccccacagatgctttacagatgctttactttatttttaaaatacattattaaaatactattttatttattttacctcacaagtatcagacatcaatttttctatattttctctacataatttaaatatttttattaa

SEQ ID NO: 140110 - DNA, 817 bp, Cannabis sativa
actcaaggttcgaaattgaagaggtaaagagaaggaaagtagttcgactatagagccacttcaaaggattctttctcttcaattataggctcaatctctcttatatattcatctaatggtgcttctactatattcaaacaactctcataactttcgttatttgagttattatccttaatactctctaaatcatgcgccattcaattatcacatagagcttttaccatgtccgccaagcgattaatctcttttggaagtgatagtatattctcctcttcttcaattagttggggtgagtttggacaataaggaaggtattggtgactccaaccctgaagtaatggatcccaatgccaatcgtaatcaaaatcttccatatcattcaacacatttattgcttcatggcctctccttaacaaatcctctctagttaccattgctccataatccaccaaactttttgtttcatcattaagttcattgtaaaagaatagaataaaacacccacttaagaaattgggataacatctctctccgagctccttaaatccatccctagcagaatagaatggctcattgtgttgttggacaaaattcacaaggtataacatttagatttaccttgcaggttaaacacattcaataaaacattagtaaaattaaaacaaaaaaaaaccaaattagaatagaattcatttatattgatattaactaaaatagttcctggcaacggcgccaaaaaacttgttgtgataaatccaacacgcaagtatacgtatcgttttaacaagtaatactcaggtaagtgagatcgttc

SEQ ID NO: 140111 - DNA, 512 bp, Cannabis sativa
ccaagtttcacgaagctttgaataagcaaggtgaaaggcagacaatgtgtgataaaaggctaaatgtcatcaatcacgaagcttcacagaccattacaaagaaaatcgcaaagttttaaacctagattttctacttatcctctacaacaaagtcaagaacgcatgtatggaacccagaaattaagcatgcaaaataaaagaggaaagaattgaaaacttgctcgctgtttgacgtctgcgtttggtccaaacgaagttgctcggatactttgggtggaaatctcacgacagacttaaagcaaaaacttccttttttgctctgagccttctaaatagagaagttggtaaaagtgaatttgtgaaggatgtgcaaccctatttataaacagaaaaatgaaaaagggtaatcatttcaaattccttagacgcctcggttccccccaaaagcaaatatcgggaatcaaatataatcaagtgtaaccgtcaaaacgtggtgagagaaaactggattt

SEQ ID NO: 140112 - DNA, 889 bp, Cannabis sativa
tctctctctctctctctccacccacgaaacccacccaccatcgccctctctcgatctccctctctcttgtctcgcttcatttctcgctctctcttgcgtctccatcaatgaccacctcctcttcctccaccggtcactatcgatggcattcctcccaagttatatacacatatatatttattaatattaatttatatatatttatattcatattatacgtatatatataccgtacatacaatattaatttatatatattatgtatattgtatatatacgattatacgatatatatatatttatacctatatatttaattaatagatagttatatgaattgtttaattattttaagattaggtattaaaaaaaatatttgattaagattaattatttagttttttatttaggcattttaaaaaaatatttagtttagattattagttgttatgtaataaaaatattatatggattatttgttgttaggtaataaaaaatatttagtttagattatattaattgtttagatattaaaaaattattttttattaattatttatgttaaccagttttttgacaactaaatatttttagaggttaagaaagtaataatggagtagataacaaaataatgaataagagatttttacgtggttcagacgttaactatcattagtccacaagtccattttattaggctctttggcccgtaactgtttatacaaatagagatacaatagactagaactcctttcccccgtgttcctcttggagaaaaggaagcttagtacgaatattctggagttgatagtagggttacaaaaatgtgtttgcttgggatgatcaagaatgggttctttttttcgaaggagaaggttttcctcttttg

SEQ ID NO: 140113 - DNA, 604 bp, Cannabis sativa
  modified_base (456)..(456): a, c, t, g, unknown or other
gatcaaccctccttgtgttattttgtaattagttttagttaaattactattttacccttctaattacttatttatactttagtaccattaattcactagtggaagtataattcagatcccatctaaatttgcgggcaacttttcagctctagaattaacacaaaaaaggaaccaacattcaatccattaagaagtcagaattccataattgtagatcatgtttccaaccatccacattattagatcccaaaatagaagttgtaagaatcatcttctctaagaaactttaatgagtaaattaaataaactaataacatgaataagaattcatgattactcaggatttgatcatcattatgatatgaattaggttatagtaaacaataagtttgataaagacagctttattcatatcgatcattgtcatatataatctttattatatacaacaccttnactttgatgtcatactacatcagtaatctgaatcgagattacttgcaccgaagaacaaacattagtgaaccgcactagcaactattgattaaagattcctaaactttaatatgctattgactattttattcatagctaagttatctta

SEQ ID NO: 140114 - DNA, 541 bp, Cannabis sativa
gacagagggttgtagtgctatgttaaagagtaaaattctaccaaattgaaagatccgggcagctttgcaattccaatttctatgggggtcaagatgtgggaagagctctatgtgatttgggagctagtatcaatttaatgcccatgtctattttcaagaagttaggaattggagaagaaaggccaactaccatcactttgcaactagcggatcgttctatggtccatccggatggaaaaattgtagatgttttggtacaatttgataagtttatttttctggtcgatttcattattcttgactatgaggaagatagggaaattccaattattttagggaggtcattccttgctacggaaaggactttgatagatgttgaaaaaggagagcttaccatgagagctcaatatgagcaagccacattcaaagtctttcatcctatacatgctccagatgcaataggagaatgcttagcaattggagatgtggattctaacatggttgaggagtccaaattcaaaaatagtaagaaggtgagaaa

SEQ ID NO: 140115 - DNA, 536 bp, Cannabis sativa
cgctctaaaagtgatcatatttttttaatagttataattattagtttaaaaaattaatttaagtataaaagatggatataaattcaaatttccctctcaaaaatagtatttttttttctccaaaatataatatatcaactaattatcaaaagaaaacataccaataacagtttatgcacttgtcatgattatgtactcaaatcccaacaattagatttcatctaatctaacctaataatgttaatattaaaagatcagaatcaactatcaaaagaaagcatataagtaattgaaaaaactaaaagcaaagaatgaagaagagaaacatatgaaatgaatacaaaataaaaaaaggaaataaaaaaaaggaaataaagaaagagaaggaaacttggaaaagaaggccattgaaatctaaaagaataataaatcaattgttgttgacctaactaattagcatatatatctttatatattaaaagtgcctacatttcttgtttaacagaatataccttaaagaatattctgttaaattt

SEQ ID NO: 140116 - DNA, 681 bp, Cannabis sativa
aaagtccttaaatctaacaatctcaatagctcaatggcatttttaacaaccttaaaaatttaggaagcatgatttggtacatgtcaaaattcgagggtaaaaatcttaatttacctaaattttagtaaagagatgattgtaaccgagctttccacctataaccaaagccattaaaatgaagaatcaccaaaaacaacaacttcaaaaagtaaaattaacaaaataactttctcatttttacactaagcgaccaaaagggggtctatttatgcaacttgctaaatttaaatttaatcaaattcattattccactaaaaatgaaatcattcaatttaatcaaatccgttattccactaaaaatgaaatcatttaatttaatcaaattcattattccacaaaatgaaatcattaatgtaatcaaattgcatatggtaaaagggtagattttggccaaggaatgattcaaggaaagatttaaagtgaattggtgtattatttaggtttttttacacaaaatgacaaaaaaaatatattttttacatttatattgccacacgtcaattttatcttttttaatttttatacttttcatttatactacttcaagttttcttaattacaaatttactgattcggtcttccactagtgtataaaggccctttcccaacgacttgacttca

SEQ ID NO: 140117 - DNA, 778 bp, Cannabis sativa
gaatttatgaaatacttctgtttctttattgttattgaataatactgattacatttaaattgagttttatttggggaataaaacccaacagctgggtcccagttatggccttttaaaagaattgtttggtccttagaaatagttgaatctcaatctttttcgaaaacagagaggatgcttgaaggagttcttaaaaaacataactgaaatcgtcctaggttgacaaaatgtcaacctgggcactggcccttatttttcgcacccagaaagtgttgtttcttccagtaaaggacctatttccccatttttgatgaagatgaagaaaatgtaaaagtcagatcgtcaatctgatacttagaaggtgcccaaattgacaaattgtcaacctgggcgttggggtgctcggggcctcgagtgctcaaaaatgaacttgctccgattctgattctgatgcctcaaatatgtctgtggtatgtctagttgatgtcctaataaaagtttttaatcatttgcactaagacaatcccaaaaattgaaaccctagttgggaatgtgaacttgggcactgggtgaaaccctaggtgcccaggctggcttccaggttgcaggtttgtgtaattttagctcccagggcttgaattagattgctccatgtcttcatggtacataatactgaaagataatgagttggattcaagttattgaagactgaatttctatctcgaaactcccaaagtcaacttggacgtagggctatagggtgttggaaattatttta

SEQ ID NO: 140118 - DNA, 966 bp, Cannabis sativa
ttcattaaagttttataaaaaaaaataaattattaggtgactattagattataagttaattattatttaattttaaattaatcacaatcatttaataataatctgatggctaaaaaaatgtaaccataatgattacatatttaatgtaaccattgaaatatatatatatatatgattttttttttacaaaaaaaaaaaatataatataattaaatttcaattattattgttgcataaaaaaataataatattattattatgttttaatcgtaatttttattatttttatttaaatattttaaatctaaattcaaattcaattttgattgtatatttaattttttattctaatgattattagatatatatatatatataaatttgaattaaattaatttatcatgttatacatttaaacaatatataatttaaattaatttaattatatatttatttgattatgatatttattatattgtaaatattattattattactaataaatatttatttaaataattttttaattttaaatttttaattaaatgtaaataatatttttctcaacaccatcctatttattttatataataatgacttttttttaataaaacaaattaaaattctatatatgcaacacaccaaagaattttttgtcttaataataataataataataacaataattattataatttaaaaatatggtgaatagacttaaaaaaaattgattttatggagttttaatatttagtaaataatttttttttaataaattagcaattcattacacaaaacaatcttttttacaacctagaagcaccaagcaagaatgtaaggccttagtattctatacaaaattatttacaaagtgttgaaccaatcttcatcctttttggttactttttttggccatacaagagctattctttgtttcactaccactttaatttggcttgtcacttg

SEQ ID NO: 140119 - DNA, 1210 bp, Cannabis sativa
  modified_base (1160)..(1160): a, c, t, g, unknown or other
ctcagcccatatgatataaaaatgagagatttttttaattagattgaaaaattaagcataaaaactcaaaattttataattttacccatttatcgttaatacccattaaaaatggacccaatatatatctaacatctatatataaatggatctccacaaaaagacaacaaaaaaagacttatttttgtctttttctaaatgttttttttacaatttttttattataattttttataatatttattttacaatttttttataatattttattttattttgtggttttttataagttttttttttattattttttttataattttgttttaattttatttttagtaaataattttttttacttattattggtactcttaatgtgcttaatgtcttatcgttaatgtgtttaatgccttatcggtatgatcccatttttttgtacttttttaaatttgtttaaattttatttttttaagaaaataattttttgtacttactattagtatttttaatgtacttaatatcatatcggtatgatactcaataagtggtttgtaatttttttttgtctcttgtattttttttttttatttgtatggatgatttttgtactatttactattatttttggtaaataattattaattagttagtaattttttttttttatcttttatgtttttttcttttatttttttgaaatgattttgcgtacttgttattggtactcttcatgtacttaatgctatattggtgtggtacccaataattggttagtaattttttttgttttttttattttactttttatgaataatctttgtacctttgtactaattttttggtaaataatttttgtactattatttctatgtgacgccttaaagtgttcaataccatattgatatggtacccaataattaattagcgttaatattaatatgtacttatctttagtaagttcgattagaattttaattttttttttacatttaatttgctaatttaattaaatttatattttatctgtctttatttaaatacaattaataaaaataagaaatatgattaatccattaattttaacgggagttacgtgtctttggcgcgtttttaaccacctagtatgatgttatgtgccaagtcacgtatgttaattntattttagtttttagtttttttaacatcataattttaaaattaataatat

SEQ ID NO: 140120 - DNA, 1370 bp, Cannabis sativa
  modified_base (1212)..(1213): a, c, t, g, unknown or other
ttaatttctcctttaattttaattctcttttaattttaattgtacattacaaacttaataaaattataaaaggtttaacacacgtgcaaagcacgtgttagccaactagtataaataaatatacatataagaagtataaatttttatatctcatttttttaatacttttgtactctcttataaattttattttattattttttttgaaaaaaataaaatgcaaacacttatcctattttttttctctccttttcatttttttattattgagactctaactatttcaaattatttttctttaattaatcacattttataaaaaaaaatttaatcaatttcttttaacttttactaaaatatgattcttttactttcatcatttttctaatatttttctaacactatttctctctcttacaaaaaaattaagagcactcctacatattgtctatcttttacataattaataaaaagtagtatatttttttttcgatgtttttgtagtttatttagagttaatttataaatgatttgcatattttaacaagattgatgtcttgttattttttttattgatttatagttgtctttttgttattttataattatttttatgttgttgtttatgtgttctatagttatttttttgttatttttttttccggtacagttgttgtttggttcagtgtattttttatcgtctatatttttagtttattttagataatatttttgttgtatgtatgtgcagtttgttttgctgtttttgtattgtttttaagtggtttctttaatttttttttgttgaacagttattttttttattcatgtatattttttaagatatatatttttagtttattcttgataatttcttttgttgcatgtgtgttactttatagatgtagatacatatatttagtttatttttttcacacatttttcttaaatacaatgataagattttttaattttttaattgacatgatgtgtagtagtagatatcgacatattaattatatattactcattatattatataccccattttgaaatcataagattttattatttctattattaatgtaactatttatttaacttttaaaaaataaattattattttaactatcactaactcaaaaagaacaagagaaaaaaaattgaaagaatagagttgtaacaacaaattttataaatatatatatatanntatatatatatatatttattgtaatagtacaaaaagatacatcaaattgtcaaagctaagtaaaaaaaatttgtaatacaaaaatatattgaggagttgatattgttttacttattacaattaggtcattgttttgttatttttttttttgttgatt

SEQ ID NO: 140121 - DNA, 1434 bp, Cannabis sativa
ttgcaacttaaaagattaatgtatttttgttgtctgtgtttggttttaaagacttgttttgttatgtttacatattttttttatgtatttggtaagaagagttgttcaaccgtaaatagtttatgtctctcattttttctatttataattagttgtttttttagtgttaatttagttattatacggttattattatagggttcttaaaaaaattgtattattagttaggtcttacatttattagttgtatttgagttttataattgaagttgttttagtttcatgtttattaagttttacaatacttacaattttgtttaactattaatcgtatttttatcggttcattgctttattaattttgtcatcttaatatttttaggtgcgtgataagacctctaatggtgttgacaagttgagccttccaaagaaaaatattaccgaggtttataacttgttttttgatttgtcttgtttgaaatgttatctgcttgtagttcattcattttaagaaaaaaatcatagtagaaagttattttatagtttgtttaatgttgtgttgatgctgttttaactgatggagaacttgatttctagtgatgatgaacttcaaagctgatgagaataggcttgttgttcatttctatttctttggtaaagtgaagtgagtagcatacattaaaagtgtaaaagaaaatattcaaaagctttccaaggaggttaaagctactgagcatggattaatgatttagaaatatatttggttttggttgtatgcgctaaagagcaacatatttttaagaaacgttacttttatctttttgtaaaaaaaattaattaatttcacatgtattttgtatggaatattgaacattataatttctttttaatttgtttatatattttagtacagtgagagacaactcttattatattttaaatttctacatcaagtattggtatatttatatattttttttttaaaaaaggacaatagttgttaataggtttttttaactgttaacaattatttaacaacgatataaaaatatagaaacaattgatgaataaataattatagattcttcaatattcagccttttcgattgtttgcttttggtttttttcttgttgttttgcggttgattctattttcaaagtgtcagtatcaaccaaaataacatatattgaaactgatctcttccttggagtagataaaagttgtttagttattgttgttgtgttgttgtcaagttgctgcacagttgagtgtcatgagttatgttcacttctagccactgtcatattgttgcacaccattgtttgggtagctattataaggattgttatttttatgttactatgtagttgaatgtgttcacacacaatagatatcatgtgaaattggttttctttgttaataactttatgtaa

SEQ ID NO: 140122 - DNA, 907 bp, Cannabis sativa
acctctcaattagaatattattttcttggttccaagtgtattcttggatagaggttctactgtttattttaatagaatgaacctttatttatacaaaaatataactaaaagaataaaaaactaaattaaaagaaaatacaatcaaacattaatggtgattattaatttaataaattagacatccatatataatatttcataacactcccgtatggatgtctataaaaactgactcattaaaaatcttactgaaaaaacttagtcaaaataaaaggagtgcagtataaattactccccctcatttaggcattcgtgaagatcttctaatcgacgaattccaatcttgtatatcgtcttctcaaatattaatgttggtaataacattataaaagtctgcaagattgacagttgattgaatatgttggacaccattatgcattctcttgaaatgtataatgaaaaatttagtgacatgtgtttaaattatatctcattcaatgtagccttcttttagtagagcgatggaagcagtattatcttcatagagaactgcttgtgttggtacttctttattgagtgtaatccatatatttcccagatatgttatctcaacgatctcacttttacgcattctctacttgcttcataaagtgcaagtatattggcatgatttaaagttgcctcattaaaaacattgtcaagaaaacccagtaggacaaaacttaagctggccatttactataattttcctaattcatattcataattatttgcaagttgccccgttaaaaaccttgccatgaaaaatcagtgggacaaaacccgaactaagggaaaaatagtgcaacatgaatatgtctaccctcatgcacatatgatccataattattttggtgataatatatct

SEQ ID NO: 140123 - DNA, 970 bp, Cannabis sativa
caagatgttaatagtctttgtatgaaatattagctgacctccacctctattactaaagaatctgttagggaatgttttaccacaaagaggtgaggtgattctaatgaggatgccgttaagttggtagttctttattttgttgaatggtttttgcttagtggtactaagcatataaaaatgatcattagtctattttagatgttgtagacagtggtaactatgacgaatttgcttggggacggagttcttttgaattgactatttcgttgttgaagggtaagcttgacagttgggttgaaagtgttagaagggcgaagagtttaggaaagagaccgagtgtattttacactttgattggttgtcctcatgtatttcaagtttggttttataagtgttgtaaatacatgaatagtaagtactaccaaaaggaaatttctagtattctaaggattattcggtggacttgtagcagccagccgaccttcaaaattttaaagactacgattttttatgtctccaaagacagggtatttcagttttttttttcgtttattcttagtttttttgttgttgttttatttttcaaagagtaactcttattgatatttttctttttatgttttttcagttgcaactatcaaatatgaaacccacttctgctaagttcaaatccttaaaattgaacagtttcaagtttgacactgactacaattcttacaagagtatgcctgttcaggaacaaccttctgttgttgagagtgacatatctgtcaagcttaatgatttttttgaaaaagttgatggtttggaacttaagattgatttgctacatacttcccagtagaagattttatctgatttggttgatttgaaagagtttgtttctgcacagtttatttcttttgctgctcaaatggctacaatgcagacacagttttcttctgtgtttgttgattctattgctaaggta

SEQ ID NO: 140124 - DNA, 1111 bp, Cannabis sativa
aacgagctttccaacaatataaagaacttccaaaacggagtcttgagtcaaaagttatggccaaaacaaaattcagcatttttcccgatacagtctaaccagaattccggttggaacagccctgaaccaactgaaattccggttgcctgggcagaaaaaacacgaaaaaacataacttttaaacctccaaaatctactcaaatcttccccaatcaccaccaaactttccagagcatcatcatatgacatattaaacatattccacagctcaaacacaataatttcactaaaaatcaaaaagtgccattaactcaagcttgctttacacaaccaaaatcagaacctacaatcaaattttaaactcaatgaaccctaaaaacgcctctgaatttaccaaaaataaatcccacaattcaacacaaaatcatgcccaaattctaaaacttcaagctcttgaacttgagcttaaattccaacaaatccaagcatttccaatagcataaatagcaaataaaacattgatttcaacttagagaataccctagaatcccacccaaagcttaataacataattctcaataaaatcatgtttacaacacctaagataactcaaacttcatatacatgcaaaacaagaacaacataaccatttcacactctatcaaccataaaattcagcaaggataacaaggattaaagctgtaaagactacctcaaattcaatccaaatgcaagcacaaagtttctcaatcacaaagcttcaatccaagctaaaatccaagcaaattcctcaccaattcaaattgcatttcaagagagggtttgagagagaggggttcgggttagggggtgaaacaaccagaattttccttttttttattccaaaaatttatcttttatttaaatgtaaagtaaaggtcaaaagaccattttgcccctagggccaattctcacatattcacacatacaagggtcatttagtcattttattgacaaataaacccaacataattttcagattatcactaataaataaaaatgccaaatatctcaattcaaattgcatttcgggcccgaacccagttcagcctgaaatatccggttgtgacta

SEQ ID NO: 140125 - DNA, 508 bp, Cannabis sativa
  modified_base (274)..(281): a, c, t, g, unknown or other
  modified_base (432)..(444): a, c, t, g, unknown or other
aaaaaaaatcaaaatatctacattaaaaaaatggatttcgaaaattaaaaagataataataaaataaattatactctaaaaattattctaattcaagttgatctaaaatttaaaaaatttcaacttaaatattatttttcatttaattaaatttaataaaatagaaacaaataactatgtatcttcaataaaatcaacttaattattaattctaatttaatatatctaagaaaaatattctaatttaagatggtctaaaattaattaataaatnnnnnnnnaacttaaatatatttttataattaattaaatttcttgaaatagaaatgaataattaagtatcttgaataaaattaatttaattattaattctatttttaagttttaagataaatgttctaatttaaattggtctaaaattaattttcaacnnnnnnnnnnnnntctacttaattaaatattagaaaacataaattagttactcgaaattactatccagaatcttttc

SEQ ID NO: 140126 - DNA, 732 bp, Cannabis sativa
  modified_base (52)..(65): a, c, t, g, unknown or other
attacttttaaaagaaaaaacctccaattaagttaataataataataataannnnnnnnnnnnnnataataataataataatatctaactaaaagaaactatatcaatataaaacacaatattttttttccagatctatatatgtatatatatatattctagttttacttttttttttaaaaaaaaaatatataaatatatataataccttagtaataaataacttaagaaaaaaagtaaattacctatttataattaataattaaaaagtatctaatcatacataataactaacaaaaaaatgtcaaactatctatttataatttttgaatttatgataattaattaataattaaaaaattaaaatttttaaataattatcctctccttaattctctcactttttaaatatttctgttgtactttaaattctcttcttaactctctcatttttctatttttttattcttctttacttgaattagagatcactaattaattaaaaataaaaaaaaaattatacatttatatataataactaataaataaatattatatgtattaaaaaaattaactaatttttttttttcacagagagatataattaatattaactaatataatgtatcgaaataaattattaactaatatactaaaaatatcaaaattataaacttgattatgtttatcactctctcttcccttacataataaaagtaagtacttaccgat

SEQ ID NO: 140127 - DNA, 1230 bp, Cannabis sativa
gagtatttggagggcgagactcacaaattattatcccaatccaaggatgtatgtgagcaacgagacaacgcccaacaggagattacccgcctcaagcagaagccaaaagtgagggaggaagcagagaaagcaaagaaggaagccgagaaggcaaaagaggagaccgagaagaccctcaaagtccaagccgatgagtttgaggagaagcttgctgaaaaacatgccgagaaagaaattgagatcgtagaacagtgcgataaagttagttttcgcactgtatatcaggcctggctctggaaccctaacatggataccagcttcttggaggagaaggaaaagaaaactttagctctttgcgaaaagaccaagatggaagaagaagacggcgaggtcgatgaggaagaagaagatctgtccaagtctcccagcatgtagacttggtttatttatctcccttttatattaatttttttttaagaaatggccctttggcaaagacaatggttttgcccctagtagcacttttttattgtaaagacaaatttgcaaggttggacggccaactttgctttttaatgcctcgtacttttaagtgtaaactttattatgcggacctttacttgcgttttattcacaatataaactatcacatgcataaattttattaggagtttcaattgattgtccttttttccgatgttaagtagttaatttcttactttacatgcgagcaatttatctacccgctcctcaatctcgagccatcatcaatttcatctcgcgatcatcggaaatgatctcaatttaggcacattcaaatatatttataatgaacttgtcatcttatatatatttttattgcttacatgagtagttaaaatttctacccacgcgttgggtttaactattttttcaagaaatttggatgcctcatttaatactttcccttagcgcaaagccttagtattcagctttatgcgctagtcgtaatttttgattttcctctctcgtcagataggttataaataaaaaattacagttgtttgatccctttctcgtcagaaaggtttgatcaaggcgttataacgattcgacccctgttccgtcgaaaaggtttggtcagggagttataacagtccgacccctcttccgtcaaaaagctttggttgaggcccttataaaaagttttcaaaaaattttattttttttgaaactatgggtttgcattgt

SEQ ID NO: 140128 - DNA, 631 bp, Cannabis sativa
atatttttaaaattaatatttacatttaaatttgtttagtaactattcataggtaatacccattaaaagtgttccatatatatatatactaagtattagtaacatgcaatgcatgtttgcttggagttgtattattagagttgctttttatttaattattaatttaaataataataataaaattaaatctaatacaattcaattatattttttaaatatataaaaatttactctagttttaaattaatttataaaaaatatatatctagctaattttattaaacaactaaataagtaaataactttagatattttaaataatataactaataaatttgttataaagtatgattatttgattgaattaaaatctaatttatatttaaattaagatttatacaaaaataataattatttaattttgttgatacttttaaattaaatttaaatatttaaaaatattttttttagaaataaaagataattaattgagttttttttttttttgaagaaattaattgagttttaattgttaactttaatgaaaaaaaaaaatattagataaccacatctatatatctattctatataaagtgtgcctatataataaaattattggtttatgagaaat

SEQ ID NO: 140129 - DNA, 596 bp, Cannabis sativa
  modified_base (97)..(105): a, c, t, g, unknown or other
  modified_base (567)..(570): a, c, t, g, unknown or other
catggggttagatccttgagttagagtcccatcttttcgtaagtagtcttgaacaaaattttggaagaagctccattgtcgatcatggttctggccnnnnnnnnnttggctatctggacttccacgacatgcgggtcgttgtgtgaaaatttaattttgagagcgtcttcatcgttgaaggttatggtcggctctcctactcgtggaactttgggcttcctttcttccacagccaggatcaattcttgttattcatactgcactgttgggcgtacctctccggaccttttcctgaatctccagcaatgtgagggcctccaataatgacttgcaagggtccatctaccagcggaggtagcaaatcttggttgttctgaccttggtcggtcttgacatacttctgcaggtgtggattgttttcccttatcagaaactcaatttcacgcttcaagttgtagcattcattagtgtcgtggtcgtagtctctgtggaaccaacaaaactttgtcacgtaccttttgttggtatctttcttcatgggcccgggctgttgggttttatgccctnnnnaaaactctatttcaatgtaatccaga

SEQ ID NO: 140130 - DNA, 506 bp, Cannabis sativa
ccgcggagaaggtactccgggaggacatcatcgccacggcggaagataagtaccagaagtacctcttccaaaaggcccaggatcaggcttacaataaggcccaggcggccgccggaaggcccctttgtatcgggagcccggtggagagaaagacccccaccaaggcctgcagtccaggttccgaatacgggggctcccgatgccagcacttctggttctggtaagtcccctttaacgatacattaggtccctcctgtctgtgattacgctagccttaggcctatagggttcgatgaacgtctccataggtttaggatgccctccactcggtggggggatcacgcaaaggagtattacttctctcactaaggcaattatttaggccggtcctggatgggttctggacctccagtgcctgttctcttggactctttagcctatttgtcttctagttggttccgtccctcggacagctatctcggggatgatgcagccagtgttaagat

SEQ ID NO: 140131 - DNA, 603 bp, Cannabis sativa
atatatatataaattgaattaaaaaattaagaaaaatgaagaattaaggagaaaagaaataatgagattaaagtgattttagaatgctacatcaccgatttatacttctcctttataaatatatatagattcatacttctcatttactgatatatatatatatagatatagatagatatatagatttttaaaattattttttctaaaagaattattagtttggccaatactatatttacatgtgtcactttattgatcaattaatagaacgataaattgagtgttaagtttaaaaatttgaggatatcaataggaactgcaatgatgacatcaattttatataattggaatataaaaataatggattatgaaaatatttgattcataatttcacacctatttcttcttctacataacctcacatctgctttctttttttcaatttataataaattttttttattaaaaaaatacttttcttatattctgcaaataaaaaaaatagttatgaatacatatatataaataattgaataattatttaatttaaaattattaatttaatctatatttattattatgtgtttttttaaaaataattaa

SEQ ID NO: 140132 - DNA, 1551 bp, Cannabis sativa
  modified_base (591)..(591): a, c, t, g, unknown or other
acaattacataatataaacactaattactccacaatttagcttaaaattcaagcttaaagatatcaaaataactctaaatcttggagtttttaacaatcttctctaagattgatctccgatcaggctatcatcaattgagaatttgaaaggaagacattccaaagactattttctgcactaggtatgggcactatgaatttccagttatgtcctttggactaaccaacgctctgggagctttcatagatttgatgaatagggtattcaaggatttcgacgatatatgtgttatagtatttattgacagcatccttgtgtactctcaatcagaagaggagcatgagcgacatcttcggatgaatctgtagcgattacgagaacctaaaatgtatgccaagttcaaaaagtgtcagttttggctatttcaggtgtcttttctcagacacattgtcactcaagatgggatcaaggtcgatccagggaaggttgaatcaatcgaggattggccgagaccgaagacagttatagaggtcagaagttttctaggtttggttggttattaccgtcgatttgttgagggattttctaanatctcaacacccttaaccgaactcactaaaaagaatgagcagttttcgtggacacacaagtgtgaagcaagcttccagaagttgaaactaagattgatcacagctccggtattagctctaccatctaataaagagaagtttgtggtttactacgatgcatccagatagggtatggggtgtgttttgatgcaggacgatcgagttatcacttatgcctcccgttagttaaaggaataagaacaacgatacccaactcacgatctaaaacttaccgcagtagtttttgctttgaagatctggcaacattatctctacagagaaaagtgtgagatttacacagaccacaagagcctcaaatatttcttcactcagaaagattttgaatatgagatagaggcgttggttgggattggttaaggattatgactgtgaaatcctttaccatcctggaaaggccaatgtggtggcaaattcccttagtagaaagggtcccaagaaagtgactagtatgatcaagatttcacctcatctaacagatgatatggtcagatcaagtattgagtttgttgtgggaaaacttactaatttgacattgcaattggatttactagttagaattaaaactgctcagttaattgatctagagctggtgaagctccgagaagaggttttagttggtcaagctaaagattttacggtgtcaagtaatggaatgctgttgtatagaaccagagtttgtgttccaggtagtgcggaacttagaaaataaattcttgaggaagctcataccactctttattcactgcatcctagcactaccaagtgtaactcatcagcttcccacccattggagtggcaagagtatttcttgtagggtactagggctttcatgacaacatccaatgggacgagcctctgggctattgtggctgtagcaggaataccaacagggggcctgtt

SEQ ID NO: 140133 - DNA, 579 bp, Cannabis sativa
aaatggcttcggcgagggcctgggtgcttcgtcttgggtggtgagacgagagagagaaagaacgggcctgtgagggggttcagtagaaaaagaagaagaaaaaagaagaaagaaaaaggaagaagaaaaagaaaaaaaaatatttttttgattttttaattttttttaaattttataatcattttttaaaattaatattacgcgagccactaaaaatttgctacgtgtacaaggtgtgtacacgtgggcagtctactgtggcaactgtgatttttggacggaggggtacagagtaaaactgaatgggagtttaggtagttttgctcccaaaaaatcgatttttgtggttaagtgttaaaaaatttaaagtttagatggtttagccgccaatatcccttataaagtattagtattgctgcgaggtgacatcttaaaaattgttagtgatatttcataaaaattattatatttaatcatgtggaacttaatatttaattgtactaataacaatatgatatatatatatatggaacacttcttaatgggtattgcccatgaatggttattaaacaaatttaa

SEQ ID NO: 140134 - DNA, 531 bp, Cannabis sativa
tccagattttaaattttttcattaaatgtccatatttttcaaaatgcatttaagaaattccatatttataaaaaaaaaaaaaaaaaaaaggccctaatattaaagtagaatttacatttattatgagattttaaaattttatttgataaatattacatgtttagttgtaaattttttatggcaatttgatgtttgtaatttttttatgagatttaacatatcatatttatgcaaactttaattctaaagttatattttatctttgtgaactgttttgtatttgttttattattttattttatttcatgcattcttctattttttttttttataagttgagaaatatttctttttttatatctattaatataaactattttcatattatattttattaaaatttatgtacttttgtaagtgagttgtttaatatacctttgtcctagggctgtacatcgatcggtttgggcagtttatcctatatattttctaacccaatctaaagttcgagttgctaaaatttaagtgcaa

SEQ ID NO: 140135 - DNA, 603 bp, Cannabis sativa
gaagagagaaaaactagtgtatagtgtgtttattaattttggcccacatgtttatttggacataaaataaaaaataataaagttcattccattccaactataattacatcaaaccaaaccaacttttaccttttcatggatatcacaataaaatattattttaatttgattggactgcttgtgattgacaatacttgttgtatataagtatagtgcaccaaagactttgaaagaaattacttaaaggcagcaagaaatatgctccccaagtttaatatactttcaaacagtttcaaaaaaattcagtttcccccctaaattcattttcacaaggctatatttatacagaaaacccactttccttcttccaaaaatactactacacactatctccaccattaggacgagggaaacactcctttggaagcctcacaaaaatcaaacctttaaaaaaaaaacacatggtggctggtggtggagaggactcctacgggttcgagagggatagtccgtcatggaaaaattcacttgacggtcacccccattgctactgtggtgatctagcttatgtttggacttctagtagtagagcaaatcttggtc

SEQ ID NO: 140136 - DNA, 620 bp, Cannabis sativa
gatatttggggtccttttcacaaacccagcatagaaggatatcaatattttcttactactgttgataatcacactatatttacttgggtttatatgcttaaaaataaatctgacgtcaacattattgtacctcaattttatgcttatatactccatcaattttctatttccatcaaaggcatacggtgtgataatgcgaaagaactaaacctgtcatcttttttacaactaaaggcattctcccgtatcactgttgtgtagaaagcatcaacatatattgaatgtcgctcgctctcttgcttttcaatctcgtttatctcttgggtattggagttactttattaataccgttgtttacttactaaatcacacaccatctattttacttaaccttaagtttttttttttgagttgttgtacaacaggttgccctcttatgatcattttcgcacatttagttgccttgcatatgcttccactttggacagctcaaggcacaaattttccccaaaatctcaggcttgtgcattcattggatacccgattagtatgaaagcttatactctacttgaccttgaaatacatcaaatatttcactctagagatgtcattttttatga

SEQ ID NO: 140137 - DNA, 504 bp, Cannabis sativa
ttctgttgaagaagaaaacactataaagttcaaacgaggaaatctccccgtaaatctaaagtatgttctatgtttctattgaatctggtttttgttgtttattcatttattcctttatgaatttttttggacgaaactgattttttcttggtttgtttaagggtgctattgttgaagaagaaattgccattaaagcagcaacaaagaaatctccctggaaacttaatgtatgttttaaatttttactgaaaccggttttgcatttttttatgtttcattattgtttcctaattgtattttgtttaaattttccaagtctttgttccaccaaaattggtttttatcttttatatgttagttcttgtttttgagtatgttatgtgaaaccagttttttgtgttcagtaatttgttattctttttctttgtgtttgtttatgatttattaatttgttctattttgtttttatttattttttcaggatgataaacaagaagttaaagt

SEQ ID NO: 140138 - DNA, 524 bp, Cannabis sativa
ccttttgaacttattctccaactcttctattcacgaatggagtgaatccgtttgctttaggccgagtcgttgatgaaggttaggcttcttcaagttcagatgctctcgtagattactcctgttgtgactgcggtaggaccttgctcttcctcttaaggtttggttcaccttattctccctatatgggtttgtgcgaatttctttctattgaacctgaagaaagagaggattggcaattttcgtccgatgttccaggtatcccaggttgtacccccagattttcctcaatttcctcaggttgcatctcctgagagttctaaatatatctctgggttgtctcttgccccttggtttgcgagccgcgaggtttgcctcgtgaatctcttctcccaaggtcaggttgattttgggtaccattctcatgcgctgcccttactagcggctatctcacgctctaactcggcattacgccggtttgcttcctccaatcgacgcctaagatgacaattttctaattccacgat

SEQ ID NO: 140139 - DNA, 860 bp, Cannabis sativa
  modified_base (819)..(824): a, c, t, g, unknown or other
tgctatttgagctactcgtccaagttcttcccaatgtatacacactttgtgggatttcctgggtcgagaatgacatcttccaattcctcaattagttttaacaggtttctctcgtcttgaactcgggggtcgagatcttcatctttctattcagtttcttctgctaagatcgccatcaactgatgaccgtcttttttatgctgtagctttatgcgatagcaattgcgagccaacatctggtcgccacgcaccactcccacgccatttggtgtttggaatttcaaggatatgtgcttgatcgaattgactgcccctagtccgatcagtgcttgacgacccaacaatatgttgtaagccgagggtaggtcgacaactaagaagtcttgcataacggtagcagataaaggtgcttcacctaaagttaatgcgagctcgattatgccaaggctagcgatgctgtctccggtgaatccgcaaaggttcaccatacaaggccttaatttggctttttcaagccctattttcttcagagtctccttataaaggatatttaccaagctcccattgtctattaatactctcttgatccttttattagcgagttgaatggttatccccaatggatcgacgtgaggatatctcacgtttttctcatattcctctgtgaatgtaatgggaggctccttggttttcaccttcttcgaaggttctggggcaaaggccgactgctcgttctttatctctttcacatatcttttttgtgcattattgcttttccctgtgatatgtggccctcttgaaataaccaggatgtcctcnnnnnnaacaggaagaggttgtaacccctgattgtttgggtt

SEQ ID NO: 140140 - DNA, 620 bp, Cannabis sativa
atcaaatctggctgtatacaaagtacatgactgtaacatgtcttacatagtaaacttagacaatatatgcacttgtcaaagatttaaatatgataaaataccttgttcacatcaaatgtcttgctcataagtttatttgccatagatggctatactatgcctatactcatacattagcttattttggtatattgaaacaaattttcattctttatttacataatagtcttttcgtataggctatactatcatatatgctaataaatctattagtttattttggcatattaaaataaacatgtgatatttaagtgtagtgtataaaaccgaaaaacaaaacataacatatggtatttaatgccgcaaatatcccccttataatgataagaaaccaattagttacttttttatataataaaaatattatttttatgttatataatttaaaatacattttcgttacctccaaaacttatttgtgtaacactttaataatcaattaattattttttaggttatattaataggtttgagtaccatcaagtttattttcaaaactaattagttgtaatgtagtataacatgctattattttagtaagggataagttgaaaatacct

SEQ ID NO: 140141 - DNA, 1023 bp, Cannabis sativa
  modified_base (738)..(748): a, c, t, g, unknown or other
atgcttggacccgacccgtagttggtgtctagatcttgcaatcgtaccaagacccgaacttggaacaatttttagaccaggacccaaacccaaactcagagcctgagactcgaaataggaacaagaaccagaataagaaccctggaataggaattggacctcgatcgaaaatcggatcaagacaagtaaccgaacacagactcggacccagactggaatgaataccaagacccaagcccgaacgcggacccagactttcgcgatgacgttggacctaggacccatgacctgagacctggaccagaaccaattctcgtaccagagcccgaacatagacccagacccagatcaagacccggacacaaacacggactgaaaactgggcctagaccaaaacccagacctagacctggaaccagacccgaactcgtaccaaaactcagactcaaactcaggactcagacccgaacatagatcaggactcggacttagacctagactaggaccgagacctgaacttggactaggactagaactcagactgggaccggaaccgggactcgatactccaacgcaggacctcaaaaccgaaccgttaaataaaccaagaccaggccaagaaccgagacaaggaccaattctgaacatggaccgggacctgcactcggactaggaccctaacccagatcgggacctaggaccctgacctgaattggggacccagacccatgactcagnnnnnnnnnnnaaacctagacccaaacttggacataagacccaaaccaggacccaagacaagagctagaacttgaccaggatctggatttatacccaggactggacccaagacccgaggtttggacccgacccatattcaatgtccaaatctggaaattagaccaaggctcggaccacgacccagaccagaactcgaacccgtaccaaaactcgaaactagacttgacatgtggtttgtgtttggatttgggactaagactaagacctgaaccaaaacacagacct

SEQ ID NO: 140142 - DNA, 951 bp, Cannabis sativa
  modified_base (881)..(915): a, c, t, g, unknown or other
agagagagtgtgtgtgtgtgtgtaacgccctaatactaaggcatgttacagtaatttttcgaagtgttatctttgctaatcaaagaattttcttgaaaattgtgacaaattaaaacttttagaattaactatgaaactttataaactttatacgaatatttacaagtgtcgggatcccattgttaaactttttacaaaatattccaattacaaaagtcaggtcgcacagcgaatacaaaataaaaaccccagatgttctgagaccgaacactccaggtcgcgccgccatgacatgtacaacatcaccctagctcgaggctcactcgtgttcagcctttgcctttcctttacctacacatgaaattagaactgtgagtcgacagactcagtaagaaaaacatataacatatcacataatattaacttgtatctaggcgcccatacacctatttacaaggcttaacatatcactcagaatttacttttttttagtattacggcagaaaaggattctcttccttaccatttgcccgagcccaaacaactcgccaatgaggcaattcaattgcccttactgtataatttgtcacacatttaatccacatcttctaaacgcttaaaactcagatagatatcaatatcaatatgcgtataccatacacatattcttattataaataatcagtatgctacttcttcccatcatacgctataattatctaagcaggtaaggcaatagaaaatagcataaacacttactatattatgagtcgacctgtcttcatagcaaatgtacatattcaaccagtcttcaagacttttaaaaccatggctgctataataccaagttgttgttgtaattattttaccaggatctagannnnnnnnnnnnnnnnnnnnnnnnnnnnnnnnnnntgaatttctaaaataatgtaaataaacacatataaa

SEQ ID NO: 140143 - DNA, 925 bp, Cannabis sativa
cagtggccattttcgttgcaatagaagcactttcctttttcctttgattttgtattagcagccttcttattcttattagccgtgtcaacatctttaagaggtttctttctattcttccatttcctcttctttccaggttttgaagtagagacaatgtttgcctcaggcttagccgtaccattagcagcaatactagaaatagaagctttgtttcctcctttatgcagtcctccaatcaaattctttgaaaaattgagtttttgcaaatgcatataattaatacagagatatactctatataaaatcgtatacgtctgcagtagcagaaagtaattctaatactgcaaaaaccaattttgcagagacaaaatagaactgtcagaatataaaaataattgcagaaaattaaatcacttgacacaagagatttgtacgtggtatcagtgttctttcaaacactactaatccacggggccacacccagagaatgaaatcaattagtaaagtatcaaagactacaaaaataattgacttaaacaaatttagactccctctagtgatttgccgcaaccctttgcaatccaccttgctaatctgatctctgaaacacaccaagtagtgaactcccttcaactattgatgtgtgcttacttcctcccgaagtaaagctaaaacaaatcttctcccaaagatatatgctcacttcctcccgaaatgagacttggaaaagtcttctcctgaagacccactcttgttcaaagcttctctccaacctattctaagaatagtatcagatcataatacaaaaaccaaatcctagttgaacaatctaggtttttacaaatgaaacactcttctcacaaagaaagatatgaaaatatgagactagaagagataaaattgtttggttgctctctaggtccta

SEQ ID NO: 140144 - DNA, 625 bp, Cannabis sativa
  modified_base (26)..(29): a, c, t, g, unknown or other
ataaaatgatttctgatctttattannnngtaaatctgattatattgaaatgtcttttatttagggcacaaaacccaacaggtgtttctaactttgttttaaattcatgtattttagagaactattatccttttgggttattaattctagatctactaaccatgtttattttcttcttacttcaactccagctacttaagcttgaatttctatcctagcgagttgagttagatgattggactgaaaggtgaagattgtccaagttaaagatgaagctcgttatcttcaaattaattattttaattactgaaaaatttagttttaattattagtataaaaattttatttcctattttatattatggcagataatttattatgacatttttgagtgtattaataaaatttctctttaaaaggttttcattatgaattacttttatgaaattgagcttcacattttctttaacttgtaagccaataccgtattatatcgttcgattttgtgccctaaataaaacttatttcaatataataaaatttataatttaataaaagatcagaattcacttttatgttgcatggttcacatgatttatttgatgattatgtttaatgtataaat

SEQ ID NO: 140145 - DNA, 719 bp, Cannabis sativa
aagactcaattaattatttttaatcaatcactaataattctaaaattagactatgtcttacttatgaattttcacgtagtaatgacttaattgtgaagaaaagagattttatggtttatttgacaattaagagactttgtggagttttgttgacctcgcttttggccaacgacaatgagtaatgatataatataattgtaataataagtaaagacacagagtttttaaagaggttcagccccaagcagttcagaaatagcctactccccttgatttgtattgacttaagaacaaagaatgcagtgattcttctcttagagcttttacaatgatatctctgagtagatctcttagataagttttttgaccctttgctcagtgagaataaatcactatttatagggctataagctttgagggaaaagtttcccttctgtttacaatggctataattggcaagactacacattaaatatagaatacactgattaagggatctagacagcttgccatatctctgtgatgtgatcctagaattagagggattacctctgtgattcacgatgcaagtgttgagattgttaagtgttggcacgttgttcgaactgtccactgcctagttaagaaggcttcgtccgtgcagatatgtgtggtgttctgtttggcatatctctttcgagcaaatatgtgaagtcgattccacgtatcaccattgtgtg

SEQ ID NO: 140146 - DNA, 2860 bp, Cannabis sativa
  modified_base (2806)..(2817): a, c, t, g, unknown or other
ggataggcaacccgaagcggcctcgctaaccaatctaaagcagcagcctgaagaaacacttaaggcatacttaagtcattttaacacggctgccactagggttagatactttgatgataacacgcaacttacagcccttcaggcggggatctccattttccattaactgccgggggcaggcagtgggatgatctacaaggacgtccggtaagaaacatcacagagttcaacgagaaagctcaggtgtttgtccgaaaggaagaagcccgaaaggaaatgaacttgttgagaacaggctcgagaggtaaacccaacaatgtttaaacagggactacttccacgagaattgataactcaggggtttctggtccgaaaagaaatgacggagttagggaatcgtcgaaggatagaaagaaacaaaagaagcatgacaaatatgtgccagtgtatactatttatactgagcttaatgaaactcagaaaaatatttacctcacacatgagcagaaggtagcctttggtaaacccaagcctatgaggaattcgaggagcaaaagagatcctaacaaatattgtaaatttcataatgatatcaggcatacgactgacgaatgtcaccaattgaaatataagatagagagtcttatcgctcaagtccattttgagcagtatgtgagatgacagggccagggatacaaccagcctcgtcagcctgataacccaaataaccaggggttacaacctcttcttgtggaaggagaggacatcctggtcattttgagagggtcgcatattgtagggaaaatcaacaacgctcagaagagatatgtgaaggaaataaagaacgagcagtcggtctttgccccatagccttccaaaaaggtgaaaatcgagggaccccccattacattcacagaggaagatgagaagaacgtgaaataccctcacgttaatccgctggtcataaccattcaactcgccaataagaggatcaagagagtgttaatagataatggaagctcagtaaatatcatttataaggagactctgaagaaaatggggctcgaaaaggccaagttaaggccttgtatggtgaatctttgcggatttaccggagatagcatcgccggccttgacataattgaactcgcattaaccgtaggtgaggcacctttaactactactatcatgcaagacttcttggttgtcgacctgccctcagcttacaacatattgttgggtcatctagcactgctcgaactaggggcagtcagctcaatcaagcacctatctttaaagttccaaaccccagatggcgtgggtgtggtgcgtggcgactagatgctggctcgggattgttatcgcataaagctgcagcataaaaaggccgatcatcagctgatgacgatcttggcaggagaaaacgagaagaaagatgaagatcttgatcctcgagttcaagatgaaagaaacatgctaaaaccaattgaagaattggaggaggttattctcgacccaagcaatctcaccaaatgtgtgtacattgggaagaacctggacgagcagctcaaatagcaattaataagatttttgaaggcgaaccaggatcaattcgcctggagtcatggggatatgatagggatcgatcctaagattatctgccatcacttaaatgttgatccaaactacccagcgaagagacaaaaaaggaggcccttggattccgagagggaaagggtactaaaacaggaagttgacaagttgttagtcaacgatcttatacgcttggtattttatccctcgtggatagccaatcccgttcttgtcttgaaacctaatggaacttggagaacttgtattgatttctccgatctgaataaggcgtgcccaaaagactgtttttcacttcccaggaccagttagtggatgcaactgctgggcacaagcttatgtcttttatggaagcatattctggatataaccagataaaaatatgtgtcccagattaagaacatacaagattcgtagccaacatgggactctattattataaagtcatgccgttcggactgaagaacgctggggcaacatatcagccactattaaatgaaatgttcgcaagtcaaatagggtgaaacatggaagtttatgtcgatgatatgttggtgaaatcgataaagagtaaggaacatacctcagacctcgcggaatgctttaaaatattaaaaaagtataacatgaagctaaacctgaaaaatgttcctttggagtctcctcgggaaattttttgggattcataggtaaggcgaggggcattgaggcaaatcctgaaaagatcaaggcattaatagacatgccatccccgacaaagcccaaggaagtacaagccatcacaggaagaatgacgacacttaacagattcatttcgatgtcaacttataagtgtgtaccgttctttaacatattgcgaggaaacaaaaagttctagtgcacaaaagaatgcaaagaggcctttaagagcataaagaggcatctcgcaacggccccagttttggcaaaactaataactagagagatgttatttctttatttagccatctcggacgatgcgattagtgtagctatagtgtgagaagagggtaagcactaacagcctatttactacgcaagtaaaaggtcataggggaagaatccaggtatccccctctagaaaaactcgtgttacgcctagtccatgcgtctcgcaaactacggccatacttccaggagcaccccacaaaattgttaatgttggaatttattttannnnnnnnnnnnatctactcacaagtaagttgtttaataccctaaatatgaactt

SEQ ID NO: 140147 - DNA, 649 bp, Cannabis sativa
tttccaagtccagttttccccccccaaacagtcccttttctacattattttataaaaattaaatgagtacaattacattttgatgcacaatgttagaaattattaattacataccacatcttcccttacgttactattccactccaaccacttcgatgtctggatttgattttgtttgaatgttccctttacaccttacttaattcctaaaatgccaaaaaatacattagctactagtacttgtatttagaattttatcttagtgcaaatataattagtacctgaaattcaggagttagtcgacttttaataaattttaaacaatcaataaggttaatttcaggatgctttctggggacgtacttgtaaattttaataaattgcatgatccttgctggaaagttaataaaagacttcaagaatagaatggcaaaagacatcattatgctcgcattagaagaaatgatttgtaacggttggcatccgtccctggaaagcatcctgaaatttactacagttgcatcatatttttagttcttcctaagctgcatcatatttttagttgtggatgacaacagtttctgataagaaaggaggccctaaggattctcaaagaaatcgtctacattttctactaacttcagcatat

SEQ ID NO: 140148 - DNA, 988 bp, Cannabis sativa
  modified_base (57)..(67): a, c, t, g, unknown or other
aagtggttatagaacgcatttttaattttcaaaaataaaatttttaaaaacaaaaannnnnnnnnnnttttgtgattaaaaaattagaaaagaaaagtgttaccgaacggtacctaaattagtaaatgtcctcttttaaaaaaattaagaaaatgaccaaatataataaattagctaataaaaattataaaaatacatttataacatatttattttttaaaaaaaatataataattaaacaaagatataatttatttggtattgcatactattatattgtaacaaaaacgaataaatatattagatcattaaatatatataacagtatttgatatgtcgtaactagggatcgatgcacatttttcccatggggatggggccctgcggggacccactcctaatgaggcggggatttcccgtctaaatgggaaacggggcggggatgtgaatcaaattttatccctgaatgttaaacggggcggggacggggatgacactccccacctcgaaggggacccgtttaatttattaattattttttattaatattttatattttatatatgtatttgtatttttttttagcatattgatattatttttacaatttttgaagttgtatttttgtataataattaatatattgaatagtaaataatatataaaattttattttttatgtaatttaagaattttatacatttaaatttttaaaataaactttatttttacaatagaggattccccgtcccatcctcgccccatttgggaattccctgtcccgtccccgatggggattaaaatccttaacggggatagagacgcggggagagcactcccgtccccgctaattccccgccccgtgtgcatccctagtcgtaacactgaaaattaatataccgtaggtttaaaattatataccaccaaaaaattataacaatactaaattaatactcaaaaaataaatatatcatgctaacaaaattat

SEQ ID NO: 140149 - DNA, 1117 bp, Cannabis sativa
ttaccccatattaaatgctcaaatcaactatgattttttatcaagcaagtaagaaattaaataccaaaacacactatgaaattagaaattagggtattaagtattcatataaatttatattttggaaactaattttatactttgtgtcatttttagattatattttttgcattgcatttttttttttttttcattatgttcttgacaaaactagttttaatttttgattttctttgttatctttaccctattttgtatgcttgaatcaactctggttttttaaaaagcaaataaaagattgaatgctaaaataaagaataaagttagaaatttagttattagatattcatatagaatttatacattcgaaattgatttttaaagtttgtattgtttttagattataatttttttcattgtattttttttttcattatgttgtcgatgaaactgatttttttttttttgctacttttgatgaaataattagttttttcaataataaaaaatacagggtaaaactattttctaataagcattttctgagctgaagcaataacatcattagatctagcacagaaaaaaaatatatagaatcttttgtttgtaatgaaaacataaaattatgagtctcgtacacttattcatttaattatttcacagggttcacaggttcaaaactagtattaaaaggttcatctattcacatgtttgaaactagtttcacatgtcttaaggattttgtaatgaggttgctctgttttatgatattattgtatatttcgattttaagtttctttttattattttattctaggttcgaaactagttttcacacttcaattttattgtatagaatattgttgtgcattgtatgatgttttaattatatttgtagaggttttttttttttgtattttattgtgtgtgtgtatgcgttttctatttagttaactgaagaaactagtttcaatgttttttatttatgttttattttcataatcttcattgttattgtgtgaagaaattgattttgtgtaaagaccgcatatgaataatactttgaattattaaataattagggtttatgtatgagattttattattattgataata

SEQ ID NO: 140150 - DNA, 520 bp, Cannabis sativa
tttatagtgttaattatagtatgctattacaaattatttttcaacaaaatatgtgttgtaatattttttaattattgttttataacagtgtgcgtcatagttacaacatattattcttatagaattttgtaaaatttagaatagtttactatgtcgaaaataagtttgaaattttttaaacatgcttaataaattagaatattaggaactatatttttgaaaacaaatttgaaattttttaagcatacttagtaaattatttagaatttttcaaaactaagtatatattacgaatattgtcatataatttttttttgaaaaaatatatatttcaatatattttttcaaacacaaaaattataaaagaggttataattaacactcctctttacttattaatttcaaaaatcagatttaatatttatagattttcgatatgatacactcttaaacattgttatttaacaattttttcttttcttattttttttacgaaaaaaaatcataatttcaatgacat

SEQ ID NO: 140151 - DNA, 768 bp, Cannabis sativa
gatggaattagtttttgattgtcacaattatgccaaaatgataaagataaaacttactggcattgaatttactaactatgctattgtttggtgggaataattattcatcaacatgaggcagaatggagaacgtgagattgacatttggaaggctatgaagagggtgatgaggcaacatattgtaccatctcactattattgagacttgtacctcgagtttcaaggtctttgtcaaggttacaagagtgttgatgtgtattataaggagatggagatggctatgattagagccaatgtggaagaggatcaagaggcaacaatggcaaggtttttaaatggattgatctaagagattgctaatacaattgaataacaccattacgtggaattggaagatttggtgcatatggcaatcaaaggtgaaaggcagctcaagaaaggtggttcaagctcaaagccaagaccgagtccacacaattcaaatacaacaccatggaggtcaaactttccaaagaaagaagactaacctagttcatcctatacacctaaaccggccaccacaactacaatccctcaaggaaaatagcccttacttaccctgttttagtgagataaagtgtttcaaatgtcaggggtgaggacacataactagccaacgtccaaataagagagttatggtgatttgagaaaatggcgaggtagatttggaagatgaagaagagtttgttgatatgccaccattagaagatgctgttgggttttgtgccc

SEQ ID NO: 140152 - DNA, 595 bp, Cannabis sativa
aatgaccaaccccgtggtgtcactgttgactgataataagttgaacggatctaactttcccaaatggaaagagaacattgacattgatctcattggtgaaaaatgccatgtttgtgttaactgaaccgtctcctgagcagtagggtgataatgcaaccaaagcagccgggtgataatgggatcaattcaatctcgctttgaagcgacaaggaatttcatcaatgcacggatgaaacctcatcaaaacgtgtgtgatcaccttctccaaatggcgagttacttccaggaagctcagaatcatggagctgttatggatcagacaactcaagtgagtctgatcttgaatagtctgactctcgcctttcttccttacacttcaaattatgtcatgaacaagaaggaacaagtctttcacgagttggtaaacgaccttcatacatttgaaaatttgataggagaaccagtgaaaggaggatctaaagctcataattctggtaatattaatggggtggctaaggctgaggcaaactttgcctctacttcaaaacccaagaacaagaagaagtggaataatagcaagaagcctgttcaagct

SEQ ID NO: 140153 - DNA, 516 bp, Cannabis sativa
tgatgacctcctctctctctctctatatatatatatatatgatctgtcttttaaaatctactcccacattaaaattggcaaaatataactcattataaaaaaaaaggttataaatcgtaatggtattgatataagaggaaaaaatgattcaaatgagttacaaaattataaaatttgttgaagatgatgtttcttagtgtataataagtacattttttttgagtgatagataattaatgcataaaattctcatataaataattcatactcatttgtgtatatcgtattagtatcaaaaataaaaataccaaaatttagtgaaatatttataaaaatatatatataatatgtttttttgaaatcttattccactttaaaattgaaaaaatattaattattatcttcatcacatcaactaaattcgttttttcatctatccaagaaaaattaaattataagtggctcaaaataataatttataataaacgtgtaacgttgtgacagtcagtagtcccg

SEQ ID NO: 140154 - DNA, 547 bp, Cannabis sativa
catcgctgtgagaacttcacacatggaggattttgtgaagcttactcaaggaaagatgtcagtggccgaatacaccttggagtttgatccgctgtctaagtttgttggtattctggtccccatagatttcactaggaaacaagagtatgtgagaggactaaatgccacaatcagtcgggacttgaggattaccacttcacatgacactttgtacaagaaaggggtagagctagccttgattgcttaggaggctgagcaacctgagcaacatgttgaacatgttgtgaaagagcagactgcaaaggatgccgtcacgacatggaaccctcctgctagtggtaatgttagtaaggggaccgacagtggcaaccctgatcacaaaaggaaggcgaaggcttccagagtatcaaggggcaatagaaagttttgaggaaacaaaggtggtcgtcagtgtcgcgggtcctaattctaatcacatcctgagtgtcctaaatgtaagaaacaccatccgggtgaatgtcgggccaaggcatgtttctaatgtggc

SEQ ID NO: 140155 - DNA, 2265 bp, Cannabis sativa
  modified_base (66)..(68): a, c, t, g, unknown or other
  modified_base (243)..(245): a, c, t, g, unknown or other
  modified_base (2190)..(2235): a, c, t, g, unknown or other
taaaagtaataaaataccttttaccacctctagttagaattccatttaattcacataaatcactannnattaaatctaacaattttgaatttctaacacttggaaaaagtttttttaatcatttttctttttacacaagtttcacatttaccataatttcttatatcacaatcaatcatacaatatttttttaactattttcatagtagaaaaaccaatatgagctaatctaagatgccacannnataaagaatcatgctcaatcatataagtggaaatagatgctttatcattgctaacattgaaagttacattattggtgcataattccaacttggaatgcctcgggaagtttaattttgatcactttcaatttgttaacaattacttgcaactcatgaagttgaggtaaaagaggttcatcataagaaattttaaaaaaaaatattgggaaataaaaaatttcttggtaccttcctcctcggccttgaatttattttcaaggtgatctcgaattttttaggcgtctttagtgtcggtgtataggtcataaagcctatccaaaagtgagttgaggatgtgccctttacatagaagtttgtcatcttctctcttcttcctttgtgccttgacctcataagtatccttgtctgtaggcacgggtaactgctccaaggtggacttaagagtataagcaatcttaagggtggttaggaggaacctcaccctgcaagaattttcattccccattagtaaagtaccaacattcactttcctataatcaataaattttcaagagtaggacacatatggtatatgcatccagaatcaagaatccattcattagtgattctttgatttgaaatatgtacaagtcaccatcagaggaataatctgagtcttctacatttgaagtagaatcatgcttcttttctctgtcttctttgagtttattcttaaacttaatgcaaaacctcttgatgtgacctactttcccacagaaataacatttctgtccttgtgatattttcccctggactttgatcttcactgagatttgtgttggcctttgaaatgatctttcttgtggtgatctctaccattgtggttgtctcttcctctggccaggtatgcttcatccttgtcattgtctttttctttggaaatttcttgttctttggatttcaaggctctaagaacatcatcaagggtgtgagtatctcttccatatttgatcacaaccttcaattcctggtatgcagctgacaatgatttgagaagaatgatagcttggctttcttcatcaacattgtacttcaagttagctaatcctataatgatttgattaaaagcatcaagattaccatctagagacaaataagaagacatttaaaaccatataaagactctaacagattgatcttattagttagagagggtttcatgtagatttcttcaagtttgctccacaattctcgagctatcttcatgttctgaaccttccttcttacagtgtgacaagtacattatgatagtgtagtatgccaattcttccatgtcttcaagctcttccttcttcaacttgccagtcagttcttccttgggtttcaaagatttggcaaccttttgatgaaaaagtattccctttaagctttctctccataggccaaaatctcctgtcccattgaacttctcaagttcaaatcttgctgctcccgtcatgattggttgtagatgagtcttgattgaatattgattccttacttccctttattggatcttgaacccgaagctctaattttgttgtaaattaagcaacaataacactaagaattcattctaaaactcgcattaattaatcaacaacttgaacagaaataacacacacaaataaaccagttaacaacacaaagtaacaaaacagaattgaactagaaggagacagcaatatttatcctggttccggtcctagagatcaattcgatccctggccatactccagctgagaagacatcatcaattctatcattaatatgaagaacaagagagtagaaatacaagcaccaatccaagagcaatacagctctgcaacactcgaaaaacataccaaagaaacagtctcagtttctcaactcctacccgagtacttcctctgttcttgaccccttcaagtgttggaaattattttannnnnnnnnnnnnnnnnnnnnnnnnnnnnnnnnnnnnnnnnnnnnntatgaactttctaaaacaataaaataaaca

SEQ ID NO: 140156 - DNA, 1036 bp, Cannabis sativa
tagggcacaaaacccaacagtcagttcgatcaagcacctgtctttaaaattgtaaacaccagatgacgtgggagtggtgcgtggcgaccaaatgctggctcgcaattgctatcgcatagagttgccacatagaaaggccgatcatcaactgatgacgatcttggcaagagaaaatgagaagaaagataaagatcttgatccccgagttcaagatgaaagaaacttgttaaaaccaattgaagaatcggaggaggttattctcgactcaggaaatcccaccaaatgtgtatacattaggaagaaccttgacgagcaactcaaatagcaattagtgagcttcttgaaggcaaacaaagatcgattcgcctggagtcatggggatatgatagggatcgaccctgagattatctgccatcacttaaatgttgatccaaactacctggcgaagagacaagaaatgaggcccttggattccgagaggcaaggggcactcaaataggacgttgacaagttgttagtcaacgatttgatccgcgagttattttatcttttgtgggtagccaatcctgttctcgtccagaaacctaatagaacttggataacttgtattgatttctacgatctgaataaggcatgcccaacggactgttttccacttcccaagatcgacacatattcttttatgtcttttatggacgcatattcgatataaaactagatgataaaaatacatgtcccaaatcaagaacatacaagcttcataaccaacatgggaatctattgttataaagtcatgtcgctcagattgaagaactctggggcaacgtatcaccaactattaaatgaaatgtttgcaaatcaaatagggcgaaacatgaaggtttacgtcgacgatatgttggtgatatcgataaagagtagggatcataccagagaccttgcggaatgctttaaatattaaaaaagtataacatgaagctaaacccaagaaaatgttcctttggagtctccttgggaaagtttttgggattcatag

SEQ ID NO: 140157 - DNA, 694 bp, Cannabis sativa
  modified_base (403)..(404): a, c, t, g, unknown or other
aataagaaaagttaaataaaaaaataaaagacatttgttgatattacaaatatctaatatacgatgatccaaattttatagcattacaaattttattttattcctctcttttgtactattttttatatataaattctcttttttatagtttacctaatgcaataattaatatagattaacaaataatgatgtaagactaaccactacaaaaattacaaactcttaaaatttttatttaatacaagaattactaaattataaaaataagaataagaaaaaaaattcttttcgtgtcttataaaataaaattaattataatattattgcaaaaactcaaatttctaaattttaaactaaaaaattataagaaaaatatgttattacaatataggctaaataattnnttataattaatatttttttatatagataaattattatgtattttataatatatgttatgccttgtcaaaaaaaatatatgtgttatcccaattttcgcactctcacgtggtatcgcacaatggtgacacgtggaatccacttggagtatctgctcggtgggaacagtccgagcaggttgccttgctggcatgcccagagcaaagcaatcaactatctgcgcagggcaaccaacacttagcgaattcagctttcgcattatgagtcgtcaacaaaatccctataacttggg

SEQ ID NO: 140158 - DNA, 877 bp, Cannabis sativa
acaattaaagatataattttttttctcaaaaaggaaaagatatattttttatatataataaaaattattaaaatagggtgtatttataaatttttaagtgtaaataaaatttatctttaatcatttttattttatatcttttaatattttctattttttcttccatacgtacaaaataaaaaaaaaattgtatgtatatactaaaataataaaaatattacacaaatatattaagtcctataaatatttatacagcaacaaaaatttataaaaatacatcttattctatccattcaccctcactaactattagaggtgtatatcgatcggtttggtcggtttatggtacattttattcaacccaatataaatatcgggttacaaaaatctaagtgccacccgcctaattaagaaaaaaaaatagtaacccgcccaataaaattaatcggtttggtcgggttaacccatccaaactgacaactaatattttttttttattatttttacattcaattgctatattttaattaattataaaaatgagacaaatatatatatagattgaatttaaagttcaaatcaaccacaataataaaaaaacatattagtttcaactttatatttttgaaatagtcatgtaaattatatgatatataaatatatatataataaaaaaatttaaatatataaaaaaacctctcttatttaggttaattagattagttcggtttgattgggcgaattgatattatttacaaccccccaatataaagatggggcgggttatatttttgttgagtttttaagtttgtatttctcgtcgagttatctctgtttgatttgggtgagttattgtaacgtcctaatctatagagac

SEQ ID NO: 140159 - DNA, 871 bp, Cannabis sativa
accaaatgctttgtacaggtataggggccccccgagtgaccgagcaaacttatgactcttggtcacttgttttttacaagtatacttctttatttgttcagggttttgggtttgaccaaaccttttgtacgcattggatggtaaattagcatcatgttaggaattttgactcaattttaattttgaaataaacatctttattaatttattgatcgaaagtgtttatgttaccgtagtaacttacattagagctatttgatctattctaatcttttagcttaacatgaaataaaacaaatttcagaaattagaaattgtactttaaatggtggtcatccgacctgagtactctttcattttatctgaaccattgggcgttgtctgcctagcaggccattcacttaaaagtaaatgttctttcagtacttatatggtcgttcgacctggtactttattgttagtattttcttaaatgtgccccattccaataccgtactactagaacaagttacattttttcatcatacttacccaatttctatgctcctaatttgagacttttgagtacctgatatggtccttccaagtgaggtccgggtacacctgtcgtactgtctttggtgtttaaaaatactcttcttaggaccatatgtcccacaaagaatttccgagccttcacttgtttgttgaaataacgagctactttttgttgatgggtgaccaactttaaatttgtcatggttcgcttctcttcgatttcatcaagtcattcagccaacagtatgtgattggtatcttggttgtatgccaatcttctgtgggatggtggctcgagttctatgggtaacatagcttcatatccatatgccat

SEQ ID NO: 140160 - DNA, 690 bp, Cannabis sativa
ggttaacccccccaaaccgaattaagattttttttttttttttttagattcaactaaaataaaaattaataacatataatatgtatacataaataatgtggcaattcaatcaacctcaccactcaaagatttatccacaaattataaaaaaaaaattcattgtgccgaactagcttatatatctcataaacaaaatgaatgaaaagggtttaacctttggaaagagatctctgtcttaatcatttacatctttattggcaatcacactatactttcagcaactccttctctttattggcatttacatatttatctacaaattataaacagaggcatagcattaaacattaaacttaaggaatacttaactacagagctgctacagagcttcctcctttcctgccgcttgctgttacgccagaggtgatgacagtgatggccgcctcacgcaaggatgaagatgactgctgcccgcgaggaatgaggatgatagttggatagagagagaggcggactgagagtagaggttgagaagatgaaggtcacgacgagagagaggcgggctgagatgagatcaggctgagatgacactaacgaagatgaagcccctgaacgcctgaagtgaactaacgagtgagagagagagagaggcgggctgagagactaaaatttagggtttgagattttttt

SEQ ID NO: 140161 - DNA, 780 bp, Cannabis sativa
caagtgggtcagcccagtacaagtcgtacccaagaaaggagggatatgactgtgataaagaatgagaagaatgaattaatccctactagaacagttattggttggaggatctgcattgactacagaaagctcaacatggcaacccggaaagaccattttcccttgcccttcattgatcagatgttagaccgattggcggggcaagaatattactgcttcttagatggctactctgggtatcatcaaatagccatagcacatgaggatcaagagaagactacttttacatgtccttatggcacttttgcttttagaagaatgccctttggactatgtaatgcaccttcaacatttcaaaggtgtatgatggctatcttttcggacttaatagaatcatgcatagagatctttatggatgatttctcagtctttggttcttcattcgatcattgcctagagaatctggagaaggtgttaatcagatgtgaaaagtcaaacttggtcctaaactgggagaagtgtcacttcatggtaacagaagggatagttttgggacacaagatctcaaaggcaggtattgaggtggataaagcaaaggtgtaaataatagagaatttaccccctccagtttctgtgaaaggagtaaggagtttcataggtcatgctggtttctaccgaagatttattaaggacttctcaaagatatcaaaaccgttgtccaatctacttgttaatggggttccttttgagtttggggaagaatgtttgaaggcattccaa

SEQ ID NO: 140162 - DNA, 978 bp, Cannabis sativa
attccacactaacaacccagcacatgcacggggggagagagagagaaagaaatgcaaactccattcaacacaaaactagagagagagagagatagagagagagaaatggaatttcttttcttttttatttttcctattttctttatttcacaaaatgaataattcatttggctgaaaaacaactaagtggccagctgccacttcctaaaacaaccacctaagcccccattgacaaaatgactaaaatacccttggtgccttaaataaagccaattcaagcctaggggtaaaatgttaaaaaaccctaacttcgctcaaactcggtattctatttttctccaacatatatcccactaagaaaaaggttctagacttacccatgtgattaaaatagacatccattgcattttttgttatcgccgaacaaaaattataaaaacagcatatttcacatataattcaattaatactcctagagtttaataaaatctctgaaattaaaaaattataagtctaatgcccacttttgataatgggacccacaattaattataaaaataccaataattagtgctaattccctttactaatccatattataaatgtggtcattacaattattctcccgttaaaagaatttcgtcctcaaaatctaacctgaacaactcttgatagtgagtcctcatgtcagactctaactcccaggtggcttcctccaccttgctgttcctccagagcactttgaccaaggctatggtcttgtttcgaagaactttttccttttttatcaaggatctgaactgactatagttcaagggcttcgtaactcaagagatgagtcgggtctgaaacatattttctcaacattgaaatataaaatacattatgaacaaccaataatgcttgggataaggctagtcgatacgctaccttcctgattttctcgagtatctgaaatggcccaatgaacctagggct

SEQ ID NO: 140163 - DNA, 620 bp, Cannabis sativa
  modified_base (444)..(447): a, c, t, g, unknown or other
attcatttatcagaaaatcaattatttatttatttccttaaatagaaatttatttctttaaatagaaatatatttccttaaataaaaaatattctaagacatgatagaaaaacataatttttaatctttataatccaaaggaaatcacagatgttataattgttatatatattttaaaaggatgtaacaatataagtggaaaatttaaattggaatcgaaggtactattcccttcgattagaataacatcattatatattaaacactacttctccttctgaggacaatcgaactcgctgcatcacctctcaacaaatctttctaaaatcctaaaagaaagtgttcttaacattatgttaccaatggttttattaagagaaagtccccaaaaagtttacggtgatgcagattagtccccaagctccaaaaatagcggcaatagtnnnnaaggtcacactttttatttgtctggttgtctccaagttaacagattcgttaaatccaattcaaatgtcacgtgtcaaaatatcattggcgggtgttattattgtaatttaaaaaaataataaaaataaataaataaataatttaaaaataatttctttttttctttttttttt

SEQ ID NO: 140164 - DNA, 537 bp, Cannabis sativa
aaagccaggcccgatatacagtgcgaaaaccaaccttatcgcaccgttctacggtctcaacttctttctcggcaagtttttcaacaagcttattctcaaacacatcagcttggctttgatgatcttcagcttcttctttggccttcttggcctcttccttcgccttctcggcttccttttttgccttctcggcttccttctttgccttctcggtttccaccttcgctttctcagcttcttactggaggcaggtattcttctgttgggagtcgtctcggtgcttactcacgaccttgcattgtgatagtagcttgtggacctcaccctccaagtactaaagccgctcagagagtaatcggttggaagcaaaagaagcgaaagaagcctggagaattgcaaatagatggatctgaaagaggtgtaaaaaaaggagagagaataatataattataataacaaagccaacgtaccatgaagtgacagtccaagctccttgaaagcatctctttccgactcctaagattgagaaaatcccaa

SEQ ID NO: 140165 - DNA, 576 bp, Cannabis sativa
  modified_base (161)..(164): a, c, t, g, unknown or other
gtgagcgtcggtgttgggatttgtcttatcttagtgagaacctatggatagtgcaagtatcttggctagagagcctcgatgcatggatgcactcatggatgcttacgagcatgactcggtgggagttgttcgagagacggaagtgtgcacgaggaacacgnnnncgcgaaaaatgagctcattgttactcggatggttggaaggctgaccttggcttagagaagccaaggtgccgcacgtgtattctgctgcctgaaaaaggtgagcccatgacaccggggattgatttagtgaaattttgtttatggaacttatttactatcaaattggttttttgtttttattttttttagttttatttctttgttctattttacgttttgtttgtcttttggtttcttttgcaaggtacttaagatgtctcatcgacaagtccttatgaattttgttcaatatgactttgagcccttttatgaagcatagatacaagacatttctaatgagatttccatatcatggattgttcaaatagtgtcaattagaggtcttcctcaatgggttgaattctacaacaag

SEQ ID NO: 140166 - DNA, 578 bp, Cannabis sativa
aactgcacccctgcttttccctttcggagtagatcaataaggtctatcccccatactatgaagggtaaggagactgcatcattgtgagctcattgggtggagctctagggattttcgagaatcttttgcacttgtcaaattttttgacgtagtccatcaaatccttgatcattgttggctaaaagtaccccaccgaagtatcttttggataggatttgccacccggcatgattgtcatagaagtcttcatgcacttctatcatcagccgctcaacctcagccttggtgacacaccttcagagcgacattgagaatctctatctatacattactccgtgtaggattaaatacctagcaacctttcttctcatatttttgcctcattcttgctttcaagcaaggctccagtttgaaggtaagctgcaataggtgtcatccatgctggactgtcatccagcatgttgacttcttcaaagatagtaatgcttgattcctttaggaactgtactggcaccaggtttgccttgtcggcaatggtgcaacttattaattcctccttgcacccctatagatttgga

SEQ ID NO: 140167 - DNA, 972 bp, Cannabis sativa
atttgatgcaactctgaatcaaagtgcgcaactaaattcataataattctgaatgaatctttagtgaaaacaagtgagaaagtttctgtgtaatcaatactatttgagtaaagccttttgtcactaaacgtgattgatacctttcaatctgtcccattttatccttttagttcttaaaaatccatttacaacctattagtttgaaaccataggtaatagagctaacttccatgaatacattattttttgtccatgaacttaatctcatcatccatggcttctatccattttgaagaatgtggacaattaggtgcttcactataagtgacatgatccacaaaatgatcaatatcatattctccttctccaacataaacaaaattatcatgacactttgttgacttcttttgtctttgagatcttcttcgaggaggtacttctggaataatctctatttgttgatcatcattttgaatgaaatattccacaattggatttctccaataacagaaccctcatcaacaacaaaaccttccttaataatagggttttcatcaataataggaccctcatcatcttagatattaggagcaatatattcatcagcaatgagagcgttagcaactagagtaagaataagactgctattattatcatctcttgaaaaagatataggaataaaattcctttagatgactcccccgtttcaagagatgttgaaagaatatttgcagcaacatcaaattctagaaatttagcaatctgagatccaataatttgcgtaccatgagtaggacagtaaaagcgatagccttttgagtgcattgaataaccaatgaaataacgacgatttgttctcggatctaattatttcaaattaggatcataaatccgtacttaagttggacgaccccatacacaaagatgattcagactaggctttctcttagtccacaactcaaaaggattttg

SEQ ID NO: 140168 - DNA, 629 bp, Cannabis sativa
ctcatctaaaatggacaccattgtagcatccttttattcgatcaaaataagaatccaacgttgtcccagtaggcgagagtctaagttattctttttttatgagtttctactattatttcatactttgtaaatttatttgtaagtagtcaccgtaagggagagtgtaatagaaacaaatacttacaaaatacttatcatacgagatcttacggtgttaatgcttcaatggataatcatccacaagggcgacgaagtctagcgtctcgaggttacattaaaacaattaaccatgtaagactaacaatggagatcaaatgtccttttgattaaagctcattattaaaaataatgtatttttgattaatcatttattttaatctttatattttaatatttaaaattacttaatttaagttagtctaaaattaattaaaaaaactaattttcaacttaaatttatttttcaatttaatgtcgaaaatctatttatataaaataacattttaaaattatttaaaaaatgataaaacaaatacctgaaaaatatctaatttaagttattctaaaataactaaattttcaacttaaataatttttaaaatttaattaaataataaattatgtatctt

SEQ ID NO: 140169 - DNA, 567 bp, Cannabis sativa
ataattaataatatttataacaaacttctttttttttagaattaattaattataattaattgaatatttaacaagatctcttataacaattaataattagaaataatgtttcataaaaattcctactataattattttaaagccatttaattataatatttattatgaaactttattttttcttacaaaaattagaattttcttctcgtataatgaatttttgaataattaattatttttaaatgatgttaagttatttttttataattagaagaactaagtatgagttttttttattgtttcgttttttgggggagcttaattttattttttaaattggtttagttttttttttttgagtaaatgactctttatccaaaaaaaaaaatggaggagtttagcaattttttttttgaaaaatacattcaacctatatatttcactttttattttttaaatatttaaataaaaaaactaaataattaagtgtaataattttaaattaagtcataagtataataaaatattaattatgaaattgtatgtgtataattttaaattataaaa

SEQ ID NO: 140170 - DNA, 1469 bp, Cannabis sativa
aatgttccatcatcttctactgaaatagaggataatcccactccctcagttgaaccaatgcaagttgatacaactgagaaatctaccactgatattcctatgtagaaggtcacgactcgtcgtcgtagtgggagggtttccacaaaacctgctcgttatggcttagatggtgaaatcaatatggtcattggtgacgatattaatggcaatccattaatctataaacaggaaatggcgagtccatagtagaaacaatggtcagctggcatggattcaaaaatggattccatgaaaagaaataaagtctgggaatatgtatatgcacctgatgattatcatccaatcggatgtaaatgggtcacaagaagaaaagaggtgctggtggagaagtcaaaactgttaaatctagaattatcgcaaagagttatacccaaagagaaggtgtggactatgaggatacttttagtctgatcaccatgatgaaatccatcagaatacttctgtccatagctttcgctttcgattatgaaatttggcaaatggatgtgaagacaactttccttaacgaaattcttgacgagaccatctatatggagcaaccaaaaggttataagcttctaggacaggaagagagagtttgcaaactaaataggtcaatttatggacttaagaaggcttctcgctcttggaacaaattttttgatgaaataatcaaaccctacgactttcaccaaactgaaaatgaaccttgtgtttactaactcaaggataatggtagtattctttgtcctttatgttgatgacattttgattattgataacaatatcaagaaaatgacttgacattaaagaatggcttaacactcgattcaaaatgaaagatttgggtgaagctggttatgttctttgtattcaaatcattagaaaccagaagaatagatcacttgctctctcgcaagcaacttacattgataaggtgctagagcaatgtttcatcagtggcaccagaggggcagttatgccttctagactcggtatccgtctatctaaggaatagtgttccactaatttgcaagagatagaagacatgagaaaggttccttatgcttcagcagttggatgtctaatgtatgctatataatccactaaaccagacatttactatgcagtaggaattgtgagcaggtatcagacgatctagaagaggaacattggacaacaggtaagcatattcagaaatatttgaaaagtacaaggcattatgtgttagtctacaatggtgttgctttaagtcccgtaggctctatcgactcaaatttttaggcttgtattgataacaggaagtctacatcttagatggtctttactcttgggggtgtagcagttgtttggggaagtgtcaagcaatctgcaatttcagactctaccatggaggccgaatacatagctaccgctgaggctactaagga

SEQ ID NO: 140171 - DNA, 547 bp, Cannabis sativa
aaatatttaatagcactatattttctcttaaaatgtcaatattgttcttaatgcatcatgattaaaggaactttgtagatttaaagtggaaatatttcagacgattctttcttaatttgatcaatttttgaatgatgaataagttaattatgagttttttgttaggggtttgttagtactgctgattagctgggcaggtcatttgaaaacttgttgctgtgaactattaattttttacatattgtctaatgttgaaggcattgattctgttcaggaacaagattcacggaatagccggatactattttcaagtcacttctcaatatgttgtttttaaaattggaaagtagatcacttggacaggcaaggtgatacaggtgtgtgtgcgctttactacatattatgtattgcaatggaagaatgaaattaacgtaatttatgatttatgttaatgagttaaaagtgtatttggtctcatttgtggtttattctgttaacgcagattttcgttaaccaaatttgagcctcacgataataattcaacaca

SEQ ID NO: 140172 - DNA, 1163 bp, Cannabis sativa
  modified_base (896)..(897): a, c, t, g, unknown or other
aaaccctaactgaattctatgaaaggctatctaatatagctaatgaatattttgctcttggtgaaaagcttgatgattttgttcttgtgagaaaaattgttagagttcttccagagaggtttaatactaaacttttgacaatagaggaagctaaagactttagcacaatgaaggtggaagaattaatgggttccttgcgtacttttgaattgaatcaacaaatcaaacaataggacaaacccaaattcattgctgataaaggtaaaagtatcgctttaaaaattgttgacaatgaaaattctgatagtgaatgtgatgatgaaatttctttattaaccaagaattttcaaaaatatatgaaaaaaatgggtaataaaaagaattactcgaaattttcaaaagaaaatgcttcttttaaaccttctgtgtctaacaaaaagggaattcaatgcagggaatgtgaaggatttgggcatattcaatccaagtgtgcaaacactttgaaaaggaataagaaaagtttcaatgtcacgtgaagtgatgatgaaaccgagagtgatgaagaaaattttgagaatgttgccctaacttctgttttaactaatgtgttttgtgattcacaggttaatgctagaatggtatgtttgaataatacccatgaacaagaagaatctgattctgatgattctgaaatctgtgaagagtctcttgctgaatcatacaaagtcatgtatgaaaattagattcaggttacttctgaaaatagagtgttgattaaaatgaacaaaaaactgtctcatcaaattgaaatttttgagttaaaaataaaagaatatgagacgaatttttgtgttaaagatgaaaaaatcactcttttaaagaaggaacttgaaaannttaagaaaaatgttcaaatgcttaatctcggatcttttatttttgaaaaagttcagaatgcaggtcaaagaggtttagctggcatcggatcaaatggtatgaaaagttctggaatcacaaaatttgtaaaatctagtgttccaacgaatcttcctgattctgcaaatttgaagtctcctgcgatagattcaaaacctgtcgttgcagaagttgtttctgctgacgcaaaatctctaggatttgcaaaaagagtaagatctgaggta

SEQ ID NO: 140173 - DNA, 550 bp, Cannabis sativa
tacattaatggtaataaataaaagatttggacatccacataattaatactatttataacacatttcaaattttatgtactaattttttttttatgaaatatcaacttcattaaattaacattctgagtataaaatatagcaactggagcattagacacagaaatactacgaccagataaggaccgtgacatcttaacaacaacatgtgctagacggtttgctgatcgtttcacaaaacgaatttttattaaaggcatagaaagcaaaaaagaaggacagtcttgagccggattctcaaagatggagcaaagggatgagtgattgagaatttgcttggatggagactaagctgtcagattcgagttcaacatattgccaaccttgtcgtttaatccagcttaaggcctctttgatatcaataatctcaacaacctctggtccaaaagcaccgtgaaagcagtgagctttagcttcaatgagagaacctgagtcgtttctagcaaccatcccatagccatattggttatcactagcaaatatcgcagcatca

SEQ ID NO: 140174 - DNA, 654 bp, Cannabis sativa
tgggtggattcaaatatactacacttagaacttattaattccctaacttagtaaagcatatagtaaaggatgtttcataagtgtaaattccctaacttattaattcctcattgaatccacacactactacaaaaatgggcttcagtgacgcgcctcaagagactctaaatatttttagtgacactccattgcatgtcactaatgtgggtgactagaaatgtattatttagtgacactcaacacgcgtcactaaattgtattagagatgctcaaagcacgtcactgtagacttttagagtcccaaattgtcagactctaaagataatacccactctcccaaagtgtcactaaatctatttttattttattttttaattatttttctaatttttctaacattccatttatataatttaaaagatacaattattaatattaatggatataataatataaaaattaattagattttttttatagaatataaatgattgttttaggcaatataaatacaatcatattaataataaataaaatcattcacgcacagtaaaataaaataagttaatttactaaatgaaataaaaaatattacaattaatttacaatgtactgatcttctcaaagaaaaacacccaataccaataataaaaa

SEQ ID NO: 140175 - DNA, 844 bp, Cannabis sativa
ataagtgtgaatcaagttttcaagagctgaagcggaggttaattacaactctagtgttagctctgccttctgacaaggtgagtttgtagtttactgtgatgcatccagacatggtctggggtgcgttctgatgtaggccaattgggttattacctatgcctccgtcagttgaaagattatgaacagcgatacccgactcatgacctagaacttgccacagtagtgtttgctttaaagatttggcggcactatctctatggagagaggtgtgaaatttacactgaccataaaagtctgaaatatttctttactcaaaaagatttgaatatgagacatatgcattggttagagttggttaaggattacgattgtgagatcctttatcatcctgggaaagacaatgtagtggctgatgccctgagcagaaaggggcccaggcaggtagctagcatggttcaaatttcatctcagttagcagaagatatggtcagatcaagcatcgagtttgttgtaggcaaacttcataacttgacgttgcaatctgatctgttagaacgtgttaaaactgattagctaactgatccagagttagtaaaagtgagagaagaggtttcggctggtcaagcaaaagactttatagtgtcagacagtggaattttgttgtttaagaccagagtctgtgttcctaatactgtggaacttagaaatgaaattctcgaagagactcataccacttcatattccttgcatccctgcaccaccaagatgtatcaagatcttaaaccttacttctggtggagcggaatgaagaagaatgtggtagaattcgtatcaagatgcctaa

SEQ ID NO: 140176 - DNA, 560 bp, Cannabis sativa
ttaataataaaaaataataagaatgacctctaattaattgaaattctacgctcaatcttattatcaatactttaagtgtcaaataagtgtgtcaattcaggataggttcaagtgatttcattttttttcaaaaaaaaaaaaaaatctaattacaattataaaattaaagataatttttttgctgcactcgacatatctgtactttattccacctatgtcatgtaattttatttcatcagagagacgaagtcactttattcttccttctttccaattctaaatatattgtatatgtatcaatttatcagagtggaatcataagaaaaaaaattattaaaaaagtttaaaagttattgatggttaatggtttttgatcttcaatatatattattgaaaggtttgaaagttactaactgatatcggttaataatcttaaatacatgttattgaaaaagtttgtaattaagttattaattattattggttatagatcctgaacatgtgttcttgataaacttagcaaccgatgttattgattatgtgacagtcaatagtcccgt

SEQ ID NO: 140177 - DNA, 640 bp, Cannabis sativa
tagcttatgcctctcgtcaactgaaagattatgagcagcgctatccaacgcataatttaaagccggctgctgtagtatttgctctaaaaatatggcgacattatctttatggtgaaaaatgcgacatttacactagtcataaaagtctcaagtgctttttcacccagaaagatttaaacatgaggcagagaaggtggctggaactgtttacagattacgactatgagattttgtatcaccccgagaaagccaatgttgtggcggatgcactaaaaaggagaggtcccgggcaagttttcaccatttttatgatagctcctcaactaggctcagagatggttaatgcgagaatcgaatttgtagttggaaagttgcccaacttaaaactccaatctgatttgctagaaagaatcagaaaggcacaattagaagatcccgagctagtttcgagatgaggtaatggctggtcggcctaaggacttttccatctcgaataatgaaatgttacagtataaagctcgagtttgtgttccttatattgttgaactcaagaaagagatccttgatgaagctcacaccacaccttattcactgcatctgggaaccaccaaaatgcatcaagatctaaaaccctacttct

SEQ ID NO: 140178 - DNA, 854 bp, Cannabis sativa
ctggtaaatattcccaacaagacagacttcaagcagtctttccattttgggaaggagggttgaagacgtgtcatacccctggtgatccttcacgcataaaaaatatcatgcatgcgagtgtcatgttgaacttttacaaagcaagtttcagcttccgtgagggaaggctgaagttgcataaaaatttaagctttgacttcacttgaaaggatcaaagggtgaagccatcatggggagtaagacagaattctagcagcccttccattctgggaaggagggtttaagacatgtcatattcccgtgatccttctcgcatgaaaaacatcgtgcatgcgagagtcatgttgaatatttacgaagcaagcttcagcttccgcgagggagcgctgaagttgcataaaaattcaaactttgactttgcttgaaaagattaaagggtgaaagcaacacgaggagtaagacagactttaagcagtccttccatttcgagaaagagggttaaagatgtgtcatacccccggtgatccttcacgcacgaaaaacattgtgaacacgagagtcatgttgaggttttacgaagcaagtgtcggcttccacgagggaaggctgaagtcgcataaaaattcaagcctcgactttgcttgaaaatatcaaaggggtgaaatagtctttgggcgtgcaatagacttcaaggagtccttccattttggaaggagggttgaagacgagtcgtacgcctagtgacctttcacaaacgaaaagcgatgcacatgtgtctcccaagctccgggaagctctaagagatgcgtgcatgcgccttggatctcctgggcagtcggtttcttccaatggat

SEQ ID NO: 140179 - DNA, 523 bp, Cannabis sativa
aggactaggactagaacccaaattgggaatgggatcgagactcgggacctgggaccaagatcgagacctgggaccgagaccgagaccgggaccgggacatgggaccgggacggcgaccctggacccgatactcgaacctaggaccttagaactaaaccatgacaaacctagaccaagccaagacccaagacaaggaccagtaccgaacacggaccgggacctaggatcctgccctaaatctgggacctggacccatgacttaggacctaagacccaaacctagacgcaaacatccacctgacaccagaaccatgacccaagacatgagctagaactagacaaggatctagatttggacctgggacccaggacccaagacccgaggcgtagacccaacccataatcggtgtctaaatcagggaatgagacctggaccaagacccagacccggaccagaacccgaatccatacaagaagtcgaactagactaaacatgaggttggagtttggatttgtgaccaag

SEQ ID NO: 140180 - DNA, 676 bp, Cannabis sativa
taattcaaccctaaccctttgtggtattctataaatagaaagtaatggcttcaggaaacacaacacaattgcatctcattcctttcagagaaaaattcttgagccaccactatctctctttcttcttcttctttgtttcgaaatccctaagtgatagagtagtacccacacacatcaagtggtatcacaatcatagtgatagagtcattatattttgctgcacccaatataaggtttcctaaactttatatgtgattattttcattgttttagaattcatattaggttgttaatgaaacatacatggtagtaaatctagatcctagtaaaatatttcccacactagcaacctgaataaagttgataatcctcttctgcattttccagttatcatcaacccaatgtgcagtcaagcacaaataagaaatattttggattgatgtccaacaatcagttgtcagcgattctctatgttgtgccaacatttcctttagttctttttattcgatccaaaaataattgataaatatctctcgccacagtgaaccttgatgggaattgcaaatcgtcaaaaaaaaaagtctgataagcttttgaaatccttttccatcaacgtgccaaaaaggtaactcatccatgatgatatattcatctattgctttccgaactaggtttt

SEQ ID NO: 140181 - DNA, 1332 bp, Cannabis sativa
attttgagattatgtaggcgtgggactacctatgttagcaagaagcatcctcttttgatagcttaccatgagggaacaccatggttgagtgtccttaatttagggtgattttattttggaaatttccccatgaagtgtggacgttaccggggtaacatataagagaacgtcaggaagagtagtggtatcactaaagtaaagaagattacctttacttaaggtgatacagtaatgatggatagtactttataattgactggatagttaatatggtatataaggagaccattgacattctagaaaaatattactttattatgcaattatggaaaggcatcctcaccctcaatggagaaaaagcttatgaattgatatgcaatttaatagacacgtaattgagtgattagtggatgttggatcacaaagtaggttgtttattaaacaacgagctgtataattgagtgtagaataaattttaaagtggttaatcaagtatgaagataatgatgattgcaaggaagcaatgatggtgtatgaactagggaacaaaaccttagtagtaatgacgggaaaaaatatacgagagtcgtagatgttgatggattagcttcatcaacgatggactcactataagttggtatggtaatttgtaccaatggcttatcagtataacaaagaatatacttgaggtatgtatatttttgggtatgttaaaaatatcatcaagatctctaccaaacacagaaaagaaatttcacgatcacagaatgatctttgattaattattattagttcagaattcaggaaatatgtattttcagtttagttatgggtacctggcatgagtaatgttgcctctatcgtataggttacattaattctctttataatggtagttaattgtaagtgatagagaaattttaaagttgtgtcaactcgagagaaattgatgcaagttaaagtaagtagaaatggaaagatttaagttgacaataagatggaaattcctcaagtttaagtgaacaaaactgatgaggaattctaagaggtgaacgaagggagtgatgggacttgattttttttttttacgaaagaatgaaagcaagaaatacaattagcaacgacaaggaagcatctactttctgataacccaccatgagcttactttggagttaagcatacttaacttggggtaatcttaagatgtgaaattcttcgaggagtcacatcgagaagtgtatgagtgaggacaaagtacgctagaaagattcacattaggatgcagaaacagtagtcgttccagagattattaagaggaagtgatgtgttaat

SEQ ID NO: 140182 - DNA, 513 bp, Cannabis sativa
ttttgaaatttttcttgaaaaatactattgttataagaatgtccatttatatatatttttaactagatcaacccaacccatttctacttttatttcagtacattctaaattgctcaagcaaaatatgtgtatgagtttagttgatttatgaattagtaataaaactaaattttaaacatcttcacatatttcaacaggaaagtggaagtgggtttacatagttgcaaaatgaaaggatcaaacatgatggtgaggattgttgtggcaacatggatatgttgttggagtatgctctctttaacagctaatcttatagcagaataactttcaatactaatttcaaagatatcagcctcggatcataccaaattttcatgcaatctctttgaagagaattctcttggaaaattgagagccatgctataccattgttgtgcacaaaatctgcagcggtcaggactgaccctgagttgaaatggactataggcaactcttattataaagataaatgat

SEQ ID NO: 140183 - DNA, 931 bp, Cannabis sativa
  modified_base (46)..(58): a, c, t, g, unknown or other
aattctgttatataggcacactttctcataaaccaagaattctgtnnnnnnnnnnnnntttatatagaatagatatattgagtatgatttttttgaaattattgtaagatgtaggaaaagttatagactgaggtggttgaattatttgaaggccgatatcaaatggggagaatttacatcgagagtgagttgagagagaggaagagagaggctgatgagattagggattttaaatgtgaggggtatttttgagaaattagtaatgtggtatatatgaccaattttaataactatgcatttaaggataaaattttagggtattgtaagtatggaaattcaaatttccctattaaaatgggtaaatcagcattattagccaaaattttaaatttgtatgcagcataaacttaatgatattagggttcaactaaattctttgcagagccttcccgctgggtcccgagattggaatcgggagtgtgacgtccgacgcgctttaaacgaatcccgggaaaggaaagcgatctattggaaacaaagagcaaggatctcttggctcaaagaaggggataagtgctcaaagtttttctttctgtctgccactatcaaaggaagaagaaatgcaattgagagtcttttgaataaggacaatatatggatctctggaagggagcttattggcagagaattcattgatttcttcaaaggtatcttcactagggaggatctcaggcaggactatgattgtagtcggttatttcaagagggtttatcgtcggaggagtcagagaatctcattcagtgccctagtgttgaagagattagaagtaccctttttgccatgaataagcataaggctcctgggcctgatgggatgtcagttctattctttaagcactactgggagtctgttagcgctgatttctgtgag

SEQ ID NO: 140184 - DNA, 787 bp, Cannabis sativa
  modified_base (665)..(669): a, c, t, g, unknown or other
gtgatgaatgcgatgatgggctctaagaatttctaagattaaagatgaaatctgatgaaatatccagaaaataggtcaaggacaatgagggcatgcaaggtgatgaaaaatgaagatggttttttcaaaagggttcgaagatttgaacaacaaaaatggcaaataaatgttttctcttgagttttatactttaagaatgatcaccgttagattaaaagaataaagatctaacagatgggaacaagggagaattggaaaaagatgggcatttaatgctaatgatgtgcctcgaaatcatgaaccgccaaaactcaaagcatgcaatttttcaaacaaggattaagacaaaaataaccttgtaatcatttaaaaagctctttttattaaaaaaaaaagaacttttttaagggacaattgttatacccaaaattcggctacacttcagagagtgacacgtgtcttgtagtggaatgtaaaccacctcatgatataataaaattatatcatgtaatgcaaaaaaaaagaataaattattaataaaagattaatagaacatattcataactcactgactacatagttttaatcgagataaggataaagactattaaaacttatattgacgagatacacacctgcctcggagtacacaaccaaagaagatnnnnnatttattcaaaggagtgaatacaaccatacaaagtaaccttgggttatgaatagcgagacagctacctcgcaattctaactaaagaaacttgacgaggcgaaccatctgctaacactt

SEQ ID NO: 140185 - DNA, 508 bp, Cannabis sativa
catcaataatttttaaacttttgcaatttttccgatcaattgatacacatacaatatatttagaactgcaaagaaggaagaataaagcgaatttctctaaaagaaagtagaattacatgactgagggtaaaatgaattacaaatgtatcgagtgcgacaaaaacagttatctttaattttataattgctattggattttaatttttttttttgaaaaaaaaaataaatcacttggaaccaatccttagcttatttggcacttaaagtattgataataagattgagtggtcattcttatactattttttttttattaattaaggtgtgtaataattttaagttataaggggttttataactttttcaataatttaagtgtaaaaaaattaatatttaagggattcttatttagtaacaaattacaaaaaaataattaataattattaataatttaattttaaatataataaattaatattaaatttttattgaatctcatcagccaaat

SEQ ID NO: 140186 - DNA, 520 bp, Cannabis sativa
  modified_base (36)..(39): a, c, t, g, unknown or other
attttatttttattaataaatcattttatttttaannnnaataaaaagtcactcatgaatttctcataaatcaagaattctgttatatagacacactttatatagaatagatatatataagaaagctaaatattatatcttcaacatcatagaataaattaaattacaaacaaaattgactatactaactaattttttgacaaattaacaatatggttagttctaatattttattgaaattagtaacataatggttgctcaaaaaagtaataatgtaaatatattataagtaataagacaatataaatataatcttaaataactaaaagtacgattttaaaaataaattcaaactatgatttttaggcaaagcagacttgactctaagttaaaaaatgcaatttgctacaattacttgactcacccaataaaaaatcacgaaacaatttattgacttcagcagtaactttttggggtaaaataaagatgctcatccagtaattcctaatccctaaaagaa

SEQ ID NO: 140187 - DNA, 552 bp, Cannabis sativa
attactgagtccaaccaaattatgccttgaacgcataattctttaaatcaatatataaagcatggcatagcatttaaaaaaatcaataaccctagaggaggatttagaaactgaacctagaaaaagtaaaagagcgagttagctaaagactttggttctgatttctgtgcttataccttagaggaggatccagctaacttccaagaagatttgccttctttagatgcgaacatttggcaagaggccatagatgatgaaatagactctcttgtggccacttacccctggctgtaagactgtaagttgtaagtagattctaaaaaaaaaaattgaaacccgatagaactgttacagcatatttttggtatgcttctttaaattttttataatattaaaaaattattgtgagtgctcttagaaatataaatatttataatttcataatgattttatctattataagggtgtgtttggaaagccacaatgtaattggatttgtgtgtaattagaggtaattacacaatttgacatgtttgtatgaccatgtaatta

SEQ ID NO: 140188 - DNA, 599 bp, Cannabis sativa
  modified_base (554)..(562): a, c, t, g, unknown or other
gctcaaatcaacataatctaacataaattaacctcagaaaacaatttcaaacaaccacagcaagaacagcaaccaaattctcaatttcaagcaaaatccattttcttataactcaataaactaaagaggatcaagttaaaagcttacctagagcttataaacacttaattcttgcagcaacaaacttgaaatgaacaaaagcacagcaaagcctagctgatctagagggtttcgaaagagagagggcaaagagagaaagagaacattttctttctaagtgatatctttgatttttaataaaaatgaaatgataaaagggtttatttaataaaatatcagcttataatacatttaaaaatctaatttattgactaaattcaaatccacataagacaaacataattaggcaaaagaccattttgcccttctcacaataaaaaatcataaaaagtcattaaggggtattttggtcacttcaaaggtttctactattcctgacattcccaatgtctaacttcattgtcgcgcaatactaaaaatactaagatgtgatnnnnnnnnncaaacaccgcgttccaatgttgtcgggcacaaaacat

SEQ ID NO: 140189 - DNA, 569 bp, Cannabis sativa
  modified_base (276)..(277): a, c, t, g, unknown or other
  modified_base (497)..(497): a, c, t, g, unknown or other
gcgcgcacgaggggctttactcggcattcacaccgcttcagacaagccctgtccgaggaaactcggacacgggctgtctgaagcttgtatcacaccgagatccctcacccattgaggatgcgtgcagcctcctgtctcggtccaatgccccattccgcgcgcaggggtatgcattgcatacccatgtgccccaaacttgtttttgtgatatcttttgattaaaaaatcctttttcattgaaacaaaattcatattttggtagaattttgtgtagannctaaattttcaattaaaaatctatatattagaataaaattaatttttattaattttttaattaataaaaattagttttagatattagtagcctttgaatttgaaaatttgatttttccacaaaaattgccttatggttaattttcaaatttttcattatttaatttactttaattgtaagatcagatattacttattttattattaaaatttgaaatgancttattttgatattaaaatatttataaaatttagaaataatctagttgaagttttaaatttgctaaccatat

SEQ ID NO: 140190 - DNA, 585 bp, Cannabis sativa
tcataatgttgggcgagccccatatgagaagcccgccaaatttgagttttttgaaagcccaacattttccaagcccaccgaagcttccttttccaaagcctctgttgacttccttcttttattatccagtattaaaacattctcatccaaactatgtgtagctgattcctccatttgtgagtcagagatatccacaatgagattctttcccttattagtcttcctaaaatcttgcaaatccacctcatgattcaaattagcttctttttctccacctttctctccatgattcttgccaccttcctctccctggttgtcactttccatattggtctttcccatatgattctccaccggtccaccactgctctctccgaccaccgcccctggagtccaccctcgggttctaagccatttcgcaccaatgttttgcttacggttctggaatttggctctcatgaattccccataaggcttaacgatttggtctaaaggtttgtcaaagagtttgacacaaaacctttctgaatgtccaatgattccgcatataaaacaaaatgttggcgccctttcatacttgaaatt

SEQ ID NO: 140191 - DNA, 1536 bp, Cannabis sativa
  modified_base (1466)..(1475): a, c, t, g, unknown or other
aatgaaccatacttgttagtaaatctagatcatgataaaataattccaacaacaccttgtttctttgccaaaaacttaggacactagggttttcagtggccattttcatcgcaatagaagaacattcctttttccttttcctttcgattagcagcctttatattcttattagttgtgtgaatagctttaagaggcttcttgctattcttccatttcttcttctttttgggttttgaagtagagacaatatttaccttaagctttgccctaccattagttgcattactagaactacgagctttgtttcctcctttctacagtcctccaatcaaattttcaaatgtgtaaaggttgttgattaactcgtggaagtcaaaagtcaacttgttcatgacataatctgaaataaagagcagaaaagctcaagtcaaactatttaagatcaaactcacttgagtttcctgatctataatagctctagccatttggagtaggtgatcacacacgttctgatgaggtttcatctgtgcattgataaagtttttcgtcgcctaaaaaagatcttgatctgacgccatcccaaacagttcagttaactgtcatgatttctacagccatgagagtgttggcaaaccttgtcttcaaggtatcaaccatgctagacagcataaggtatcgagctttattgttagcattctgccaacgctcaaacttttccataacttcatttgttacattctcacctggtttcgcaaaagcttcttcagttaacacaaatagggagttttccctatgagagcaatattaatgttctccttccatttgacaaagttggctgcagagagcttgttgtcagtcaacagtgacagaattgggttgttcatagtcattttggaatctacaaatatttgtaaatagaatcaaataaggttcaatacaaaatcatacacattcagaaattattaagcatttagcaagtaggaatgacatgtgaaaatacaaaaataaaaccctaaaattgccaaggttttcaacaaactaatatagtatcctgtttaggggagagtcaaagatatcgttcattgaatagcagtcagcttgtctaaaatggacaccattctagcaaacttttattcaatcaagatgagaattcagcattgtcctgtttaggtaagagtcaatgccactctattttatgagcttccacgattgtttcatactttgtaaaccctactcttagacactatttgggtggacattactaagaataaaagacctacaataatacttatctttcgagattctatgatgtcaaattgctaacgaacgagcatctattagggttgaatctcactaaaataagaactatgtagaacccgttgtgttttgtgccctaaataaaacacattttaatacaatcagatttaataattagtataatatcaaaaatcattttatgttgcatnnnnnnnnnnatttatttcatgattatgtttaacgtataaattttattaagtccagaatatatatataaat

SEQ ID NO: 140192 - DNA, 977 bp, Cannabis sativa
  modified_base (919)..(938): a, c, t, g, unknown or other
aattaattttagactatgataaaataaacttcatacacaaaaattgtaacaaacaagatcaaaaataaaaacaaaaactttaagaactaaactttatataaatataattagttttagattttagagttttgttttttcttgttagttttagttataaatttaaaaaaaaaaaaaaaatagcaagtacgggttggacccgccctttttaggctaacctgtacccgcccaccaaacagcgggttaaaactcaacccaacccaatttttgcagatttttaatgggcagtttctatgcaggcggttcccacggtttagcggtttttatgttccggcctaattcaccatatattcaataaatatgcattcataggctctactagctagtttgtttctcttaggaccaggttttcaaaaataagctaaacaaccccaagttttaaaataagacacatttggttgcctatttttcaaaatctcataaggtaaaatttgctcttagatttagaaactatattcaaaacatagcaaacaattaaaaaaatttcaccccaccaatgagatgcaacaccagaattcaacaaaatagccacaactaattcagtaaggttttattttttttagctttaccattcatttcaggtaaatatggtgcagtcctttcatgtatcatgtcatgtgaatcataaaattcaataaacaagtttgaatcatattcagttcttctatcactacgaagcatttttattttcttattgaattgattctcaattttagccacaaataatttaaacatgtcaagtgcattatttttattttttattaagtacacataaataaagtcaaaataatcattgataaatgtaataaaataacgtttaccatttttagttagcgttccatctgttggaatttattttacnnnnnnnnnnnnnnnnnnnncaagtatgttgtttaaacaccctacatatgaactttcta

SEQ ID NO: 140193 - DNA, 552 bp, Cannabis sativa
aaatggttataattattttggacatggtactagggtttgattggatgttgctttaagggatgagttttctatagacaaatcttattagggagcctttttgcaattattttcttgttgaaataaataataaaaaaaaagatacagagcaacatttttcatcattatatccaacatgttgcctcttgttcaaaaaaaaaaaagtttgttatattttattttttttggctcctaaaataaatgtaaatgattgtctattttcgttcaaaaatcccgaaaagcttgtttgtggtactcttatgatggttggtccaaataattcataatctatctttgtttcaatgtttattcaaatgtttgtcctaaattgatttatccatttcgagtgctcacttttcaatttccaactccatgagtgaatactttaaacatatataaatattttcaatgacatgtgaggctaatagagttgagactttcacttggtacatttttcgaagggaaattatagtaaatgaccccaaatcataagactatgttagtttatgtcctcat

SEQ ID NO: 140194 - DNA, 554 bp, Cannabis sativa
  modified_base (58)..(58): a, c, t, g, unknown or other
gagtttttgagaagggtatttttgaggttttggaaaagtagtcatatattttcaatgnagaaaagtattagtttagggaaaaaatattagatatatgtaagtatagaaaatcaaatttcccatgtgaaaacccccaagtgcatcaattatatatgttattataccaaaaaaaaagatctttcacttttatcaaaacaaaattcaaaccttaaacattctaattgaggaattgtacaagctggattatatgtgtacttacctaaagaagaataattttttgccattaaaatttaaaatctcctctttttataatatataaagtgcacctgatttttagctataacattggaagggttggttagtactttattggctttagtagaagtagtgagactagtgagaatagtgcctatgaaattgccactcttaacaagtatacataacattatctatatttgtatacatataaaaagtgttataatagcttatatctctctcttctcattctatatagccatgtttcattctcaactttgtttgacttatcatcacac

SEQ ID NO: 140195 - DNA, 690 bp, Cannabis sativa
gtgcaaaccatgttatagaacatgagaataatggattgcacatcagatttatttttaagcataaaagtccatgtaaagcgagatttgtcatcgacaatggtgagaaaatatttatattcttcaatgcttatgacattgaagggtccccaaatatccatgtgaataaggtcaaatatatcatcaacaaaattatggtttaatatgaatggcaacgttttttgttttgcaatatgacaatatgtgacaatgctggttttttgaaacatttgaaccagaaaagaactttttattgattgtaatagaatgtacatggagggatgaccaaggcgtttgtgtcattggtctccattattacaagaaagtaaagagtaagtagaacttgcaataggtatgaaatcttggagaagaacatatagctttccaagtcttttagctgtcccaatcaccacactcggagaatgagcctgtaatatacaaaaatcatggtgaaaatagaccatgttagccgtgtcactaagaaggaatgttggaatggacaataggttgatgttaaaggttggaacaaataatacatcataaagaatatgttgtggatttatttgaactgtaccaattcctttaacagatattcgattgccatcagggagagtcacatatggtggaaaatcattgttagaaaaagataaaaaa

SEQ ID NO: 140196 - DNA, 514 bp, Cannabis sativa
ttgtagggatgttagtggatattatggtccttctaccccatcttctagtgatacctcgtcttctagtgattatggtaaattccttaggtagaaaatcataccccaatctctccttttacttgtcttcaattaatgcaagcactttatgttgtcttgcacaaatgcattttgagggtatcgtctacaggaaagggaagaagagagtgacctcctcggagactccttccgaggtggaggtggagcccctcaaaaggcagaagaagaccacaactaataagaaatgagcctcctagatcgctaatctcgaggtccctgagtctgaaacccaggatttgattcctccttcgttctctgcaagtaccgacgagcctctccctaaagtgactcaagcctttgcctcctcgagccagaccattgaaacactacctgtcgaggccagaaagactggctcagagtttaccacagagtttggagctgcgtattggcatcagttcaaggctctccttccccatga

SEQ ID NO: 140197 - DNA, 891 bp, Cannabis sativa
  modified_base (71)..(85): a, c, t, g, unknown or other
  modified_base (115)..(129): a, c, t, g, unknown or other
ttgtaccaccatcttatttatgagtagacttgaagtaaagggcaacttgatgatcctttctctcaatgaannnnnnnnnnnnnnnatgatcctttctctcaatgaaagcaccaannnnnnnnnnnnnnntttagccaacgacagtgagtcttaataataagcgatcaaagatataatttagatatgatatgaaaagataaataaagaacacagggtttttaaaaaggttcggccccgagcagttcagtaatagcctactccccttgatttgtattgacttatgaacaaagaatacaatgattcctctcttaaagctctaacaatgaaatctctgagtgtactctcttagataattctttcgaccctcgaagtgagaatggatcactatttatagggctacatgtttgagggaaggtctcccttttactaacaatatctataattggtaagaatgcatattacatatttagaatacactggttgtgggatttggacagcttgccatatctttgtgatacgatccgagatttatagggattgctcttgtgcttcacgatgcaaatgcttgattgctaagtgttgatatgctgctcagattgtccactgcttggctgggaggacctcgtccatgcaggtatatgcagtgttctgctcgaaacatctctttcgggcaggcatggagaatcaagtccatgtgtcaccaacatgtgatgccacgtcagagtgcgaaaattgtgataacaattagagaaagatcactcatagaaacatgatgttcaatacgactttcatgagaaaggaggagagcttgaacttcttcaattgtcaagacatcgcttcttgatgtgatgccagaaacaacgggatcgaattctgggccaagaccattca

SEQ ID NO: 140198 - DNA, 827 bp, Cannabis sativa
agcgcttcattaatgaatctccacaaaaaaaaatcttaagtttttttggcaaccgcaaagaccacatgcgattccaccattgtcgatgagtggaagatgaggaatgttcatattgagtttccaaacttgcagccaattggtatcctgttttcacagagtaagatcctgaatctgaatgatgccaaatcaacttatcatctctgggaaaagtacttagaggaatggatagaatgcgctgaatgtcaatgtctccaaagtgggtctgaagaatccttaagtcccaagtctgatgtatagagatatattgctcaaccgtaaaagaagggtctctcgtataagaataaggggtcatagttgtattaccaggtaaccaaggatccgaggcacatcgaacattccttcctgttccaatcttccatcgcaatccttttaacaacaaatctttaccatcacatatactttgccatgttaaagatggtaaaacacctttttagccgaaagaaaatccccatttttaaagtaacgagcttgaagaaccgtagccaataaagagttaggattatccagaattctccatgcttgcttagctaaaagagcttggttgaaatgaataaaagagcggaaacccataccaccatcagctttagaagaacacatgaatttccatttcttccaatggatcttagaattattagtgtttgaaccccaccaaaagttagccatcatagactccaactggttacaaaactttttagggagactgaagcaactcattgcatatgtaggaatagattgcaccaccaccttaagaagaacttctctacctc

SEQ ID NO: 140199 - DNA, 1831 bp, Cannabis sativa
tgctaagttttcttaatgatcttaccttttttctattgatgaatgtctctgtatgaaagatattagtatcttagtgaaaatattaacattaaattggcttgtagaaccaacaaaatattacatctttagtgtaataacaagataactcattttggttgctctttctacttaagttgatattatatatttcagaatgattataactcaccatcttagtaaagcactaagtgcttcaaacgagtacaattcaagcaaacatattagtttcatatttttgaattggaattgggtattataatttggaaagtgagattgagaaagaagttagaaatttggagaaaacttatcagtgtttattgtttatgtgctttggattattattctacttttttttggctatgatggttatgatactaggtggcgtttagttggaggtaatgaaatagaatggaatggaaaggaaacaattttcattacattcctttgtttggttgcatattaaagtattggaatgttattccaatggaatgacctttccaccattttggtggaatgactcttcatttttgaaatggaaggaaagaccattccaatacatgatgagaaaaaatataataattttttgatcaattttttttatgcattttaaattttattcaattcctatattccgattccgatttccattctcatttctattcctatattttcattcctcccaaccaacgccaccttagttctattttattcgtaatcaatcaagaaaatgatccataaaaattaatttattttggtgtagtttttcttttattgtatcattttttaaataaaataagacacatttagcataaaacttagtatacgtgcctcgcacgtagcattactagtatatatatatatatggatatagtagtgggtcatatttttatttttggatggcacgttaggttttattttttttaattaatatatataaatatttttattcactactacaatgttagcctttagagactgctttttcaccctatttataaaaagagatgctaaagggtgtaaaaatacccgttttgttcgaaattgacatttagaggcggtttttttgataaaaaccgtaggtataaaattgtattataccatttagaggcggttgggaattaattattatttttttttctgcttgaccctatggcgtcggttcctttataggaaccgacggcatatagggtacacggtttgctgacacgtgtgtcatatgccgtcggttcctataaaggaaccgacgccatagggtcgtccagggtatatatatgttagcttcgtcttcttccttcccacttcactcaacaaacccagcaaaaccaaagagaaatacccaacaaaaccctcgccgcagccacctcctctccaccatatctcccccatttctcaaccatttgagcccatttttttgaaaaattatcttccatttttgatacttaataacatacacctaaaaagttttcattttttaccctatttgagtgtcatccgaacccaaatagaaaattttgggtttaaaatccagccaccattttttgttgagaaagcattgaatctcaacatcgtttaaggtataaatattgtttctattcatttttataatgtacattgttttatttttgtttttgtatttgggtttttttattttattagtaatattattgtgttgtatgtatatagtgccaggatttttacggaagtggtcgtcggattgcggttattaggttataatttaaacctcaatatatagtatatatatgtatttgtatattttattgaatatgtgtgt

SEQ ID NO: 140200 - DNA, 589 bp, Cannabis sativa
agattgcctacgtacccgaagtgggatcaagccttacatagttcattgcacactcatcttttttctaagtgcgctgtctacaccatgggtaattaccctttttgtttaagtgtagaactttttgatgaacttcccattaacacacgggtaaatgcgtcgaccttccaaatttgaaagttcatatgcccctcttaggaagaccttagtaacaacataaggtccttcccattttgcttcaaatttacctttcatccttctagttatgacaattggtcttttcactgtaagcactagatctcaaatcgaaaaagatcgaaatttgacttttttggtgaatgccccagctacctaggcttggtaaatttctagcttttgttgaatagcaagccacttttcatctaatgcttcaagctcagctagaaggacttgcacattttcatctgggtctgttaattgagtagctattcttaatgaaggtatttgaacctccaaaggtaaaactgcttcagacccgaacaccatgttataaggtgtgcaaccagtcgcgatccttaccgtggttctataagcccataaagcttctaggagg

SEQ ID NO: 140201 - DNA, 943 bp, Cannabis sativa
tgcaacataaaatgcagtttctgatctttattaattagtttatctgattatattgaaataggttttatttatggcacaaaacccaacaatttagagtttagtatcatctccaactggcctttgagtattattggtggatatgatctcagtgccaggagtggtatggtcgaccgccatattggtatttctagtttcccgtatgcctggtatgaactcaactagaggagaagtcactccatggcccaccatcggtggttgtgtgataacttgtcttgggttcatctctggtggatctcttatgtttccaggagtctgtacacttggttctgtcaccatcgggccaactggatcagcttgaattcccccacgagttacaaccatcctattaaccaattaaaactttaagacaaaagtttgtgtttttgctctcaatgaaagcaccaaaatattgacctcgcttctagctaatgacaatgagtcaggttaaagcaattagataaagtaaataatagaaagcaaagaatgaaggattctatctctctagctcttacaattgatctctgagtaactctctcttagatcactcttttctttcttgagtgttcttccttaagcaaaatttcatcccctaatagtatcagttacgtctggcgggacaatgtatgtccaactggaagacaaatattgtctccacctcttcttgagttcccaaatgaagcatctgtaaacttcacctacgatctggtcgggatagaaatgatgttgcaccttgggttttggagaaggtgtaccttcactgctcacttcccagtcctcaaaactcgaattagaaagtccgtcgcttgatgaggatagactagcacaaagacgaggttggttctcgtacaagagttggagaagatcctggtcgatatgatgttctcctccccaaaactcaccaggg

SEQ ID NO: 140202 - DNA, 912 bp, Cannabis sativa
  modified_base (107)..(130): a, c, t, g, unknown or other
agccttctctctccctatctagccgaccactccctctctctctcttccctcttgagtttcgaaattcttagtgtttatttcattatatgtgtttatttcatcgtttnnnnnnnnnnnnnnnnnnnnnnnnaatcaacatacttgtgagtatatctaagatcctgataaaataatttccaacacattgtacatgacaacaaacatggtgagtgacaccagtatctaatatccaagaattaggtgaaagagggtcgattttaccagtccagttgttgattacaggattttctgatgtggatgcatcagtaaagggctgcaattgttggctgagcattgaaatgagttcttgacactgagcttgggtcagttgagatcagtggaaggaagacaaacctgatgtgtttggggtcgagatgttgaacccgaatctggttttctggtttgatttgatgaatcagtggcccttggcttgccatatccgggagggaacccatgtaaaaaataacatttgtccttgtaatggccgggcttttggcaatgagtacagtgtggtcgagggcgcttgttttttgatgtttgattggctgctggttcagtagcagcaggtatagtggctgcagcagcagcaattgggggaatatgacgatttcccgatgttctttgcctttcttggtgaattaccattgaaaacaccttgtttagagatggacatggatcaataaggagaatttgatccttaatagcatggtaagaatcatttagtccctttaggaactgcaagacttgatcatgattgatctgttcttgattttgtgtagcagcagcacaagtacagggtatccgtggccttagttgatggatttcattccacatagcagtaagtttagtgaaataagtgttggaaattatttt

SEQ ID NO: 140203 - DNA, 752 bp, Cannabis sativa
aaaatatctcaattttaaaattttaaaaaaaaattaaaatttaaaaaaaaaatatcttaactagaatttaaatttaggttattatagaatatttttaattttaaatttagatattcctaatattatattctaagtcatataatttaataaatttaaatattacaaaataaactatttgaaaaataagatattttgatatggttagaatatttccaattttattacaaaaaataataaaataaaataagtttaaaaaaattatggtttgaaaccctaaaatttcaattcaaacctaaactaactaacttttcaaaacttcatgttatttttgccaaaatataattttaatgaaaaaaatatccaataagattaaatgttgaaactaacatattcctaatcttataattctaattaataaaatatatttcaaaaaataacatatttgaaaaagatatgatatacttagcaaattatttaaatttgaacaagattatttttttaaaaaaaaaaaatttaatatcaaagtaagatcattaaaatttgataaaaaaatatgtaatatctgatcttataattaaaataaataaaataatctaaaatttcaaaattaaccataaggctcttttgtgagaaatcaaatattcaaaattcaaagcttagtaatatttaaaactaactttaattaattaaaaacttaataaaaattaattttattctgacaattagatttttaattgaaaattcagattcta

SEQ ID NO: 140204 - DNA, 738 bp, Cannabis sativa
tcctaaatagctatatatgccgtgtactgtagagaaactatcaatttgctgcaaccgttgctgcctccttggatcaattctcaacactatagtatcaatttgccgcctccttagagttggccttaaaagccaactcatggcttgggcactatttggttatttcatgagtaagtcagagatatatatgtgttgagtactttcacaattgttggtccaagcacaggtgtgtgaggtgaaaataatgaaatttaattgagcatcattgcaccgaatgacttttttccttctaattttgaataataagattgtcaatattagttagtagcatgacctcatcgtgatattaaataacaataataatgcctcataacactattcattgaaaaatcactttattcaagtgacattccaagactttacaaacaaacaaatgtgaaaacgaaattctattatatgcctgaaaatattaagagcgcatttgaaaagccggtaagaaattgaatttaaatgtaattaaaggtaattgcagtatttgatatagggatgtaaacgggttggggtaggtgcggggattgctccccgaccccatactcgttttttaaattcaccccatactcgccccaatacccgtttaaactaaagcatactcgccctaatacccgtttaaattaaagcgggagcagggcaggaattacccgacaggagaaggattcccatcgggtacccattacatatata

SEQ ID NO: 140205 - DNA, 629 bp, Cannabis sativa
atatatatatagactaggaagcgcggttttgtaatttttttttaaaaatgatttaagtttttattaataaaaatttaaatgtatagctaactgaatattttatttcttttaatgcacataatcaaataataaattttatatttatatatagattgttaataattatttttggacaaaattattatcattatattgagtcttaaaattgttaataatttttttactacccattaaaaaatatagtttttgttatgtataatttatgccaaattgaagggtatgagttgcatgtacctcaataaacctgtagtataatgtgtaatgtgtaaagggaaatttgaatttccatacttacaataccttataatttttttcctaaatgcgtacttattaaaattagtaatgtatgatcattttaccaattttctaaaactacccctcccatttcaaatcctaattttctaaagctcagccgactctctctcaactcaccaaccccccacgatcaacccacggcttcgaccacccttacccacgaaaaccccaaccctaacgaccctcacccacgctcaacccacggcacccacgaaaaccccaacccccggtcaacccacggcacccacgaatcc

SEQ ID NO: 140206 - DNA, 535 bp, Cannabis sativa
agctcaaatttatacatttgacacatttaattatgtatataaaattaatttaattaaatattttcattattttaattgtaaagttatttcaattagatatatttaacttaatttgattttgtgttattttcagatttgaggtacaaatcaaatgtcatttttgaaaattaaaagaaaaaggcaagctcaactaagcccaatactttcactcagtcctattctttgtaccaacaacacataataaaatgacaatcaaagcaatacataatatgggtccaacttctttgaatcatgtccaagccgccgttttcaaacattatgctttcaatgggccatcaccaagcccaacacattttttcaagcagggtttctctatcccacatgtttcattacatatcactccaagtttttaaccgctggactgaagtaaccacgtgtatcccacattccagactttttgttcactatgttactccactcttctccaacagaaatgggatgcataaatggtcccattatctaccactttggtcag

SEQ ID NO: 140207 - DNA, 940 bp, Cannabis sativa
tagtctattttaatagaatttaacgaattgataatgacaaaagtagcgtaaacgtaactttaggtatttaatccgctaaaagaaaaaacatgtggtatatgaatgtgttaaatctaaaacattaggtatttataccgtaaatactcctatgtttgaataggatttaagagaaaagtagtgacgaaattaacgaaaatgtaacttaaggtatttaatccgtcgaaaaaaaacatgtggtatttaagtgtataaaattaaaaacgtatggtatttatgccgcaaatattagtaatatatattggcaccttataattaattaatatctatgattttagctttttataattgggttaattagttattttttattttattaattatttttattttttgaacgtacggatacaaattgaaatttgttgtttttattacttgatatttttgaagatttttttaataatcataaattatagactttatatattttttttagaaaaactttatgtgttataaaataatgtagaataatataaaatatatatgaagaaaagaagtagaagataaagagagaaagagaaactgaatgaaaaattttcagttgtttattccaatggtgtgaacccctattttaacaaaaatatgagtaaaagaatgtgaaactaaatcaatgtaattatagaaaatacaaccaagcaataatggtgataattaatttggtgatttggacatccataaataatattttataacactcccccttggatgtccataataattgcctcaataaaaaccttgttgacaaacttggtcaaaagaaaaagagtacagtgtaaattaactttccctcatttaagcattcgtgaagatcttctaatcgacgaattttgatcttgtatgtcatcttctcaaatgttgatgctggtaataactttgtgaataa

SEQ ID NO: 140208 - DNA, 628 bp, Cannabis sativa
tttagggcataaaacccaataattttatggttgagtgaataacttgaaatttatttaagtgtgtatgtgttgaaaatgatatttttgcccttgaaattgtgtatgtgttatattaacgccttaggggtattttggtcattttgaccacttaagtattattcaacaaaaacaaaatttttgtaaattggaaaatcaatttcttgtgtgaaccactcttggctgacccttctctctcccttaacctttcattttgatttctttgaattggaaagaaaacacattgattttggagtggattttgggggatttctagcttcaagcttgtggagattgtggtaaaacccttatctcttttaattgtgttaattctgatttcaattgaaactctttgaatgtattttgggtgttcttgagagtttatgatgcttgttgttgtgattttgagatttagtgataattttggtgtatatgagcttatgggtgtgtgttgtttgcatcttgattctttaaaatgcttttagtgatgaaattaggttggtgatgagtttatttctgagttcttaactcaatttttagtggatagtgttgtgtagagcaagcttgagttcatggaactcaagcttggagc

SEQ ID NO: 140209 - DNA, 558 bp, Cannabis sativa
ataggcagccctcatcaaccactcatgcatcaaaagtgagtaaaggcaagtctcctctgttcaaagggctttcggattccagctggcaggtacaaatgtcttttgagtttcaatcttttaacaaacgttataagaaggatcaaaagcgtcagcttgcctttgaggcctccacgtatcaaatggttcgctctattaagtcgactcttttgcaccattttcctggggattctctgcttgacatttctctgcctgagtttcatcgagaatcgtttggagcttcctctgatacatatggaagtaacgcacatgtgcagagggagccttcagtatttgcccctatcaccagtcccgcccaaccggatctgcatcctccagcttactcgtctccagtaatcactgcaacacccttggtgtcgactgggccaacttctcagggggagtctggcaaagaacaggatcaagcaactcatattcaatgaaggggagatatttgcattctttttgttttatggttgctctgtttatattccaaaagacatttatgtttggtgcattaat

SEQ ID NO: 140210 - DNA, 598 bp, Cannabis sativa
tacttaggtctggaatcagtacagcatactaatgaggcaatagagaagatcaaggctagaatgcttgcctctcagagtaggcaaaagagttatgcagatccaaaatgcagaaatgtagagttccaggtaggagttcatgtattcctacgagtatctcagatgaaggggattaaatgtttcgggatgaagggagggttatgccctcgatttacaggaccttttgagattcttaaaaagtttagactagtagcttactgtctagccttgcctccagcactatcagtagttcataacgtattccatgtttctatgttaaggaaatacatttcggacccgacgcatgttcttagttatgaaaccctagagcttataccagatctatcatatgaagagcattcagtcaagattcttgatagaaaggataaagtccttctaaataagaccattagctttggtcaaggtactctggagaaatagcagggtggaggaagccacatgagagttggagtccaatatgagggctcaatatctggagttctttagattagatttcgaggacgaaatccttttaatggggggggataattgtaatgaccgc

SEQ ID NO: 140211 - DNA, 747 bp, Cannabis sativa
tgctttaattcattcaatttgaacatataaaaactacagataacatcccataaacccagcagcaacaacatcaaattaccaagcatgcaactatccatttttcttgaaaagatatcaagaaacttaaaagaaggctataagaatcttaccaacaattagagatcactaaatcttgagaaaatagtttgaattaccaaagaaaagaccaagattcttgctgctcaaagagggccgaaagagagagagagtttgagaaaaaagaatttttgcttttctttgattttgtaaaaagaagtaaatgcatcctcttatttaattttattaaattaatatcagccaacataacataacagaaaacataatatgaccaaatattaagtccacaaaaggacaaaggcttatgggaaaaaatgactattttgctcgtcccacactaaaaggataaaaaggcactaaaagggtattttgggaaattctaaattcccgacattcccagtgtctaaataaactgccccgttatactaaaatactaaattgtggttctactgagccatacaccgcgttccatgttgacgggcaccgaaaatgcaaaattatgaaatttcactatatgacatacaatgcattcaggattcaaatataataacataaataattatttaaatatctataaattattttcataattaaatcttaattaactgccaatttccacatttaagctaagcggtctttacaactatcccc

SEQ ID NO: 140212 - DNA, 1617 bp, Cannabis sativa
gactattatcaaaggagttaagaaggaaggcctatactacatgataggagaacctatagctagaagtaacaatactgttggacagaacaacattttacaaaatccagaagatgctaaggctatactatggcacaacagacttggacatattgcagaaggtttgcaaattgttaatgaacaacaattgctaggtaaagataaaatcagcaaggtagaattctgtgagcattgcatacttggaaaacatcacaggctgaagttcaaaacagggatacataaatctaaaggtatattggattatatacactcaaatttatggggccctgaagagacaccaacccatggaggtaacacttactttatgtctatagttgatgatttttctagaaaagtatggatctttttacttaaaaataaaaatgatgcttttcaaaggtttaaacactggaaagcacttattgaaaatcttactaatagaaagattaaaaacctaaggacagacaatggtctggaattttgaaacaatgagtttgatatgttttgcagagaaacagggattcaaaggcatagaacagtcagattaacacgacaatagaatggtgttgcagaaagaatgaatagaaccattctgaacaaagccagatgtatgttaatacaatctggtttgtcccatggtttttggggagaggctgttatgacatctgcttatcttataaacagatgtccctcaagtgttattgaattcaaaacacctgaggaaaggttgtctggtaaaccacccgatctttcaaatctaagggtgtttggttgtagtgctttcgtgcaccaaagtattggtaagcttgaacctagagttattaaaggagtttttctagggtatcctgaaggagttaagggctataaaatctgattaagagaaaagggtggttttaaaactattattagcagggatgtatttttaaagaaaatgaatttccttgtttacttaaaactaaccctgcatgtacagtagaaactaaccatgcaggtacaatacagtttgaccctatactttggaaactagatgatcaagaagaacctgatataaatcaggtggaaccagctggaaatgaacctgatcaagatcaggtgtaacatatagaaggctctaacagggaagagacacagactgaagagcaacagagagatgaaaatgaggttattcaacccactgaagctctagatgactaccaattgaccagggacagagaaaaaaggacaccaaaacctaatcctaagtacagtttcaacatctggaatgaagatatagcctatgcttttatgtcagctatacagtcactaaattcagagcctcagacttatgaagaagctatgacagagcctaatgctaagaagtggtttaaagctatggatgaggaaatggtttcactaaagaaaaacaaaacctggataatgattctaaggcctaaaggaaaaaggatcagagcatgtaaatgggtttacaagtacaaagaaggcaaatttgaaggagaacctataaggtttaaggctaggttagtagccaaaggttttacacagaaagagggagttgactataatgagatattctcaccagta

SEQ ID NO: 140213 - DNA, 563 bp, Cannabis sativa
tttttttgacgtgagaaaatgttagttttattgtaaataagatttaattaaaattaatatagatatttttttatataattattctattgcttctctctgtcatgtaagccgtaagcgttgtcgccgcctatttttttatttctatatctttcattttctttctctcatctgactctcttttttttttttttcattgtcatatttttgggtccctcgtggtgctcttggcatggctctttagtatcaatttcgaattccacaaaactcacattctttgacttattctcatcgaacaaaaggtccaacgtcaacagctgcaaccatatacttttagttagattcaatgaacaatgaattcacatcaaacaatgacactttgtaactttactatttctttcgtagcgtcaacacgatacttctcatccattgcagtgtgtaaggagtccataaatgagacaaccttcgactgcatattaacttcgacaccaagccaatgtggtggaccttctagcgtcaaaatcagcacaaacatctacaattgataagaaaaacagtaaagtcat

SEQ ID NO: 140214 - DNA, 898 bp, Cannabis sativa
  modified_base (527)..(529): a, c, t, g, unknown or other
tctgctttttgtttgttatctttctcttaattgctctgccaatttatgacactatatatccttatatatgttgttataaatgaagcctttaattttttatttaaaataaaagataaatacctaatttgatttgaattcagaattcaaatttaaatataaatatttaataactgaatatcaaaatatcagtagatcttttattttaataattatccttttaattaagcaattatctaataattcatttaattaataattaaaagataattaacttaaattaatttaaattattttaacctataaataattaaaccaaattaatcatggacctttatatgtcaccctactgtgtagaatgggcctacacgtgtggaccatattttaaggtccaaaattgatttctcaatttcaccactaataagatttattatttaattggttaattctcattaatctcttatttcacaaggattaaaataaatattattttctctaaaataatatatttctctctttaatatcatttnnnaataatattatgtttaactaattaatatagtttgaataattagtatttttccccttgaactttcgacactacctaatttttctccctaaaattagaggtgtccataaaaaccgataaaccgaccatcaaaccgaccagaccgtaaccgaattttcggttccacgtcattctcgaatttggcggtcggtttcggtttttgaaatagaaaaattgttaaaccaaaaaactgccaaaaccgccgaaaaccgcgataaaccgccaaaaaccgtccaaaaccgccaaaccgaaaaactaccaaaaactgtacggtcaggtttatacggttataatttctaaacggtcggttataaaattgtaaaaaccgaccat

SEQ ID NO: 140215 - DNA, 817 bp, Cannabis sativa
ttaattgtactatacgagttctttaacttgttcgttacaattgaccaatatgatcgatctaatacttatatcttgggaactcagtagttcaatcgagtgggagcgttaatcacataaatgaaatatatagcttttataagtacatacaagtgaaacgatagttttcttaaagcttggttaaacgcgtttaaatcattaatgtctcatttcggtaattatattagttttatgaaatatcatttacaagtagctaagtgttttaaagataaaatacattgaagggtaagatggtaatttttttcctattcaatgtagaccatatatagaggatcattgattatgtagattgaaataatggataattcataatgtatttatatctggtatatagagcgttctatgtaatcaagagtgtaattccaaatctatagtggagttatgaggaattaataagttaggaaatctacttggtaaattttcggatctacttattaggagtttagttacataggctcatggtccccatattgtctcagataatatcatcttgtagactcaactaattaatttaataagtgaattagaatttgaaaatagactacgtcttatttgaaaaatttcaccaagtttaagcattctttagaagaaaagagaaataggggtttacttgttaattagtacacttcgtgagtctaattaataaatatatttaaattgtattttctattataattatttataatcattaaaataaatctggtatttaaataattaaatgagagaaatgctaaaattagaaaagacacttttgtttcat

SEQ ID NO: 140216 - DNA, 612 bp, Cannabis sativa
gccaatcacaatttatttatttttgtaattaaacatataaaaagttacgggtgcttaatatgaaatattttcttcaccactcccttctctcttctaccatttaatataatatgaccaatcatccaatccaatgacaatcgaccgcccaacattagatatccaattgtgatcggatcaaattagatgttatttttaaatatccaattggatcggatcagatgttggatggattgtccaaaaatctaatacatgcaacatccaatcaaactaattaatattttcatttagtttgaatgagtaattagattttatattgttagatgtaaaatatatatgtatataaaaattaatgttaaaattttactctttttttttttggatgggatgaatccaatctaattcaatacatattggacctaagatattagatggattcaatctaatcaagaaaatattaagtctaaaatattgaataaatccaaattaaaccaataaattatatgaaatacatctaataaatagaactgatctaattcaacatccaatgtatatttaatcgattggatgattggatcggatcaaatagtaaaatctaacctctaatatataatt

SEQ ID NO: 140217 - DNA, 515 bp, Cannabis sativa
tttgttgtttttactaattatgtcttttttggggttatagttagctctgattttgtgagtggtttgtatcgtttgatgactcttatgacttattttgtttttgttttattattgttgtaatgttgttttactattgttttctttcatttttttatcacaattttttaaatattgttgtactgttttatttttaatagcaatagggaaataatgaaatttgtatgcaagttattttcttcagtatcatatactccaatatatgttcaattttcctttgttgtttcactgttattttttagttgttctccttcttttcatttttgatattttctcttgtatgttctcttgttgtgccccagcttcccacatttgctgcatttgttatgttatttttttttcccagccaacttccattatctttttttttttttgtcttctaaatttcaccactttaatggaaggtaagactattactatccatgattctttcattcaggttacctcaaacaaatatt

SEQ ID NO: 140218 - DNA, 617 bp, Cannabis sativa
aagtatgtgacattctaatatcacatcaaatagctttatctcttctttccttaattctttttttttattaggtttataaatatttatttatattcttataattttatcattttattattaataattttttaaagctttttctaaaaaaacgtggctttttttttttaataaaaaaatatacatatatttattttcttatatttttatcattttacattaattaataattttttttaagaaaaaaatctatatacatttataacataaaatctatatatctacttatttatctatcaatcaatcaatatatataaaagagaagtataaacggtaacatagcgctttaaaattagtttaaatacatctatctatttcttccttaaatctctcatttttttaatattttattagatcataaaccaataaatcaatattttattatatttctaattttaataatttttctataaaatataatatatctaattgatcaaaagtgttcactaatttcaaatacgactagatatatacatactagtatattgttacgtgcgatgcacgtatgctatgttttatattaagtattatattatgagttcagaagaaaataaatgaat

SEQ ID NO: 140219 - DNA, 827 bp, Cannabis sativa
  modified_base (91)..(104): a, c, t, g, unknown or other
ataaaaatgcattcaggaatcgaatataacaacataaataattatttaaatatcgataaataattttcataattaaatcataattaactgnnnnnnnnnnnnnnaaactaagcggtctttacaatcaacgattgaaggagatctcattagattttcatagccacacgttttgggttttctttcaaaaaaaaaaacaaatttgatttttttttaataaaaaaattgatgttgtttagtgtattttctaaattatttcgataattatttgttgttttttggttgatttacacttactattttttttttatgattttcgaaaatcttgaagaaaactactgcattgaatttctgaaaaatataaaaagaacaatgagtgtgtgttaaaatttcaatacaaaaatatgttgcgtttgcattgtttttaagtttcatttacatttgtttttcatctttctaaaattaaaagttaaatgtataggcaatacaataacaacacaaatataactgaatgttagaagaaaatattgcaattacgaagaaaatttacatatattgatgcaataacaacattagtagttgattttgagttgttttgtgtgtttattatagttatttgttcatcaatcggtattgtttttgattaaaagcaacaaaaactacacaatatctacaaaagaataattaagttgttttcatattattgtgaagttttttctgtgttgtttttggaacatgaaaatattacataaaatcaagttgttttcgtgttgttgtaaagattgttatgaattagtatacactacactagttgttcaacaagtaaaaaa

SEQ ID NO: 140220 - DNA, 915 bp, Cannabis sativa
aggggctagcttctgcatcagcctgagttaaagccaacacctttgctggagcaggttttgtagttgccttctattcttctttcttaaattgtgggcaatctcttttatagtgtcctggcaacccacactggaaacatccttgccctctacactcacccaaatgatgcttcttacaactgggacactctggctaagtgtatcgggtttcgaaaccaccctgacggttgcctcgaccctggttccctcaaaatctcttattctgacctgagccaccgagtgcaaatggtgccttacgtttctgatcggtggtcgagccactaccaccttccatgaccaacagtaggaggattaggggccccaccagcaacctaagtgccttgggactcttgtgtgcactcaactgcgccctcagctcgaagtgcctttcccaccatgtcagcataggtggtgttgtcatcagtagtaatcataagatcatgttttattttcgaatttaatccattcaggtccttttctttcttgttgaaatcggttggcataatttccgaggccaacctagccaatcggtcaaattgggttagttatgtagtatttatttagtaagtaacaaacactcatcatattctccttctgagtcagctggataaattcttttcttttcccacttttgactgcctcattatatattttgcattgaacaactcctggaagtcttcccaagtaacagtagtaacatctcgagtcagagacaccatgtcccaccaaacaagggcatcttcctgaaactggaatgtggcacaggccaatctgtcattgtcggtgactcccataaaattcaaaattcttgtaataatcgtcagccactgcttggctttcatcacattgggacctcccaaaaagactggaggtgcctgc

SEQ ID NO: 140221 - DNA, 533 bp, Cannabis sativa
aaccttgactcgggacccgcacccatgtctcgatcccgaacccaaactcaaaaatgggacctaggacgtgaaccaaaaccagaccgagacccgtgtcggtgatccagatcttgagtggggattccagtaacagggcccggaacagaccagtagtcggtgtctaaatctgggacgcatactaggacgagaaccaagacgaagaactaaacccgaacccagacctagacttgggccccaaaattagaacctgaacaagaatcaccaaaccaggaccataaaacacgactaggaccgtgaccaggacccggacccagacctagaaccgaagacatgcctagcgtcagactcaaactgagactggaacttggccccggacacggtcgtgtaactagaccggaactaagacccggacctggacctaaatctaggacccttccaaaacacacacttggacatagatagggatccggatatgaacttggactcggaccaagagccagactgggatcgaaatggtggacctagatctggac

SEQ ID NO: 140222 - DNA, 682 bp, Cannabis sativa
aacacagggtaatgatgttgaactaaataactaataatatttttttaatttttaatttttaattgtatcactttttaataacgtagagaaaaactagcataaaatttagtatatgtggctcgcacgtaacttattgctagtatatagatatatgggtgttaatatgttattgatatatatatatatatacccaattatatgtataagagcaattgttctccttttttttgttgggatgcgttttgtcttcttcaatttgtggctttcaatgtatattattatatatatctaaatgatttccaattgaaaatcaagtgacatatattattgatttcgctggtgtgcataagccatctctgcttatgctatggcttgttttaggcttcctgttaaaatttgtaaaggaattgaggctgtgatggctagattctggtggggttctactggggaggctaggaaagttcattggaaatcttggaagtttctttgtcagtctaaatttaagggtggtttaggatttaggtctcttgtgcatttcaaccaagctatgctcgctaaacaggcttggcgtatactataaaaccctaattctttgcttagccggatccttaaagctcggtattttcctcgttcatctattcttgaggctgtccctggtcatagtccatcgttttcttggaga

SEQ ID NO: 140223 - DNA, 700 bp, Cannabis sativa
tctttcaattggtgacattcgtcaccgtatgcctaatatccttatggaacttgcaatacttgttaggatctcttttgctcctcgaattcctcatgggcttgggcgtgtcgaaggcaacctttttccatgtgcaaggtaaatattctcctgagtttcattaagcacggtataaatagtatacactggcacgtacttatcacgctttttctacttctttttatccttcgacaattccttaactctgtcctttctcttcgaacaagaagcccccaagatatcaattctcgtggaaatagtacctattgtaacattgttttgttttcttcctgagctagttttcaacagattcatttccttttgggcttcttcctttcgaacaaaaacctaagccctttcgttgaactcagtgacgcttctcactggacgttctcgttagtcatcccacaaatcgccccctgcgattaatggatcagtagagattcctacctgaagggatgtgagttgagtgctgtcatccaaattcctaaccctagccatagccatgctaaaacgacttaagtacgccttaagtgtctcgccaggctactgatttatattgtttagtaaagccacttcgggtcgcctatccctagcagcctggaatcgtaaagcccgcttagtgaatttggaaattagcagttgtttatgtttaattatgaaa

SEQ ID NO: 140224 - DNA, 503 bp, Cannabis sativa
tccaacaatctccattcttcaaatagacactatggatccatttgacccataaattatctttctttaccgctagtgtccatatattcttcatcaaggctgctttgttccaagtactgacatttaaaaatcccattccaccttcagatttataaagacaaattttctcccaagcaacagctccagctccaatcatattgttagagcctttccatagaaaactcctacaaattctttcaatctcagcaactaccctctttggcaatattagaatctgactccagtatgtatgtatggtgagtaatactgagttgatgagaacaaccctacctgcaaaagaaatatgtctagagctctaggttttgatgcgagatgtcattttgtcaactagagtattgcactcattctgtgagattctctttgagtagattggtatccccagatatttaaaaggaattgagttgcgggtaaatcctgaaagctgtgtcactttttggatctctggt

SEQ ID NO: 140225 - DNA, 682 bp, Cannabis sativa
atttagatttggagggtgaggaaagggataaaatggtcattaaataaataaaaagaggctagagaagttattaatagggcaagttggttggtagcaagcaaaggccaccgacgaaaaagtgattggttggacggcctgccatgtcagcttatggatattttattttgttttactttaaacaaaatcccaatcaatattagtcttctaaatattgagctgagttaatatatatttaggcaccacatcaaaaatatgggtttaaacacaatatgaatatgatagaaaaaaaaaatatacatttaaacatgatatgaaaaaaatataagtttaagcataatacgatacgatatggtacgataagtcaaaaagtatagtatgaaaagacgaatgaattagcttaaaaatacaacacattaaaaagtctaataatttgataataataataataagagtaaatcctattttagactttatattttgtaagaattaataattagaccatttgattgttaaatgataaaataaatcctgtatttttaaaaatagtacaaataggaccctaagtttaattttcgacaatttttttaatataacaaacttgaagacaattcgtaacagaaatagatatggaaaatttaactaccgttttgtcataacgtctctaggtcagattattattaag

SEQ ID NO: 140226 - DNA, 698 bp, Cannabis sativa
tattttttttttccactttaattctttaataagatgtgttgtgaccggtatccatcttattgtatctactagaattatattatttaagtatgttcttagattgtaatggaaaaataaaatattatctaaacatattgtatgacatatctttctccggataatcttctagatatatcattaacaaaaaatgctatttaaatgaataatatggtaaataaaaatcatgacaaatcacatatagcaacaataaatggaggttttaatcggaattacaagagttaattacaataaaaacgaagaagttatattactcagtaataagtaattgtgtcaaggttgaaaaagaagaaatttagtcctttaattaatcattacctacctactaggtaattgtacaaaattatgatttgctaagtgaaaaattaaataataatgataaaaacttgacaacgtgtttgatcatattcccgttcccacttaaggttataatgacaataacattttagggtgtgcttgttttgaatggaatgtgaaccaagtttaattctcttccatttgaaatagtattacaatgttagttgttacaatgtttacaatatatagtagaacctctatccaagaatatacttgggaccaagtaaattatattctaattaggaggttataactaaatagagttacactaaaaaaaattaaaa

SEQ ID NO: 140227 - DNA, 795 bp, Cannabis sativa
  modified_base (38)..(53): a, c, t, g, unknown or other
aataaatcgtaatttattaattacagagattgtattgnnnnnnnnnnnnnnnntagataccataattcgaataaaatattttcgggcctgacaactatggaactcgacggagtggtcagaaatgtcacgatggttgaaattgtgttatattggaattataccggactaggttaaaaattgagataatggtttaaatcggggtagttggtttgaccaaaatacccttaggttagtaaataacttaagtttttttgaatgagggtaaaataatcttttaccaaggttttattctattttgtcttttgtggtttctaggctgaattgaggattagtattattattaggttttaagttatttattttatttagtagagttgataaatgaggatataagtgataaactagacaaaattccaaactctttctttcttttctttctcttatttgggccatagaagaaaatcaagacgacccaagattttcagactttttcttcatctttcagccataaatctctgcttgaaactgattctaagcttaaggataaatcaaggtaacttatctcttttctatccttgtgtttttggtagaaaaagtttggtgttgtatgatttattgaggagttaggttttgtttaagtttgtttgtgttatattgagatttggggtgtatctattatgtttgtttactgtgaagtatagattgagtttgtagttgtagtttgagttgagtgagttagagtttaagaactcaaaactcactcaacaatggtgaagttgtgattttaagttaatt

SEQ ID NO: 140228 - DNA, 593 bp, Cannabis sativa
tgttttcaatttttttttctatttatttttttaatgatatatcactaacataaattttacctatgtaggatgacaataaatacttttatcaaaagtgaccgaaaattcccaagagaaaaagatctaatgaagataaaaaagtacaaaagtcgtattttttggtagcgagcaaggaggacatgacttccgtttatcattcttcaaaattccaccaacaattatttctaaataaggcatgttgtttaccgttttttaagcacgttgttgtttaccttattttaaggcacgttgtttaccttactttaaggcacgttgtttatctaatgaaatattgtttaccttattttaaggcacgttgtttaaaattttgaataaattattatatttttctttctcaaacaaaataaataatatttggaaagtccatttatttctaatggatttattatgcttttttttttttaatattgtacatatattttgactttatcttctacaatattcactaattgtcctaaatttttataaaaaatcatgactttttttagtgacaactcatatacatatatttattttaatctttatatatttat

SEQ ID NO: 140229 - DNA, 535 bp, Cannabis sativa
ctccattggggttgatcgagacttgcctataatgcactaggaagagtcacacaagcgggtcttaggtcctggacgtgatgatgagcagtggcaaccacctccaatatcttattgtgctctactaagttagttctatccctcctgagggaaataaggtgcctttggcaaagcttattcatcaagaaaattattctctttttaaaaatatatatgtatttcaaaatttaataaaaatctctaatacttaaaaaatttatattgaaataataaaattaataaacaaaaataagaggacattacacataataagagctttctctatgttttttaagatatgtgggagttttatgttttcccattttttatggatttgggcatctatttcatcttttatgttatttatttaccatattttctttattctaagtttctagtacaataatgtaccattttgttctacctcaacaataattttttaaatttgtttcctatgctacctttcttcccatccgagcgctcatgtccatgtcatttc

SEQ ID NO: 140230 - DNA, 613 bp, Cannabis sativa
agtgtcacaattagttatattatgttaatttgacacataagatacttgtatcataaataaataaataaaaataattaatttcttaaaaataaagttagaaggaaaggaagtattgattttaaagtatctagatatatttatggaagaaaattaaaacaaaatgaactaaatttttcgtaatagtaatactttttttttgcaatttctttccaaataagcaatgacataatcaactttacatgactttatacacattgtatttgaaatggctattgatggcatagtgactcattctagtcttcaagtttctttatttttgtagatttcagatgacaagagtagttgctgtcaattgtatcttataatcttaataatcaatgatcctctatagatgatttacattaagtagggacaaaattaccgttacgctttcaatgtattttattcttaaaatacttagcaacctataaatgatattttggtgagctaatataatcactaaattgagcgctctatcatttctctatatttaggtaagctcgaaggaaattatcgtttcacttctatgttcggataaaagctatagattttatatctatgattagcgctccca

SEQ ID NO: 140231 - DNA, 986 bp, Cannabis sativa
  modified_base (481)..(488): a, c, t, g, unknown or other
  modified_base (924)..(925): a, c, t, g, unknown or other
cgcatgtttttaattttaaaattaagcggcattagtaggctctcgttgatcatgacctgatatgccaactctttgtttcgcatgttgttcagcctagatggacgccaggcaaaataccaggagtcagggtaactcgatcgggtcaaatcaaggtcagggagctcagtttcctccaaatgctcggggccgaggtagaggtcccaggggcagggctcgtggtcagggtgatattaacccgccacaggctgcccaagccactcaggaagcccagaactgggaaaataggttttgcagaaatgcaagccagaatagaggagcaagataatgagatccagagattgagacagcagggtgctcctgcagtgcctgttccaaaagttctagtggcacctgcccctgttgtccaggccgaaccagtagtagcagtgaatagaatggaaaccctatatgaaaggttccgcaagcaggcacctccagtttnnnnnnnnggtccggacgtcatgaaagccgagcagtggctaactgtgattacgaggatattgaacttcatgggcgttaccgggaatgacagagtagtgtgtgccacatttcagtttcaagaggatgcgttggtctggtgggacatggtgtccatgatgcatgatgtcaccacgatcacctgggaaaagttccaggaactttttaacgcaaagtactacaatgaggccgttagaagtgccaagagaaaagagttcactcacctgacacagaaagaaaatatgagtgtgacggaatatacgacacagtttgatcggttggcgaggttggcctcgggaatcgtgccaaccgatttcagtaaaaaggaaaagtatttggatggacataatgtgaagattaaatatgacctgatgatcactacaaacgacaagaccacctatgctgagnnggtggaaaaagcactgcgagctgagggcgcagttggatgtatgacggagtcagttaggact

SEQ ID NO: 140232 - DNA, 615 bp, Cannabis sativa
aatcttattcaaatttctgagtatttttcagggcctctttcatatgagttttttcgtcctttttttgatcttctttgtcgctatttataattacatagtggacattgaattacaaagttgactgaaataattttacagccatcatccctaaaatcgtgggatttgattacatatcacgtagtgtaaatgtggtttatgatttaaaaatcgtataactatgattttcccgcttttactgggtcaaaactatcgtgtattaaacacgtctttaactgttgaatctgcagatgtctcgacagaaacttaatgatagtgatcccaatagcgagctggtgccattcttccttctgaggtcgacaatgtatgtcttgtgtcgatcacaaatatttacaaagaagttttctgactcgccagggtggtaagcctcgctcctgttagctagatgaagctattggaagtcttcccatagcgagatggtcacctcgcttactttctcttgagcagatctaacttttaaacttagtttgttcattgcatgctaaggactttcatggttgatacgtatcgctttctctggtgcctcgctattcatatttagcgacatatggtttctcg

SEQ ID NO: 140233 - DNA, 642 bp, Cannabis sativa
  modified_base (589)..(607): a, c, t, g, unknown or other
gaacacagggttttttacgtgattttgcagttaaaattctgcatagtccatgagtcaatattattcagatttctgattgtttttcagggcctcttttaaatgagttttttcgtccattttttttatcttatctgccactatttataattacatagtggacaattaattataaagttgaccgtaatacgtttacaacaatcatcactaaaattatgggatttgattacatatcaggtagtgtaaatacggtttatgattggaaaatcatatagctgtgattttctcacttttactgggtcaaaacaatcgtgtattaagcacgtcttcaattgttgtatctggaaatgtctcgagagaagcttagttctattgatctcaatagcgagctggggccatttttcttctggggtcgtcaatgcatgtcttgtaacgaccacagttcttaatcttccaggctcatttgaatgttatcttttggctcgccaagattgtcagcctcgctaatgctaatgggatggagtcttcccataacaagacgggcacctcgctaacttgatcttaggccgatcctgttggaaattattttacnnnnnnnnnnnnnnnnnnnacaagtatgttgattaacaccttaaatatgaactt

SEQ ID NO: 140234 - DNA, 624 bp, Cannabis sativa
  modified_base (232)..(265): a, c, t, g, unknown or other
ataattattggaattaggataaagcaaatattttaggatttaattaaattaaattatttatatatatattttaagatattgccttagattttaatttttaaaagataaaacggcaaacctaaattaggtaggattaagattagaaattctatattttaatccaattagaattaaaataattatagatatatcaatctaaaaaagaacgtgatataataataataataataannnnnnnnnnnnnnnnnnnnnnnnnnnnnnnnnnaataataataataatttaattttattgattcaaaatatttataatttatgtatgagaaagaattaaaatcataaaaaaaaaaaaacaaaaatagataaaaacacaaaaaaatactaaaaataaataaaaaccttcacttgaatatcattccaattagtctctctaataatttttgaatagacatcctattgagaaacatgtcttcttcaagagttgtcttcttaacattataactctcgctaactttcatactcttcgagttggtaaaattttttggattaatgatgctacataatctatttgaagattaatatagaatttggttgcacttgtagaagagaagttaatttcatctattt

SEQ ID NO: 140235 - DNA, 637 bp, Cannabis sativa
ttttatgtgtaagggcattttggtcatttagtaaaatggctaatgagggttaggtggcagccttgggtgatgacacctattttatttcagcctaattgaatgaaaaagaggggtattactttgaaagaaagcaaattaaggaaaagaaattaaattagagaaaataacatttctcttctctctctcttggtgttcggccctctcaaaccagaaggaaaacccagccaaagtctttatttttctgtgttttcagccaaggattcaaggaggaacaatcaaggtaaaccctagctcctttccttttaagttcatgaagttgtattttagtttcaagaggtgatttgggttataggagctgttagggtttgatgcttgcatagttcgaattctagggcttgtttgggttaattttagttcatagcagctggttttgagattgattgtaagttttatgcaactttgagctttgagttcaaagctttaagctttaatggcaacttgggttttggtggtttgttctgtgagttactggccggattatattgtgtatgcccttattaggtactctggaaggtttcatggcaattggtggagaattgagcaacaaatgaagagctttgggaaacctggtgcaaac

SEQ ID NO: 140236 - DNA, 644 bp, Cannabis sativa
tgtggtgaaatctgtttctttgatcttcaattgcaagtaaaagttgaggctggcatcgttgaatatttttatcggtggtattccttctttagcttggtactgtatttgcagtattgttttggtgtttttgcaccccaatgaagtaagcagtatttgtaatagctcttcgtacttgcattttgttggtatgaattctccactagcctcatagttgacataattatgttcttcatcccattgtccattgctctttatcagtactggtatacgttccattacctgccattgttcccaatattacatttacgtgtctttttttttcatattaaaacaacagtaaaacaatactacaaaacaatttacactagttgtttattagtattcttatttattattttgctgatccatataattagcaatgattctgtgttaataacgccaaaacaacattagaacaaccttgttttttcgaatgaacaattgtagtcgtttctcagggataatttacatgtaatttttttttttataaaatcccatcataaattaaacaacatcagtttatttgttttacgtttttttaacttcagatctaaatctgggttttttttttttttttttttttttttagtttttaaaaaattaaa

SEQ ID NO: 140237 - DNA, 859 bp, Cannabis sativa
ccatactgcgcaaagatattgctcgagtccctcggagacaaaaaggggatgactcggattctgactgtgaggaccgggagctgtgcgccagaaaaatttttgaggcggaactctctaaaaattttatgatgcccaaaatggcagcttacaccgggaatacggaccccagcgatcatttgtctcggttcaacagagtaatgacggtcatgagagtcaacaatgatgccatgtgcctatgctttccactgacattaagtgggtccgcggaggaatggtttaaaaagttggaaccaggatccgcggactgctggaacaagtttcaagttagtttccggagacagtttgtcgccgcgagaaaaattaatctctaagtcagtgctctgactaacatcaagcaactacctacagagacattgaaaaaattcataaagaggttcaaggaagaagcctggaaaactaagaaagttgatgacggacaacagcttgcactccttcaagctgggatacgtacaggaactccactctggaatgagtgacagcaggaaggagctgcaaacgttcaagatatccagaagagagtccagaagtacatcaatttagaagaagcccaactaatggcttacggagaatactatccgactagagtggcagggtacgtgcctggatcccaactcccgggaaccctacctccggttactccacaaatgagcggtatacaattctccgctactccaggatataatctgtgccaagccttggctctcgcatcttcgcaatatgggaacccctcaggaataagcggacaagtcccgtctcactccgctcctgctgcaagcctagccggaccttctcaaggctc

SEQ ID NO: 140238 - DNA, 589 bp, Cannabis sativa
taataataataaaaaaattaatttatattttaaaaatcaaataaatatttattattattttttacacgagagttttttgtttaaaaaaaaatatattattattattagggctcttattattattatttttgtttgaaagggaaaaataatattacacgggaaaaacgataaatttcgagtgtagcgaaataacaaaaaaacgaagtaaaataatttatttagtttggtaaaactaccagactcataaagagatatatatttcacttatcacttcaaaattacataaactttctatcttaatctctccacccaaatctcaatatatcatttgcttcttactcactctcaccacataacaaactcacacacttctctttttcacagcttacaatttttttcctcatacacacctctcacacaaaacacatatttataaagttacaaaacttgagcatcaagacaacttagagacaaagacatttcaaaacttccttaaaaagacttttcaaaagttggcaaccaagatttttttttttttcataattaataattacccaaaaagaaattgtaactttacaaatatagataa

SEQ ID NO: 140239 - DNA, 1350 bp, Cannabis sativa
tataaatattaaagaaattaacagatttttaaaatataaccataatttaaaaataaaacaactaatttttaaatttaaacttcaaaatatctcaaactaatagtaataatctattacaaaaatttaatattattaatctgtaaattttatatttaagtttaaatgttaaaaataagattttatttagatatttagggtttgaacatcaaaaaatttaaaatttggtgaaaaatcacctaaaaatcaaatttttggtgaagatctcccagctgcccacgaaacaggctacaagcagcccattccgcgtgcagggaaaggggtggtgggttaggcacaaagaaatgaggacatttatagggtatgtgagcgcgcggtgtagcatcctgggtgtgtctgaaggagtgacaagctcgagttcagacaaggtgtgtccgagatatcagcgcgcgcatgcaccttgtttgagtgactggtgcgtgcgatgcatccatctcgacaccacttggacccaaaaatttaaactttcatatcttttacaatttttatcggaatggagttctgtaaaaaccaaaattgtttaatttttcacaaggaatccaaatatattaatttcatgaaaaattattttaattcacatacaatcataaaatcacacattaactaacatgaacacatccaaatcatcacaatcatcattttaaatctatatttcatgaaattaaattattaccatggctctaaggccagttgttgggatttattttactagaatttaaatttactaacatgtatgtttcattaacatcctaaatatgaatatctttaatatgatgaaattaaacacatgagagtttagaaaacctgacattgatgcagcagaataataatgactcctctcgctcagatctctaacccttgtttctttctattgcagagtaataacaagatctgagtttggatctctttctcttcttcgagttggttaccaccgtcttttgcgctatgattgagtacttgacttgctatgtgtgggcatggtactctatcactgtggctcgaattgatgaagaaaaatgatatggtgcgaaatcactatagaaaagagtctctcatctaccagttgtctgatagagttagaaaactagatttggtaggttgaagggttggatgagatgagagcatcatgtttcttttatagtatttcaactagggtttaagatttaattatatggattaaaaaaaataataggcgaaattcacactaagtggccagccactaatgggcctcactagttataattttaccacttaatttcaaccacttattcttcttttaataatgccatattt

SEQ ID NO: 140240 - DNA, 833 bp, Cannabis sativa
  modified_base (452)..(454): a, c, t, g, unknown or other
taatacaatctttattattcattcaagtttttaaattttttgtaaatatgattttgtattgtgaagattattagaattttttatctctatatgtctaaactagtaaatatctcgcgtttcagagatatataaaatattttaaattatatataaaaaataaattgtatattttaattaataataataattacttaataaaattatatttaaatgttaactttattattaaaaaaatttataacataaatacttaaaatattaaatttattgttaataaatattaaaattcaaaaaatagtaacataaattctggttttatttttattttgatatgtgtattaagttctatgttcgaattttattgagtgtgtttttaatatttgagttttagtgttttatgcttttaatgtttgagtttgtgtttatgagatctctttttatttatttatttnnntatttatttttatagattttgagagcttgaaatttaaggttatttatattgattattgtgattaaaagtttgatttttcatacggaaattaaagtttaccttttcatttcgttaattgaaaaatattagtagaatgtttatggaatgagaattttgaatatatgaaaataaaattgaaaaatagcatatcgagaatcaaaatttattgttagtctccttacaaaaaaaaaaattattgttaatctgtaaagataatatggtaagaagaagatggaaaaattaatttttagttcatttaaatatgtatataattttttttttaataatatgaacttattttaattaatttttgttttttaaaattatttttttaaaataa

SEQ ID NO: 140241 - DNA, 630 bp, Cannabis sativa
tactccagcgggagtaaggaacttcattgtgagatgatagatcgacatcacgatcttcatctctttcaagattggtcgaccaatcacgacattgtattccgaatattggtcgattacggcgaagtcagccattgacttggctactacaggggcggttcccaaggtaatcgagagtttaatcatccctttcagtgcaatgacatcgtcggtaaaaccgtatatactcgacgttacaggtcgcagatccttctcatgcaaccccatttgcttaaaggcttggaagttcaagagatttactgaacttccattgtccacgagtatacgatggacgttgtctccgccaatattggcgacaatgaccagtgcgtcaaaatgcaggtgatggacccatctcgcatcactctcaatgaacgtgatgtcatcgcattctttcttgaataacttctctggccgctcactaagattgttcacgttggtgagccgcttctctttagcttcctttggatatcgctcctgcgacttctgggagtgtcctgcgatatggggtccacctatgatggtcaatatattacgaggcattcttgaaccactcgcgttttgattttcctctttgtcatccgctcggggatg

SEQ ID NO: 140242 - DNA, 968 bp, Cannabis sativa
gaggtgatgactgatgttcggccaatctccttatgtaatgttttgtataaaataatttctaaggttttggcgaatagattaaaaggaattctgcctttggtgatttctgacacgcagagtgcgtttctccctggtcggttgatatcagacaatatcatggtttcatttgagataatgcattatctcaagcgtaaaagaagagggaaagaaggatacatggctctgaaacttgatatgagtaaagcttatgatcgagtggagtggaagtttattgaaaatttgatgcttcatatgggtttttgtagtcgttttgtgtctcttgtcatgagttgtgtctctactgtgtcgtataatgtggttcatggtggacattctattggacctatcatccctggtaggggtttgcgtcagggagatcctttgtcaccttatttatttctgatttgtgctgaaggtttgacagctctcctgaaaaactatgagagacttcaacttattactgggtgtagagtggctcgtggggctcctgcggtttctcatatgctgttcgctgatgacagttatgtttattgcaaggctaatcgacgagaagctcaacatgtgattcgtcttctcaatgcttatgagcttgcttctggtcaaaaaatcaattttgagaagtcgtcagtatttttcagtaagaacacgccagtggatatcaagagctttgtagtatgatgagactcaatgaggctagtgaagatagtttttatcttggcctcccttgtatcatgggaaggaacaagaacgctatccttggttttttgaaggaaaagatgaaaaagaggattttcagttgggaaaacaaattcctatccaaagcgggaaaagaggtgttgattaagtctgtggctcaggctcttccaagctatgctatgagcgtgtttctcttaaccaaagaaatttgctctagtctagaaggtttaatg

SEQ ID NO: 140243 - DNA, 973 bp, Cannabis sativa
taaatattggggtctacatttaaatttaattcacaaataacaataaaataataaaaattagtgctaattgcctttactaatccataaactagagcggtcattacacttttgcctctttagcttctacaattgattctggttttctctccggcgaagaaggggtcgccggaggcttattggggcttggccggaaccttgaaatctccggaaaatccattaaagatgctttctttgatgattcagagacttttgaaggagacccttttgcctctttagcttcaacacttggaatatcaactaaaattgattctccattgttgtctggttttttgccgtttgatgaagctttttccttcacttccatcaaaaccctattaaagcaaagaagaaaaaaagcttagtttggagtaatgataaaatggaaactgaaatgcccagaaccatattctgatttattcataattaaaaatcaaacctttacagagtaaatctttgggaacaaaacaaagttctgaactttggcgcgaaaaaaatagtatttttttttatttaagcgtataacttgggattcgaacttccaacaaagactagctcaagttttcaagcaaaaaaaaatagtatagatatgataaattatacactcaactaataaagcttctttacaagttttaatgatgaagaagaagaaaggtaccttttttttgcaaaattatttattaaattttttgttttatcaaataataatatagattatttattttcttttttttttttttctgaaaggagattatttattttctaaatttgttaaaataaataagattttaagattttaagtttaagtttaatttttgataattttttttaatattacatacataaaaaatgtaactaattttattattaataaatttattttgattaaaaaaattagaattttatttatattaatttataaaatataaaatttatt

SEQ ID NO: 140244 - DNA, 1353 bp, Cannabis sativa
tttcccattgatggtattgaacaaacttaacaataccatataccctacgagcatgcaaatcataattcctttcactttcaaactttcgggtaccttaaatattccaatcacgctcattatcacgaaagaaaaatctagaattgacagcttgagatagagagatattacctagagaggaatccttcataggctgcttgcctttcgcagcagtagatgccttggttgctgaagatgcacgaggaggtgctggagcagatttgggcaaaggaggctcgggttcgagttcagtgtcctcataatcagtggagactccaaagtctccaggaagctctttttcagaatggatagacttggattttgtctcggatcgaagcaacagagggatcctccatgggttcttcttcttcagaatttgaagaaaatgagggggggattcaatttcagcttcttggctagaggagctagtctgtcatggcttcgtttcgtgcaaagttccttctcgagagttgcttgctgggcacgggtgcgagaggaaggacttgttggagttgatgcagcaacccccttccctgatgcagtaggaggcgatgcagtagcatttggaggagaccccttcgaagatgaagacgatgaagtccaacatttgtagggtcgcatagattttctaaccacttgtttaggaattcatttcggcttgggcttcacgggctgagattcacgctgaggaaacgatgaatctcctgggtttgaagcagttgcagcagcagacaacaagattggagcagcaggagccctaggttccaccattttccttggatgccctaggttcttagtcttagccatgaatttctgaaaagaagaatgagaaacagagaagcaagaacacaaaggaatagggatcgggtaggttatgaaaataaatgacaaaggaagttggtttatataatcatgtgagagagaaacacaaaaggaaaccaatttaaaaaaaaaaaaagaaaagaaaagagtaactaccagcccacgaacacaaaggaaacctcccccttttttcaaaattattattttttttaaataaaaaaggaaactagaatatcaatgacaaagtacaatgaataagatatcaaccttaaaaacgaaacatatcagaataaaccaatttcgaataaatgttgaaactttccaaacaaagcacaaaattttcttagcccatgattcaagtcaccaacgcctccctctcttattttttttttatttttatttttgaaaaagtgaaaataatacaaaaaaaaataaaatatgtacaataaatataaggtattctaaagcaagcaacttaatcaaaattcatcacaa

SEQ ID NO: 140245 - DNA, 1622 bp, Cannabis sativa
cggaataatgtgacgaaacctagcagaaagactaaatttttgtaaatacaaaagttcagggagaatttttaacgaaccgtatactttagggggcatgatcagatgtgtcgaaagttcagaaggtaaaattactaattattctttaaaaacataattgggcattttatcttaataaaatattaaatgcaatatcttaaaaattaagttaggtatatttttttaggaaaatagttatattttttaataaataataattaaaatataaaatatggtattttaaaaaataaatttagggtttttttgttaaaggattttttgggcttggttaggggatttggatgtggcccttattgccacacccttgagtcgatcctgtacttatattgtaacacactactagtttagacgtattatcgtaattttatattaattatgcaatctattgttaatcaacgggtttattaaaaaccgtaatttattaaaatctttacttaattactcttcaattgaagataaatatttttttacataattgggatcccatatttaaaatatctgcaatcgtaatacaaaacattcgatacaaaagttgtcgcctagcgagcattcaaaatacagcctgctatcccaaagatcgtacgctttaggtttaaccgtcctgacatgtacaatctttatccgctcgcactcactgttgttcagccttagctctgcccttatctacacatgcatacaataactttgagtcaacagactccataagaaaatcataatcataacatagatataatttgaattacaattaggcccccatacactcaaccatatttcttccccacatcctacacagtactgagtcaagaacattcatatggaagtactatcaaccataatattagcctatactcggtactctagtcgtaccgatgtgatagcatcaatgtgtacttatgtcaaacatacattcatcaatagctaatataactctacgtatactaatattactattctaatgtaatataataggcgatcataaacatgtatattgagcatgtaatcacatatacatatcattatactaatcttacctcaattctgaattcatgtgggccagtcaacctgagtggaactgctgctcgacgatttacaggcccttaagtcacaatatttataaaattgatgagtgatacactacatcactttttagggacttaaaatcaaaactaaaagtttctctatccatggataacatggcaataccctaaatatcgtaaaaataggaaaatctagggtgccctaaactgccccaactggtagatcggttcccaactgaaaaaccattgctgtggggtctgcttggggatgaactggtaaaccggttctacaggatcatattgaaacggttgaccggttcagtacaggaacccccaaaaatcttctagaccaatcaaatcgaccccaaatgatcccaaaccttccagaatacctaaaaagaccacaacaagtataactcaagcaataaaactaggtacaaaccccaaaaatcaaatccaccataagctcaaactttgaccaaaaaccacacaagcatccaattaagtctaaactagctccaacaacct

SEQ ID NO: 140246 - DNA, 852 bp, Cannabis sativa
agcaaggtggaggaagccacctgggaattagagtctgacatgaggactcaatatccagagctattcaggttagattttgaggacaaaatccttttgacagagggataattgtaatgaccgtgtttataatatggattagtaaagacaattagcactaagtattgatatttttataattatttatgaatttatttaattttgggtcccattattagaaatgggcattagagttataatttctcaattctgtagattttattaaactctaggagtattatttgtattatatatgaattatgttatttttacaatttttgctcggcgataacaaaaaatgcgacggatgactattttaatcacatggataagtttagaaccttatttcttattgagatgtatattagagaaaatagaatatcgagtttaagcggggttatgatttttgaccattttacccctaagcttaagttagcctaaatttaagcaaaaagggcattttggtcattttgtcaaggggcttaggtgtttgtttgggagaatggcatctggccattatgtgagttttcagccaagtaatgtttaattaattaatttgttatttggaaaataaagacaaaaatcattttgacccaaaacacatttcttgaactctctctttctctctttcggctgaggcaaaactagagggaaaccatctccaaaaccttgtattttctgagtattgagcaagattcttgtaattttgaagcaaagataacccctagaacttttattctttgtttttgaagctttgaatttggtttgagtatgaaactttgagatataggggctgttagggtttggttgtgttgg

SEQ ID NO: 140247 - DNA, 575 bp, Cannabis sativa
cttcttacctgtaccacaaaacacccatgagtcacagtgactcagcaagaaaagctattacataaagaaaagtcttggaaagtgatagttggtttcattacaacagattatacctaccaataggtcatactctttcaacgtacatatacatctcaacatctatacgaacaaccttattacaaaattaaaagtgtttgtagccatatataatcaacaacatctgtgtttcgtaaaacaccctaatcaacaaccttagtgtttcgtaaaacaccctaaggaaacactgaaaattttcccctatagcaaaccggtcgaccggttctgttgcaccagaaccaaccggtcgaccggttctggcagggctgaaaacttcgaatttccttcctccaaaatcaatcccaaacaccaccaaagcaacccaaaagttccagaacagtacaatatcatcaatacaacatatccaaagcactagaacgtatcaattcaatatccatttcattttaccatattagaaccaagtctaagctcttaaatcaacaaaattccaacttcaaaatcaaacagccatgaatatc

SEQ ID NO: 140248 - DNA, 612 bp, Cannabis sativa
acaatctcaatagttcaggggcatgatttggtacatgttaaaattcagtaaaaaaaaatactaattaagcaaaattttaattagccttgaaaacttaatgtgatcacacatgcaaagcacatgcccaagactaataaaataattattaaaatttctactagtcgtttcctaatggtctaaccaaacattctacgtaagatagtattaataataataataaaaaaaagctattcgattgttttaaatcttgaagttgacatttttttgataaaggtttatataaatgtaaataatattttgattaaaaaatatgatatgatttaaatttagattttgaaaaatatgatagaattgaattagtattttttattatttaaattaataatttttatcacctcatatatataaaataaaataaatgaacaaataatatttgttatgcctattaatcacaatttttacaaatttgtagtaatcatttataatatgtatatatttatgtaattatgtttattgattgttatcaatattttttacgatcaatgatgattattgtgatagtcagtagttccgtgatccgtagggaaaataccgggtaagttgtgcaatctc

SEQ ID NO: 140249 - DNA, 1055 bp, Cannabis sativa
aagacgcgaacccggaccaagacttgcgccaagacctgcgacccaggacctgtgactcgggacctggaccagatgcaagacccgtacaagaacccaaaccaaaacccagacccaaactcaaacttagaccctgagaccggaaataggaacaagaaccagaataaggaccctggaacaggaactggaccttgatccaaaaccggatcaagacacggaatcgaacacaacccggacctagactgggatcaataccaggacccaggcccgaacacggacctaagcttgcacctggacctaggacctaggacccgtgacccgagacctggaccagaacccattcccgtactagaactcgaacataaacccagacccagacccagaccaagacccggacacagacactgactgaaaactgggccaagacaataaccgagacttaaacttcgacccagacccggactcgtaccaaaactcaaactcaaactaaggactcagacccagacatagatcaggactcggacttagacccaaactaggattgagacctaaaattggactaggactagaacttagacttggaccgagatcgggacccgatacttaaacgcgggacctcagaaccgaacagttaaacaaacccagaccaggccaagacctgagacaaggaccagtttcgaacatggactgagacctgcactcggactgggaccctaacccagatcgggacctaggacccggacccatgacttaggcccaagacccaaacctacacccaaacttggacataagacccagaccaggacccaagacatgagctagaattggaccaggatctagatttagacccgggactggacccaagacccgaggcttgaacccgacccatattcggtgtctaaatctggtaattagacctaggctcgaacctagagccagaccaaaactcaaacctgtaccaaaactcaaaactagactcgacatgtggtttgtgtttggatttgggactaagactcagacctgaaccaaaacacgaacctagacctaaaccaggactc

SEQ ID NO: 140250 - DNA, 904 bp, Cannabis sativa
  modified_base (54)..(55): a, c, t, g, unknown or other
  modified_base (428)..(435): a, c, t, g, unknown or other
  modified_base (755)..(755): a, c, t, g, unknown or other
cagacaccgactagaggttttgtcaaagcgctgggtccagatccggatcccaanntcgggttccagtctggttccattttttgtgctgggtcacgagctttgtcttaggttcaagttcgggtctgggtcagttactaggtcgcgatcctgattctgggtccaggtcccggatattgtgtgggtttgggtcctgatctaggttcgggtctgagtcctagtctctgttcgggattaggtctctgtctgggtttttatctgggttcgggtttgagtttgggtttgagttcaggtcggagttagattcctggtttgagttcaagtccatatcaggctccgggtgtgggtttgtgtccttggtcttggtctaggttgggtccgagtctattgttccaatcccgatttgactctggattaagttctgggtctannnnnnnngttctgatcctggtctaggttcaagtttgggtccgcgtccgggtctagcattgggtctgattctgggtgtgggtttgagttaggtttcgagtctgtgtccgggttaatgtcaaggtttgcaccccgatctaagtgtaggtttgggtcaatgtccaagttcaggtctcgagtgcgggtccaagtttgggtctgggtcaggatcttggttcagatctaggtttaacatttcgatcccagtctcagtctttgtccgagtctaggttcgtatccggatcggtatctcggtctaagtctctatttgggatcgggtcccagatttnggtccaagtctgggtctcagttccagtcttggtacacgtccttgtccgggcccgtgttctagtatcagtttgggtctgaggctacgtatttgttcagttctatgtttgggtctgggtcctggtcacggtcctagtcttgttctagggtc

SEQ ID NO: 140251 - DNA, 652 bp, Cannabis sativa
cggttatataggcttatggtcccctcactagttgagataatactttttgcaaactcagttgattttaattaatcaattataattctaaaattagactaggtcttatttatgcaagtttctggttggtagcctgataggcccttcatatcagcacagtggcctgtcttgttcggccgttaatggctgcttgctgagccctcaacgtttccatttctttatccctccattcagcaaacagatgtcttttctcttcaaatgcaagatttaccgcaacacggagttcctcgtgatcatgatgcagggtattagtatgaccatgcatgaggccaagagccgcacggaggttctggatctcagtgtcatctccaatagtttttcaaacatttgttgctggggtaactctagtattcggaataccctgattggctgtcgaactagcatttccagtctattgcacaccaggcgcgattccactcaaaggagtcgtcacaccttgacctacagttggcggttgtttaggatttgtagctggtggaacccctgcattccctggattttgtagtgcgggatctactgtcggtggatttgctggatcaaccacgtctctacgagtctgtaccaccattgcgtttatgattaaatttgaagtaaa

SEQ ID NO: 140252 - DNA, 1006 bp, Cannabis sativa
cacttgacctgccccaggcggtgtgggattgcacagcttactcggtgtttccccttacggatcacaggactactgactgtcacacaaggtgggtataggaatcaaagcgcaagcagtatgcatgtggagagagcattgagtgcatttgtaagcaagaatttgttgggtttgaaaagaagtgtcacagtaaaaacacatagttgtgtcatctgatgatcttttataaagcaatagaggaccatggtgagcatggagaacatgatcaaattaagtattgtggcaactcagcacatgctctatggagagaataagcacacgtatgcttgctgcaatcatagcatatttgattgttgtcgattataagctcacataggctgcagagttgagctcttatgtacactcttcctatatcatgagtttgtctcaaacgatggggatgagtgtggtgtttaaaataacgaggcataataactctctcaattttctcttcttcttatttttgtgtgtttttgtttgggtttcctaatatatgggaacaatgattgcttatatatagtaaattaattttattcaaaaaagtattattatcatcaattgagttaatatatatatattggttaaatcgatcattcttttcttcagaaatatttgttcccataatttaaccaaaaagaaaagaattattttctttttgagcgtgtggttattccaagtttaatgaaagaagcaaagtggttattctctgcctcgaatcgaaatgaagaaaaacaaaaagtcatcactactgaaaatattaatgaaaaatttactaaatagataaaaaaaattttaaaaaattataaaaatactttaacacgaaaaaaaaattatttttattaattgaacttttttatttacaaagatattttttcagtaaatattataaatcgttttttagtttatttatagttgtattatagttgtttttttttttttttgacagttgtattatagttgttatgaagtt

SEQ ID NO: 140253 - DNA, 993 bp, Cannabis sativa
  modified_base (31)..(62): a, c, t, g, unknown or other
  modified_base (865)..(877): a, c, t, g, unknown or other
attgttttagatattcatatttaggatgttnnnnnnnnnnnnnnnnnnnnnnnnnnnnnnnnggtaaaatatattccaacaacctcttctttaatgcatatagcatcctctaagacataactgcacatgagacaaacaatgatgtcagaacaagcatgaaccaaacaagtgcgaacaaggttaagaacaaaataaagtaccctacatgtggacaggggcaccttctcaaacaagtaaagaaggggcatcttcattggaagagtcttctcctcctactcgaccacaatggcctttccctttcctaccacttgggcagaagattaagcaacattctcgagaccgtccctgatcctaatggctcactcaataggtacttggtcactttggggagccttcctcttcttcttcttcctctgaacctcttgttcagatacaacctctccctcccaggctaacataggctctcctactgcctgctcgatcctttgcccatgatcagacagatatagcttgtacttgataaaattggcttcagtagccaggagagagatgttctgcttgtttgagggaagttggagaatttcttgagctctctttctgagttccaaggtgaacgaaggtcagcagtaagacaaaatgtgttagaaacttgtataattggtgtccatatacaagtttctaacacattttgtatatgtgaaaagggtttcagatgaatttataaatcacatagacaagcaattgataaggtgaaccaaagaacttggaattgcactctcagtcatatagaacgctctacatgttccacgatatagatacactgtaagcatttaaccatcactctaatctcaataatcaaagatcnnnnnnnnnnnnnttacatcgagtagggataaattttacagtttcacccctcagtgtattttatccttaaaaacacttagcttcctgtaaatgatatttcagtgaacaaaaatataatcactgaaacaa

SEQ ID NO: 140254 - DNA, 819 bp, Cannabis sativa
ggaggaaggagtatagccaatattacttcaatcaaagtttcttaacccatgatatgtataaaagttgtataattgtaaacatctatttgagcaataaaaatataaggaactttaactatattttaaaacaaaatgagataggtatccgttagatgagcttttcggtgccacataggcgcatgatcttacacgtgtacaagatgatattcaacattcatttatattctttatatacataatatatatattatcaaggaccacctgaagtaaagtagtctctatcttcattgtatttctaacacgtgtaaccaattaggatgttccatcaacattttatacaacatgacaaactctccagtgagagccacaattacatgaagttgtagtttgaacttttgcttcacatggataaggatattggtccctcacttcagtgccaaacgggcttgcaaacatctaagggtattattacaatagaattgaagtaatagactgactttctcttcttcttcttccatttctttcaatatttgaacatagtacttgaaaatgaagagtagcaaactctccagtgatatttactataaccagaagttactactctagaatggtagtattctgattgggtgtacttagattctcaatcctaaaaaaaacaaaagaaaacactactaaaaaaaatactacaacaacacccaaaaattaaagaacaacaaaaacaagcataaaaaaatagaacaaaaataatgaaatcacacacctctacaacccttttcccaattatttcctcaaccacatctgttgattgcacaatcttta

SEQ ID NO: 140255 - DNA, 859 bp, Cannabis sativa
gagggagagtaggatggatggagagtgtagaaagaatgaggaggatatttgttctcttttatgtttttttggtgttaagagtatatgtggaaggatggagagtaaaataaatattaaaattaccattttattatttttaatacaagtatatattaattttgaaagggtaaaaatatattttttataattttttttgtatttttcttgaattccctcatgttaagagggattaaaaatagtgtgtttagagggagaccctttccttttatctctcctcttccttcttttctccctcttgtcaaataaaagaattctaccatccttcctatccctctccgtccctccttctttccctctaccaaacatagtgttaaattttttacacctaatactaaaaccatattaagataaaaagagtagttatcttcccatttctcattctatctaaactatccattatactacaacaagtaaacaaaataagtaaaaaaaaaaaaaacaatgcatgataattaagaacaaaaaacttcaacttatgaggacaacgttaactttgaaaataaaacgtttatagttagaaaagttagaaaataacagttagacctcgtgattattacagataacaatatttgaaatagaaaataaatcaactaaaccactaacatccttggcaaacgtccacctaactacattgtggctacaaagttacaaagataaaagaaaaattataacttaacaaacagttcgagaggagtttatattaatgcacataattattaataccccaagtagaggaggctcattttaagtagtgtttggtttacatgaatgagtgtaaaaatggaattgctattcctaa

SEQ ID NO: 140256 - DNA, 553 bp, Cannabis sativa
  modified_base (67)..(68): a, c, t, g, unknown or other
aacataatagtcaagctttacccataagcggttgagctcaactcaagacagttgagctttatactannattacaagaatttggagactacatctccaccatgaatggttgagccctacttcgtatagtcaagctctacactaatatttcaagacttttgagactacattggtcgagctctactaaaagtagtcgagatttacactaacattttaattataatctcaaccatttatgttcgagctctactaacaccaatcatgctatataatatatcaaatagactttggaaatctcaaacatatttggtgaagctctacccatttaccgcatcatttggttgagttgttgttgtacatgtggaaggagttggttcgttcaaaatcaactgtcgttggattggttgttttggatctacaatacttggtattttgcttcgtggcattgaattaccaaatatagtatgttacagttgatcttgggtgattgagcaattgcataacctaaaaatactaatcataagtaaatatgcataagagccaattggtgcaaaa

SEQ ID NO: 140257 - DNA, 605 bp, Cannabis sativa
ggcagcctttaatcctgggtttgaatgcttttctattcttaatgaatttcataccttgtttataatccttgtgtaactttgttcgttttgttctttatgaaatgctttgtacaggtataggtgcccccaagtgaccgcgcagactattgactcttggtcacttgttttcacaagtatgctttttgtctgttcggggctttgggtacgaccagaccttttgtacacatttaatgataaatttgtaacatgctaatgaacttgactcaatttgaattgaagtaaacattgaagctattatgttggaaatatgtctgttatcgtagtaacttacattgaagctattatgttgatctaatataatctttagcttagcataaacaaaacaaattttagaaaataaaaattgtactttcatgattggtcatccgacctgagaattttttaattttatttgaacctttgggcgtggtctgcccagaaggccattcacttaagagtaaatgttcttttgtatcgtacttgacatggtcctctgacctggtactcttactggtagaattttattaagtgttccccattctagtaccttggtactagaactagtt

SEQ ID NO: 140258 - DNA, 2134 bp, Cannabis sativa
  modified_base (847)..(855): a, c, t, g, unknown or other
  modified_base (1375)..(1377): a, c, t, g, unknown or other
  modified_base (1464)..(1464): a, c, t, g, unknown or other
atagtgttagatctcgtaagataagtattttgtaaatacgacatctagttaactcatccctaaagatgacaacttagactagtgtttacaatatgaaataaagaagaagtttataaaataagaataactttgactctcgtcgaaacaagacatcattggattcttattttaatcgaaattatcctttagttttttctcttagctttttccttaagaaattgtttaaattaatgtatcattggacaagaaagtttataaatcatatgcttatgatgtcactctattttcttttataaagatgagtgatgcagatgactatattcaatattctatcttgtaatgatattcctcgatcttagaaacatctcctacttatatatgcttagtaaaactacttaaacttagagctgaataagtattttaatggaggtccaagatagaataattactcaagaaatatttggtataaatttatttccttcactttaaattttagactccaaattaaaattttaaatttcagtttctagaatacattggacactacaatataactttcacaagctgttaatatctattttctatcaatggatccaaactgtatgttaaatgtatggattatgagttttatattatgtgactagaatccacttgaactattctaagaactctttgttgtcactagacataggaatcatcaaaagaccacaactaaaatattaaatctatggcatttgcatcttgtccatagtgtttttgacaagattattctctatgaagagaaaacataccaatatccacttggaagtatgtttatttttattcgaacatatggatgtacattcannnnnnnnnatgagttatcgttaaattcttagacgattactatagattataccttgaataaaaaaattgaaatatttgagaaatttcatggatttttagcaatggtaagtggttaaagaccttgcgaactgacagtggtggagaaatatttgattatgcagttcaaatatcattaaattgaactttgaattgtattcaaacttacctcctagaactttgaagtcacatattgatgaaaaggtaaggtctatgattagttactagcagctacatgagtccttctagggaaatgccttagatatagtaaatgacattctatgtcatcccatctaagtctgattccaagaaaacctcaaaaagatggaattgttatatacttagtgtacaccattactagattcatggatgccctgatcatgaacttaagaaatgttagaactattaactaagggttacatatttgatagctattctaaagtgattggggtggaccatcttatggttattaagataagaaagtgtttgtttnnncaaatactacttttctaagaatgtaactaaatctaaaagcaaagtagatgagatattttttcaattccaaagtgttctatcatcttnttctatataagatggtcccactgtctctgttgtattgtcacaaccgatgaggtaagtaccactaatgttcttagacagaaagtcacggtacctcattgtagtaggagggtttcaaggtacccaccctgttatgacttggaagaaacttatgacaaaattcattgttaatttaaaaaagcaatgaataatcagaataaggaactaagaagcaaagccaagagaactatagttaaaatcattcatatggagcaaccaaaagttttctattacaagttgaagaagggaaattgtgataataagtctattcaatgggcttaacaaaacttcttgatcctagtatcatgggtttgagattatttaaacatgtggcttgtggtattcctcgtaatttacttactctagtgcaagcaacttactttagtaagaaactagagtatttttcgtattgaactctaaaggaagtcttttggctcctagacatagagtttatttatctaaggaaaagtttcaactattccaaaaaagatataggccaagtaaagaattccttaagcttcaacaatgagagatctcatgtatactctggtatgcattagaccagacacctattgttgagtgggagttgtgagtaagtatcagtttaatcaaggaaaggaacattggaagacaa

SEQ ID NO: 140259 - DNA, 810 bp, Cannabis sativa
tatctccaaagtcattgtcctccgctttcaaaaagtattaccatttgtcgtctctgaaacacaatcagcttttttatccaacagactcatcactgacaacattcttgttgcttttgagcttatccattgtctcagacataagactcaagggagactagaattttttgctctaaaattggatatgagcaaagcgtttgatcgggtagagtggaaatatcttgaagcagtaatgttgaagatgggctttgcttctaaatgggtgtcactaatcatgaattgcatttgcaccagttctttctcatttttactaaatggggaagttgtaggccatgttcaaccatcctgagggttgagacaaggagatccactatctccttacttattccttatttgttctgaaggactctctcgacttttgcaatatgaagaagctgttggcaatttagaaggtttacggttaactaggcattctccatctgtttcacatctcctctttgctgatgatagtttgttgttttgtcgagctaataaccaatcagccattgcaattcaaaggactcttgacacttatcatcaagcatcaggtcagatgttaaacaataataagtccgtgatgtccctctctccaaacacagctgatgtcaccaaaaatttctttgctcaaacgttgaatatgcctatcacggaatgtcatgaatggtacttgggtttgccttcttattctggtagagacaagcaagaactattcagccatatcaaagaaagggtttggaagcttcttcattcatggaatgaaaaaatattttcgat

SEQ ID NO: 140260 - DNA, 937 bp, Cannabis sativa
gactttaattttaataaaaaaatttctagtccgtatgagttcttaaaaaataaatttttaaattttcaatagtttttcacatgtttagattgatctatgatactatttgaatataatgatgtatatagaattcaaaataaacacgaaaaaagaaaaatgaaataaaacaaccaacggatcaaaaactctaatttttcatgtttatatatacacatatataatgtatataccgcataaaaatatcataaaggtatgaaagagagtatcacatacaatttttatgcaataaaatcatatattaaacgtataatatatataaacatatataaaaaaaaatgtatatacgtatatatatatacaacaatacttacgtatatatataatatatataaataaaattaaaatatgaatatatgtatatgtatatacgtagattgaattaaaatgtatatatatatgatcggaattatatgaatatgaatatatatataaaatatatataaattaagaaccaatcatataagtatatatattatatatgaagaatatgaatataaatatatatgtatatatatgaagatgaatacgaatataaatatgactatatatatatgtataaaaaaaattgagtacgaatatatatatataatcgaaattatataatatgaaagtatatatataatatatataatttatattataaatgaagaaccccgtaaaagtatgtatatataaaactcaaaataaatcaaggcagagatatataatccgctctgataccaactgttagatatttatttgtacaaactgaaacatatgtatgtgcatataacatgcagaataaatgaacatatacactatatgaatataggattgaaatacctccagccattgaatcttagagctttagtctcacataagctttatttgcaaaaga

SEQ ID NO: 140261 - DNA, 527 bp, Cannabis sativa
taaaagaaaaggggattaggaactgaaaaaagaaggaccctcaaaaagaaatcttgactgttttccggctaaaacagtttggcgccgtctgtgggaagctttcttttttccagaaaaagaaccttttcgtaagataatcaacaaaagatatgcaaatgaacaggaggatctgactcttcaaaataacccagataaccaccttggagcaccggcgaacactggcgacacaggcgaagacgccatggacccaacctaccatggtgagagatcctggagaggctgaaacaacaagaagggaaaatggcaacccaggaaatagaaattgcccttcaaaaggaacatatccaaaggcttgagagcgagaatggacagatgaaagttgtcctcgaagggtaccaacgatcaccacatgcgaaagaaactggtaatcgccagatgggaggagggattgagaaggaaaatcacactgataataacgacctctcaggcaaccatacccgatgcatgcatgaagaaatgggagaaaa

SEQ ID NO: 140262 - DNA, 708 bp, Cannabis sativa
cttcataaaagtacttaaacctagaaaatggatagataatataagtattcaaacgagaaaattaaaaatataccaagtgataaaatccttaaggtatatttaaggttgcttacggcagattataactgcaattgcgaggcagaattgacaaccgctcgaaaattataaggtttggtagattattagctacttaaacaagaagattacgagcaatggagaaacccaaaagtgttgtatatttgatcaaaatatagttatttgcactgtgaataaaaacgcaagcaaatacaattgtattgagtttaaatgaaaacagtacaaggaaattaagatgagaaaaacctaagactggttacaaacttgtctttacaaaaatgacactaggggcgaaccattaagtcattctcctaagtagaggatgagagagaaagaccgtctacacatagcttggagaaagaccggctacacatagacgagaaagaccgtcttcatgtagagggccttgatctctgcacagaccctattctcctcatcattagaagatcccatttcctgaagcctcaagaaatttctcaaaactggagagaggctgacgcagagatctcctggcacaggttagggtgttgggttggctggattctctgaaagaaaccacgccaacttccttcccagatccacctgaaaccatgccaatcttcctttggaatt

SEQ ID NO: 140263 - DNA, 633 bp, Cannabis sativa
atgatttaggcagtttttaggcagtttgtttggggcagtttgtttggaagtttgtttggatagtttgtttggatagtttgagcctttcaagcctaccataaaatgaatatccttagtgaaccctttgagcctaaacctgttttgtttattcaccctttgaaccaaaagatgtatccgcactgttatttttgtcttcaatacattttcaatgatatcataagctttaaaataagtttgggggagcgaaatacatagtgtgtgaaaggatagaataaagaaaacttgtgagattgagaaaggtaaaagaagaaaaaaaaatattttgtaaaatcagcatcacttgaaagaaaagggaaaaggaaagataaatgtgactgaaatgagaaaaatatagcaaaaatttcagtgatgtcgggtgaatgaaaaaaaatagagaaatttttctcattcgtggttaattgtgtgaacacttcaggaaattttaatttatgggaagcttgtgggttataaaggtgcttatgatatcttttgccagaaatacttttcagtactaaatgcttaagcccgaaaattttaccctgcaagacctattgatttcgaaaagaatgttgtcaatattagtggagagaggta

SEQ ID NO: 140264 - DNA, 508 bp, Cannabis sativa
atcacttacattactactcgcaagtcgagctaatgcgtcagcagtcgtgttttcttcccttggaattttcctgagagcacaacttttgaactgtgcgaacaaatcgtgtattttgctcaaatatgctatcatcttttctcccgaggcttctattctctaaatacgtgatttaccacaagctgtgaatcactgtagatttcaatatgttcgaccttcatctcccaggctagttttagactagcgatcagagcttcatatttggcctcattattggatgctttaaatccaaacttgactccagcttgaaggtgttgcccccaagtgtgacaagggcaattcctgcaccggatagttcatctgtagccaacccgtccacatgtagtttgcaagtctgcttgtcttcactattacttggctgaggtatttgtactggctcggggttgttttccgatatgctttcttccttgcatgtgcattctactagaaagtctgctaaggcctggccctt

SEQ ID NO: 140265 - DNA, 1093 bp, Cannabis sativa
  modified_base (1051)..(1067): a, c, t, g, unknown or other
tagcaagtaggtcttccatggtagcatcagttgtatccatagttgcaggcatattcagcatttcagtagaaggctcttctttttcgaaagagagcataaatttgaaaatatttattacataacatccttacatttttaccaagaacaagtctaacataataaatacaattactttcttaaaaatgtatataacggatctaaaaaaaatactctcactaaactaattaagtatcggtctcatataatttaagaaaacagcctcacttataaaaagtgttgaatattactgatgtccaataacaataatctataaaaaaaataaataaaaaaaaacttttttcataaatgtacaacaaaaacaatataattacaaaaaatgtgcaaaaaaaaaatattttaaaaacttatacattttgaaattttattcctttaagaagtaatttacatggagtatgggtttttttaaaccttttatgataaatatggcatatttaactatggactcatttatatggcttttttaatctttggtaatagtttatgggattttaaagcccatacggctgggacaattttgtaaaaagcccatattgtgtgttttgtagtttttttaggttattttagtaattttaagtgtttaaatttttggttcagtttttttttttttgaagataatcgtttatgtttagaggggttttgcatgcaatcatcacgatttgatggttgcttccccattttaacttactttttcagttttcaattcatccctataaacattaaaccgcctatactatatggcatataagggagtagtttattgaaagaaaaataggaggattaagatagaaattaagagattcgttggaaaattatctatacccagtttatgtttttaacattattagtgtgttgttcttcttcttttttaaaaatttttaatccgaagttatttttgtatttgttttatttattcatgttggattagttgagtattttgtgttttgagttttgtttcatggtttacaatgttgttgttgttgggttttatgcnnnnnnnnnnnnnnnnntcaatataatcagatttgtttattaa

SEQ ID NO: 140266 - DNA, 620 bp, Cannabis sativa
  modified_base (507)..(518): a, c, t, g, unknown or other
  modified_base (558)..(578): a, c, t, g, unknown or other
aattgttaagtaggttgtgactctctattgaagtgtacaagtgagtgaatttttatcggtccacttaatattaataatataaatattataaaataatttaaaattaaaaaaaaaatctcattttttctccttttgttttcttttttctttcttttttttcttctttttctttcttcatggaacgacccctatctcctgttcttatctctcttgtcccctctcagagccattctcctctgctcgatctcgttccaatcttttcccctcttcttgttctcttacaaaaactaaagtagcaaactcattttaattttatgtgtaagttgagactcatagctttgtttttctctactttgctcaacaaataaagacaatggagcttggtactcttccgcccaacaacaaaaacaataacaaaatgaaaagtggagatcaaaacaaaactgaagtttagggagtcttattctcaaaatttaataatgggggttgtgttggaatttattttannnnnnnnnnnnatctactcacaagtaagttgtttaacatcctaaatatgannnnnnnnnnnnnnnnnnnnnacatataaagtttaggaaactttacattggttgcagcggaat

SEQ ID NO: 140267 - DNA, 929 bp, Cannabis sativa
  modified_base (659)..(662): a, c, t, g, unknown or other
gaatgaaatcaattaataaagtatcagcaattacaaagaaaattgactcaaacaagtttagactccctctaaactattttcacaatcctttgtaatacactttatgaatatgacttctgaaacacctccaaatagcgaactcccttcctctttgaagcgcgagtgcttacttcctcccgaagtaaggattgaacaagtcttctctcgaagaccacttctcacaaataagaacagctatgaaacatactagaacctagatgaacaactaggttctcacaaaataaagaaactctcttctcacaaataagaaaaatgcaaaaaatgaatactagaacagttgatttgaatggctgctctctaggttctatttatagaacataggaaccctagtgacagccacaagattgaatctacagctgtacaaaactttcctaagaaaaacttgatctgcaacatcagaaacggattctaacgcagcaaatctaaccaaaaaaggaaacttgccataagcgagtccgatcttctattgagtcttgactccttccataagttgtttatatattctgattgtatgaagacacaatcgaatttaataaggaaaaaggaaataatcaaagtttcctttaaaaacaatctttccataagagaattgcttctcnnnnaagaagtttccatacaagaaaagttcagctgaaaaacgcatctttcctaacatagaaaagagcaatacaaactgaataaacaagcgtaagaaatcggttatgaatgcaattaaatcttaccataaaagaaaagatattttggcatctaacttgccaaaaaaaaaaaactttacatatttgggtaaccttaaagtttattttcaaaactaatgagttgttatatatgttggaaatattttacctggatttagatttactaccaagtat

SEQ ID NO: 140268 - DNA, 668 bp, Cannabis sativa
gtctgttgactcatcagtttgctaccttgtgtaggtaaaggaaaagctaagctggagcaacaatgagatggagcttggcaatgattgtacatatcgcggtagtgcaacctggagggtctcggtcttataaatattttgaagtgtagtttagttgcctgtcgttgtttaaaaaaaattatgattaaatggatattatattattaaaatacttttataatgtattttgatactcgagatctcgacctatatgtttatatgttataatatattaaatttatcttttgagtttagtaaattaaaataaacgggcgttacattgatgttagcaaagcgtatgataagcttgagtcgggttacctccgtgctatgatggtaagaatgggttttgatggtctttggattaactgagttatgcaatgtgtttcttctgtttcctataccttttcacacaaaggaaaggagttggggcccattgttgctccaagaggattacgtcaacgtgatcctttatcaccatatctttttattcttggtgctgaaggtttatctagtttgttgcgtagttaggaataaagtggtttactcacgggatgtaaaattgctcgaggtgcgccagtaatctctcatatgctctttgctgacgatagctatatttattgtaaggccac

SEQ ID NO: 140269 - DNA, 591 bp, Cannabis sativa
catatgacataattgattggaaattcttaaagcacttactcaaagctttttatttgccaactcagtttgttaattggataatagtttatgtccgaggctttatatacttgatagtaatgaatgagaagatccaggccaattttaaggtgctaaagttctcagacaaggggactgataggctacttttaggttcattttatgaaattttttagaggggtgttttagttgattatattcattttctgcagaattacactttgttctacttgtttcaagtttaaatggtaaaattcataatatgaattaaaaatgagaaaaaacatgctaaatgatatgtatttggtgcatttatcatgaaattaagagttctaagatataatgggtgaaaaaaaattaagttttgaatgctcaacacgtttcgtttgtgatcaaaaattaagtccaaagcttcgagataattttttactattatgcattcacttttatgaaaaatattatgtataaagttctagatccctctttcatctttccaaaacatcttgagtcgtccaattccgagaaatatttaaagagttatggccaaaatattat

SEQ ID NO: 140270 - DNA, 723 bp, Cannabis sativa
agagagagagagagaagagtgagatcgagagagactgagatagagagaaagaagagtgagatcgagagagagagagagatagagaccgagacgattggttccaaataaatcagtgagctaataaagtaaacactcatcccattatctaacaatagaaattttggcacacattgtttatcaattaatgggaaattcacatttgatcatttgcgtggataaggttgatggtgagagtaattgtggtaattctagtcccttgttgaaagatatttctgcccctaggattacttgtgttttagatagggcttctatccaagaagtggtagtgcacgctgactccatgcaagctatgcatggtgagactactgatttctcaaagactcacaaaagaaaaataagttgaaggtatcttttaataataagattggagctctcaaggtgaaatctaagagtcccgaaaaattccataaatgtggtttgaaggagttgagaggccctttcttctcgactttggaaaatctccatgaggttcatgttagtgtggcatcttctactcctttactcgatggggttggaaataataacttggttggtcttaagagagtgggccctgttgtacagggctaccgagcattatgaattatttagcttagaacgttcaaggtttggagaatgatcaaacgttctaaattttaaatgtaacgtccccgcttcaagcctcca

SEQ ID NO: 140271 - DNA, 1117 bp, Cannabis sativa
ggactgacccaaacccaaacccagacaaggatccagacttgaacccagacccaactatggactcggacaaggactcagaccccgacccagacccggacgtgaacctgaacctgaacacggaattgaattcaaaagtgggactaggacccgaacccaaacatggacccagactaggacctaggacccggacctggatgggggacctagacccgagaccccggcccggaccaagatctggactcgaacttggaactcaaacccagatctggaccctgaccgggatttgaaacccgaactcaaactcgaacttggacttgaagctcgatcaggtcctagactcagaccgggacctaggacccagacttggatcagggacctggacccgggacccgggctttggaattggcactgagacctaagacctgaccccggacccagaccctgaacttggacccagaccaggtcttgggacccaaagtggaactagactaggactccagactgtggtcctgatctggacccggggcctggacctaacccatagtcgatgtttggatttgggacccatacccggacgcaaacccaaactcggactcagacccaaaccaggttccagacctggacatgtacaccgtaacccgaaattggaagcggaactggaagcggaccaagacttgggaacaagaccaagggactaggacccagacccacactcggaccgagacacagactcgaattaaaactaggatcgggacttgagacacgaacccaaacctagacatgaacttggatctagacccggaccgggattggagactcagacctggacccaggtctagacctggattggggacccaaacctgaaattagaaccagaatcgggacccaagatttagaatgtgacccaagacccgacctgaacccagacacggacttggacacgggctgggacccaggatctgagttagaacgagatcgggacccaagattgggaaccggatcttgacccatgtaccgaggcttggacccaacttgtagtgggtgtgtggatcttggaatcttaccaagacccaaacttggaaccatttcaaagctaggacccaaacccagactcgga

SEQ ID NO: 140272 - DNA, 900 bp, Cannabis sativa
  modified_base (640)..(645): a, c, t, g, unknown or other
ggtaggaataaccctagcgtccacctctaccttggtttccacaaaaccgcttactcttccctaagccaccagatgcaggagtaattttccttttttgatcagtggtggaatcaccaccatccctaccataaaaaggagtaggaagggtgggggtctcaccaacactcggagtcatacgaggctcctgaaggaaattcacagcacccttggctcttaaagctttttcaaccattttagcataagtggttgcttcgttggtagtgatcaccaaatcatgcctaatcttcacattcagaccggcgaggtacttctcctttttactaaaatattttcacacaatacccacatcgagtttggccaaaagatcaaacttggtagtatattttgtaactgacatcccctcagtttgtactacctcagtgaattccttttgcttagcactgcagacggcttcattataatatttggcgttaaatagttcccagaattcttcccaggtcagggttatcaactcccaccacaggagagcatcctcctggaattgaaatctggcgcatgtcaaccgatcgtttccaaccacccccataaaattcaaaattcgctcaatcaccgtcagccactgctcagccttcatcacatnnnnnnctcccagaaacactggaggtgctttcatgcgaaacctttcgtataacggctccatatggttaccagcaaaaggttgttctactggcaccgctggagctacaacgacctgagcttgctgaggaggcacgacaggaagaccctgttgcactctgtactcataaacaatactaactataccgatgcactctgtaccataaccgtacaagtgttggttgtgcaactaacgttttgagcatgcatatacacataacatat

SEQ ID NO: 140273 - DNA, 535 bp, Cannabis sativa
tgtgcccaaatcaaagacacactttacacagaagtctagaaccagctccacgaccaaaggggcgaccacgacccatgtcaccaatgtgtcctctatcggatccttgaaatccaccaattcttgatgagtttagactcaagttggcttgcattttgagagacaaatctgtaacattactatggggttcctatttggtttcatgcgagagcaatagggtctggacttcctcaaaggaaagaaggtcattgcgagatgtttttccaaacacaactggatcaaattctagaccaagaccattcaagagttgcaaacaagatcctaagtgttcacaggagatccaacaatttcgagagcatctgcagcagcttgagctttatcacattttcaacaatggataagtttcctttctaaagatgagagaatatgcccttcaattgcagtaagcgagcctttgtttggctagagaatcgttgttccaaagctctccaaactgagtgagaagtggtaaatgtagctacagaggcaagaattggtt

SEQ ID NO: 140274 - DNA, 609 bp, Cannabis sativa
aagacatgatatctatatatatacatatatataaatattcagatcacttccattgatgtctttgatttcaatgattaaactatcctttaatttattcacaccacacccaaaatctaatccaacatcaaaaattataaacttcaactacatatacaattccaatagcaaaataaaagaagacttacccaaatattctatgctagctctaaattctcaatttccaaacataaattaatggtaaaatttttagaaaatagtaagaatgaatgatgatgatgatgatgagacttacagtgggtttggctatgtacgagagagaaagaaatgtttaggttttgttatccttttatgtttatcatatatatataatcagattattattattaaaataataataataataataataataataaaactttattattaataattattatttcttagctactaagaaacttctacttctaggacattacattaaatctcacatactcctaattacccctaatacttaaattatcaacttatcacaatattcccattaattttatcaattaagcctgttatgacatttctggcccccgatcgagtctccaagatcgccaa

SEQ ID NO: 140275 - DNA, 577 bp, Cannabis sativa
actcgaagttggtcaaataccctaaaaatagaaattttttaatggctaaaaaaataataagataactattaataatatagtttttattaatattatattattattataatattttttatgtatatataaagttatcgtttaatatatatattataagttacagtaaacataaacaaaacagtacgaacgaacttttgttcttcctccttcaacataaacttctccccctatatctattttcttcgattttcaacccgaaacttagcaaactaagctcctgtagtagcaggatagcaaatccttgaaaagggaaagcttaaggtatggtttaattttgttttaagtttaaaaacaattagtttcatataggggttttatgaattagaatggttatgaagattctgaccttataggattgttcttgggtagtcatgggaccaattccgatattttcatgctgaaactgatgtgattttgggtttgaaatcgagtttggaactttttaaagcttaatccgaacgttaatgacgtttttcatttaagggctcgattttaatttttgttatgtaaggatggt

SEQ ID NO: 140276 - DNA, 594 bp, Cannabis sativa
aaaatactgaaagatagtaagttgaaaatgacttatctgaatccaaacttctatttcagagctcccatagtcaacctgggcacaaggctagggaccccttttgggttaactgttgtggctcgggactactcaactttgagataccatctttcttgccacatgtcaaacattgatatccacgtcaccagggaaaacttctaggttaacatttcccccctaagttaactttacacttgtgtggagttgacttgatgacgtgaaccgatcttgtttctcttgaaactaccaaatgggcatcatttttgacaatcttagataattgtttctattcttcaagcattcctaacaaaattaggacttttaattcactttctcttatgtttaggaattttcaaaaattgttaagcaaagaaaaagaggaaaaacttattatttttcacttatcttttatctttttctttgaaaactcaaaattttcatgtattttttatggcagtaggattaattgaattgaaattatattccttgctgaacatgacatcctagatttaccttaaatcttaatagcattaggaattgttgttaccttttaaa

SEQ ID NO: 140277 - DNA, 587 bp, Cannabis sativa
catctattttgtagctttggcagggatagttgggctaataaaaatggttgtctatgtgataaaaaatgtcttcatttggattgtatagattaacagataagaagtagtattagagtttctttgcttagtcctaagaatcattgagtagttgtaatggtataagtgtaatccatttgtttgattggtgaatattttcttcttgattaaaaaatatattcaaggattacttttcttcttgcttaaatcgaaaatttgctatagagcattgctattaggtactttaaggtagggccggcaaaataagtcagacacgataacacgattcaaaacccgtacgagaattaacgggtttggatttgccttaaatgggtttaggtcgtgttcaggttgactcgtctaacccgtttaataaacgacctggtcgtgttcgggttgacacggttaacacgaaactggctcgttaatgacttatttaaagttattttagtacttgtacatatcataaatgagttataaacgtgttgaatacttcataaacgtgttattggttgacatatttaaacaaaatatgcttataaacaggttac

SEQ ID NO: 140278 - DNA, 517 bp, Cannabis sativa
taaaaaatattttttattctttacatcaaaatatttttttttgcttttatatttatttttaaagtaaatattacaataaaattttcatttatttaatttttataattttaaaaaatacgttattattattaatatttatttttcacatatttaaatgttaaaatttcattatttaattaatattttatatttaattattaagtatttatttcataaattttttttgtaacttaaattttgattattaaaaaaattataatttagattttttttatgttttatattcataaaaattaattatatttatttgtatttatataattatatttatttgtatttatatcctaatttttttattacattttttaaaagtaatcaattttataattttatacatatttacaagttgtttattattctaaaatattaatgacataaaatttcttgagagaattaaatactaaactctgtaaattacatttactattacataatatatatatataacattatataa

SEQ ID NO: 140279 - DNA, 530 bp, Cannabis sativa
gagtcgtgactactgcggcgaggtttgctgggatattgaccccagtagtcgctgccggtgcgctaggcgggttagtgtgagtgtttacaccttgatcgcccacgaagggatcacggggtgtttcctcgttgcggggggcgcaagagcgcgctctgaaaactgcgttgaggtgatcacgcctatcgcctctatgtacttgataacgtcctccctgttgcgtctctacagagccggaccttgtgtatctgctaggtgtacgactatgcgaggatgaagaggcagattttacgtcattgtctcttgatggttggctgcaaggattacatcgctcagggtcttcatcaacctgcgtttcctggttaggatacctcaaagattggtctctcgaggttggctggtttaggtccagaccctcaggattggttcttctttccctgcgaacatgattattacgacgtctagagttcgttacctgagggttgtctgtgcgagtagtaggggctcgagggggcatcgggccctgttctgtc

SEQ ID NO: 140280 - DNA, 629 bp, Cannabis sativa
gaaactagagagaagcaggatcgggggacctaggaacaagacctggacacagacccaaaactgtagccggattaggacccgaagctggcccaagacctggacctagacccagacttgggacccgaaactgaaatgtgaacgagaacatgactagcaccctggagcaggaccgggaacgtgagcaggacccacacctggactgggacccagtcctggactaggtctaggacccagaataggacttagattagaacctaaacccgaactcgggactccatctcagacccaaatcaagcccctgacctaaattggaatttggacttggacatggacacgaactcaaagccggaccctaacgcataccaagacccaaacctgggaccagacccaatgtccgaacctacatccggactcagatttggaaccagatagggatccaaaaaacctgtacctagactaggactcagactcggaccctgaccctaacttagacctagacccggacccgagacaaaacctagacctaaaatcaaaactggaactgtgactaggacccggacctgagaccagaaccgaacccaaaacataacccaaacttagaccaaaacctggaccaagaccttgactag

SEQ ID NO: 140281 - DNA, 587 bp, Cannabis sativa
caatgtgatttataagattgcaaccaagcttttgaattctaaaatcaataacatccttccttcaataatatcacagtcccaaggtggttttattaaagggaggtttataggacacaatatcttgatttgtcaggatttggtaaggcattatggtagaaaggcaaacaagcctagctggatgattaagctggatctccaaaaggcgtgcgatacaattgagtggagcttccttgaagagatgctaactggtttgaattttcctttgaaattcattcgactagtcatgaacttaatttcaactcccaaattctccttgatgttcaatggaacacttcatggtttcttcgaagccaaaagggggataagacaaggtgacccgatctctcccttgctctttgtacagggcatggagtactaatctagattgatgaagaaagtggaggaaaagtagggatttaaattccatgatagatgtgctaatttgaagctgaatcaccttacttttgttgatgatgtctttgttggaaattattttagcagaatctagatttactaacaagtattttggattaacaacctaatatgaa

SEQ ID NO: 140282 - DNA, 1347 bp, Cannabis sativa
aacacttggaagtgatccgacaaaattacccgaatggagatcataatgttctacacaaaaaacattttcgtctgtggtttcacaagaagatgaatatacatgtgttgtaaatgtttattatcttaagtggtgtttgtcattctctaatgaggtatttatttttatagatatatgacttgcacaagtttggatcattagagaatggcgaagagttgcaagttttagcatccgggtctgatcacttaggtacttactatgaaggttgtattgtgaatggagttcgatttatggatacaaaacgagatgagaagaggagcaccaaaatagtagagatgagaagaggagcacacaaaattgaaacttgaattttaatgatgtacctcaacactttaaagaccaaattgtacaaaaaatgaaggtaaaacacattaacaagtttaatgttgtaaatatttaatttcaattaatacataattcattaacaaattctatttgtttgtagtatttgtacaatattgatagtcatcctgagcctgaaagagtgatgcgaactctttatcatgagatgaagagaagatattctaagagaaagaatatcatgcactcgtgatttaaggaacattattctggggatccaaatgatttggcaagtgttatcgaagttgtacctgatcactacactacagagagctggaagcaaatcattgacttatttttgagcccaaagtttattgcgcgatcaaatctaaacaagaaaaatagaggggaaatgaagtatttgtccacgcaaggcacaaagtcgatgccagcgtctcgtgatgaatttgtaagtaaaattattaactttctgttagcaatttcttttactaataacacaaactaaccctatttttgaacaggacgtccctaaagactatgcaattcatacttggaaaaaaggccaccttagaaaaggaacggaagacacttggattagcgagacatgcaaagaactacatgtaagtttcgattttttgttttataatatttttaaaataaatgcatgatggtattattgtcccaaagtgtagatgtcccaattcaaaatttacttacaaagtttcaactttaatatttgtaagtttcaactttgtaagtaaattttctattatacatataatatttactattttttaatatttagagatccaaaatgaattgtattccatttgcatttgcgtgttatttgaactcaattttcatttctagagaggactaattaagactaagaattccattttttcaatattagactctgaaaataatctactcttaaacagaaggttgttcaaaaagtaacctttattc

SEQ ID NO: 140283 - DNA, 1888 bp, Cannabis sativa
gtacaaagtatatgtatatatatatacatacatatattatataacaatatatttgttgaagaataatgtctgcatttaaacacaaaatcacaaattattatatcaattcattttaaggaaaagcacatcaaagttaaaaggatcatagatcaaagttaaaactcacagatgtatttcataaaattaaatcaattaatatttcttctttttgtccccttatctttgaaatcaggtgcttcaagcttagaaagaattattattaagtttaactatgaaaaatgaaaaataagagaaagttaaaaacctgagttgttgtcgtttctgagggagaagatgcgtcgtcgttgaggagggaggagctgtgtagcttccgtcgctggagaagatgtcgtcggtgacttagcgaggagatggccgtcgtcgtcagcgagtaggggagaagatgatgtcgtctctatcgtcgtcaaattgctgccgtcgtcgtccaccgatttgctgggcaacgagcgagtcaccgtcgtcgtcgtcgtcaaatcgctgggcagcaaagagggatgaagtgggagagagaatacgatagtgagagaggggctgatgagattttagggtttgctttttttttttaaatgttatttaatagagggagaagataattacagatatgttacccaacaaaaaatatacccaaattaaataagttaggggaattaccaatgtattatttttgagtttctaatatatttatactagtaaacatctcgtgcttcgcggcggatatataaaatattttaaattatataaaaaataaattatatattttcattaataataattactaagtaaaattatcttaaaattttaactttattattaaaaaatctgtgacataaatatttaaaatattaaatgtattgctataaatacagaaattcaaaaaatagtagcataaattctcaaatttctaaacttaacagttttataattttattggtacccaatataatagtcttaaacataggccaaatcaaagaataaaaagaagacagatttgagtttgtatttgattcatttatggtttaatttttattctgatgtgtttgttaagttttaggtttgaattttattatgtgtgtttttaatgtttgagtttgatatatcaagttgactttattttatatttaataaacatctaaaatttaaaattttggtttctaactattattatagtgcgtaatacgttaatctatatttcacttaattctattttttaaaatattttattaattgattaattaattaagatatttaaaaaaatgattcctaattttttttaagtcattaaattctttaactaattctattatttatatatctctaatctattataacaaatatctcttaaaaatatctataataatttattaatatatatacacagtttttttattactttaagaaagttattagtaacaatttattttaatatttcttttttttaaaaaaaaaaaaaaacaacactacggggtattccaattgtagaagcttcaagttgaaaataataggattgtcatatttacatgttcatcttagtagttaatgatccatagtcttatttttataatttaattacataattttttaatataaattatctaatttaatttaaactaattaataatcataatttttttaaaaaattgaatagttttggattaattaatcatagttgttatgataaatataaattaaaaatcataactaataatttaaaaacatagcaaaaaatataactattaacatataaattgttcacattctattaaaaaaaatcattattttgaaatctagttaaaaaaaattatttaaaaaacaaatatggatgaaaatt

SEQ ID NO: 140284 - DNA, 543 bp, Cannabis sativa
taagaagaaggggggcccacatgtactacctaagtgagttttgggggcagccctttattcacttttactttctctcactagaaatttgctcttggaaaagctcctccacaattccaaatgtaaaagttgtactgactatccctaaatttacctaaggttgttcgctcatctttaagaacagttggagaccatccacaaacaccaaaattattacctctggaggcctcatctttagcttcccgaggggttgtgttattcagataatggctgcgagccacatagtctctgtcctcctcgttggcaggaactgaaatttgctgccagtctaaaaaactttggaactttgaagtcattagtagattggttgcttacaatcgttacaaagcatgtactacaaaagttgtcgcctagcgactatacaaaatatgtccaactgtcataaagaccgtatgctctaggcctaactgcttcgtcatgtacaatctttatttgctcgctctcatggctgctcaaccttagccttgcccttacctacacatgtaa

SEQ ID NO: 140285 - DNA, 664 bp, Cannabis sativa
gttttttttagatgaataaaagtgaaagttgaatcgaataggaatttatatttaattttttatttatgaaatcatatagtatttaaaaatatttaaaatcatataaaatatttaaataaggggtaatttagctataccagaaatttaggtctactaaattcaaagagatggtaccaaatgtgtaaaatttgtaaataaaaggtactaagtaatcattattagaaacataaggtattaaatttatattttttttaaaaaaaaaacacacacaataacaaataattatttatcgcttgacaaatttatttttagaaggaagtctattttctgtaaaaaaaaaaaagaaaaaaataaattttattgtaaatatattacaatcaaatggtttgaatattaaaaaaattatagtagagacttaaatataaaaaaataaaatcatttctatgtattatttactaaatttttttattaaatatattaattaattaatttttgtaagtatatacttaatcataattaatgtaattctataaaagaaatgcttacctattagtaacctgatattaaaggtaaaataaaatgtgaccattatggttacattaaaaatgtaaccattgaatagtcacccatatatatactagcaaaaagttacgtgcgaggcacg

SEQ ID NO: 140286 - DNA, 1214 bp, Cannabis sativa
  modified_base (909)..(918): a, c, t, g, unknown or other
  modified_base (1054)..(1060): a, c, t, g, unknown or other
gaagcagatcctggtcaatttggtgttcgcttccccaaaactcacttgggttcatcaacaaaagacaacacacaagataagtgtttggtcggaatatcaaaagttaaaataagcaaatatcccgattaggagtactcaacagactgaagaatgagaatattcaaagaaatgtcaaaactcaagaagtatgaaattttcgggagttagggcaaaaaatctcatgaagcttagaataagcagaatgaaagacaggcattatgcagttcaaaagataagcattacagacgatgaaattgcatgaaccgtgacaaaggagaatcgcagagtttttaaacttagggtttcctacacatcttcaatagcgaaatcgaaagtgcattcagaaagtaaatgtgcatagcaaacataaaaaaaatcgagaagttactcaaggaatcaagcgtctgggttcaagttgcgtgaagccaaacgagcagttttaatgaaagcactttagcgagcttgaagccaaaaacctctctttttgctctgaacttacttagcaaggaaggttggtgaaaatgagcttgtgaacaaatgctcactggaataggcaaaaacagcgaaaaggggtaatcatttcaaaagaatctcagacgccttggttccctctaaaagagaatatgggaaatcaaaagtaatcaagtgtagccgtcaacggtggtgagagaaaatcatattttaaaatattaattgtcagagcatttattagtcgaaaaccgaagggacgcccagccagcctcacattgagtcgcgaacagatgcgcttgacacgtgtcacccatccaaattcaaaagcagctcggatgaaatctacacgcaacttcggaagtcccgtacagacttgggggaaaatgttatcccaatttnnnnnnnnnnacgtggcatcacatgatggtgacacatggaatcaactctgagtatctgctcccaagatatagtctgaacaagatacctcatatgcatgatcaaggcaaagcaatcagcaatccgcacagagcgaccaacacttagnnnnnnnagctttcgcatcgtgagtcatcacggaaacccctataacttggggattggattgcagagatatggcaagctatccaaatcccacgatcagtgtattctgtatttattatgcaatctttctgcttatatccattgtaacgagaagagaaatactt

SEQ ID NO: 140287 - DNA, 546 bp, Cannabis sativa
taaaaaaattaagaacaacaaaatattttctagagttttcatcatttttcccatcaattactttattttattattattacaaatttaaaatattcatctttctataaatatattatttaattttttattgatatttttttttttcaaaaaaatcaaaccaaacaaaaactacaaaaaatgttttgcattttcattttttaagacaattttaaaaacaataaatagaaaatttcagtattaatctgtaaattaaattgcaggtacactatttattagtattaaaatacttttatttgatattatattatttttaaataaatttatgctataaattatatttagtcttataaagtatagtaagaatggtaataattaattcactcatcttatatagcatctcattagttaatggtattcaaaaatattctatttaagaataatttttaatttattaaataattattttttttaaatctcaatttaagttagttataaagatgaataatctctaaattataattgattatacattttttaagtctcata

SEQ ID NO: 140288 - DNA, 545 bp, Cannabis sativa
aatattcccaacacaagtgagattgaaaaaattaagtgatcaaaagaatttgagtgataacgataaattgagtgataaaaagaactcaagtgacctaaaaaagagagccgaagacagaaaacaatcgaggcaagtgagtgagaaaagaaaaagaagagttctatcaatgagaaaaaatagagagaaaacaaaataatttttatgccagaaaaagtgagattacgtgagcttggcatacaaaataagcaatgattctgtttgtttacaaggaggctctttttagacactaaccaacttgatttttcgctgcctagtgttgttgtttctattttgcaggaattcgaggatgtgtttcccaaggaggtaccacatggtgtgccacctattcgaggaatagaacatcaaattgattttattccaagtgcttcaatcccaagtcgcccagcatatagaactaatcctgatgaaactaaggaaatacaatggcaagttgaaggattgatgaccaaagggcatgtgagagaaagtaagagcccttgtgctgt

SEQ ID NO: 140289 - DNA, 583 bp, Cannabis sativa
agagtctcttgctgaatcctacaaagtcatgtatgaaaagtggatttaggttactactgaaaatagatagttgattaaagtgaattaaaaactgtctcatcaaattgaaatgtttgaattaaaaataaaagaatatgagacaaatttttgtgtgaaagatgaaaaaatcactcttttaaagaaggaacttgaaaattttaagaaaaatgttcaaatgcttaatcctagatctattatttttgaaaaagctgagaaaagaggttttgcagacattggatcaaatggtgtggaaagttctggagtcacgaagtttttaaaatctagtgttccgacgaatcttcctgatgctgcaaatgtgaagtctgctgaaatagtttcacaacgtgtcgttgtagaagctgtttctgctgctgcaaaattcccaggattaacaaaaagagtaagatctgaggtaagaagatttattcatacttgtcgtttttgtggtagaaaaggacatatcaggcctaaatgtttcacgtcgcaaaatatgtttaaaataaattattttggtaatttagaaaaatctcaaaagaaacataaa

SEQ ID NO: 140290 - DNA, 1311 bp, Cannabis sativa
acttcaacgcgtgtcactaataagggtgactagaaagacagtttttagtgacacttcacacgtgtcactgaacctttttacattcactttatgtgagtcactatagacgtatagagttagactttgtcaaactaaaaaggtaatagccacacacatgaagtgtcactacatcctttttttttcttttttttttttattaatgttaatatgctttttataaataaaaaaaattaatataatttttttataattcagattatatattataaatttataaaaaaaaattatattaataaaataatttaattaactatatatttatcaattataaattaatatattttaattttagttataaaattattaataaaccaatatatattatttaatttgattctattttaatttaattttatattattaataaattgatgatatattatttttttaatataattctaattttatataaattaatagtatattaattttatataataaattaataatatattattttttagatagcaattaacagaatatttgaactactaaacaaaattataaaatacacacattatactttatattaaaatgtacattaggcatatgacattaattttaaccaaaaaaacaaataaatcagagtgaatacaaatccaaaacaaatcagaacatgtttagaaccaaaaaaacctaaaaaactaaaaacaaatcaaccataaatctggaaccaccaccttcggccattaacccaaaccaccatcctggcgaaaaaccccaagttccctcagtccacctacacagcaaaagagagagagagaaatagagagacaaacaaaatatcaaataatcatacatgtatataatatgtacgagtcgttcttcaatgaaccaagattgtagagtagatggatcaaaccaatgttcgatgctgacaagcctgccccaaatcaccaaagcattgccatctagcctgagcaggagctccaccagaaggaaaaataaagagggggaagagaagtgtggtgttgcgctgagaagaggagagattggggcttcattctgggcagcaagacgtcgaactgagaggagatattggggcttcgaggactgaggagggagagggaggctttgattgagagaaagaagaggtaggcttcgaactgttgttggttgtcggagaagaggagtagtagctccgattgagagaaagaaagggaaaggcaggcttcgaatctgagagaaagagagagaggcatcaactgagagaaagaaagagaggctttgattgagagagagagagagaga

SEQ ID NO: 140291 - DNA, 1024 bp, Cannabis sativa
gctgaaggcaaaggttatatttttcttggccaacaccatgattgaagattccaaggcctacgttaagacatgtgataaattccagagattttcaaagatacctcatgcaccgcccaacaaactaactcagatgcaaagtccttggcctttctccatttggggaatcgacctgatcggacaattgcccacgggcaaaggtggagtacaatacgaaattgttacagttgattacttcactaattggacagaagccgagccgttggccaccatcacatcccaaaaggtgaaagactttattgtgaagagcataatttttcggttcggattaccatacaagatagtctcagacaacgacaaataatttgatagtaagtccttcactgatttctgtgcgaagcatggaatcataaaaattttctccgcggtggcacatccccaatcaaatggtcaagttgaagccgtcaataagacactcaaagatactctaaagaaacgacttgaagatgctaaagggaactggccagaggaactccctgtagtattatggtcataccgtacaactgagaaaacagggaccggacagactccatttgccatcgcatatggttatgaagctatgctgcccgtagaacttgaacctccgtcccacaggagatggacatatgaccaaaaagttaatcacgcgctcctcgcagaatcacttgatgaaatcgaagaaaagggaaccgcaacaaacctaaaattgatagcccatcaacaaaaattagctcgatactttaacaagaaagtgaaagcatggagattctttgtgggagatatggtcctcagaatggtattttctttgaaaacaccaaaaagatagagcacgacaggtgtgctcggaccgaactggaaaggaccatatcaggtgatcgaagttctagagttaggagcatacaaagggggtaagtatgacgaaaaaatacaactcgttctagtaccaaggtattggaacggggaacacttaagaaaatactaccagtaa

SEQ ID NO: 140292 - DNA, 583 bp, Cannabis sativa
actgtagcgtgccttagcattagggcattacaatagttgtcttatgaaaaacctaaattttatacttattaattaaaacttctcataatggtatactataacatatatatatatatgtataaagcttaaccttgaattaatctacacatctcaaaactaaaataacatgatcaccataccttgacttgaagaggaactctagtcgagtctatgaacaattattaagcccaaaacttgtaaaaattatcctaaggttgatcaaagaataacatcgagaaacaacatatcgataacaatgatgaggcttgtttaagatattggctgtgatgttaagaggataatgttgacgtaagggagaagaatgaaccttgaatgatagtagtatttgactattagagatgacaaaatataggtaaacactaatgtttagttttagaatgatgggaggaagatatgagaaaagtcaggacttggggatgatactatagtgttggctaagtgagctacatgttgggttttatgccctaaataaaatttatttcaatataatcagatttacttattaatataggtcagaaataac

SEQ ID NO: 140293 - DNA, 692 bp, Cannabis sativa
aaaaaaaaaattccgccccccaatagcggccaagcaggggctccgccgctaatagccccattattagcgacggaggagctccgccgctaatagccccgccgctattggggggaattcttgtagtgtaatatgtttcctttcttgacatatcaaagtgactttgcaacatttttagttaactaaaaattaattattaaaaaaaatgtgatattgtatattatgtgatgtttttaattaataaagagagcttggccataagccctcacaacatagagagataggagaggggctctacgaaaataatgtgagtgagatgataatgttttttttttattattttttttatttttttttatctaaggttattatgatatcatgtataatgtattatatactatcatttttttttaataaaaatcataagatctattaattaataaattcgttcaaaacaatagaacacatttcagagaaacagtcctccaactgaagcacacgacctgtagagaaacaagagtctcttgccaagcaatgagccaacttatttgcagatcgttttataaaacacaaatttgtgaaggcataagatactgctctgaatcgcttggacacacaccaagctattagtttccaacatgactctatcccacgaatgagttgcaatccaactcaatgcttctttaatgcctatt

SEQ ID NO: 140294 - DNA, 534 bp, Cannabis sativa
ggcataaaacccaacacatatgtggtcatgcaaaatcacacatttgtgtacctctttgagtttgtctatgctaatcttcatgttaattgtcggctaatctcgatgttagccttgctaatttttaggattaatagtacatattaataaggaaaatgctaagggaggtgagatgtggcatacagttattggtgtattttaatatcggatttcaaaaattttgatttaaaaaaataatataggaaatcgctatttataaaagaaaaaaatgctaataacaattaactatagatagtataaataagaaaaaaataaaaaaaataaaaaacttacaaaattatgtataattaaaaaaaattaattcaaattaaaataaataaaaatatgtacatattaataagaaaaatgctaacgtattcatttttcatgatattaaaagaaagatcattcataaaaaatgattgataaaattaaataaaaaataattaaccagcaaaaaaacatggctaattagcaattttttcccccgaactttga

SEQ ID NO: 140295 - DNA, 1374 bp, Cannabis sativa
  modified_base (472)..(474): a, c, t, g, unknown or other
ttttgaaaattggaaaaatcacggggtggtgacacctcatacacgcgcgcggatgccctattttctcgggtgcacgcgtgtttggacgtatgcatgtccgagatttctcggttaggggggcatttcgtgtctaaacacccctacgcgcgcacggacaggctgcatgcagcctctatgtgcgacaaatcacgcctagcccacctgatgcatgctcgcggataccatccatacgaaatgcaattttttccaatttttttattttttcatggaattaatttcgaattttttgtgtagttttgtattttgatttttattttttgaattttaaatctaattatctgaattaaattaattttttttttaaaattaattattttttttaaattaatttaagatattagtagattttgacttgaaaaaggataatatctaatttttcacttaattggttatcttttttttaaaaaaaaannnttgattattttatcttattttatattttacattatttaattaattttataaaatgaccttatttgaaatttaaaataagattattttaatttagaaattttaaatcgtaaccaggtattttgctaactttcgaaattttattatttaatttaaattaaattatcaattagacaaatgatatttatttatcattttattttattggatatttaattttattttaaataacataaaatttgaaaagttgttagtatttttttgaatagatatttaggtttgttgaaaacctaatttttcaaattaataggtttaattttaaaattaattatttaatttaattttataattttcaaaaataatatttttttatttagatttttcgaaaattatttaattatttaatcaatttaaattaaataaatcctttatgcaactatctaatttgttgcttgtgtgtgttttatattgtttattattaaaacttgttttataaaacctatttttgtttgatctaaattctcatggttaatttgttgacagatccaatgatctgattataatcaatggttcaattgtcaataggtcaaatagataatttgtaacaggtaaagtttgtaatcttctcttataaacctagtaacatgatagaatccatccaaatcagtatgcctgtgtgagcctatatgtttgctttggacttagatgcatatagggagcccatttaatttttgttattaaaatggactaggttgctaaataaaattatcacgcttgatagattttatttaattgggcctattcaattaatagcagttgttaaaattaaggttaaattcctctcctttgggcattgtgtgagagttaggggactattagtactgaacccaaccctccctcaca

SEQ ID NO: 140296 - DNA, 970 bp, Cannabis sativa
atgccgaaacaagttaagggtacatcaatacatcccttttaagagggtgcattgtagaatcaccctaaaatattttggttttttgtaccttagatccctaaactatacatgttttgacaagttggtcctcaaactttattttttaacaaattagtctctaaactatatatgttttggcaaattggtctccaaactttatattttgataaattaatccccaaacttttatttatttagcaacattaagtttccactattagatattgacatttttattatttattttacttactttaatttatgtttttgtgttaaattcaaataattttatttttttaattttaatactttgagaaaaataattatattaatattttttatttattatattaatattaatatttaaatactttaatttattatattcatatactataataataagaaaaaataagataaatactagcagacacatataatagctagagaaaattttgcccctcacatttttatattttagcatttatagtatatatttattgttaatttatgaatatgtggtattataattttaataaaaaaaataaacaattgaaaatgcttaaataataatattattattttataaactacaaaagtaaattatattttaaaatttatttttaatttatgtttcgcgacgaacctataaaaatttaccatcgttgatacaaaatttaaataatcaataaatatatataatttaaaaattattaaatttataatactacatattcataaatcaacagaaatatactataaatgctaaaatataaaaatatgaggagctaaaattttctctagatattatatatgtgtgctagtatttatcttttttttgtttcttattattaatgtatatgaatataataaattaaagtattaaaatattattaatattaatataattatttttctcaaagtattaaaa

SEQ ID NO: 140297 - DNA, 529 bp, Cannabis sativa
aggtcataacctaggctcaacaaacattaaatcaaagtcttgataataatcaaggctataaccattcaaccattaatatttagccacatatgatgctgaccacttctcttaccttagtttagaactcaagcgtacgggccgacctgagtggaaaaataagctagacgatcctcggttctatgtcacgacaattaaaaactcaatgaataccttaactcgaaattccggattaaaaccctaatttaaaaccgattatacttagccctaaacaacttcgaaatagatcagatagcttaaaaacaatcaaagacaggtaccacgttccacctcgagccaaaatagggttcagagaaaactcgagaattttcccctacaggtaaccggtcgaccgattctggtacaccagaacaaccggtcgaccgattgctggcagaccagaaaaattctgggttttcttccccagctcgaatcaaaaccatcacagacctaaattgcatttctagagcagtataacataccaaatacaaca

SEQ ID NO: 140298 - DNA, 555 bp, Cannabis sativa
  modified_base (60)..(62): a, c, t, g, unknown or other
ctatgtgggcgagtgagactcacacgcgagtgagggacaaagcattcagacttgcctgannntcacaaactgtagcgtcagaacgcagcagtagttgctacgtggcgaatttggacaaagtgaattttaacgtataaggcttattttctcagcgcaaaacaactaaacaacaacacaaaaacaactagaaaataacttaaccatagaatataaatcaattaaagtttattatattatgcaaacaaaaataaatttataagacaaaaacttcaaaaaatagaaataacttaatagcaacgaataaacaacacaataacaattttattttaatataaatattaattgagcatcaacacttacgtcaacttaaaaaataaaataaaaatagcacacaaataaaaaaaaatatatacatttatttttcttagttaaacaactaaataacaacaaaaaaacaacggcataaactccattacactatgtaaattacataggcatgaaaataactctaaaaagtaaaaaacaccactaatgtataaaataaaataaacatgt

SEQ ID NO: 140299 - DNA, 1276 bp, Cannabis sativa
tctttcgagattaaacggtgctaaattgctaatgaacgttcctccattaaaattttatgttgagctaaaacttttatgttgagctccaaatccaattctccctctaaagtcgttaaaatttgcaattaagttctgccttgtaaaatcgagctcgacgacttctactattttccaccaatatatgctaccatccctccaaatgcataattagtcttcaaaatagcctaataaattataattacactaattaataatttaaagaatcaatttaagaatagcaatacataaattagctatatttacaagacaaaatatcgacttatcaaatttccccacacttgactcttgttcatccttaagtaagttaattataaaatgaatgatacttaaataaaccggtctttatgaaaaataattttagtttcaaaaattgtgcatccacttataatttccaaaaaatccaaactcttcatcattaaaatttcaactcaagataattacttttcaaactcaatttttgtgtgtatgttcaattgactcatcatattactaacattcaaattaattcatgcatgccaacaatcagtatttatctcaaaataaatgtgtatttcaacgaaaatctactccataagcttaattatcaaatcattcttcactaatgtaattacacacaatttaaagatcaataagactttataggcttataatgtaaggctagggtgaaaggtagataaagaaggttaatttaggctcaaatcacaccataacatacatctacaacattctctcaaataattttcatatgtattccccaatcactctccccagcaattaaatcttgtatcttttttttttccatgaaacttactatttccccacacttaaattgttgcaagtattcatttaattttcattgatttttttttttaatgaaatacttacaacttacaaacattcattccaagggaatagtaattattttcttcatcatcacttccacataaccatcaatatttttccatcaacaaaactctcacacctttacaaatacataaaacatcaatatactatggtgtgaaaaatgatgaataaggattttttaggctcaaaggttactctacatgattaaaagaaaaacaagatgtcaacatttaggttcaaattggtaaaagtaagactaggggtgttcatccaatccaatccgcactattttgctcatagtgcatccgatccgcactaagtgcggatttcattttttggatccaatccaatc

SEQ ID NO: 140300 - DNA, 842 bp, Cannabis sativa
tatatagacaattgttaaaatgtactatcattatctaatatcttttttgatgtaatactactattagtgtaattaaatattagatctcatataattttaaaaatagcttttagagaatatcactaactaatcgtgagacgccacctataaaaagtgttagacactattgatgctcaataacaaagctcatatatatattagcattgctattggccactattagtgcccaacaccttatataggtggtgtgttagcgatatttctaaaaattatttttcttaagttatatgagacccgatatttaattacactaagtatgacaccgatgagagtgctagtcactagtggtaccttttaacaattctcatttatatatattctcaatgtatattacccattaatgattactaaataaatttaactatataaatattaattttaaaaatattaaatcatttgattttgatctaatgacgaataataaaagaaaaaatttaaatttttatgcataatttagctacttaattaaaaaaactatcaaaaaatatctcttcaataaaaatatatttatatacaaaatataagtcaaaattcaacttttttttttttgctgaattttttttttcttaatttttttagtccatacaatataaaaatgagaattttttttaattaaatgaaaaaattaagcgtaataactcaattttttctaatactacacattcataaagggaaatttgaaattctatacttacaatcccctaaaattttatccctaaatgcatacttattaaaattggtcatatatgaccaaatttataatttctcaaaaatacccctca

SEQ ID NO: 140301 - DNA, 579 bp, Cannabis sativa
ctaaataaactacttttaacaatttttttaaagaaaaaaaatatacctatcttactaattaactatttatactataagtaattaactatgtctcaaacactataaatattaagttaactcctatttctctctcattcttatatgatgtatgatctccatcatctttatctctcaaatttaatttatttctccctcattcttatatgatatatgatctccatcatcttcatctctaatatttaatttattggtgtttccttttcttttttcagactaagaaaccaaagaaggcaaagaagtcattgccggcatcagattggtacgtacggtattagtgtattatgttattaacccgtttctattttaattttctctattgtcatatgaataaatatttatttaatcatattatttattatattgtgtcaaaaaataaaatccgaatacgacccatgtaacctgtttataaatggtggagtgagataggatgatgccaataatgacaactatgagtaagatatggtgatgacaacgattttcaataaacttaatctcgactacaagataatgatacaataa

SEQ ID NO: 140302 - DNA, 606 bp, Cannabis sativa
ttactttcagaatttcaccaaattttcttaagttttccagagagaaaaagaaaccctcgaacagaaaccctcatacaccatagatttttcacttcttttccttcgtcgctgccaatcaactttttaccgtcgatcaacaccaacgcccagttctcaagcttcatgtaagttcttcgcatcttgtactttagtttattgtttgtgtacatcgcatgctttactattcatctgctttttctgggtttgatgtttgagttttctgggaatttctgtttcgagtttctgtgtaacacgttagattcctcttttctggtgtttgagttacatctattctacgtattttttgtcaagtacccatcttttcttcacgtactgaccttcaagggttcagagtggactttgtcttctcgatttttacccctttttccttgtctttgcttattcgtaatgtcaccatctgtgggattcttgcacccgactcttgtcaaaaaaaaccttctaaggctttctttttgacaagtatccagagggggcctctttccagcggttaggggaccccattcccttttgggcatttaacaattttgtatacattattttaattaa

SEQ ID NO: 140303 - DNA, 707 bp, Cannabis sativa
atatgacaaaattccaatgtgcacaattttagcttgttggtatatttttccttaatgcaatccacacaagctctaaataaagttagtaaaatcaagtgtaattagtatctccaccatctactaatatttattcaatttatggatatatgttccataatcttcggtaccataatgtagaggaattgttatttataacacatttcttattgtcaaattaaacatacatatcttagtgagtgacatcatttcgtaaattaatatagtaaagacctttaaatatgtgactaaatcaagtttataaagaaacttagaacataaaagtctttgataatattaaaacaaagtcaccactatatagtttgttccttaaatttataaatgtgagaactcatcttgtctgcaaataaaatttgctcactgacttccttagatttatttataaaccttgcaagaaattatgaatgtggaataacaatctaaaataatttactatattaataatcacattaactatattagaatgaaatcatacaaataaatagaaaatttaatagtggtaatgaagtgtgatttattttttttaactgtatagtaaaaaactatacattctagatgaagttatcagaataaattttggaaatttctactagttatgtaaaaatatatgaatactgatgtaataaaattgcataattattaatatatag

SEQ ID NO: 140304 - DNA, 647 bp, Cannabis sativa
  modified_base (216)..(217): a, c, t, g, unknown or other
  modified_base (338)..(338): a, c, t, g, unknown or other
tgtctcttctcttccttctgtctcatcatatcatatcttcctctcgatgtactcttaccatggcttgattctgaccttgtcacaatagcttgatcagtatgatacacaccacttggttgcttgatactgtctgtctccaaaagagcagctgacacatcatctacagttaaagtagtctttccaaccaaaagtgtagtcactaatgtctcatatgannttggtaatgatgccaacaaaataatagcttgatcctcttcatcaattttgacctctacacttaacaattgagttatgcacttattaaatctattcgtatgatccctaacatcttctccttnaaccatttttaattcatataactgcttcttcaaatataatctatttgttagagattttgacatataaagcttttctaactttttctataactcagacggacatgtttcattcaatacattatactttaattctggagccaaactaaaacgaatagtgcttactgcttttgcctgcaactcttcccaatcttcatcagtcatactttcaagtttttttccctgcagtacctttaggagcccttgttgtaccaacacatctttcaccgtactctgccataaactgaaattattcttcccatcaaaaagctc

SEQ ID NO: 140305 - DNA, 570 bp, Cannabis sativa
taagtaaatctgattatattgacatgggttttatttagggcacaaaacccaacacagactcctttgacttggtagacttgggggtagaagggtttgcagcagtcaactcctcggaaaggtcaatgacctctctagaaggtctctttttcgaggacccctcagtgcccttagacttcttggccgaaggagaggcgctagagcttccgcccattctcttccttagagcatcgatcatctgccgagacatgtctgcacggaacaaaaacaacatggttagaaaacagccatcagaaaacacaaggcatgaaagtcaagaagctcaaaagtaaagtaaagttcaaggtgatcgccagcagagagactcagaagtccataatcacctgacatcaatcttatctcaaacatcacagccttccctcttccggcaaagggggcagatggccgaacaggtgaagtgggctcccttatgcaaattgcatgttccacaggcatgggcgtggcggggagtttcttcttcctcttcaatggggtcacctactcgtcctcggcctcatcttcaggattcaaagg

SEQ ID NO: 140306 - DNA, 1031 bp, Cannabis sativa
  modified_base (485)..(486): a, c, t, g, unknown or other
  modified_base (955)..(955): a, c, t, g, unknown or other
gatttctttgatacattttcacctgttactagaattacatctattcgtgtgctttttgctcttgctattattcataatcttgttgtgcgccaaatagatgttaaaactactttcttgaatggtgaattagaagaagagatttacatggaccaacctgaaggttttgttgttcctggtcaagagacataaagtgtgtaaattagatatatctttgtatggtttgaaacaggcacccaagcaatgacatgagaaatttgataatcttgtcatctcacatggtttttaaagtaaatgaaagtgacaaatgcatattataaatctgaaaaataatgtgtgtactgttatatgtttatatgtggatgacttgctgatttttggatcaaatatttatgttgtgaacaatatgaaacctctgttatgtgaaaattttgacatgaaagatctaggtgaagtggatgtaatccttggtatacagatcactaggnntgaaaagggaatttctttggatcaatctcgctacattcagaagatcttaaagaaatatagttactttaactataaacctgcttgtacaccatatgatcccagtgtaaaattatttaagaacattggtgatggtgtaagacaatctgattatgcgagcatcattggcagtcttcggtatgccactgattgtactagacccgacattgcctatatcatgggattattatacaggtttactagtagacctagtgcagagcattggaatgccattgagagggtcatgagatacctcaaaataacattgaccattagattatattatcagaagtttctagctgtacttgaaggttacagtgatgctgattggaacactttatcaaatgactgcaagacaaccaatggctatatttttagcatagctggtggagctgtttcatagaggtctaagaaatagactattttggctcantctacaatggagtctgaaatgattgcactagctactgctagtaaagaagcaagttggctaagaagcctgctaggtg

SEQ ID NO: 140307 - DNA, 834 bp, Cannabis sativa
  modified_base (645)..(647): a, c, t, g, unknown or other
aatgagacaatttcactagttaagaaaatgtcgtagaaaaatagcaagatagaaacaacaatttgagagttagaatcatgaatatggggataatgtcccaaattgtttaaataaattttgagaacaaaatttctataaggaggggatgtttgtaacatcttgataagtctaatggtaaataattagggtttatatttatattatgagttaattaggtaataagtgagattatgattctactaatctatttcaatttcaagataaaaataaaatctaaatttgctataagtgagtaaataagcgtaatttataaattatgaaaatttatgtagcatgtgtgaatataataggagctatatgtggaataaaattattttcaagttcggcgatcctgaagacccgataagtggataaataagcgtagtttgttgattacggagatttctttgaaataggaggatataatatgagttatttgtgaaataaaaatattttcaggttcggcgatcttagagacccgattggaggctaaaaatgttacagcagtttagttagaaatattgataggattattgggataagttgattttagaatagcggggtattttggggtactcaaagttggccaaataccctagaagtagnnntttcttagtggctaaacaataataagataactattaataataaaacttttattaatattatattattattattgggtgactattcaatggttacattattattgtaaccatgatggtacgatactgttggaaaacttgattcggaagcctgaggatcaaagagaaaacatgattccaaaaggctgcc

SEQ ID NO: 140308 - DNA, 812 bp, Cannabis sativa
  modified_base (117)..(124): a, c, t, g, unknown or other
  modified_base (207)..(209): a, c, t, g, unknown or other
  modified_base (756)..(763): a, c, t, g, unknown or other
ctggttcccttgtttcacctcaagatctcattcttcaacggttgaatggtcttggacctgagttcgactttgttgtctctgacattattttcttcttcctttaaatttgttattttnnnnnnnntaatttgttgttggagacataaaaaaaatattttattttgttttgttattagttaagtgaaaaaatattttttaataaatatnnnataatttaatattaaaaaagtaaccaatctaaagtaattgatccaatctacacttttgtggattaaatttgaactattgtgcggattgaaatagatttaaaatataaaattcacacttagtgcaaatcgaatgcactataagcaaaatagtacagattgaattggatgaacatttctagttgtcacgtcaaaaaaataacagtttatacctactcgcaataaaatatgggatttttataaaaatactgaattttgggctaaaatttacaattttactttcacgcaaattcttttacaaaaataatgtctttttataaaacaactataaaataacaattagaacaacaatggaacaactaaaaaataaacgtagaacaactgtaaaaacttaacaaagtacatagtataaaacttacacagcatttttgaaaaaaaaaatagaatattttaaaaaaaaaaaaaattggctcactgtagaaaagaattaaaaaaattcaatatataatataaaaagaggaaattacacttagtatgggattttaaaagnnnnnnnnataaatatggcacatttaagtttggccaatttatatggtattttttgtt

SEQ ID NO: 140309 - DNA, 1260 bp, Cannabis sativa
aatttacaatatttgttaggatctcttttgcttctcgaattcctcataggcttgagcttgccgaaggccaccttctactcatgtgtgcggtaaatgttctcccaaatttcattaagctcggtataaatagtatacactggcacatatttgtcatgctttttctgtttctttttatccttcaacggttccttaactctgtcctttctcttcgaaccagaagcccccgagttatcaattctcgtggaaactgttcctgttgaaatattgctgggtttgcctcccaagcttgttttcaacagattcatttccttttgggcttcttctttctgaacgaacacctgagccctttcgtgaactcagtgatgcttctcactggacatccttgtaagtcatcccacaactcactccctacggtcaatggatcagtaaagatccccgcctgaaggactgtaagttgcgtgctatcatccaaatttctaaccctggccagagccgtgctaaaatgacttaagtacgccttaagtgtctcgccaggctgctgctttatattggttagcgaggctgctttcggtcgcctatccctagtagcctgaaattgctttttaaaatccctggatagctaatcccaagaagttattgaatgatgagtagacttgttaaaccagctacttgttgctttaagaagcgagggggggggggaacaaaatacaacgtaaattgttcgtcacattacttgcttgcattattgtgttaaagttattcagatgcaagaccgatctgtgattctgtcataggatgacacacgcgagtttttgaatcccaaaggaaaaggggtattcataatatctgggtgatacaccttaagctcctcgtcagagtcgtatccagatagtttccctaattcccccacttgatatctcctaaacttgtcctccagctcgtttatttgcaatcggaattgatcctcttgctttggcctaagctgttggcgaaggtcaggtttcttccgattcaagtgctctcgcagatccggttggaagtaattgctggcaaatcttgtcttactcataaatcaagtcctactcatagactttgtctttaagtggcttgcggatttagtggatgccatacttttttgatcattagctcattgagcactttgtcctcttcgagttgatagaatatgggttatggatcgcctcgaagtcacacttgcttcttcacgctctgttcctgttggagtttattttaccaggatct

SEQ ID NO: 140310 - DNA, 558 bp, Cannabis sativa
atcaaaaagactcattgtcgttggctaaaagcgaagtcaacaacttgcttcacacttatcagtccacaaaactcgttgattctttttggtaattctgttaaaggcactaagatcttagaaaatccctcaacaaactgacgataataaatagccaaacttagattatctttaagttttattaatattttaatatcaaaataagatcatttcaaattttattaataaaatatgttaatatcttatcttattattaaaactaaaaatattttcaccgaaaatttgtaatgaacatacaatcatcaattatgcacataaaccaacatcaacacatccaaattatcacaatcatcattttaaatccatatttcatgaaattaaatcattaccgtaactctaaggccagttgttggaagttatttaactaggatctagatttactaacatgtatatttcattattagctataatctaacaccctaaatatgaattttctaatacgatgaaataaacacataagaaattaagaaatccttacattgatggcagcaaaataataga

SEQ ID NO: 140311 - DNA, 821 bp, Cannabis sativa
attaaaaataacaaaaacatataattaggggtaatataggaatattgaaaaatttaaatgctgaaaggataccaaagtagatagtttttgtaaatagaaggtactaattaatcattatttaaaattgaaggtatcaagtatgtataactataaaatacaaggtaccaaataagtatttacccttaaaaaaaacacatatagaattagagaatttagaaagatgaagaatgtatgctctaaaaaacaaaagaaacaaaaaaatagaaagaaaaaaaaaacaaaaaaagaaagagcagccagagagataagaatatatataagtttagagttatttagtagtgttgcttaattaataaaaagaatattttaggaattttaatatgaaaaacacaaattttgtcattgtacctatcttattaatttattatatgtatattatatataattaaaatcaaagatgtatagattaataatttttaaaaaattagaaaataaatatgagaaaataaataaatatttatgaattcattaaaaaaatttaaaaatgaaatatataattttttttatatacttaaatgtaaaaaatttattaaaaataagaaaattaaagataaaattaataaatgtattttgaagaattaaaaagaaaataattaaaagtgtttaaaataatttaaaagtaccatgtcattcatatatatatatatatataaatatatatatatactaaaagaaaggtacgtgcaagacacgtatacttggttttatgttaggtattttctactttatttacaaataatataataaataattaaagaaaa

SEQ ID NO: 140312 - DNA, 1088 bp, Cannabis sativa
agttataaaaaatcttacattaatagcatcggaataatatgaatccttctgttcagaactcgagcccttgatcctttcagttgtagagtatgatcaagatttgaacttggattctccttctgatgataaaattattggaaactaactataccaggaactagaattactaacatcctaaatatgaaattcctaaaataataaataaacatctaagagttataaaaagctttacattaatggcaacaaaataatatgactcctttcgttcagatctctaacccttaatcctttcagttacagattatgatcaagatctaaacctgaattctccttctgatgacaattgagctacacagtcttactcaatatgttgagtattgctttgatatgtgtgagaaagttctcaacactaaggaacacaaaattttgagtaagaaaccaagagaatttcgaaaataatgaatagaataataatagctttcatttgattcaatttttgtcagacaaagagagagtcataagtctattgaatcaaaagccattatgttatttttatagagaggcaataaagttagggttagaactaaatgggctgatttaaaagatacaatgaaactgaatgctcactcatggtcgaactccctataaggcccatgagtttgatttttgctattatatagcttccttaataaaacaaatttatctttcttcaataatgccatttttctattctagttatataaatgctaactttatctatttaataattataattaatttttaaatatatttattaattagaccctccaaggtctcttaattaataaataaaacttgaattccctttttcttttcaaatacaccattcctaaataaaattcataaattagacatggtcttatttagaatcttaatcgattaaatatgtcaattaattgagactataaaataatattaactcaattagtgtggggaccatgagcctatggaaccaagctctcatgtatttctaaaatttaccgagtaaattctctatcttattagttccttgtgactctactatagattcagaatcgcactcttgacta

SEQ ID NO: 140313 - DNA, 502 bp, Cannabis sativa
tgcaaaccatggtaaacagttctaacttttcttaagatcacaattaggtcatccatgaatctagtaatggtttatactaagtacataacaattccctcattctgtatttccttagaaggaactaggcaacgactagtaactaatcatagaccatgtattttcatcaatatgcaaattgaattttcggggaggtaaacttggatataattcaaaaaatcaacttaatgatctttgaactgcatatcaaacaaatatttctccacccctataagttcgcaagatctttaaccacttaccttaagtgtttgtcaccattcctagaaattcatgaaatttttaaacatttcaaaactcttttgcataaggtaaaatctagagcgatcgtcttaaaaataacgaaaactcatatccacccctgaatgtgcatcaatcttcgaatgagatgattatacttgtggatataggcatattgactctttgcagagaaaaatcttgtcaaaac

SEQ ID NO: 140314 - DNA, 817 bp, Cannabis sativa
taattttaatttaattagccttgggattcccaatcccagattaattaattactacttaatcctaattctacattgctagatatcaatatataatatggtataatatggttattttaaaatgaagtgcatgctagttggatattatcgtaaaaattatactaattgaattattagtataattactttcgaaattttacttttacgtatatacagatgtatatacacagtagtcatttaattaatatttaacgataatatttaagtgatactttaaatttataaaaaaaaaaataaatctaaaaaaattttgtaataaaaatataaaataaaaaaaattaaatgtataaaaattacaacataagaaattttacctccaataactttagaatataaatatgttcttcgttttttatataaccatgcacgtcgagtttattatattgttaattaaaaaaaatggtttgagttttgtgaagtcaaattcatttttaacaatttattcatacttaaagggttttattttcgggcactataatatcttttataggtagcgttttacgattaattattatataagactcaatatttaattacattaatatcgataaaacaccgagaaaaatgttataagcactaatattaccttttgacaagaaaattgctaagaaatattattagtgcctaatacatttcttagcgtaattaagtagcgcgtcttatatataacttaaaaaaataatttttaaaaagtatcgctaaacaataggtggatgtcatctataaaaggtattgtacaccacttatatctcatagcaat

SEQ ID NO: 140315 - DNA, 639 bp, Cannabis sativa
gtgtgtttgtaatatagatgagttatatatttttagttatcttcttttgtagagaaagatatgtccatccattgatatatgcaaaatgaatttatgttattttgatgtggtcaaagttctttttttgctctaacaaactaagaatgtctttgtcttgtataattcctcttgtatgatttgtatgatattgttctgtgatttgtttaataaatttcctattcttgatttgtaacggtaagtgaatcttgtttctattaacagggatttattattcaatcgttcgagatatctatacgtatatattttctgtattctgtattttgtttttttttctttttagcgtcattttctaaccgacgcttaaaataaaataaaaaagttagtatttagcgtcggtttataaatgtcgaaatttttttttgcgtcgttttgaaaatgacgctaataaaaaactatttgtttataaaaccgacgtaaattctttaagtgacacttaaaaacagacgtgaatagcgaattttgtattagtatctcccactatgacaaggtaccgagaattatgtctaagaaaactaaattgtattgacctctttggttgcgtcaagacaactgaggcagtgtgatcatcatatggaataa

SEQ ID NO: 140316 - DNA, 815 bp, Cannabis sativa
atctccattgttggttttacatgattaattgtttcaatataacctcgagacgttagacttcgtcccctttatggatggttattcgttgaatcatttaacactgtgagatctcatgtgataagtattttgtaagtttttgtttctattagactctcccctacgatgactacttagaaataaacttacagagtatgaaacaatggtggaagctcataaaataagaataacattgactctcacctaccgggacaacgttagatctttattttgatcgattaaaaggttgctagaatggtgtacattttgagttgtactttattcaactaatgttatctttgactctcgtctagcaggacactgtattccattatgttagaaaccttagaaaataattgaatatattttattttggtatttttgcaaacatgtttcattacttgttattttctgaacttgtgtatgaatttatttgaaccaagtaatttatttctatttattgatatttgtagtgtcaaaatgtacaacccacaccttagtcctcttttagtttattcccttacaaatgaactccaaagtgtgaagatgactcattgtcagggtatcacttcacacttgctcatcatgaacttgaaattccagaaagcaattattttatctagagagcaaagagttcctttttttctcaataacttatcacctgagtttaactaatttgttgtatcttttatgactaacaatcggaactcgtctgacatggacaagctggacgctaaattgcgtgcttatgaacagacattgtcacttgcatggaaatc

SEQ ID NO: 140317 - DNA, 865 bp, Cannabis sativa
aaggtgtcttattattctaataaatatcatatattaataaatcaatatagttttaattatttaaataaaattaaataaagaattataagaaaataagttttaatatgaaaaggcaactaaattaattttttgtattttaaacttgacaaagattaaaacatataaaaatttattttgcaataaattttaaaaaaattcaattaattgggcaagattaaattcaccaatcacctacatagaaaatgaatataatacattttctatgaataattaaagggctttttttttaattattttaaacttgacaaatattgaaaagtacaaaaatatattttgcattctctctagaaaaaataaaaaattgaaactaattgagcaagattaaatttatcaatcacccacttaaaaaataaaaatacttaaacaaatcaaaataaaagaatagtgatctatataatgtaaaagtatattatccacaataatttctaaactggactttttaaaatgactctcatattactaaaaacatataaaaaaacaaataaaaaatatgacaaaaaaaaatgagaaaacaaagaaaatgggaggaaactcacataagattatcatctcattttctttttcttttctttattagataaaaaataaaaatttattggataagatattaatcaatcacccattaaaagtaatattttttagacaaaaaagaaatgtaataagaatattatttataacctacatagataaaacataaattgtttttaaataatgtgggacttttaatttgtatgtgtgctttgatttttaaacaaaataaggaaatatgctagaaaatagaaaaaataggaagaaaaaattataa

SEQ ID NO: 140318 - DNA, 1417 bp, Cannabis sativa
  modified_base (463)..(463): a, c, t, g, unknown or other
  modified_base (497)..(498): a, c, t, g, unknown or other
  modified_base (1094)..(1098): a, c, t, g, unknown or other
tgtatgaaaggttccacaagcaagcacctccagtttttctgggaggtcctgatgtcatgaaagccgagcaatggctatcagtgattactagaatcctgaattttgtgggcatcaccggaaatgacagggtggtctgtgccaccttccagtttcaagaagatgcactggtctggtgggacatggtgtctatgatgcatgatgtcacgacaatgacctgggaaaagttccagaaactttttaatgcaaagtattacaatgaagcagttaggagtgccaagagaaaggaattcactcacctgactcagaaagaaaatatgagtgttactaagtacacaacgtaatttgaccgtttggcgaggttggccttgggaattgtgccaaccgacttcagtaagaaagaaaaatatctggatggattaaatgcgaaaatcagacatgatctgatgattactactgacgacanaactacctatgctgaaatggtggataaggcactnngagctgagggcgcagtgggatgcatgatagagtctagaagaactccggtggttggcgggactcctacccctcctacatcaggttttagcagaggaggtagtggttcgaccatggaccagaaaagaaaggcatccactgcaaccagtggctcaggtcagaacaagaggttccgggggaacaagggtcggggcaatcgccagagtggcaccgaaacccggtacactttcccagagtgccccagttgtaaaaagcaccatttgggggagtgtaaagggcaaggatgctttcagtgtggcatgccagggcattacaagatggattgtccccagctcagaactgaggcactgaagactgcagcaaaactcactccagccagggtgtttgcgataactcaggctgatgtagaagccagcccctctgtggtaacaggtcagctcacggtcaacaactcttatttctctgtgttgtttgactctggagccactcactcttatgtggcagctagagtttttggtaaattggatagaccgcatgatagttatgaattagggttcgaaaccctactccctggcagagagttagttatctccaaaagnnnnnttaggtctatgccaatcagaatagaggatagagagttgagcgctgatttaatagagttgaattttgtggattttgatatcatactgggaatggatttcttatccaaatattcggccagtattgactgtaagatgaagatggtaatcttccaacctgaaggcgaagaaccgtttgtttttgttggatcggttcagggatctcgaatcccagtgatttcggccttatcacctaaggaatttttatgtgatgggtgcttagggtttctggccgtggtagtagataccactcggccagatactgttcggccagaagacatcaa

SEQ ID NO: 140319 - DNA, 760 bp, Cannabis sativa
  modified_base (97)..(99): a, c, t, g, unknown or other
  modified_base (148)..(155): a, c, t, g, unknown or other
attcaattttactatttcagtgattgtttatgtactaaaacatactccccatactttcatatctaccaaattatacccctcaaactttgatatgtannnaattatgccccctgaactttcattcatgttataatttttttactaaaannnnnnnnaaatccttaaatttaacaatcttaatagttcaggggaaatttttaacggtcaaaaaaattcagggggcatgatttagtacatgtcaaagttcgtgaagaaaaattactaattaaccattcttttattttttttatttttttaattttaactagtaaacgattcgcacttcgcagcaattattttaaaattttctcatataatttttttctttgtattttctctaataattttacataatcacttagaaaaatatttttttagataattataaaatatcttttgtaattttttctttgaaataataaaaatataaaaatatgaataaaaataaaaataggaataaaaacaagaataataataaaattaaatttaaaataataaaaaaatcataaaaaaaatattaaaatcttttgtcattcctccctcttaaaataaaataatcattttataaaaataataaaaaagcattatatttgaataccttaaaatgcaactaaataaaataatagaataaaaattgtttcattgacattccatttcattccttccaatcaaactgctgttaggttttatgccctaaataaaacttcatttcaatgtaatc

SEQ ID NO: 140320 - DNA, 980 bp, Cannabis sativa
atttaattgttactgaattattattattattactttaaaattattatatattttaataaaataataataataataaaactaaagaaaaaaaaaatcagaacataatgcattctctaatgcatgatatcgatgcatactcgcatcagtaaaagcaaaaaaaccaaaaaagaaacatatatacattaatcgcatatgtatgaattgaaaatactgtagatttttatatatatatatgcgattgattgaaaaactagaacgtggaccaaatacagtaacatggcagtatatataaaactgtcatttatataccaaaattttcaatcgtaaagatatatcatcgcatatatatacaaagcaaacatttaatggcataagtaaatatatatatatcactaaatatcagaaacaaaacaattaaaagtgactgaaaccacatatagataataaccatatgtgataaattacagagaaacaagaaaaatatatacactcaatactgtacgattataatcgaaaagatataattccaaatggacaaaccaacatatatatatgaacggatatatatattcgacactacatttatactgaaccgaatactaattgcaaaaagaatatactaattgtaaaaagaataatttaatggaagatcaatattaccataaattctcaagaactaattaaagggttgctctgatctaattaattcatgagaatcaaacaataggattaaggaatagcggaagcgtaccggagtccatagaatcgattttgtaataacctttgattggtatgatcttccaattttttacatcaaaaccttctctctggaacttgagttttcttgatgatggggattcaagaatacgatatatgcaaaaaatggggacaatacctgtttaaattaatatcctttttgactatttccaatttggcccctcatcaaattagaaattgtctaattggtatccacatattaa

SEQ ID NO: 140321 - DNA, 1106 bp, Cannabis sativa
atattaaaaatatcacttacacacataataacatctccaatgttaaattttagaagatgtttgcttatttggctaaacactaggactctatactattagagttgaataggtgctaatatcatagaaaattaggttgatgctactacatgacattgatgttttctctttttaaaaaaaatgaaaaattaaaggtaaataagtagtgtgataatatttaaaggtgtttataaaatagtcgatctaatccaattcacaaagtgcggatatccgtacttgtgcggattggatgttaattaacatgtaaaagtaatcgatctaatccaatctacacttatttataaaaaataattaaaaaattatatataaaaataacatgtaaagaaaatagtaatttaaaagtttaatacatataatataattatattgtaaaacttaatagatcaaatatatattctattcttatatatatatatttttctacatacaatttataataaaattaaatattttttatatacatatttttttttcttcctttgaatttatttgttattttatttattttgatatgttgttggagacataaaataaatataatacattttattttgttactagttatgtgaattttttttcataaatattaaataatttaatattaaaaaatttcaaatccaaaataaccgattcaatccgcacttttacggattggattggattcgatttgagctattgtgcggattggattggatctaaaaaatgaaatccgcacttagtgcggatcggatgcactctgagcaaaatagtgtggattgaattataattaaaacaaataatatattaaataataatgtgtgagatcataattataattatgtataacattcttgaagagtgttatactattggagtgtttttagaattaagagtaaaaaataatgtagaagagagataaaataaaatattatatttttggatgatataaagatttttagcacctttaaaaaatactaccattgaagatgctctaatttttttaatgttgatgtcactgttcttccttcacactcaaccgatttccatctcttttctatacattttttgcg

SEQ ID NO: 140322 - DNA, 602 bp, Cannabis sativa
gttgttaatgagtaatggggactgtgacatctccttgttaaggtctatgttcgactctgccacgattacgaatatcttgaaagggagtagacctagcgagataagtggctttggactaaagaaggttgtggtaaattcactaccaagtctgcttatctgatacaggcgtatgatagagcccctgcctgtgtgattgctccggccctatggaacaaactttggaactctaaaattctggagagacacaaaatcctttggtggagtatcctctctaatgctttgccggtcagacataccctggctaggagaatccatattgatgacgagacttgcccgttgtatggggaagagacggagtccactgaccaccttttcctctattgcaattttgcctaccacatctggaggtcctccccttggggggttttcccggtttacggctctggtggtagggtatgggatagggttaaattcctttggaacttaaagttagatgggatgatgcggaaacgctatttatttatgcttcaatcaccgtggacatgatttggaaaacccgcaatgataaggtacataactcgactcaggataatattttgaat

SEQ ID NO: 140323 - DNA, 826 bp, Cannabis sativa
  modified_base (128)..(156): a, c, t, g, unknown or other
  modified_base (306)..(313): a, c, t, g, unknown or other
attgatagattttgtttaggcccacttagtattgagcttattcaatgaataacagttgtttaattaaggttaaattcctctccttcgggccttgtgtgacacataaggggccattagtagtgggtacnnnnnnnnnnnnnnnnnnnnnnnnnnnnngaacaaccccaattgtgaaggcctatttaccttatttgaataactgtagttggttaatcaaactagtttaacctaataaaattgatttgcagcataactaatttcaaaatatatgaaattaatttttcatcagattattttaaaattaannnnnnnnaaacacacttagtttaatgaaacaaattcaagataaactagatgtatttttctgtattcaattaaataaaagaagttataactaattaaattcttctagataattaattatttggattttcatagaaaatatatttaagttgaaattagtttttaaaactaactttggatcaacttaaattagaatattttgaaattaataattaagtagattttctaagaaattagtcattcagatattcttcaaaaatatttttaagttgaaaatttgttaattttagatcaacttaaatagcgatccttttttcaagttaaggtgattagttcaagatacttaatttgatatttaattaaattttggaaaaattatttaagttgaaaattttgttattttagaacatcttaaattagatattttaggaaattattttattatattttaatataattttgaaattttataattatttataaatagattttcgaaatcaatttttttttgaaaattaaatta

SEQ ID NO: 140324 - DNA, 698 bp, Cannabis sativa
cagagggaagaaattttggaaaccccactttgaagcgctacctcgtgagagggaaacactaaaatcttctgccgaggaaattccaaatgttcaatcgaaccaacttccggagggtttgaaatatgtttttctggcagatggcgaaacttttccagttatcatctcgtccaaccttcaaccttctgaagaattgcagttactcgagctactgcgaaaatacagacttgcaataggttggacacttgctgataccaaaggaattagcccttgagtttgcacccatcgaattaatctggaagatgaggctatcctaagaagggaccctcaaagaagattgaaccctccaatgaaatgagtggtgaaaaataaagtactaaaacttcttgatgcgactatcatttatccagtggccgacagcaaatgggttagtccaatttaagtaatgcccaagaaatcgggtgttaccgttgtccaaaatgaaaaggggcccttgttcccacaagaactgtgacgggttggcgcatgtgcattgattatcgaaaattgaatgtcgcctcccgtaaagatcattttccgctcccattcattgatcaaattcttgagtgcattgctggtcatcttttctattgctttctcgatggttattcaggttactattagattaagattgcattagaggaccaagaaaagaccacttt

SEQ ID NO: 140325 - DNA, 1468 bp, Cannabis sativa
  modified_base (1439)..(1442): a, c, t, g, unknown or other
ctcatattttcctaacaatcaaaaagcttattctttttcaatggaaggagaaacaatcaagatgatgaaccaagacttggtgagattggaccgctctaatggcaccaatttcactaggtggcaagacaaggtgaggttcctcctaaccaccctcaagattgcttatactcttaagtccaccttggagccgttacccgtgcctaccgacaaggatacttatgaggtcaaggcacaaaggaagaagagagaagatgccaaacttctatgtaaagggcacatcctcaactcactttcggataggctttatgacctatacaccgacactaaagatgcctaagaaattcgagatcaccttgaaaataaattcaaggccgaggaggaaggtaccaagaaatttttaatttctcaatattttggtttaaaatttcttatgatgaacctcttttacctcaaattcatgagttgcaagtaattgttaacaaattgaaagtgctcaaaattaaacttcccgatgcattccaagttggtggaatagtggcaaaattgccaccatcttggaagaataataggaagagaattcttcataaaaatgaggattactcttttgaagaaatccgaaaacatatttgaatcaaggaggaatcgatatgtagggataagcttgtggaggggtctaatgaagagacttccaaagaaaatttaacttccaaagttcctaataagaacaagggtaagacaaaaaagagtaataccttgggtccaaagtctaatccaaaccaattcaaaggtgaaaaaagtccatgttttgtgtgtggaaaacttgaacactattctaaggattgtaagcatagaaaagactttaagggacccaaagtgaatgccatcgaggaggatatcattgctactcttagtgacgtgaattctgtgcaaggaaaagttaagggatggtggtatgatacatgtgctaccgttcatgtcacatatgacaaatcattgttcaagacctttgaagagtcaaagggtaaccatgagatctaaatgggcaatgaggttaaatcaacggtattaggcaaaggtaccattgatgtattttttacctcaagtaagaaagtcacattggtgaatgtactttatgagcccaacatgaatagaaacttgattagtggtggcttacttaaaaaacctgatattaaggccgtttatgaatccgataaggtcatacttaccaaatataatgtatgtttgggcaaggggtactcttgtgagggaacggtgaaattatgcaccaataatgtaactttcaatgttagcaatgataaagcatctatttccaattatatgattgagcttgattctttatttttgtggcatcttagattagctcatattggtttttctactctgaaaaaagttaaaaaattgtaaagaccgcttagttnnnnttggaaattagcagttaatcacgttt

SEQ ID NO: 140326 - DNA, 806 bp, Cannabis sativa
  modified_base (53)..(55): a, c, t, g, unknown or other
aaatctgaagtcggacccaaccccgtacccgaaacctgcacaggacccagacnnngacaggaacctagacacgaacccataccaagaccaaacaagaacccagaccaaaacgctggaaccaaactaagacccagacaaagaataagacccaaacctagtcctgcaccaagacccaaactcgaacacagaccgggatcagaatcaggacttagacccgaaactaaacccgaactcaaatcgagataaaaacctgggactcggacccgaacctggacccagacccagccccctaaccaacacccaaagctcgatccggacctagaccgagcttcagacccgaacccaaactcggaccaagactccaaccctaacttaacatcgaacccaaactcgaactcgaaatcgcaattggaactataaccgtactaagaataggacaacaaccacgataaggacccaaacttgaacccaaacccaaatgaaaacccaaacagagacccaaactcgaaccgcaacgaggacccaaaccgaaacctagactgggacccaaacccaaaccagaactgggagctggacccaaacttgatccagaactaggactagaaaactggactaggaataggatcgagactcaagagctgggaccgagatcgagacctgggacagggaccgagaccgagaccgggacctaggactgggacagggatcgagaccgggaccgggactgagaccgggaccgggacccgggacccgggacccgggacccaggacccgggacccgtgacccgatacttagaccttagacc

SEQ ID NO: 140327 - DNA, 1843 bp, Cannabis sativa
  modified_base (43)..(47): a, c, t, g, unknown or other
atctatattaataagtaaatcagattatattgaaatgagtttnnnnnagggcataaaacccaacatctttcgtataaattccatatgcttatttgttgtataaattgtctatacggacagacaatatattaacttagtatgtccgatcgttattactcggttaaaatcataagatctcagaatacataattcataattatgtctttacattccttatatgagacctcctcacctgacctactgacttaacttaataacaagttaagtattcatttatgataggtattcagttagagcatttcttatttccacccactaacataaactcatcttgataccttgtaaatctttacttgttaacacattcttcctcttagaaatctctggaacgactatcgattctacatcctaatatgaatctttctagcgtactttgtcctcactcatatgcttttgaagatgactccccgaaagatttctcatcttgagattactccaagttaagtatgcttaactccaaagtaagctcatggtgggttatcagaatgtagatgctttttggcattcctaattgtattacttgttttcattctttcgtaaaaaaaattgtcccatcactcccttcattcacctcttacaatttctcatcggttttgttcacttaaacttgaggaattcccatcttattgtcaacttgaatcttgttcatttttacttattaactttcatcaatttctcttgaattgacacaactttaaaatttcccaatcacctacagttaactaccgttattaagtgaattgatgtaacctatacagtagaggcaacattgctcataccaggtacccataactaaactggaaatgcccattttttgaattctcaactaataacaattaatcaaagatcattccttgatcctgaaatttcctttttgtgtttggtagaaatcttgataatcttttcaaacacatctaaaaatatatatacctcaagtatattctttgtcttattgacaatcccttggcatgaactactatgccaacctatagtgagtcccccgttgatgatgctaattcatcgacatctaagaccctagtatacttttcccgtcattaccactaaggttttcctccctagttcataaaataccattgctcctttgtaatcatcactatcttcatactttgttaatcactttaaaacttattttacactcaattatatagctctttgtttaataaacaacatactttgtgatccaacatccaccaatcactcaattacatgtctattaaattgcatctcaattcataagctttttccccatactgggtgagtatgcctttccataattgcataataaagtgatcttttcccagaatgtcaatggtctcctttataccatattgactatccagtcaattttaaagtactctccatcattaccgtatcaccttaagtaatttagataatcttttttaccttagtgataccactactcttcctgatgttcttttatacgttatccccggtaacgtccctacttcaagcctctgttgggcccttactccaacagaatgatggctcttatacacgagtgcatcactctagctgcttccgagctgacgactggctccacggaccaaccaagtgtttccaacgtgctttgctccgactcgcacgcttcatggggaaatttcctaaatgaaatcaccacaagttaaggactctcaaccatgggagctaccaaaacaagatacttcttgctaacataggtagtcccacacctacataatctcaaaattactacacaatcgccgccttcaattcacctaggatt

SEQ ID NO: 140328 - DNA, 509 bp, Cannabis sativa
tttgccccattgttagtttgtctttttgtgacttaataaattgaaaaataaatgttatttaatattaattgttggctgaaatgaatatattgatttccttttctttattttttcaaagtttcaaaaattagaaagttagaaaatattcaaaggaaaaccatttttttttctctcaattctctctcttttcggccctccttgagcagcaaggaagtggagtttttcttggtgattcaagcttattttgaccagatttagtgttctataattgttggtaaagtttcttcatctttctcttatgttttcttgaagtttttaaagtgaaatggtaggttgcatgctagttttggggtggctattgttgctgtgtttatatgttgttttcagggatttaagcaagttaaattaaggatgttagagctgtttgtgaagcatgatagttaggttgagtaaagctaaagtttttctatgcaaaagtttggttttcaacatgaaattgtgtgttttgt

SEQ ID NO: 140329 - DNA, 889 bp, Cannabis sativa
ccttctttccaaatctccaaattcctttcattggggacacccgaaggaaaatataatccccaactcggaatttaatatctctatgctttggatctgcgtagcttttttgtctactctgtgaggcaagcatacgagctcaaatctttttaatggcctcactcattcttggaacaagtatcttcctcaaatcaaattttcttataataatagttattagagtactattgggcatggctccatatgagatgctttatggaaggaagtgtcattctcccattcattgaaatcagtgccagatgtgttgagatggagtcaatgcggtctgcgagggatttaggtgagtcgtgcgtcaaggatagtcctttgtctgatatacaagtacaggatgactttttctgtttctaaagtgatgtttcggtgtctcttactggagaagtacgggatggctattgggttgcaactgagtttgctactatgttaggagcactggaaggggaactactcgtgatacaagtggctcttcagaaagcaaaggagagggacatttcaaagttacacattcaatctaattcgaaggttgttgtgtttgctcttaggagtgcctttctgccttttgcttggggaacttatccaattttttattcctgtgttaaactttgtaagtgttttgaaattgtaatcttttctcaaattttttttatcgatgaatcgtgttatggattctttagcaggttggactaggtgtgtaaaggtgcaatcagtgggttatttaaggaatgtggtttcctttgtgactactactttgatagagtttgttttctgttttcaataaaagttttttaattatcaaaaaaaaaaaaaaaagaaatgaaaaagacaaagaggaatt

SEQ ID NO: 140330 - DNA, 761 bp, Cannabis sativa
aaatagtaaaaatcttcacattttttatagtggtacccttttgtgaaatgtggccgagacccatctcgggatattttttcccactagtcacaatgaatttttactactaagatttgaatatgaagcttggtttcatgttaaatttggttaagatgaccccctgattcaaaaattaaaaatattaattttgtcatggtaaattttaacaagttttttttttcgtactcttataatcgttagtgttctcttaaaatctcaccctacacatctcgaaatttcacagggatgaagctaagaggttgtgcattttctattggacacgttgagagagaaagttgttttcaagcactaaccattatttcaattgaaatagtgaaaatttcatttttctgatagtggttcccctttgtgaaatgtggcccagatccatctcagaataattttttccactagacacaataaattcaaactaataaaacatgaatatgaagaatggtttcgtgttaaatttgattaaaatggccccaaattgaaaaaatgaaaatattctacttcccatggtaaatttgaataatttattttcttactcttacactcgtttgttttctcttaaaatctcaccctacacatctcgaaaaattgcaaaattccactgggacagagccaataccattgtgcaccagttttctattggacacgttgagagaaaaaaaaaagtaattttcaagcactaacaatcattttaatcgaaatagtaaaaa

SEQ ID NO: 140331 - DNA, 1401 bp, Cannabis sativa
  modified_base (1335)..(1360): a, c, t, g, unknown or other
tcacccatgaatttctcataaaactaaaaattttgttatataggcacactttatatagaatagatatttataaaagcatattaaaataataattaattgttaactatatgcatttagattgaatttatttatttattttatttttcaaatatctatcatctttttttatttcatgttttagagtttgaatataaaaatggttaacttgacttgcattaaaaaaaacacacacctaaacttataaacacaaacacaaacctaaacataaaataaaattgaatacctaacaaaagctgaacatacaaacttattataataattagcatactaaattttcattaatttcatgaaaaatacaggtgctcacagaaactaattaacttgatcatcgttaagagtggattagttgaatagacatagactatggagacgaccaaatgaaaaaatgtgagtttctatataacagaatgacctagagagtatcattttttttatactaaaatgtatggctctccaatattgctcaaaatatgatggcaatagctagtgtatacatagagataatgatatgttattgaaagaagatataataataataatactaataataataataataacaataatataattgttatattatagttaattgtaattgttgacaaaggttttcgtcaaccaattaaatgatataatgaggagagctatggaataattgatgctggtagtttttacgtggttcgggcattaatgagccatagtccacgagtctttgttatttatgagagttcttatacagagaatgttcttggtgaatctctttctctcttctttactctctttgattcattgattgatcccttttttcgttctgtttaggggtatttatagagtttttccaggaacactaaaaagggatcacttgtctttaagtgtcagccctttaggtgcacaagtttctagcagatataaaatagaacatacatgacctatgccgtaggtatcttagggattagatgagagtaatctttatccttccttgattgatgtgattcttcataatggagtcgtcactagactcgttgattatcgtgtaatcgccgtaaaagaggcttacaccatctgtcaaatccttttatgggtgttctattacatttcccccatgctgcattaaatgtgaaatgactgtttgaacatgttctccttctcccagagatgcattgttgtatttctagctctcggagagtaaaggcatgtcttatgctcctctccgggggctcactccttgaaatgcaccttctatctacatatgacttaacaaagtctcttaattannnnnnnnnnnnnnnnnnnnnnnnnnttcacaattaagccctagcttagtaaaaattcataaactag

SEQ ID NO: 140332 - DNA, 574 bp, Cannabis sativa
  modified_base (381)..(381): a, c, t, g, unknown or other
gttgccgaaaaccttggtcaacaggttctaaatcccagctcgcatctatgtgacctgccatatcttccatagtaccgttttactagggcataccacacggacagacaaaaaacaggccaaaagtaaaacatcctgacccaaagggcaggttaaaaaaaaaagagcatatgtataaacatcctgacccaaagagtaggtccaaaaagaaaaaaagagtatatgtatagacatcctgacccaaagggcaggtccaaaaaaataaggaaagatatgtgcatcaaaaaagatcatatatataaaaatcctagccctaagggtaggtcaaaaaaataattgtaaatatatacaaagggcccggggacaggccttaaccattgtttncccttagaaaataaaacaactgtaaataaagattgtcttaaataaaagagaattggctgtaaataataaaaaaaaaagagataagaaaactatgggttgtattcataacggcctagtcaattcgaggaggaaggcgaggaccaatgcgagcctccagcatggcgtcaaacttcttcttcttctcccagaattt

SEQ ID NO: 140333 - DNA, 709 bp, Cannabis sativa
  modified_base (134)..(141): a, c, t, g, unknown or other
  modified_base (189)..(207): a, c, t, g, unknown or other
ttggatccaaaaaataaaatttgcacttggtgcggatcggatgcactatgagcaaaatagtacggattggattggatgaacacccctaccatactaattgagacagtactatttgtaagactcagttaattgannnnnnnnaatcatttataattctaaaattagtctatgtcttatttatgaattttnnnnnnnnnnnnnnnnnnntgtgaagaaaagagattctagagtttatttgctaattacgagactttgttgagtctaattaataaatatattaaaaggcaattttatttgataattaattttaattataaaataaatagttttggcatttaagtggttgaattagaaaatatatcatttgtgaaagaataggataaatagttgaaaatggcaaatttgcaagtggtgggcccacatcctatggccggccacatgtgctctattttacaatttatttatcatttttctaatgccaaataattcaaacctacacctagaaggattcctataaatagatagtgatagactcaaactgaaggatgatgaaagcttatgcattcactagccttcagtcaaattttgagtcttctcttctctctctatttcgaacacttcctctctttttctctcttcaatttcgaaccctagagtgatagagtacatgcccatgcatagcaagttgctactcaatcatagtgtgtaa

SEQ ID NO: 140334 - DNA, 740 bp, Cannabis sativa
ttaattatatgatgagttttatttatttttatcaattatttttgtagatctcaatttcgatttttaattttttatctctattttgattttggttttggtttagtattttattaccttatatttttttataatattctttttctttctttttaggtcacaaattatatgatgaggcaagtaaagaatttataacaaaattattcacttatgtataaaaagttagtaattaattaactcaagtatgtaatttgttttatgtacagagcaaacttattttgatcaatagtgataactacaaataagatacgataatgatagcaactttgaaagcagtggggggactacaagtgagatacggtgatgacatcggctttgaatgacaacagttttaaaattatatgatgagttttctatagatttatcaattagtttttttagatctctattttatgtgaggattttccaatctctattatttttattttactataacgtttgaaaatatcttttttagataaaaaattgtatgataaatttttctaccatgttaattttattttttaggaaatttgcggcaaaaacctattttgatcaatttgttgctattaaatactcaaaatctaaaaacgacagcaaaagtaggggtgttcataaaaaccgaaaccgaccatcaaaccgaccagaccgtaaccgaattttcggttccacgtcatcaccaaatttggcggtcggtttcggtt

SEQ ID NO: 140335 - DNA, 524 bp, Cannabis sativa
  modified_base (27)..(30): a, c, t, g, unknown or other
actaatcagattgtaaagagttttatnnnnggcataaaacccaacatcctgttcggactgtattctccgagcaaatactcgaagtcggttcaacgtgtcaccatcatgtgatgccacgtcagagtgcaataattgggataacagtatattttacttattaactagccacgtacatcatttaattatactaattaataataacatataatatcccgaaaaataaatgatatttaaatagacgcattttattaaatatgtaattatttgtctaatgaagtaaaattatgatcttacttagcgtaattaataagagttcattgaatgatcatgaagcgtaatttattaattacagagattatattgggatatgtgtgtatcgaggataccatttttgaaataaaaatattttatcaggcccggcgactatgaaaatttagcattatggtcagaaatgtcacgacattaatggaagaattattttgagggtattccggactagctagaatttttagaatgtcagttta

SEQ ID NO: 140336 - DNA, 1035 bp, Cannabis sativa
caggagtattggggccaaattgggaaggtccatacaaaattacggaagttgtacccccgacacgtataggctcggccggtatgactccaacataaaccttataacaagagcccgatattggaacggccaatacctccgcaaatattatcaataataattgctcttcaccgacgattcatgctaagggtatgcccataagcaacttagaatctttattagtgtttagtcttttcttttagatttgcttcagtagtgctacgtagtgatgtaataaggcattgtctccgatttcatttatcaataaaattgcaagttattttcatataatgacgcagcttgtatgattgttattcaatcaacttgcaagcctcacaatggtcacagatttatgggtaatagtggacatccaagactcaaagtaacaccccagtcataagataagtgaccaagaggtgaacctgcatagtcacttgggggaaaccacacccaaatctgtactagtaagaaaaaatgcaccctcgcttaagtgaatattaaaatttttaaagtgttggtgcagtactcaatgttttgagcaacttgtgtgtggtgaatggttgagtatagataaatacccacgctatgcggctcacgccaaacaaaagtcaacatgtaaagccatatataaagataaaggccctatggccaagtaaaaagattaaacacataaatgtctcaaaactaaagttacgggaataaagactgcccgtacagtcacgaatctctgtagagtactagtgggcataaaagctgtaaaagtagaagtacatcaataggaaccatcaagtaagtcattaagaggactgtcatcggttgcttcaaccccaaagttgaggtatgaatcggcctgaatgcaagctgcctgcgccttctccctggcttctgcctcctcagaattgtgacaataagatagcatactttccatgttcttacccagataactaaagtcaaccttcttgttgtttagccaaaatttgaagaaaacatcggtggaga

SEQ ID NO: 140337 - DNA, 739 bp, Cannabis sativa
ggtggagtccaggtctccctcaagatcggcgtaggattgggcaagagagaagcatgtaactctacaaaagaagtacaaatatggtcaatacatttcaacacattaggaggagaattattgtgtaccctttcattgcacgtcctccatatagtgtcaacaacaatcgaagcataaagaaagacgtcctcaactcggatccccctatttctaagttcccaaataaatttcacccagtcccaaacacagataccagtatcacaaacagggtagattccccaaggtgaagatcgccacaagtgtaacgtcacatcacaagaaagaaataaatgttcaatagattcatccctcaacccacacactggacaacttgtatcctcaatctgaaatcgtcttccaatctcagatctaacagggaacgcattagataggatgaaccaccaaagaatcttatgacggtccaaaatttttctattccaaaacttattccaaagcaacagatagtgccagccctatgtaaatttgggctttaggcaaaaataaaaattggggcctagtgaaaaagtgaggcaattaggatttgaactctcaacatcttagttgttaaactaatcaaattaccactgggatacaacgcatatttagcattaaaattattatttattttatgagggaaacaaagtgatcaaagatgtgtgtatttcctcaagccaacactttctatttatagaaaaccacatag

SEQ ID NO: 140338 - DNA, 691 bp, Cannabis sativa
gtggtactatgtccaagaactttattggtatcaatttctattactacgaaaacatattaattagaacaaaatacatgatcaagaataagctttaataaatttgctaatttgttcattatattacatccatgtctaatgaaaatagatgtgttatagagatactgtggtgtattgagtataatctagagttcaaaatgaactacatatgtcaatagcttcatccaccctcagtgtcatagagatcatgtggagttatgaatatagtctagagttcaaaagatgtaaaagatcgttgaactgcatatattactacttaactttttccacccctatcagatcaaaagatctttttattaaataaaatcttaataattgcttgagaaattacaattattcataaacattgaatttgaatttgaggtgtttatgtggtatgatctctttgcagagatgaatttaccatagattttgtatcaataataaaacacaaacacatacaaatattataaacatataaatataattggtattggcatacacaagataaagaaaatatgaagcttaattcataaatgcaagttataactaaaagagaaaactttatcaatattctcaaaacaaaatgaattgtctgcataaatatgaaatagggaataaaattccaaactaataattgaaatcaaattgttca

SEQ ID NO: 140339 - DNA, 1689 bp, Cannabis sativa
  modified_base (1308)..(1314): a, c, t, g, unknown or other
atctaatataagattgactcgtggacaatgtggaattttaactgcaaaactacgtaaataacccttgtgttcatacttttttctttactatttttatttttctgtgcaagtttatcaccatttaagctcaaatctggttaacgaaaatctgcattaacagttttgtgctttcattgagagccttcgtgtaaaacctcagaaaaaattctccttacataaaaaaaaaaaacaatcttcttcatggctgacaacacagagaacgttaacacaccacatgaagaaactcatcaccatcctagaaaagagcccatgggctccagaaggccttccaactcacagtctcaatggaccactcgctccaagaggaaccaacctaagggtggccctagtactcagaccacttgctccaggaggacccaacctgaggtttgtcccagtacacgaatgacacgttcgaggaggactcaacatgggaatggccaaaatcctggaatgggagatgaaggacccaatcgtgggggtgctcagcccatagatgagggtgcttatgaccctacaagatacatacctatcgtagaaatggaaaattgccatcttaggcaccgcctgaaggaggcaaaccagcagaacgctgaattagagcgtgatgcagctgcagctagggcggcacaggggaataacactcaacatcaacctgtccctagagtgagaagaccacgaggcagacctcatggctcacgaaccaagagacaggaaactactcaggaagaacaacctggggaaaatgaaccatctcatagaaatgagaatgggaggcaaccagaaactaacgaacaggaaattcctcgcagaaatgaggaagatcctgggacacaacctggggaacgtaggtcatcggtgcaaaatcactagcgttcatcctggacccataaggagagggctcgtacaaatcctagtgggggaaacataacgaacaatgcccacggggaagaatagggcgcgaagaagcaagtgtgacctcggggcgctcaaggacccacaatcgatcaactcgaggaggagagagtgctcgtcgtgctaatgatcaagaaagcacgagaactagtaaatctgcaagtcacttaaggacgaggtccatgagtaggacgaagtccatgagcaagatgaggtccgtaagtagggcacagtctgtgagtagaacgaggtctgctagtaattattcctaaccagatttgcgagagcacttgaatcagagaaaacctgatcttcaccaacaactcggtccaaagcaagaggatcctatccaannnnnnntagacaagttggaggataagttcaggaggtatcaagtgggggaactaggaaaacaatcttgatacgactcagacgaggaactcgagccgtaccatccagatatcatgaaaactccttttccctagggatttaaaaaccctcacgtctcatcatatgatgggaccaccgatttggtcttgcatttgaataacttcaacacaataatgcgagcaagtaatgttacaaacaatttacgttgtattttgtttcctgcctcgctagtttgagcagcaagcagctggttcaacaaatttactcatcattctattacttcctgggaacaactgtccaaggacttcaaaaagaagttctaggccgcaagggataggtgacccg

SEQ ID NO: 140340 - DNA, 501 bp, Cannabis sativa
  modified_base (55)..(63): a, c, t, g, unknown or other
ttattaattaatataaaatttttagtttggcacgtttttcaagaaaattctttgnnnnnnnnngattgcactgtaattgaaaaagcattgtagcgtgccttagcattacggcgttacaggatttgtcctcaaatattcacttgcatcaaaagggcttaaatcagaaacattaaaagtagcactaacattatattctctaggtaaatcgagtcggtaggcattgtcattgatccttttaagtacttaaaacaaaccatctcctcgaggaagcaatttggaacgtctttgggcttgaccctggttagcttgctttatgtattgcttgacccttctctctatgttgagtcgtgccctctcatggatttgcttcacaaattctgctttctttttgacatctaaatgcaaatgctcagaaaaaggtaaaggtaataaatccaaaggagtcaaaggattaaaaccataaacaatttcaaatggtgaaaatttagtagcagaatgcat

SEQ ID NO: 140341 - DNA, 589 bp, Cannabis sativa
aataagaatcttagtcatgccatataaagtcccttaaaccttcctttatgtatatactagataactaagccgcgcttcacgcgggttcgacttaatttttgtattcttttgttttttttttaataatttaattgagtaatataatttgtaatataatattttgatgtatattttataaacaaagtaaaaactttgaaattagataatagaaatatagttttctattttataaatatttaaaaagatggtgatgatttattaaatatagtggaattaataaaaaaactgtaggtattttataataacataaaatgaaaaaaaaaaaaacaatttttatgtttaattatctagattgtgattaatgaaagttttttaatgtaaaaaattatttagactatttttcttcagcaaaaaaaaaactacaagaataatttaagtattatttatgaccgttggtatactctttccacaaaggtgaatgtagggtgacatttgtgaaatgactcacacaaacgttatcttaaaaactgaaaataagagattatataaaaatgttagtaatgttataaatattaataattatgtggat

SEQ ID NO: 140342 - DNA, 533 bp, Cannabis sativa
ttttcaacccaaaacctagtttttcaagctccggtagtagcaggatagtaatcattgcagaatgagaacttaaggtaaggatctgtttcattttaagttaaaaataattggttttatatagtggctttgtgatttagagtggttatggagatttcaacttcgtagaattgttctttggtagctataggactagttttgatgtttacttgttgaatttgaggtaattttgtgttagaaatcgagtttggaactttttaaggcttagtccgaacgttaatggcgttttccatttaagggcttgattttaatttttgttacgtaagaattgttgtatttatggtatatatgttccatgtgaagtttagaatgatttcgataagtttcggtgagtgcaaaatttgagattttcgtgccaaactgtttttggaaattcttataacttttcactggggtgtccgttttggacattctatataccatttcaaagctttcgacgagctctacaatatggtgtatgttttagagccaaaata

SEQ ID NO: 140343 - DNA, 1399 bp, Cannabis sativa
atgaaagaaatcctgaacaagatttaccacatctatcccaacagtattccaatgatgttgaaagaatcccggacccattccatctggccctggagccttatcagggtgcatctggaacaaggcaagtctcacttcctcgctagaaacaggtttcaagagttcttcattttggatagaactaacagtgcagttaacctctctgataactccagcattcgacgaataaccagcggtatacagatcattaaaatattgaacaattacctgatcaaggccggttgtccaatctgtccactccccagcattgttttgcagttgacggatctgattgtttctcttcctggcactagcagaagcatggaagtacttggtattcttgtcaccgttatggagccaaaactgtttcgatctttgcttccaataaatctcttgttgagccaatagttcaaaataactattttgttcactttcgaattcagtatgcagaaacaaactcggctggctcttcaacctggtcatacgcctcttgctttgggcaatacggttcttgaaattccctgagttttcctttccccattcctccaaccgaattgagcattgtgctattttaccagatagagataacccttgcaaattagaccaacaatcttcaaccagctgagaacacaatggttcacgagaccatgcattttcataccgaaagcagtggaatgtggcagcagtagacaatatttcaggttgtaaaaatataggtgtatgatcagagcaagtgtagtcaatattggtgagtgtagaatgattaaaaatgactaaccaatcatgagtaacagcggctttgtctagacgaatttcaatgcaatggtccgttccttgtccacgttgccaagtaaaaggatagccacgaagctccaagtcgataagatgacaatcatcaagggccgattgaaagccagagattaaagcagtgggatacggacgtcctcctttcttctcttcattgctggctatgttattaaaatcgccaattacacaccatggaagtgttgactcgagagagagacttcgaagtagttgccaagtttgatgtcgtaattgtctgttcggttcgccatatagtccagttaacctccaaactcccataccttgaacactaacctccaaatcgatatgatgttgagaaaaacccaagaacttggcttcatcattcgatttccagaacagagcaaggcctccctttcttccaacagcatcgactgaaaaggctccttcaaaaccgagtctaactcgcacccgattcaccaattctttgttacaaagggtctcacataagaaaagaaatttgggcttcttttggaaacaaatatcctccaggaactgaatggcccgtgggttcccaagc

SEQ ID NO: 140344 - DNA, 784 bp, Cannabis sativa
gtttgatggaatcattcctccagcttttgccaaaggaaacagactaagagttttgaatgttaatgaaaatcaattggaagggtcattgccaaaatcatttctcaattgtaaatggttggagctgttagatattgggaacaacaagataaatggatcatttcccacctggttggaatctcttccaaagcttcaagttcttatcttgagatctaatagatttcaaggccccataggcaatcccaaggtgagacatccctttcgaaatttgagaattgtggatttcagtagcaatgaattcactggccatttgccgcaaaagttttttgagaatttcgtgggaatgataaatgccaatactgaggaattaacctacatgaaaaacaatttaggacaaactacctattatgaaataagcacattgacgatgaaaggacgtgacgttgagttgccaaaaattcaaaccatgcttataaccattgacttctcaagaaacaacttcacaggagagattccaaagttgattggtaagctcaactcactcaaaggcctcaatttttctcataacaatattgttggtaatatcccttcatcattgggaaatttgaccaacctagaatggttagatctctcttcaaatgagcttaacggaatgattccatggcaattggctgcaaatttgaatcaacttggatttttaaatctttcggtgaacaaattggagggaccaattcctcatggcccacaattcgatacattcaaagaagattcatatagtgggaattcg

SEQ ID NO: 140345 - DNA, 756 bp, Cannabis sativa
  modified_base (217)..(220): a, c, t, g, unknown or other
agatatcattcattgaatagagtaatcaactcgtctaaaatggataccattctagcaatcttttattcgatcaagactagaatacggtgtcgtcccattaggcgatagtcaaggccattctatcttatgagtttccaccattgtttcataccttgtaagtcttactcttagcagccactatcggggtggacgttattaagaataaaacacttacaannnntacttatctttcgagattctacaatgttaaatatatcgtgaacgttcatccattagggttgattactgactaaaataagaactgtgtagaaccaacaatagagatgaaaatccttataactaaagctcattattttaaaggttgtattttcatttgttacttattttaatctatttattttaacatatatatttattttactaaaattactaatttaaattactctaactataaattttaatttaatatttataaaatcataccctaggaagatctgaaaaataaaaaatagtttccatccttagtattaatttcccaataaatattttaaaaattaattaatttaagttggtccaaaattaattaaatagttaattttcaacacaaatttaattttctacgaatatatatctcagaattcgaaatcaatgtataaaaatacatttgcgaaatcacttaaaataaaataaaataaaattagaaaaattattctaatttatgttgatctaaaattaaataaattaattttcaacata

SEQ ID NO: 140346 - DNA, 725 bp, Cannabis sativa
attatttattttatattttaaattgaattcacacactacatttttcgtaaagtttggaaataaaaaatctttatatcaaatttacgaatagaacctatatatagacacactcaaatttggttatgtgagttttgattaagaataaataaattacaatatatgcattatcagatacgttatctaataaaaaattttaaaattttttaaaaaatacatatatatatatataatcacatttaaatgacacaccagtgtagcaatagctaaatttttttttcttaaagataaaaatctcaaactccatttcaaaaattaaaaaaaaaatacattaccttattaaaaaaaaattaaacatacatgtattgcacttaacatcaccttattgaacataattaaaaaaaattaattatacgtgtattgcacgtaacatcaacctagtatatatatttatattacttagaagacatattataaaatagataaaatattaatagataaatagtataaaaatattcataagataacatctcatttaatttgtattttttttttacatattgagaaaaaactaatgtttagtttcatttaaaatattttagtttgaaatttttttttggactaataaaaatatagaattatatatataaaatcttaaaataaaattaactcataataaattatatattacatcaaatataaaaaacttataaaataaatatttatta

SEQ ID NO: 140347 - DNA, 685 bp, Cannabis sativa
attcatttatcagaaaattaattatttatttatttccttaaatagaaaatcatttccttaaatagaaaatttatttccatatataaaatattcttatagagctcgctcatgtttcgacaactgaggagcaaaatcggagtcatcgtcttgaacaacaggacgtttgcccttattcctattagctacagatttcaaacccattttagaacttttcttggcacaagggaaggggtggatgaagaacgagtaatagccatatctatatatggattaagagcaaaagaaagagagggaaaacgattatgtaaattggttaatgtgagttgaaaaaaaaatggaagaacagaaagaagagggaaaaccggttgtgatcgtggagggagacgagttcagctgtggaggttttgtttttttaaaaaaaaaactgaaaataataagaaaaagaagagaaaaagagagggaaatgatgtaagattgattgatagaagttatagatcagtgacgtatagggttgcatggaatgtgtgtgcaagtagtaaaattataataaaataaagttgaggagtaaaaatattggcttaatcgtgtggtgatatatttgtaataaagtgtgtattttatattttttggtgtaaaaatttctttaattaaactttcttttatttatatatgagtaatttgcggc

SEQ ID NO: 140348 - DNA, 508 bp, Cannabis sativa
attaaagacataacgctccatctgacaatcgcagttcttggtgataaggtgaactttagtagccaacatcatttgaatgtctgcttctatctgagagcgctaacttgtcggaacagtggatctcattgtaagatgtctggagctgattagtgaaggtaccaagagtatgccttcctatagtgagatggatgcctcgctatcaatcactcagattcttccaactgtgatacttagttagtataatgtaaattatacgctaagtgtcctaacagtcaccatgtcttgttaacacctttttacacatagcgaggttgatgcctcgcttatgcattatcgatgtcatcctttcgatcatgtcttctaatgcaaaatggtttctctttaatacgtgaattaatagttcatacatccttgtcttgcttacgactatacagtcagcgagttatagatatgttctatcaacatcgcatttaatgagttatttcatttaatatcttttaacataatt

SEQ ID NO: 140349 - DNA, 1043 bp, Cannabis sativa
  modified_base (969)..(994): a, c, t, g, unknown or other
tcgcgtacctgtagtacggacacacttataatcaagataaaagtatatttgattcactactacaaaaatatgctttttatcccaatttttaagggcattttattccggttttcgctaaaataaaaaccgggatatatgccagtgggataaaagctcttataaaaactgggataaaaaatcacttttaatcccggttattatagagaaaccgggataaaagactatttttaatcccagttttcctttaaaaactgagataaaaagtaattttttatcctggtttttctataataaccgggattaaaaaaaagtaaaaaaaaaaaattattctaaaactaacaagcaatgaaccattacagagatattttttttcttaataataattttgacaaaatatacaataagtacagatttaaatcccaacaaattagtacaacaacagccacgtcgcgaacacccttcgacaaccacgagtatagcggcgaaccaccttcgacaaccgtgagccattatcaactaccacaaatagcgaccacgaagcttcgtccaccatgaaaaatcatgaacctgtcgaccccgaaccttcacacctgaggaaagagagaaggagagagagttgatcgacatttcagaaaaataaaaaaaaaataagaaagaagaagtaggagcacaaatctctcaagaacaaaaaagaaaaagaacacaaatggtacctggaagtttcagagaggcatggagctcggatttaaactccgttgactcgtccttcgctagaaaaaggccgctgtcctaggatgatgcacaaaagtaaaagagaagattgcaatgagagacaccatgggcagtcgcttagaaagataggagagagagagatagatcaggtgggaggaaataatagtaaccctaataaaaataaaaaccctaaaagttagtgttcctttttgttggaagttattttaccaggatctnnnnnnnnnnnnnnnnnnnnnnnnnntaacaacctaaatatgaacttctagaacgatatgaaattaaacacataa

SEQ ID NO: 140350 - DNA, 697 bp, Cannabis sativa
  modified_base (664)..(671): a, c, t, g, unknown or other
aatttttaagttttggaaatcatttaattgaaaagagtttcacatcattttaatgtacttgaatgtgtaacatgcaagaagcatgaaatgtctgttaatctgaaggttatgcaaagaagaccattgaggatgacgactttgatatactcgaagttgcgtctttctggaataaaggcaaatccctcgtcaaatcgaagaagacacagtctgaaaaatgtggctttaattcaggatgacttcaatgataaggcctatgacgaatttattgactcgggcagaactgttgtggggccgttcaagacgaaggaagcgatcccccgtaagctgtttggattttacaagttcatttttagcaacacattagatctggagtaagtaaatattataatggtatttttgattatcatatacttataaaaatctttaacagttacattcattataattgaatcagatatgtgcttgcaaaattcggaaagtttgaagtggataggaggtgcatggcatcgttgcgacccttgcgagaagttcagggatctgaaagtgtgaaattggttactaaatatgtttcatttattatacatgtctaaatcgtatttcatcttgatgctaattattgactgtttcatttaataaaataaagaaaaaaaaatattttgaaaannnnnnnnatttagttgaaaaattaaatttcaac

SEQ ID NO: 140351 - DNA, 634 bp, Cannabis sativa
tcacgtggagtgatgaagaaaattctgagaatgttgccctaacttctgttatgactaatgtgttgtgcgattcacaggtgaaagtcagattggtacgcttgaataataccacagaacaagaagaatctgattctgatgattctgaaatatgtgaagagtctcttgatgaatcatacaaagtcatgtatgaaaagtggattcaagttacttcagaaaatagagtgttgattaaaatgaataaaaagctgtctcatcaaattgaaacttttgtgttaaaaataaaataatatgagacaaatttttgtgttaaagatgaaaaaattactcttttaaagaaggaacttgaaaattttaagaaaaatgtccaaatgcttaatctcggatcttctatttttaaaaaagctcagaatgcaggtcaaagaggttttgctggcatcggatcaaatggtatggaaaagagttctgtggagaataaatttttgtaaaatctagtgtttcaacgaattttcgtgatgctgcaaatttgaagtctgctgcaacatattcaaaaactgtcgttgcagaagttgtttctgctgacgcaaaatctccaggatttgcaaaaaagagtaagatctaaggtaaaaagatttgt

SEQ ID NO: 140352 - DNA, 541 bp, Cannabis sativa
aaagaaaaacccaaaattttctcaagctctctctttctctcttgttcggccctccttgagcagcaagaaggtggaaattttcttggtgattcaagcccttttatagctatatttttcaatctctaattgttggtaaagtttcttcatcttgctcttttagtttcttgaatttttgatgaaaaagatgagtgttgcatgctagtttggagtggtttgttactgctgtgtttacatgttgtattcagaggattaagcacgttggattgagtagatcgaatctgtttttgtgcatgtttggttggttttaatctagtttagagtttttggttcaaaagctaaagttttcaaagagaaatttcgaaatttgttgttgtagttgttgctgctgtttaaatgtgttttctggagttttatgatgttgaaatatgttgggttatgcttgaactagtggctgttttggaggattagtcaagttttgagttttagaactcaatcttgaacctccaatggtgaaatgagtttctgtggttgaagcttggtt

SEQ ID NO: 140353 - DNA, 878 bp, Cannabis sativa
gtgatttttccggcaactactccggctactccggcaaggcaacttttccacttttccagcttttccagcaccgacatcaaactccagaatagtcgtcgtatttggcattgtcaccggtgaaattaccggaaaaatcaccaagaaaccggtttgtttcttgatgaagaaaccagtttcttaagtgatttttccagcgacaatgctaattctaatgacttttttggcgtcggcagcaactccggtgactttttcggcaccaacagctactccgacgactttcccgacgccgacagcaaactccagtgactttccccgcacgaggtacaactcccgcgatcactatagttttatttgttttattttttttaaaaaataaatatgaagggaattttaatttttttttatggtaatttaagtaagtttttattttttttatgaatcttaaattcagatttctttttaatattttaccatatttttagtttgattgttaagataatgtcatatttagtgacatttactttttatgccatatttatcataaccttaataatttttctcatatttttgaaaatagcccttaattataatatagttctcgaagaaactggccatcataactgaaaggtcaagttttcaacagacttatatgtcccatttcaattcggggaattataaagcatactttttttttttaacataattataaaacatacttaacaaaaaaaaaaaaacaaaaactcaaaatcaagaatctcattaaaagaaaatagaagaatacatagggatggagatataattttaagggattatttcacaaaaatttaaaaacaacaaaaaaattataaaaatacggttttacggaattttaaatattt

SEQ ID NO: 140354 - DNA, 536 bp, Cannabis sativa
  modified_base (429)..(430): a, c, t, g, unknown or other
caagcgggtgagtcagctggatgtctcatcttaccatctaactttctatcgctggcatgccagatcaaattttttgcatgattaacattttgaaagaatcaaaccaaacgaggtattggggtaagtaccataatacttttgcagagataccaacctttacctggtcggaattcttttttttttgccacctaaactcattacaagtgggacacgatattgtatccacaaacatcttatggtgtaggatgtaatcgttaggacatgcatgtattttttcatattgcatgcctaaggaacaaaatgtcttcttcacctcatagaaagacgaaggcaccacattatcttccggtaataactctactaagaaagctagtaaatctgtaaaactcttattactccacccgtatttggcttttatattgtataatnnaataagtgtcgacaacttagtaaacctattacaattagggtaaataggcttctcggcatcctctacaaaactttgaaatttcaaaggatcgacatttaattcatat

SEQ ID NO: 140355 - DNA, 511 bp, Cannabis sativa
  modified_base (40)..(64): a, c, t, g, unknown or other
ttttttcattttatatttctctaattaaattagtttattnnnnnnnnnnnnnnnnnnnnnnnnnaacaataataattaattgattaactgcatagacttttcttttctcttccaatttgatatgtgaactttgttatcgtcttattcaatttttaataattaattgactaactatagagacttttcatttctcttctaatttaattatgtgacatttgctatgtctacgagatcttattatttttttgtaatttatgtgctctatataaatagatctttttcacttttcattatcatcatacttctctttttttttatactactatatttctaatttttaattctttttttcctgtaagtttgattatcacaaactttaatttttgttttttttttttttttgtcatgacagtactcaagaatcaacatcaatgttgtcattgattaatggaatgttgaggtaagtatttttatgttgatgtagggttcatactaacattgaaatatagac

SEQ ID NO: 140356 - DNA, 606 bp, Cannabis sativa
aaaaaaaaaaaaaaacataattattaagtactagtgatgcctactattttatgtaagtagcgttttatgattaacgatattttaaaattatataagacttaatatttaattacactaataatattttttagcatttatttaaaggaatattcttttgtaatttttatttttatttttttaaaattgaatattcatccgtattaaaaaatgaaatacatttaaccaattttttccctctaaatttatggaataatttacacgtaaaattcaaacaaaattaattgtaagtaaatattttttttctttttaatacaagtccaaataaaatagttatttacggggtgaaatcaatttatgttttgattttttatatttatttttctttgtaaatttaaggtgttagctagattttaccgttaaatactaactaaattattactgtattggtttcaaaattttacttttacgtatacacaggtgtacacagtgatcatctaattagtatataacgatgaaatttaactaacgcctcaaatttataaaaaaaaaaaaaagtaaacttatggagttttgtcaaaaaaaaaaaaaaaaaaaaaagttaagtat

SEQ ID NO: 140357 - DNA, 1905 bp, Cannabis sativa
gcgataagaaatgtaattaagacaaagcaaaaatcagtaaacgatacagaacataaggttttaaagaggttcgaccgctttagttcggtaatagcctacttcccttaaattatattgacttgaaaataaagaacacagtgtttcctctctcaaagctcttacaatgaaatctctgagtgttttctcttagatctctttctaaagcaattcttttgctccctttttcagtgaagctagatcactatttatagggctaaatacacgagggaagattgcccttttgcttacaataactataattggtaagaacatacattacatatttagaatacatgaaatggggtattgggacaacttgccatatccctttgatacaatcccatgattgtagggattgcctttgtgcttgagcttcacgatattaaacctgaagtggttaagtcttgatgcacggctcggatcatctgccctttgctctgctcggtcaagcaaactttgtgcgtgcagatgtgctgcttgaattctgttcgaaatatttctccacccaagtgtaaagaatgacaaacacgtgtcactagtatatactgtctcgtcaaagtgcaaaaaatgggataatattctcctctttcttaaattttttcaatctacttggaaaaggtggaggagtgacataagttggtacagttggtttgtatgacttttttagtgatggtagaccaactaaagtaggagatttaacttttggtggagatgactcttcaagggatgaattgttgactcctttagttagaatcaacttatgtacttcttggtgtggtggtgattcaagttgtgtaccactttgaagcgttgtggccttgacattctctattggggtacttctatttgtgtaggtaaagtatttgaactttaaatttcatacccactcatagatgtttctattggctccgcaagattctctaacttttgcagagattgttgatggctccgcatagtttcatgaaagctttgctcaaactacaaggtattagttgcaaacattttaatcagctcagcaatagttgctttttcactatttggtgcaacatgagtaggttattgaaattgttcattatctgttccatctgaatagtagaagccaccaaagtgttgagtagatcagtaagagaatgatcttgatcttgtggtgctacaggaggatagtaagaagttggttgaacatattgaataatcccacagtaggaagcgctagaatagtctctccattgttgattaaatgtgcaagtgtcgtagtaggaattatattaataaacttgtgacgagatataatatggatcacagtattattgattgtacatcgtcatgtttataaagaaaaatctaaaaattaaaatcacaactcaaagaaacaaatttagtaacaagaaaaaaaatgaataacaaattgaataaaatagtcacttgcaacgttgccaaaaatttgatgagtgtggtaagccacaacaatttactaattattttatttctatattactaattactttagtataacggtaaatacaagtcgatcccacaaggactattatcaatttattattcaaatatttgtaacaagaattaaaaagggggtttaattataaagattcaataacaaaaaaaaaacaaatataatgagatactacgatatgaaataaatagttaaaggttaatctccaccctcaacaatcatctttaattcctaataatgaatgtaatttcaaatttctaatcaaactattaatcccgcaaataattctaaagtagtcaattatcttaatctccctattacatgtaatcaaggcaaagcgctcaataattaactcttttacttaagcagtaaatccacgaagcaaactattaatcccg

SEQ ID NO: 140358 - DNA, 742 bp, Cannabis sativa
cccattaatgagctttgagggggtatttatagtgtttctgtggggtgatccccagaattaaggtacatgtatttttgtaactagccataaaggcgtgaattcccaatgaatataccatgggtaatgcattgtcaaatccctaggtgccttagggattttatgagggttgtccttattcccttttgacagatgtgattcttcacagagtagctgtcattagacttttttggtcatagccttctaggtgcagatcgggggttgtgtcgtcagagtttattgcgtgtggcagttccaacatgcctcctcccatgcggcattaaatgtgagatgactgctcagagggagcctgacaccacccggagatgctgtgatgctaccttgctctccgggagcatagaaaaccttgcatgccttctccgggaggcatatccaagataatgtctttctttaataagacttagcaattaatttaagtgctaaaccctttgtgtccacgtgtccttgtccacgtatattgggcaaaatcaggggcaacatttatcccccaagccttgtttaattgtgaaatgaacaaggcttgcttagatgcctctggttggctcctcggtttcctggcatgtgctttgggtgcgtgggggtgtgtttaatgatcaccattattgcagcgattcactttttgcaggcgtcgattcgtttcttgtccattgattgatacggtgcattaatgggtgtcagacagaca

SEQ ID NO: 140359 - DNA, 911 bp, Cannabis sativa
cagggcagcaacctttccagttagactctgaacatctttgtgtttcttgggggaaggcatgctcaggagagcttgattttttctggatttgcctcgattctccgctgactgacaatgaaacccagaaactttcccgaattcaccccgaaagtgcacttcttcgggttgagtttcattccgtatctccggaccactacaaagcattcttctaggtcatccgcgtggctagtgcacgccttcgatttgaccagcatgtcgtccatgtatacctccatattttgccccagaaggcccttgaacatccagttcaccattctttggtaagttgcaccagcattcttcagtccgaaaggcatgaccaggtagcagtatacccccttatcgatcctgaagctagtgcactcttgatctgcgatgtgcatcttaatctggttataaccgacgtacgcgttcatgaaggacaatagcttgaatccggaggtggcgtccaccatctggtcgattcttggcaaggggaaacaatcctttgggcaggctttgtttagatcggtaaagtctatacaaatcctttggaaacaatccttttaccagtactggaatagccagccattctgggtaatacacatcccgaatcatgccactggttagcaatttgtccacctctttttctaaggcttcagccttcactgagtcgagggggcgccatttctgttgaaccggtggcatgtccgggttgatattaaggacatggattatgacgtgggggcttatgccggtcatgtcttcttgacaccacgcaaaaacatccatggcgccccttagtgtcttcattattttttctttttcctccggctctaggctctttcctagccggaggactttggtggagtcgaggtcgcacactgacactt

SEQ ID NO: 140360 - DNA, 585 bp, Cannabis sativa
gttaaacactatgactcaagtaggataatatttttttataccatggaacatagggtaagaatcacacctctatttcactttcgctataatatttattttatattaatataacattgtcacttttttcagcaagcattgggttgattatagcaatgacatcgggaagagttgtattcttaaacccgcttaaatctaaaatcctgacaatcattgctaagatgataaatacgtaagtttagaactttaagctattcattctactataatcatcaattattaaattctaaatgcttaacttataatttttttaatatctttaacagtacatatgcaattattagttcaaatactattgtatttggcccaaagggaccgcaaatatatccctttgtttgttcaaaacaagcatacaattacgaatgtggttattatgtactaacttacattcgtgatatgcttcaacattcaagtcatattacagtcaataaaaaaatagtaagtatatatttatttttactataaatacaaacatataaaagtactatcatcttaattagttttttttttttttttaatttaattgac

SEQ ID NO: 140361 - DNA, 506 bp, Cannabis sativa
tgtttaaaaattattttccaatttaataattttatatgaagtttacctttattacttttatctcaccttgataagttaaccattttattataggaaagtattaattataattagttttagtgttttaaagaaattatattggtcaaatattttattttaatggtaaatgcatttattataattttaatgatttcgttatttataatatataattttttttgttttgtgcatttcttaatttggtagctatttattattattattttttctcattctgaatctataggtttttttttcattccttttataaatttgggagttattcagaattattttaattatttttttaaccttcttgattttgtgtagtctatcattaatagaattttaatcgtaattttgtgtagtctatcattaatgtaattttttaaattactttctataggtaaagtatatataaagtaagaattatcattttatttttataaaaataaaactaaaaatta

SEQ ID NO: 140362 - DNA, 1766 bp, Cannabis sativa
  modified_base (299)..(300): a, c, t, g, unknown or other
  modified_base (1731)..(1731): a, c, t, g, unknown or other
tatttctgtgtgaatttggggtttgaaaataagttacactgattgtgttggtgagtagtggtggtttcggtacttgtattgatggtggtcggaggtggtggtggtgattcggtctgtggatggtgatggtggtggtgatgttatgaacagacgaaagaaaaagaaaaagaaaaagaaaaagaaaaaggaaaagaaaggaaaagaaaaagaaagaaaagaaaagaaaaaaaaggaaagaaaggaaaaaaaaaagaaaaaaaaaaattttttatttataattattttttaattttaaattnnttttattttatttttttaatataattatttacgtgggtcaattaaattgtgctacgtgtatattgtgtccacgtggacaatgaaacctggcagttaacagctaaatttgaacggaagtgttaaattgctaacagaacacgagtattgagggttttaccgcccaaatttgggttttgggggttaagtgaaaccaaaataaaagttttgggggttttgccgccatttaccctatttattaatatggaacaattcttatactataaaaattgtaacatttgtaattatattgtggtgaaaaattttaaatttgtatttgttaatatatgttgatggttgtattacataaagtataatagtaaacaataaaataacacatgcaataataataataataataatatctgaaaaattgaataataattttttcgaataaaaaaaatacattataaatagatgaaaaattttgcactaaaaaatatctgaacgatcttgatttaccgtcaatatcatctaaatttaatagtctatgacaactttagataattatgaggtgcttcaaacgtactatatacgattgaattgctacccttgtaaagatatgatttattttattttatttattattaatttaacttttaaattaatttaataattaaaaattttgttttaaacaataatgtatggaacaattatataataaaaattttaatattgtaattagtgtggtaggaagtcttatattttttattgttaatatatatattgacgactgtattacattaattataacagtgaacaataaaatagcacatgcattaatatatagcatccgaacaaaaagttatggctctttgtcaaagacaagcatacataataaatagatggaaagtttttgcactaataaaagatttgaaggatctcaattaccgttgatctcaattaaattggatagtttatgataactttggataattatgagatgttttagatactaacaatgaaggaggcagacatgtactaaatgatcgaattgctacccttatatttaagattgacaattgcacaatataattgttatcctaaattttggcctgtatgacgtgcaatcaaaattgtaacatgtagcaagataggttatcataagattgtatctcgtcgacacattaatattgtagagaggtatttcccttaagggcgagttgtcgtctggtcgatagggagacaacaacctgatagagaagcttgttggatgcttatattgaaggatcgatatatgtttgactagtatatatattttgacaaagtaaatggttcagcgggacagttgtttttttggttcccacaactccaacgatgacatgctcaatttagatccactattagttcaggatcccacaagattcaaattttataatgttcttttcaattttnagattaattttaattaattaaactattttaaattt

SEQ ID NO: 140363 - DNA, 814 bp, Cannabis sativa
atattattaattttaaaattatgatattaaaaaaactaaaataaaattaacatacgtgacttgacacgtaacatttatctagtatattatagatgtattaatataattaattttacaatatgactatttataaaataaaagcaaccaactaaaatctataatatagaaaataaatagccttaagtaaaacttttaagaaatgggatttttacactagatgctaaatttgacattttttttttacatttttatttatgtttgatttttttaatcatttttagtaaatttatctttcattttatttttaaaaaatttatttaattacaaaagtacttttagtgcttattattagaatattttctaattctgaaataaaataaaagtaatttattttgagataaataaattttttatattaatctggaaaaaattaattatatgattttctatatatgcttagatttcgatattcatcacttaatttgatttcccaattaattgtaaaaatattctcacaattaaagtggctcaaatattaatagagtatcttacctataaatatagggtctcggtccacgagctcttcactcattctatgcaaacagcaaaattctatctaaagagagttgataaagcgaggaagccagaattcccataccggagctatcgcatgaattgaagctgaaacatcaatggcgagaggtatttcggtccttttatcacatatactattttgatatgtctgttgttattctgcattacatatcgtttatatatgcttattttcatattatattattgttggaaattattt

SEQ ID NO: 140364 - DNA, 660 bp, Cannabis sativa
taaataattaaaaattataactattctaacgtgggacctacctgccgtacacggattccattccgtgttttgcacatttgggcacaaaatcggctgcctacattattattatcaattcagattaatttagaaattaattaataaaaaaaaaaaaagagaaaggtaacacctcaataaaaaaagcttaattaattaaatgactcttgacaacataaaatgtatacaaaatatggtattgttagaaagaatatctctatatctaaatgttattaattatacttggcaagagagttagtagtaacttgctttgtggtgcaccataaaagacaactctaagtaattaataataaaccaagaaaaagagaaaaaaagatagtaaagtaacatacctataaagcttgaataaaataatcaataaagaaaagtttggagaattaagaagccattgattccaatattagctattgaatatggatgttggagaaagaagctcgcctcttgtgtgtggttaaaagaaagagatataaatataaaatattaaaattaatagatatatacctatatataatttagggaaaaaacaagaaaattctaaaaagggtaaaatattacaaaaaaactgtgggccggcccaatcaacatttgtacagcccactatga

SEQ ID NO: 140365 - DNA, 607 bp, Cannabis sativa
aatttgcatccgatccgatccaattatgattggatatccgattctattggatcggttgggattggatcggtcggttggaattggattggatgactttctgcacactcctaggtgtcaactattaaattttatgccttaaaagtaagtaattaatagataatatattagagaatatatattaattataagagtataattattaaatacctaaaaatttcttattcatatggagaatgtataatcttgcaaggatgtgtacaagagaaataagattatacgatatgaataaaataagtcggcagtgtattaaagttttgaaaatatttaatatggaactgctaagtatagtttactatatactatacttctagtgtgtgtgtgtgtgtgattttgattcgaatcacatatgttgataaacatatagtaaatgtactgtgtataatttaaatatgcatgactggaccaatatgtaataaacatattttattaaattgttatttaccacgaaaagagttattcatatcacaatgatgatcattagtagatcaatctaaatcctaagtatacatgaactcctatttgtgttcatgttaggctaaaattagtc

SEQ ID NO: 140366 - DNA, 538 bp, Cannabis sativa
  modified_base (480)..(487): a, c, t, g, unknown or other
attctcatagaatttcatatctctagcatgatcattataacaaaaataatgagagtggggcttgaagttatcaagagaaataccagagggcctctttcttttatccttctttggaattacaacagggacaggaacaggttctgtagtgacaagatcagcttcaggttcttcactctcggatgcagaatcaccaacagcaggttgatctttgggcacaaattcttcacttgaatcggacaagccctctgattcatgatcctccttagtttcttcagatttagaatccgaggatgacacggaagggggattctccttgagatttttggcctttgaagatgaagacaccacctttttcccttttgaaacatttttaggttgaaccacttcgggtttttgaggagtggaaaccttagaccttgttcgagaactcaccgtggcaaagtaaccatagctttgtcgacattaggagcaccattcgannnnnnnnacttcgacaatgtgtgatcggatgaatgagattcatcatgatcaccaaacc

SEQ ID NO: 140367 - DNA, 572 bp, Cannabis sativa
acgtggcatcacatgatggtgacacatggaatcaacttcgagtaactgctcggagagtatagtccgaacaggatgcctcatagtcatgcctgaagcaaagcgatgagcaatccgcgcagagcgaccaacacttagtgaattcagttttcacatcgtgagtcatcaaagaaagccttataacttggggatcagattgcaaagatatggcaagctgtccaaatcctacgatcagtgtattctgtatttatcatgcaatcgttctgcttatatccattgtaacgagaagggaaatatttcctctccaagttcatagccctataaatagtgatgaatattcactgggcaaagggtcgaaagatttttacctaagaaatgttatctaagaattcatattcagagatattgttggtaggtgggatggctccattattttgcgtggatccgtcgagcatgacccctccagatgaattcccgaacaaggtctgttcgcctacctctcggcccacgtcgtgactgaggattggacggctgaccgttggttgtctgggaagcattcaccgttgggtcatcct

SEQ ID NO: 140368 - DNA, 544 bp, Cannabis sativa
ttccctcgttttggtttcattttgcctgtgttgctaatttgaacgatcgaggtctgttcttcttgatcgttctattccgtgcggcggaaggtttagagcatgtagtattttcgtaaatatttgtatgtgggttgtataaatgtttaaagggccagtccataatatatttataattttttttctttttttatattttcctattttttttctttatttttaagtgaataataattataaaacttgtatatactaataatcattcaatataacaaatgaaattatttgtatgtagaattaaactaagacaatatctatctataatctataatctataataattataataaaatgttaataattttagttcttccatattaatttacaaaaatattatttcactactaaattattacttttaagacaaacattaattattaatgtatttttcttaaattttgcaatttatataaatttgctacttcaaaattcttatgtattatttatttaataaaattaattaggtattttatgtatctatttctat

SEQ ID NO: 140369 - DNA, 813 bp, Cannabis sativa
ttaatttatttgttttttgtaaccaaatttgttatattagatttttgctcaattattttattgtaattattttttgtgttccaatcgattttttgattgttttagctattttatgtatttgttttattttttttagttagttataatagtaaactactttctatggttaattattagttatgatgttttacgtaattgaattctaaatttcagcttttgatttagtttttcaagtaataggtttttatttggttgatttttgttactggtttctttatgttaaattttgaaactttatgtaagaaaaagagctttatattatttcaagttattggttatcatgtgttagttcttaatttttttattttatgaaatgatttctttattttagatttttaattagttgtttaatgtacctagtttttacaatttatttttatgcaattgatttttaattagatttttaaaagttttgttataattttgtatgagttctacaagttttgttatggtttcacaaattttgttattatttttttatgatttttcatatggtcgaaacaggtttaataggttttataggtttgaacttgttttacagggtttacaagttcagaactggtttcacaggttcgatattggtttcacatgttcaaaattagtttcataggttttaagagttttgtcatgggtttgctccattttatgatgttattgtatattttttattttaagtttcttttttttattattattttgtttctaggttcaaaactggtttagattatatttgtgattagtattttgttatgc

SEQ ID NO: 140370 - DNA, 1248 bp, Cannabis sativa
  modified_base (1199)..(1208): a, c, t, g, unknown or other
tcaatcttattagatttatgatagctttccaaggccttttttgtatgatttttttgtcccgtttttgatctaacctaccactatttataatcacatagtaggcagttaattgcaaagttgactgtgatctttacaacgcttctcccctaaaatcatggggtttgattacataacacgtagtataaatgcgtttattatttaaaaatcacacagctgtgattctcccgcttttactgggtcaaaatgatcgtgtgtttaaacacatctttaattgtagcgttttgggatgtctcgacaagaacttggttctagtgaccttgatagtgagctggagccttttttcctatttttccgaggtcgataatgtacgcctcgtttcttctttgtttgaaagcttaatgcttccttgtgacaatggcagttcttattaatagagagtttttcaaggctcatttgaatgttatcttcttactcgtcaagattataagtctcactgaaaagatgtctgaagttaattggttaaagaaacaaagatgcgccttctatagcgaatttcgggtataacaattgccccttaaaaagttctttttttaataaaaagtgctttttaataattacaggtggcattttcgtcataatctctttttggaaaaacgcgttctttgattctggcggttgtacagttttgagggtcattataaatcgtcttttcatcttctgccccactcccaaccgttagatttcccaacctttggccttcttgtcactggactttgagtataaaatggtggcttaagcttgccatattccataaacttctagtttttcggtgagattcatcttgagattggattgtcattctcttgctaagatgtcccatctgagttcagaaatttacccatctaaattcataacaccagaatgcaccaaccacttttcttctctatatgttcccaagaacttcaaacctcaatttgaattagaaacgaaggattccaaggctgaggagcttccgatcaatccaaaccaagggaaccccattgatcgttatgggcgatcctcacaagtgattcttgagggtaagtattatccctcatgaatggtggtttgaactggattattattttttttttgctccattgatcttctatctctgtccccacaggattggatatagattctgttgggttttatgcccnnnnnnnnnntccatttcaatgtaatccattttattcaacatcaataaag

SEQ ID NO: 140371 - DNA, 699 bp, Cannabis sativa
tgaaaataacatgtaaacataaatcacttctcatctcttattgataacaaatcagagtagattgtaatgggttttatttagggcataaaattccaacagcaacaaccctgccgttctctgattttcagccttgatctgctgacaagttaggcatcgcaatacgaattctaccacattcttcttaattctgctccacctgaagtaggttttaagatcttgatacatcttggtggtaccgggatgcagggaatatggagtggtatgagcctcttcaagaatttcatttctaagttccgcactactaggaacacaaaccctagtcttgaataataacatcccactatctaacattgtaaagtctcttgcttgaccagctgaaaccttttctctaatctttactaactctggatgagttaacttagaacctttaattcgctccaacagatcagattgcagcgacaaattatgaagtttgcctacaacaaactcgatgcttgatctgaccatgtcttctgctaattgaggtgaaatttgaaccatactagttacttgcctgtgacctctcctgctcagggcatcgaccactacaggatggtaaagatctcacaatcataatcctttctgagtaatgaaatatttgagacttttatggtcagtataaatttcacatctctctccgtagagataatgccgccaaat

SEQ ID NO: 140372 - DNA, 1073 bp, Cannabis sativa
  modified_base (302)..(303): a, c, t, g, unknown or other
tggtttctactttttagatctagaactgtggcggaatccgttcgatcctttggagttttggtggtggagatctcatatcaagagttcgtttgactcgtcggttgccgaatgtgtcgccggtgaatggaggctgataggtggactgttgaggcgtgaggcagatagggtatggaggagaagaaatagctttgagatttttttagtttttttgaaataatttagggatttttacaaaaatactgaattttatgcaaaaatttataattttactgtcacacaaatttttttacaaaaatactgtnnttttataaaacaatcgtaaaacaataaaacaaaacaattaaaacaataatgaaaacaactaaaaaataaataacagtgtaataactgtgaaaacttaaaacaatattttttttaaagaaaaaaaaattaccccacagtaaaaaaagttaaaaattttaatatgtggtataaaaactcaaataatttatctaagcatccaatatgagctttaaaatttgagtttatacatatatggtatagaaaataccataaaataatttaaaagctaaaataccatatatggtatatacccatagtttatacataataacactatgggtagtttgaaacattatattaactctattattgttacgcagattatggatccagtttattcaaatctccccaggttgatgatactttgggttggtccccccgcctgaggattgggtcaagatcaactgtgatgtcagagtcggggtaggaaccatgtgtgcgatggcaattgcgaaagatcatacggaatcaattttgtgggaggcgacaaccaggcttcatttctctgaccctcttatcggggaagcggcggcttgtgtgttagcattgcagacggcggccactatgcatcatccttttgttattgtggagagcgattctaagatggtgatcaataacctaaagggagccgaatccttttggaaacttgagaactacacaagacaatgcaagcatctctctacttttttgataatgtttctggtatggtagaggtttctactattccgaat

SEQ ID NO: 140373 - DNA, 860 bp, Cannabis sativa
aagaaaaataatgatgagtttttttattttattggatctttgccaaaaaaaatgtacacgcccaaagtgaataattccaccacatattacggcacacaatacgaaacaaacccaaagtcatcgggtactgagagtagtacagtgacctgaaaattttcaaatatgccaacaatatatccacacaacccacacttgacacatcagataaaaaaatagacacttagagatactcaaaattttagaaaaaaaataggtaacaactgatcaatgaacatcaataaagcctctgagtattaaaaaaatgcacaccttgagcagcagatcatttcagcacacccatccacaatgatactcatgggatcactaagacttgaatctccatacgtgtgtgagcagtgatctcatgtagtccaggaagagaggagatcttctggaccactctctcaatgaaacacaaactgatatgtgaatatctaagaatgtttgtttttattttatatataatgccttttttaaaaaaaacactctggctctttctctagtacccagaaatggctttcactctcttccagagatgtagccgtcctctttgatccccaagaactaatatagaaggagcatactacttattagtaaaaggtttaagagagctcttcccattgcatctggaaaaggtagcctttttatctagggaacattcaagcttagtatcattcgaagtagcttataggagacggagatagatatgacaacacactgctcaaggcacttttgaaatacaagaatactcataggcaaaaaaaattgatcagatgacactgagaacagtttagatagtacagagaccaatacatgttctt

SEQ ID NO: 140374 - DNA, 751 bp, Cannabis sativa
  modified_base (313)..(318): a, c, t, g, unknown or other
gcccgtacctacactcagtactcaacatatatcactcacgcccgtacttacgcccagtatgtcgccaggaaaattgcatcacctaatcaggtgagcccgtatatcaaatgcataatattatcacattaccaatactcatcaaatcaacattttcattatataacggtattaactatatctcaatattaatcaattcattgcaatactaattgtattacatacaacatactatgtagtacaatatacttttcttacctttaatccaggttaatacatgccggccaacccaagtggaaaactatccccgatgatnnnnnnccttaagctttcactcttcaaggatttgctatccttctactaccagagcttagatcgctaagttttgggttgaaaatcaaagaaagtagatatacgagagaaggttttgtcaaaggagggagaatgagggttcattcgttcgttccttcgttcttttactgttatattatatataaaacttaatatatatatataatcaaacttaaacgaaactgaaaaggtttcatttatacatatataataataatataatataatattagtaatgttgacttcacttttagccaacgaaagtgagtctaattttataagcgacaagtagttaaacagaattgaaatatagtaaagaaatttaaagacacagaaattttatagaggttcagcctggagcagttcggtaatagcctaatccttgttatttgtattgacttaa

SEQ ID NO: 140375 - DNA, 551 bp, Cannabis sativa
  modified_base (506)..(507): a, c, t, g, unknown or other
aaagatataacaataagtttatggtgtctttttcactgtcaatatcagtccagttcaatgtatactcaatatatctgatactagtatactttgctaatgccctggaaaaggcattctactcacacaagtgtaagtaaactttatcgctgattatcacgtcagtgtaaatctagtgcactgataaatcatgggactaaagactttgaagcatataatcataattattttccactgtgatgacatgactataattgtgaataactctatgttctagatataacagaaattgtatattaaaactataatcacgaaaactacatgtaaacttaaatgacttctcatcttctattgatagcaaataagattatgagaatgttaatggttgaggaactgtggtggtggtgatgatctggtagaacaacggcttcgggacggcgtcttcagtcgatgaatagctgaccgcagtacatgtattcgcagaacttacttcactacggatgaatatnnaagatattcaaactccactaagcatgcattaataattaattata

SEQ ID NO: 140376 - DNA, 895 bp, Cannabis sativa
ttttctcgtcttccttcgtgaatataatgggaggttcctcggttttcaccttcttggaaggttctggggcaaatgccaactgctcgttcttgatctctttcacatatcttttctgagcgttattgcttttccctgagatatgtgccctcctgaaataaccaggatgtcctccccttcaacaggaagaggttgtaacccctggttgtttaggttattgggcagactaggcttgttgtatttgtggccctgtcttttcacatactatttaaagtggcctcgagtgatgagagtttctatcccatctttcaattggcgacattcatcgatcgtatgcccaatatccttatggaatttaaaatacttgttaggatctcttttgctcctcgcattcctcatgggctcaggcttgccgaaggcaacctttttctcatgtgcgagttaaaaaaaatataataagaaatgacattgagccctgaacaaagttctagcaccatgtcaatggcacgtacttatcgtgcttcttctgtttctttttatcctttgacggttccttagaaccgtcctttctctttgaaccagaagcccatgagttatcgattcttgttgaaactgtacttgttgaaacgttgctgggttttcttcccgagcctgttttcaaaaaattaatttccttttggacttcttctttctaaacaaatacctaagccctttcattaaaatcagtgatgtttcttactggatgaccttataagtcataccacagctcgccccctgcggttgatggatcagtaaagatccctacctgaagggttgtaagttgtgtattgtcatccaaattcctaaccctagctggagctgtgctaaaatgacttaagtatgccttaaatgtctcgcc

SEQ ID NO: 140377 - DNA, 750 bp, Cannabis sativa
aaatataatagagaatatataataagaggaatgggaatgggctactgctactcctccttcctattgtcaattggttttgagatgaaaccccatgattctcatcagtttcgcttataatttatatatatattatgctataattacgtttatttatatacatattatgctataattacgtttatttatataatttatattaggtttataattatttattgcgcattatatcatgaaatttttacactaaaaatacaaaatgctaactttattacacatataccaccacacggttagctcaacatttgtacacgtttctttaagtttattatatttttaccacatgcatacacaattcaacctttttgacacgttaatgattgatgtattacatcaatcactctatacatcatttttctcctttttctcttctttttccttttattttccatttcttttcagtttttttttaaatagtaacctccatagctgaacacttccttctccatgatcccaactccattttccctcttctttttgttcttcaattttttttttcaactcccattaaccgaatcccataactgttttccctctttctatttttctcttaatccatatataaatatggttgtaactcgttcttcatcaacttcttcccctgctcaataaaaaagttctaaaatggggttgaaatctttagctaatagaaacaagggtaaacgacctgttgttgaggaggatgactctgat

SEQ ID NO: 140378 - DNA, 954 bp, Cannabis sativa
ttttcctaaataaaatgacttgaaaagccattccataccaactaaaaattatttttccttatctacccttctcataaataaatgattaaagttataatgatataggtaacattttttatcttcaaacatatatctacaacatttgatattacaataatatgtttattatattttttttttacataattataggaaaacaatattattattataattatatggataaacgatgtgtgatgattataatatacgaataatatttatgttgatacttaaatattaatataaattagactattaaattaatttttttttttattttattatttgataattagatttaaaaaatacaatttgagagtgatacataaatatatatcatttttttatttttaccataatgataattttataaaacaaaaattattttaaaaaagtaaaggacattttggtcaaaataataaaaattttatttcattctatactataccaatcatcacaattcttattcagttattgattccatagtctttaccaaataaaagaacagaaatttaattccattctattcttattcccattcccattcccattcccattcccatttcatttttattttgtaaccaaacgccacctaaagttcaggcgctgagcgattcaattcatcaagtaaaacgctaaatcatgtttttcaattaactccgtcaattcttttggcaccagctactcgtaatcactatcttgcaagtgaagagacctcggatgaacccaaaacccatagccaacttgtttcactgaggttaggatcatcaccattgtttgccaattgtagaaaatagtgattcgaattgtgtgttgatttcatagaataatacatatttatatacagagttaggagactaaatatctactaaatatctactaaatatctaactctcttacagctaatataca

SEQ ID NO: 140379 - DNA, 506 bp, Cannabis sativa
tttaatacaatgcaacccttatacagtgtaccaaacaaactcttagtgcacaagtgttctgttattattctggtcttaatagtcattagattatcaattgttgattttaaaaatgggaattaccatatatattgtttttttaacttttttttaattttacggtttaggtttttaaagtagtttatccggtagtttccatgtgagttgctatacgattttttgttgcgatttaagctgcaacgttagttgcaataggagtttctatgtaaaattccgtaaaaatgccaaaaaaaactgttttgaagtgtaaaaatgaaaaaacccctttaaaaatatatattttaatataatacaaaagaaaaataaaatttattaatataaacaaattttaatatatataattatcaaataattatttattaatataaacaaatttatttcttcttctctctctgttttttttaacaagaggcaacatgttggatatgatgatggaaatgttgctc

SEQ ID NO: 140380 - DNA, 1295 bp, Cannabis sativa
cacatcgacattaagtacttagctattatagaacgtgttaaagaaaatgaattggtcattcaacacagtagcactaaattgatgattgctgatcctatgacaaaggcttgcaacctcataaattgaaggatcatgtagagaacatgggacttgcttcccttatgtaattttgtacaaataaagttattattaataaaattcttattttgtttattttctcatatttatgcgcaacttaattttacatttgagaaaattttagagcacctaaataaacataagatttaggatttattcacttaagtacattgccacataaagtacattgttctatagtaaataatttgtaatatagtgaagataatactcgactcataatgaggacatatcgctatgattcatgtgttattatataatgaggaacactgggcttgaatgttttagtctaaatactaaccaagtgggagaatattaaaatatttttatttagggaataaaataaaggaattaatgttgagataaatgaatattttatattcattaaatctggacaatattaattgcgtaatattctatatattgtcaaatttcaatattcattattcgatttgatttccttaattaattgtcaaaatattctaacaattaatgtagcgtagaaactaatggagtatctcacctataaatataaggtctcggtccccgagctcttcactcattctgttcaaaacagcaaaaatctatctaaagagagttgagagagcgaggaagcccgaattcccataccaaagctatcgcagggattgaagctcaaacatcaatggctggaggtatttcgattctttcattgcatatacagttttgatatgtttacagtttattctacattacatatcgtttgtatatcttatgcgaggagaattcaattgattcattctatgttgttcaggcttcgcaattattggatgagcatcttcattctttctcaagtgattacataattgcattacaaacgaattgattcaattgataatgcattacataagtattagaattctccaataatactcacttgaggaagaatcaattattggataatatgcgaggaagtaattatcgtttgtatatcttatgcattacatatcgtttgtatatcataatgaatctaatacttgaggtgtaagtttgagcaaataaatgattttttctaaaaactaggttcctagatcgatcgctcccactaatcaagtgaactcttaattttacaattatagtattgtaagatggataataaa

SEQ ID NO: 140381 - DNA, 843 bp, Cannabis sativa
gtttggactgatcggtgtgagaaaagttttctgaagtaaaagcagcgcttgattaccgctccagtgttaactcttccttcagataaggaaaagtttgttgtttattgtgatgctccgagacaggatctcggctgtgctcttatgcaagctggaaaggtaataacctatgcttcttggcagttaaagaagtacaagcagaggtaccctactcacgacttagaactcgcaacagtagtatttgcgctaaagatttggcggcattacatatatggcaagaagtgtgagatatacactgatcataaaagtctgaaatacttctttacctagagagacctgaccgtgacacagagacgctagctggagttggtgaaagattatgattgtgagatcctttatcaccctggtaaggccaacattgttcccgattccttgagtagaaaaagaccaaagttagataaatacaatgaagcagatctcgcaacagttagcaaataaaatgacccgagctaaaattgagctggttgtggggcagttggctaatattaccctgaaatctactcttttggagcaaatcaaagaagcacagtgcaagatccagagttagtgaaatcccgagataggatttcggctgggaagactaatgactttaaagtggatgaaacgggaattgttaccatttatgaatatttgtttatgtgcctatggatgatggtattaaaggagagattatgaatgattctcatacaactccttactcagtacatccagggtcaatgaagaagtatcaagacctcaaggccatattttggtggccaggcatgaagaatgatattgctgagtatg

SEQ ID NO: 140382 - DNA, 533 bp, Cannabis sativa
  modified_base (27)..(43): a, c, t, g, unknown or other
aggatgttaatgaaacatacatggtannnnnnnnnnnnnnnnntaaaatatttccaacaaaaatatgcctaaagctcaagaaactaagttctaggtgcccaggtagacgtttatgtcaacctagacgtcaaaaagttaaggtctaagtttctctctctagaaattgtgaagtgaagttagattagtcattttttcttaatttctcttgtaaggcaattaaatttttgtgataataaaagctctaagtagatgtagctctattaccatcactgtaacgccctaatgctaaggcacgctacaatactttttcatttacagtgctatcttttctaatcaaagaattttctcaaaaaacgtgtcaaattaaaacttttttaataaatattaaactttataatttacatagtcatttacaaacaccgggatcttgtttctaaactttatacaaaatatgtcaaaatacataaccaggtcgcacaacgactacaaaatactaaaccccagatgtcccgagaccgaacactctaggtcgc

SEQ ID NO: 140383 - DNA, 607 bp, Cannabis sativa
ttgttttagagattcatatttaggatgttaaatgatatacatggtagtaaatctagatagtggtaaaatataatccaacacacccatcgctgactgcctgggctcaaccaccatcatgccaccaatattggatgagctaggtgcccatgaccggagccattttgctcccatcgcatactgagttcgacgaggcaatgccttcataaacgtgccataaggcttaacgattgttgagattggttgaacaacaatcgagaacaaaactgatccgtatgcccaatcacccaacagataatgcagaaagtcgacacattcatactgaaaattaatccaaaacaagtcgccaccaagctgttgtagcttcattcttcgcttcaatcttttttcaatgtttaaacgaacctgaacccgcaaataatctttccaaacaccattaaaattattctcatcagacttaataaagctaccaatataattcccagcatcccgtacaacctgttctattttgaagcccgacctaatatcatgtaattgcacccatatatctagatgatgcaaaaggaacctcccgaggaacatcccttggtttcaaccgttcaaagatgag

SEQ ID NO: 140384 - DNA, 652 bp, Cannabis sativa
aaaaaaaaaaaaaatctaaaaacagtttttaaaaatttgtgccaaacaccattaaatttttaaaatgacaaaaaactgttttctattctcattataaaaaacacaattttaaaaattgaaaactgaaaactaaaaacacagccaaacaagctcttcatctttacaaatttggacgaagaaaggggtcgagttggacaacgacaaaggaagttggatgacaacgtaaggagagtttgggcgtggagatcacactcttcttttgctatagatctgagctcttcacaaatgtcttcatagattatggagtttttggacaagacaattgattcttagctataaatctgagttattattgatttttattgtgtttttggatagaaaatagagagctattatgtgttgtttgaatgttggatttgagtgcctcttaaatagagtttggaatttggggcttagaagtcaaatctaggaagaagaagaagaggagtttggtaacgtctttttttgataatttaattgtcaaagtattttttaattaatgtaaatattgattgatattatgaaatattagtattatgtaatattataatttagagaaagaaaatagagaagagatgagaattttctgagtgttttattccaataggtgatc

SEQ ID NO: 140385 - DNA, 651 bp, Cannabis sativa
tttaacaaaacagaaagtctaatttgtaatttttgcaaaatacagagttcaaaatggtatttatccttattagaatgatataattataataagataataaaatgatgcataattattaagtacaaataaattaatgtaagaaaataacacttataatcaaaattatactgagggtaatttttatttttatggttttacagtataagtttgcaaaaatatgattttttttctttaagaagttattttgtgggaaaattttagaaaaaagttaaaacatatgggaaaatgaaattacaaggtatacctattttattttatttgttttaatttttacctttatttccatattctttaagatatactcacttctatagatgatgtccccattatactctttaggtttatgtaaattatatgctagacttaagtggagagtaatgatatattaagcaaccgactcacaaaaatgggtatattttaatgaattataatataaaggtatttttgattaatggatacaaaaaaatattattccttaacttatcgaaaaaaaagtgaaaattacatgaaatatgggatttcataacaaagttagaaaaatatggcatttttaggtttgccacttttctatggcattttttcacatttaag

SEQ ID NO: 140386 - DNA, 1140 bp, Cannabis sativa
aaaaaaatcataaaaagttattatgcatatatttcgagcaacaaatatggtcacaacacgtggacgagagttcaaaaataaaatgtatttaggagaaataaatattgtaacgtctagagaaccaccacgtgccaagataaaaatatgctaatctcgttaactggggtccataagccaagtgatttaaaataaatttcacttaattaaacaaataacttgtaataaaaacttacattactttaaaataaaatattaaagttacatgtctgggatcccgtaaaattattttcaaaatattacaagttatttcatacaagccgacctaagtggcaaaatagaatttttatacaatttcttgttcgacccaactctcgtctagcttggccagaacatgtacaattcatctttaaaactctcgaactcatggctgattcgatactattttatccttgcttacacaatagagcacctgtgagccaatgtccaataagacaaaacaataaaatagcatatgaacaattataataatcatatttcatacattacacatctgcgtatataactgtgacaccgcactgtatatcacattatcttatatacaatgatgtcactgcatctaatgtctatcagatagaaaacatatattaagtattaaacattaattttatattttatttattttctacttacattttgttatagagcattggtattaggcattagtggtgcttatcactatctagatgtgtaagccctataattagttagtgatactctttaaaaattattaatcaaattatatgagacatgatacttaattgtgccaagagcaatatgacacctaggaaaatactaaacatcaataacgcttttggcattactctaatttttttttattaaaatatatattatattaatacaaaattattacttactgacatatttacgtttttttaaataaataataattaataaaatattataatatatataatttttattttaaaaattaaaaaaaatatttgctataaaaaaatatttgggcaaaatcaagggcaacatttaccccccaagccttgtttggtggagcacaaacgaggcttgtttgatgcctctgggtggctcatcggtttagcggca

SEQ ID NO: 140387 - DNA, 962 bp, Cannabis sativa
  modified_base (275)..(280): a, c, t, g, unknown or other
  modified_base (421)..(425): a, c, t, g, unknown or other
tttagaattgtatcaatatcatttgcatcctatacattttatagttcactctttttgatttttttttcttttgaaagttctttttctaattttaaaaaaattaatttctcaataaaaaaaatattaaagtatgctctagaaaatttacgtagtacaacttttaagggatcgttctggtagacgtgctatctatttcggcatctaaaaaaattttggaaaattttacaataaacccctttttaaatgaatgtattgatgcaccatatttgttttannnnnnaaataattttttagtcaaatcttttcttatggtcgtgtacgttattgttatttaagatatcttataaaattttaagaaatttgaaaaaatttaacaagccgaaaataagattcaaaaagtgtgttgcacgcgtgactattnnnnnttatatgcgtgtgaaatagattgtttgaacactactttctatattgtcaattattctgaatttttcacaattttataggatatcttaaataactataacgtaaacgaatatgaatatgaaaaaaaaaatagacttaaatttttttctaaatgtcgaaatgcaccctttttaagggggtgcattgtagaatcacccaaaagtttttagtctatttttttttcataatcgcatacgatgtacttatttaggaccatatataaaattttcagaaaattttaaatagtttatagtaccgaaaataaagctcaaacaattatttaccacacgtataagaaaaaatagtcgtttgtgttcaactaaatatttaaaccttattttttacactatatactattcgaaattttctaaaaatttataagtaatcctatatagttataatgtacgcaattatggaaaaatatttgactaaaagttgtcctgaatgctaaaacaaatacaaccccttaaggggtatactataaatttaccctatgctct

SEQ ID NO: 140388 - DNA, 589 bp, Cannabis sativa
caattcaagcaagttgcagcaagtcttagtgtgaatccaatccaagtaagtttctagcaattcctagtttagtttttttcttgttcttgaatttttagaaatagaaatggattttgcatgattttgagttagtagctgctgtgttagttgttggtgtttgaatcatgtttctggtgttagattatggttttgtatgttgttttaagcatgaataaagagttgttggtaagtttaaatgagctttgagttttagaactcaatcttgaagccttaatggtgaaattcgtttctgtgtatgggtagttgttttatcacttggaaaatgtttattggggtataatatgcaggtctggaaagtttgatttagtttggaaacgatttggttagagtatgagatttttttggttggttttacactgcttgtaaaactggttacccgaattttgcagcagggaaaacccatttttcagcttgtcgtttcgggtcagtttcaggtttctgttggttgattccccgctagtttgggatattgccatattaagttgctgtaaataggtttttggttttaaacctaagtcccggttgtgat

SEQ ID NO: 140389 - DNA, 516 bp, Cannabis sativa
  modified_base (123)..(159): a, c, t, g, unknown or other
tttagttaacgaaaatttacgttactaataataataataataataaaagtgactgctagaataatggaacttattaataattttttttttaaataaataagaacataataataataataatannnnnnnnnnnnnnnnnnnnnnnnnnnnnnnnnnnnntaataataataaaaataataaaagagcctaccactatgcttagccgctcaccttgtaataattattataagatggtgtttgtcctcacaacatatttgtcttcccattttatttaaataataaatttaaaattaaattattcattacaaaatagataattactattttactaattcaaaatggattttcttaatatcattatcttgtgtcatccatatccttgacggtgttgcaaggtagcgatccgaagaccatagacctacaataccactttctaataaattagattatttattagatttcatcaactaaataatcttatttattaattccatgattactccaatgtaaatatat

SEQ ID NO: 140390 - DNA, 2389 bp, Cannabis sativa
  modified_base (2358)..(2363): a, c, t, g, unknown or other
aagaatccaaacaactgaaggagtttcgagctcagatcttggtgatactttacgacagaaaggatacaagggttaaagatctaagcggaatgagtcaattattgcaacgaaaaaggtaagtttttggcaaagaatcaaggtatttctaattttgttgagaattcatgtgttttagagaattattatccatttgggttattaattctagatctactaaccatatttgtgttcttcttattacaactccagctgcttagacttggattatcatcttagtgagttgagacagatagttggacaaaagggtggagattgtccaaacttgaagatgaaactcgagtttttatcattttgaattaattgttttattttttgaacaatttattttcaatttagtttggaaattttatttcccatttcatattattgcagacaattcattgtgataattttaaagtattaatttaaatttttctcttcaaaaggattttattatgaattgcttttatgaaattaagctttatattctatgacttgtttgccaatgccaaattatatttatttgtttatcatgttattatgtgttttacatttattattgatagaaaaatctatggtataataatctctacaaagagataataccacataaacacttgaagttaaattcaatgtttatgaataattgtcatttcttaaataattattatgattttatttaataaaagatcttgtgatctcatggagaagttaagttattgatatatgcagttcaaagattatttacattgaactctagaatatatttaaaataccacagaatctctataacacacatattttgattagacatagagatatattatattatacaaactaacaaactagtagaacttattcttgatcctgtatatgttccaatagtaatatatattactaaagttcatggacatagaattatagtaccttatcatcatgggaggatttttctagcctgttataatttggatgacactagtgatgacttacaataatatgttcaagaaatgaattttaaataaaactagaaaaaagttaatctaaccattcacatggatagttataacttatcagaattatgaagataagataagaaatgttgcaatgtctattcgaaagacttaagcacaattcctaatccttataaaatatttatggtatctctagtgattacttaatcttaagcaagtattttacattaatgttaatactagaatgctatgatttattatttctagataaagataaaatgtcacaacaagatgtccctaagtaccaattgtaagagattaaatacgcactttgtgtatgcattaaaccaaactcctactgttgagtgggagccatcaaagatgtaatccaacaagagaacatagagatataatcaagaaagaatctctaaaagtgacccatatgttagatgatagaggtgtatttagaatcattatatctacaccaactcaaaactttatatgtgagatggtgattactctgggagtagagaaattattttggaagggtgttaaaacctatctataataatttagttccaccattgaagttaaataattgagttacttttaaaagatactataaagttattcaaactgaagaaagtttttgattgttttatctctattccattttggatagaattagagttgtgtcttctatatattcaaatgcacttatcaagcagtaaagaaatcagtatccctagaggagtaatacatatagaaaaatgatgttctataattgattatgaacacaaaagaaagtaatggtggagaaagctattgcttgctacaaccttacaatttctattatatgggtatagtcaaacacactatacttgatatgaatatcaagacaatgacttaattgaaatgcacttctagttttatgttagtgcaagtgggagtttgttgagattttatgccctaaataaaacctattttaatataatattatttgctatcaatagaagattagaagtcatttaagtttacatgtagttttcatgtttatagttttaatatacaattctgttaaattcagaacatatagttattcacaattacagtgatgtcatcataatagagagtaattatgattatatgattcaatgtctttagtcccattatttattagtgcactagatttatactaatgtgataattagcgataaagtttacttacactcatataagtagaatgtcctttctagggcattagtaagatatactagtatcagatttatgaagtatacatcggactggaccaatattaaaagtagaaaatgttaggttttatgccctnnnnnnaactccatttcaatgtaatctatttt

SEQ ID NO: 140391 - DNA, 529 bp, Cannabis sativa
ttgtcttttcaggtgtgttctgacaggttggcgcactatagtcaaaaccgggtatttcgggccgaactgggttcgagcctgaaatgaaattgaattgaattaattggcattttaattgatatttgatgatattaaatttaattgggtttgaaattgtgtgttaataccatttttgcccttgtatttttaaagtggaagttatatggccctaagggcattttagtaatttggctttatgagttaagtgtgtgaaatggcatttctgacaaaaaggaaaatagaaattctggttattctctctcaaacccgaccctctctttccctctcttactctcttgtttttcaccttgatttggtgagaaattgatgggaaactagtttgattgttggggaaaaatttgtgttaaggcttggagttaccttgtgcaaggaatcgaggtagtttttataactttgattctcttttgcttgctgaattttagttgaaaaagcatgaatatgttgaagaagatgatatgtgcatgattgt

SEQ ID NO: 140392 - DNA, 662 bp, Cannabis sativa
tttgttaactttaaaataatttttcactacattgttactcaattaacttaaaaaatactattgtgatctacttttcaatatgaacattttaaaatgtgagaaacatatgttttttcgctattttagaaaaaaaaaaactatttagttactaatatagtaattagttattattttataattatttttaaatcttagttaacattcattttaaatctttgttaaatgaattatatatagggtaaggaatgaattatattatattatacgataattaattggcttttaaaataataaaaatgtatataaataatttatatataaaaataagagaattacctcatatactatttttttcacttttttttttattaaatttacggtttatgtttctaaagtagttacagcactagttgcaatagaggtttctatacaattttttgttgcaatttaagttgcagcgttagttgcaatataggagtttctatgtaaaattccgtaaaaatgtaaacaaaattattttgaaatgtaaaaataaaaaagccccataaaaatattattttgttctattacatgacaattcattagttttaaaaataatatttaaagtaattacataaaaatattttaaattataagctaccatggcaatttagatcaagtaa

SEQ ID NO: 140393 - DNA, 589 bp, Cannabis sativa
caacctccagaaaaccaaatcaaaccatctaaattctcacagcaacaaaaaacctaattccacatatagaacctaacttaagctaagaaaatttaagagaagaagagttaccttggatcaaagcttgaggattcctactaactatccttgaatcaagagcaattaacactactctagctgctccccaagagaatcgaaagagagagggtgaaagaagagaggaatgaacactttctccaattttctttctattccttctaacctaagtaatatatgattttctttctttcttttttttttaaaaaaaaatagcttatattcagcattaataaaacccaaataagacaaaagaagctttttgccaaaagaccttcttgcccccaaccaataataaaaataactaaagatctcaagggtaaattagtcatttaccacaccccgaaaataccaactccgctaaaacttagcaatgatttcccgaataaattctaaactataaaatgcgactctctaaggcccaacgccgctttccacagcttccgaacacaatcacagaaattgagaaattacatagatagcataataaata

SEQ ID NO: 140394 - DNA, 784 bp, Cannabis sativa
taattatttaataattcaaagtattaatcatatgcggtctttacataatggttcctctgattttacaaaaacaaaaacttgtcaaaaaaaataaacaaacatgttacccatgtccatctatttcaatttttatattttgttataatgatcttcgaatgaaaattaatatgcatttttcacaaaaaaaaaaaaaatatatacctattggaatcctcacactaattgaaaaaaaatatgtacctgttaccctcttatatcgatttgtatacaaaaatattatctgatgatattgatttgttacctgaaaaaaaaatatccattttaattagattgatcatagtttgaaaaagtaaacttattagttgcttacataaaaaaatagcatacatttaagtacacaaaagttctatttacccacaataaggttccaaacatacaaggttcatataccatcaaaaaaaacatgtcaccacctgattaagtgttcccaaaaaaaagccttgcacacacaacacttacatatacccaaaatatcacaaaaaaatataaaaccaaaagctacatgttaaagtttgcaaaatactacatgtgctaattacaaacatcagaaaaacacaacaatattatccaaactacagatcgtgattgtaaaactaatcatccaatcttcaaagctccactagtagctttgggcatctttttcagtaaactctgaaccagattcatatccattcaactccttcttcatagcatgcacgaaaagctcaacgcacatcttctttcg

SEQ ID NO: 140395 - DNA, 831 bp, Cannabis sativa
  modified_base (601)..(609): a, c, t, g, unknown or other
cttttagtttcaattttatgtcccaaaaagtgatttagcgtgtcactcatcagttttacgaatattataatttaggggcctataaatcgtcgagcaacagttctattacagagatcaagaactgaacactctattacaaagagacaaaacacatgtcaaaggatatgacaagctgaaagttttaacttgacagagaactaaattacttagaactcaaaagtatgtaaatgaggaaagtttgagaacttaaagagaaactctgatattttagcttaatattaatctattactattagatatcaataccaatctactcttatattctttgtactattaatgttctagttatattagcttttactaatgcttttttataatacagatattgaatggtgtttgggagagtaaaattttaattttaaatttggaaaatttctttttcaggtatgtgtatgtaattattaaatttttatttttagatgattatgtagttttcaggagagattcaaattttaattttaattttgaatttaacttttttttccagtaggttagatagttaattttttttaacagatgtacatataataataataataannnnnnnnntaataataataataatacaaaaaagaatattggtatctcgctcatcaatctatatatatataaaggagagatatgaggcggtgacatgacattataatatcactttaaatgcatcaatctcttttctccttcattctcttattttttggatattttattagagcttaaatttataaattaatattttactatttctaagattgatcttcgttcaggatatca

SEQ ID NO: 140396 - DNA, 795 bp, Cannabis sativa
  modified_base (588)..(588): a, c, t, g, unknown or other
aatggccccttaatttaaaaattgtaaacgttctactttttagggtaaattttaacaagtttttccttcctcttacactcgttagtgttctcttaaaatctcaccatacacatctcgagaagtcattaaattttatagggatgaagccaagagcgttgtgcatcacttttatatttgaaacattgagagaaaaagtagttttcaagcactagtaatcattttaatcgaaatagtgaaaatcccacatttctgataatggtacccctttgggaaatgtggcacggacccatctcgaaatattttttcccacgagttacaatgatttcatactagtaagacgtaaatataaatatttttttcgcgttaaatttggttaaaatgacccctaattacaaaatggaaaacgttctacttttcaaggtaaatttaactttcttcttacactcattagtgttctcttacaatctcaccctacacatctcaaaaaatagtgaaatttcacaaggacaagccaagagcattgtgcatgacttctctattggaaacattgagtgaaaaattagttttcaagcactaacaatcattttnatcgaaatagtgaaaatctcaaatttttgatagttgtaccccattgtgaaatgtggttcggaaccatctcgaagtatttttctccactagtcataattatttgatactactaagacgtgtatatgaagatttgtttcgcgttaaatttggtttaaatggccccctaattcaaaaattgaaaacgttctacttttcagggtaaatttt

SEQ ID NO: 140397 - DNA, 533 bp, Cannabis sativa
tctactgcccttgctttaagcttccattggacccttacacctgagtcgagaaacaattgaattacaaaaaattggtgctagacactatagcacagggggtagcgctatagcgcacgactggaaaaaagatgttgcatggaggaaaaaagataatttcaacatgtggttatttcaggatttttttttcttaggcgatataatgcagggtataggcgctacagcgcaacacttatcattttttaaaataaatcctaattctaagaggattgatctatctttgttggcctacataaagaaagatgtaaactggattgaggtacgattcgagagatagaaacaagcaactttgagattagaaaccacattaaagggcgagagataagagattcgcaacaatcagcatcaactttcatcattaagagttcttttcatctttttcttctttattctatgtttagttatttaattatgaacacgattattgtaatgaccacatttgtaacatggattagtaaaggcaattagcactcatt

SEQ ID NO: 140398 - DNA, 961 bp, Cannabis sativa
attattccctcaaatcaggggatttgattacaaatcaagctaaataaatgaggtttttacacagttgtgaatatcctgcttttattgggcttagatgaatgcgtaattaaagatatgcggtaagccttatcccatagggatgcctcgccgagaatggagccaagttaaccttgattgcgagcagttgcttgtcatttgatttctcgggactaatattgttttaactctgataactatattttttgatgtcgatatgatcttccttgcatgcataccatcttctagcgagataaacacctcgctatctgttatcttgactcgccacactatctatactcagtttgtatattgtataatatacactaagtgtttttagtgttgtagtttctctttcacgcagcgaggttgaggtctcgtcatgcacacgggcacccacatagtttctcatcaatacataagttagcagttcgtacgtttctatctcgcaaaggctattcagccaaccgagttataaacatatcctgcgaattatatttccaacgagttgtgccatgctaagtgtacttttcgtttgcatgtttaagttcttcgttcttcccagctcgacacctgttttcctgtgatgtgcttaccgaatttcgggtataacaatttccccttaaaaatttctttttaattgaaaagagctttttagtgattacaaaggttacttccatcatgttcctctttttttaaatgatgcatatcctctgattttggccgttttgcggtttcgaggtacatcagaattaaatgaccatctttttcacttccgcttcgaatcatgtccataggatcaaatctttctctgattaacgaaaccattatcatgggtataaaataagaaaaaaggaaccaccttcgcaccattttagaaagtttgggaaaaacccttaaacttcttcatcaaggatcaccatta

SEQ ID NO: 140399 - DNA, 685 bp, Cannabis sativa
atacgcgattagttcagtattaatctgcgaagactaagggagacaatatccggtgtactatgtgagcaagcgtcttctggatgccgagacccgttatccacaaatggagaaattattattcgcattagcaacaacatcaaaaaagttacgaccttacttccaagcacacatcattgagattttaacaaaatatcccttgcggcaagttttggcaaaaccagaagcctcagatagattactgaagtggtcagtcgagttgagccaatttgacatcaggtacaaacccagatcggcaatcaagggacaagctcttgcagacttcatactcaaatttccaagtgacgaagtagccattatcgcagaagagtaaattgatcctgacttaccaaatggcgaaggatggactttgtatgtagacggggcatctaacagtgaaggatcaggaggtggtataatcctcataagtcccaacaaattcaaggtacacatttcccttagatttgagtttctcacatctaacaacgaagtcgaatatgaggctttgatcacaggattaaaactcgctcttgagatgaaaatcgagtatttacaagtctttagttattcacaaatcgtggtttgtcaaatcaatggagagtaccttaccagaggaggtcgtttggccaaatatctttctcttacttgt

SEQ ID NO: 140400 - DNA, 540 bp, Cannabis sativa
  modified_base (240)..(244): a, c, t, g, unknown or other
atttaattttaaaatgtagatatttcaaaaatttaaaaattcgattaaacttgaaaattaatttcttaaataattttagatcaacttagatcaggtattttcattaataatttattgaaataaacagactaaaatatattatattttaattaaaaaatcaataaatagtttatgaaatatctagatagttatttttttagtggactattttgtactttttctatatatatttaattaaannnnnaattaatatttaagttgatttgtttaagatacttaaagattatatatttttcaagaaatttaattaaataaaaaattatatttatgatgaaaattgatttattaattaattttagaccaacataaattggaataatttttcaagatttattttatttaaataaaatttgaagatgtattttgttaaatacattaaatttcgaatttagttttatatatttatagaaaattaaaatttgagttgaaaattaattttaattaattttggatcaatttaaattaatgaattttcttaat

SEQ ID NO: 140401 - DNA, 714 bp, Cannabis sativa
ttaataaaagattagaaattattttatgttgcatggttgacatgatttattttatgattatatgtttaatatataaattctataaaattatgaacatatagttatacatgattatagtgttgtctacacagtgaaaaataatcataattatatagttcaaactatttagcctcacgatttatcagtgcactggatttacactaacatgataagtagtgatgtggtttacttacacttatatatgtggaatattctttccaggacattagcaaagtaaaatagtatcggatgtatcaactgtacatcggactggaccgatattgacagtaaaaaagatatcataaacttactattatgtcttttctaagtcaatgtcacttagttgatcttaggtcaattgatctcaatcctgagatggttaagttctagcttaactgtactatacgtgctctttgacttgttcattacagttgccaatagggttggcctaatacttgcatcttgggaactcagtggttcaattgaatgggagtgttaatcatagatatggaatctatatcttctattagaaatgaaacgatggtttcattaaagcttggcttaatgtgatacatgatagagcgctcattttagtaattatattagtttactgaaatatcatttataagtagctaagtgttttaaggataaaatacattggagggtagaacggta

SEQ ID NO: 140402 - DNA, 538 bp, Cannabis sativa
aagagcttgaagtatctttttactcaaagggacttgaacttgaggcaaagaagatgggttgagtatatggaagactatgattttactttgcagtacaacgctgggaaagctaatgtagtagccgatgcactaagtagaaagcctcatggtaccttggcatgtttggctcttgaggactgtaaaaggacaatcacaatgggtgattataacttgcaatactatgaaggggacaaagtagcttgtatctctaacataatggctacaccagtactactttaacaagttaagcaacatcagtggcaagatggaaagctaagacttatttggtacccaatccaggatggtgagcaactagatgggtggactgttaataatgaaggatacctataccatatgggaagactagttgttacatatattcctaatcttaaggagtccattttcatggaggcccatagatcgatgtttgctgtacatcctggtagtacaaagatgtaccaagatttgaagagataatattggtgggaaggtatgaaaa

SEQ ID NO: 140403 - DNA, 707 bp, Cannabis sativa
tattcttcctgagtgacaccatctcttcatccatagccttgaaccatttcttagcattagatctttccatagcttcctcatatgtttgaggttctgtgttaattgactccatagctgtcataaattcgtaagctatatcttcattccagatattgaaactgtatttaggattaggttttgatgttcttttctccctatctctggtcaactggtagtcatttagagcccctatttgttgtgtgtcttatgtttcctcttcttgttgtccttctacttgagcctcatctctattaatattttctgtttgttccacctgaacttgatttggttcaggttctcctcgtgcatgttccacctgattgacatcaggttcttcttgatcctctaatctccataggataggatcaaactgtattattcctgcaaggttagttttgatgtacctacagggttagttttaagtgaacatggaaattcattttccttgaatataatatctctgctaataatagtcttaaaaccccatttttcccttaaccaaattctatacccttttaccccctcaggatatcctagaaaaactccttttatagctctaggttctagtttagcaatactttggtgcacataagcactacatccaaacacccttatatttgacaggttaggtggttaaccagaccacctttcctcaggtgttttgaatt

SEQ ID NO: 140404 - DNA, 822 bp, Cannabis sativa
tactacttgattgcatatacttgcgtagtaatcataattttcgtaacacctcgattcaaacactgactacgagtcaggataaagccttaggtccacattcgaatctcgatcttggatctcggtctggttccaatttgggcactgagtcccaggccgagtcctaagttttggtttgggtttgggtttggagttgtgtcccggtagtcagttcttgggtttcgtgtccaaagtcggctcttgtttctcgagtttggggtcaagttttgggtctgaatccttgttttgggcccaggtttgggtccaagtccccaatctatgtctggatccttggtccaggtctgggtccaggttcgggtttggggcccaggtcccccatctaggtcacagttcggttctgaggtccaaagtctgagtctcaggtcctaggtcccagtcccaatatgggttctagtcccagtccaggttcaaggctcgatcctagtctgggtctgggtccaagtgctgatctcggtccaggttcaagtcccgagttcgagtttgagttctagtacgagtttgactctaggtctgggtttttgttcgggtatgggtttgggtcttggtcagggtctatatttgggtcggggttctggtacgggtctgggttcttatccaagtcctgggtcacgggtgttgggttccatgttctgggtcgcaggtcctggcataagtctaggttcaggtttaggtttcggttcgggtattgatcccaatctagttctgggtccgtgttcggttctgcgtctagatccagttcttggtccaagtccaattcctgttcca

SEQ ID NO: 140405 - DNA, 750 bp, Cannabis sativa
  modified_base (154)..(167): a, c, t, g, unknown or other
  modified_base (260)..(284): a, c, t, g, unknown or other
gtggtaaccgaacccgaatgagagaaagagatccaggttaagatattaataatgctctgctacagaaaggaatcaatggctagagatcttgaacggaaggagtcattatattctgctggaaccgatgtaaggctttcttaaacccttatgtgtnnnnnnnnnnnnnntagagaattcatattaggatgttaattcaacatacttgttagttaatctagatcctggtaaaatattcccaactggcctcagagccatggtannnnnnnnnnnnnnnnnnnnnnnnntttaaaacgatgaatattgtttgtatgtttattaagatgtgttcatgttggtttatgtgattatttgataattgaatgtgtattacaaaatttttccatgaaaataattttattttctttctgaaaatattttatttggattccttgtgaaaagttaagcaacttttgtttttacggaactcaattccgatgaaaaacgaagaagttatgaaggtttgaaaaatcgaatgcatatggtgtcgagtaggtgcatcgagtgcaccaggcgctcggaaaaggcacgcctacgcgcgcgcatctcagacaaaattcttgtctaaagctgtgtctcgtccctcgttcagacacgaagccacgcccatggagaccctgcaggcgccaagatttctcggcaggaaaccctgcatcatcctccttccccgcgcgtttggggctgcgtgcagctttcctcggctgcacgtgcagc

SEQ ID NO: 140406 - DNA, 514 bp, Cannabis sativa
ggaccattagaacgggtaggtgggtcgcaacgttgtaacactgcctggcctctccctgattccctctcacggttcctattccagcctcctgagtaagaaatttcacacacaagtgcctaatcgacgtgactgcaccaaaatccaccagggccggtcggccgaggatggcattgtcagctgtcgggcagtccaccaccccaaacgtgtagtacttgaaagtgctttggggcgtgtctgggcacaaggtgactgggagcctcactttttcaattgggatgagtattgttccattaaaccctgtgagctaggaactgctttgtgaaagatcctcccgatcctccgtgaggcctattgctgtgaaggcttctttgaataacaaattcacagaactcccgttgtcgattaggattcaggccacaatcttgttagcaatggagtctttatgaccagggggtcatgatgagggaaatgcactgtcttagcgtcctcttctgtgaatgtaatgggctgatcc

SEQ ID NO: 140407 - DNA, 513 bp, Cannabis sativa
tatatactctttaaatgaaaataaatatcttttgtatttaagatatttactatcgtaatacaaaacattcgatacaaaagttgtcgcctagtgaccattcaaaatacagcctgccgtcacaaagatcgtacgctccaggcctaaccgccccgacatgtacgatcttcatctgctcgcactcattgttgttcaacctagctttgcccttacctacacatacatataataactgtgagttgatagactcagtaagaaaagcataatcataacataaatataaacctgattacaattaggcacccatacacccaaccataatccttccctgcgtcctacacggtaatgagtcaagaacgttcatacggcggtattatcgaccataatatcaacctatactcggtactctagtcgtactgatgtgatagtgtcaataaatacttatgctaaacatacatttatcggtatccaataatattctaaatatactgataccgctattctaatgtaatctaa

SEQ ID NO: 140408 - DNA, 574 bp, Cannabis sativa
cggtccaggtccgagttcaggtccgtggtgcggtccaggtttgggtttgggtctggatctaggtcctgatctaggtcccaggtttcgatcttggtctgggtttgggtgtgagtccattttcgtaccttgatccctatctagatctgactccgtgtttgggattaggtcccagatttaggtctaatccaattctcagtccgatctaggtacacgaccacctctaagcctgagtttcggtctcggtttgggtcttgggcttggtccgagttcggttctaggtctgggtcagggtcctggtcagggtcctagtcttgttaccggtcctggtccggcagttcttatttaggtgctagtttcgggtcctgggtctaggtctgggtttgggtttgggtcgtagtctgggttcgggtcctagtctgagtcccagattcaaacaccgactatgggtctattccaagccccatttactagattccgagtcaagatctggatccctgtcacgggtctaggtctggttctggtcctgggttccaagtccaagtttgggttcgggattgagaccgggtgcgattct

SEQ ID NO: 140409 - DNA, 836 bp, Cannabis sativa
aaaaataccgcttgacagtatttttagtatttttgtaaaaaaaaaattttttgtaaaaaaaaaatggttttgtaaaaaaaaaatggcaaaaaaaaaatggcaaaaattagtataatggcaaaaattagtataccatgtaaatttccctaattaattagtactttaaggtatgtttgacatcgtaaataaaaaattgttttttatttttaaaaataggaaattattttcttaaaacaattaagcttatttgatcttatattttaaaaataattttcaaaaaataaagttacaaaaaataaaaattttgaaaacaacaaaatgttgtttttctattttaaaaaataatttatttttggtcaatattatttttaaaaaacactaaccaaacctgattttgttttgaaaacttcaaaagctttttttttgttcttatttctaaaaatgcttttttgaaaacaaaatataaaaaacaatgtcaaacatacttttatatttctaaattatatatttgtaccttaaattaaaatttaatcattacacttttatcaatttaaccaaacagatcttagttatatgtaatcagaaaattaaatttaaattcagaattcataaaattttaaaaaatctgattatattgataaaattttataaaaaaaaaataaatttaaagtagcaaatatagaattcatcgatctcgctggtctactattttatgattagaattttaacttatatcctaaactataaccagtatttttcgagacgcattaattttatatgaatttcttgttatattatttataataatataatatatagattaaatatatgtaata

SEQ ID NO: 140410 - DNA, 715 bp, Cannabis sativa
agaggtatgttttaaataaatataaaattagaggtaaatttgattaattgatgaataaaagatgcatttttcaacttaccccttaactagctgagcccctgagcctttcatgttggaaacggctgtttatagtttgggattatttcaaaaatttacaaaaaataatagaaaaaaatatacaaaaaatacagttgtataaaattttaaatatttattttatttttatgattttaattacagaaattatggtcttttaatttatttttatgttgttccgttattaatttattgttatttacatgttatatttttattgttatttagatatcatttttgtgtaatttttttattatttacttgttgtttttataaaacaccataaaaatatataaaaaaatatatttgaacataaaaataaaaaagttttacaaaaagtgacattatttgcatgtttcacaaatataatataatgtacctgaaattgtggatatttttgttaaaaataaaaataaatccataaaaaatgttttcaactgtagatacctatatttgtaaactttttattatttttgggtatttatgaaaatatccttacaagtttgggataagttgaaaactaacattttttattacacattaactaaatataactctaaaataattttaattgataaataccctcttttataatcaaagtaccaaatataacctcaca

SEQ ID NO: 140411 - DNA, 656 bp, Cannabis sativa
  modified_base (35)..(36): a, c, t, g, unknown or other
gtctttggagagagccggtgtataaggaaccttcnnaaaagcagcaagagcgaattgataaacgcctttctaaacaaactcctcgaccatcatcaggtattttaaactttaggtgttggaattttatccctagttatattaacccttgttgtttttttttgtaatcgcagaaatgaccttcctaaagtctgacaagtcatcttcagaggagttgcttcctcgtgctgcggagttagcttcgcagttcatggctacgtttgcgaaggcttttgctgtagggcccaaagaagttgaaatcgcgaagaagcatattgctcagcttcaagaagatgttaagaagctgaagcaggatgcgtcttccaaagccaaggaactagaagaactctgtaaggccaaggagcaggtcgagcttgaagccaagtcgaagattgaagagatgtgtcgcgacctggaaactgagaaggagaacggcaagaaacagtacgaccaggcggtttcggacaacatctatactactctttccaagattccagacttcgacttctcaattcttagagcgaaagccgcagaaatggccgaggcttttcgcgctatgtcacccacaccaactcaaggtggtggagggaaccttctcgaggagactgaagtcgcggagg

SEQ ID NO: 140412 - DNA, 625 bp, Cannabis sativa
tcttccacactatgattgagtagtgacttgatatgagtgggcaaggtactcttcactataggtttcgaattctaagaagaagaaatgagagaattttgaaatttaagagtggttctctttattttcagttatctgacaaaatggactaatgaaggttcttaggttaagcgcttataactatctatttataagattacatctagggttaggatttaaattatatggaattaaaaaaaaaaatggctaaaaattcttttaagtggtcggtcaagtattggaccccactagtttcaattttgccttttaatttaacagcttatattttttctttcacaaatgccatattttaaatgtaaaatctatttatctaataattataattaattatcaaataaaattaccatttatcttatttattaattagactttacaaagcctcttaattattaaagaaaccctcaaatatcttttcttctcaattaagctattgaatagtgaaaatttataaataagacagtctaacttagaactctaattgattaattaaaaccaattaactgagtctataagtcaatattatctcaactagtgcggggaccatggacctatataatcaagcttccaa

SEQ ID NO: 140413 - DNA, 657 bp, Cannabis sativa
aggggcgccccggcgggagcctccaatttagggcctctaggtcgggaaggtttctctcagcctgagatcctcccaacagctacgccaggtcttccatcctcctctcctgctcggacctctgcctctctccttggcgtgccgtcatcttcccagcttgccctttctcttgctttaactctccctacatccttttcttcaggccgaggctccccgcctctacccagtcatcccccgcgggtgttagctgaatgggacgagattcccgccttccggatcaagaaggatgctccgttcgaagaatcggctgagaattatttcaaaactctccttgatgccgtcagaaaacctgatgatgatttctacatctcccgcgggcgattctattttaaaggatactgccatctcggtaataaaggtattttactattttgcgtgtgcctcgatccgttttagtttttgccttacttgctattactcatacgttatgtttacttttgctagacggctttgagatgtgcccatgctatgaagttcgccccacaaacagatagagagagggagagtttggccaagggctattcctgctacaagaagaattacgaaacggccgttgctgcgaagacagctgctcttaccaaaattagcgctttggaggtc

SEQ ID NO: 140414 - DNA, 513 bp, Cannabis sativa
ttgtttgtgacgattgggctcgctaagatctttgtgtttacgtcgagcttgttattgatatttttaatttgggggccgattcctgatccattgatattttataacaagcagtaaactaatataaatgatagttattagtttgttttgagttttggttttactgtttttagttttatttcatctattatttttattgttattagtttaattcaaattagtattttatggggttataattaatagttttatgtgttgaaactaattaggttttcccattagtcttgtcttttgacatgattctatagtttctctcattggttttggtttattggtttctggcgttagttactggttcttggttctgtgttcgttcgagtgtccatggcgtcgagtagttttcagcaaatggaggcagcggaaaaaatggcagggatttttatgccaaaatggcaggtgcaacctgaaatagatgaatttgttggcataaaagaagctttaagctggattaaccgt

SEQ ID NO: 140415 - DNA, 664 bp, Cannabis sativa
gattgtcccctgccccttggtttgtgagctgcgaggtttgcctcgtgaatctcttctcccaaggtcaggttgattttgggtaccattctcctatgctgcccttactatggctatttcacgctctaacttggcattacgctagtttgcttcctccaatcaatgcttaagatggcaattttctaattccacgattggtatgtatctggttgggtcataggcgccatcctcatcaacctggttaggaagtggctgattgttgtttatccaaggtccgtcaagccaggtaccccaatactaggttttcctggggcttgtagtctgttcatgcgatgacttaatagatccctaaggacttaatggttcttttttgggggcgatgattgattccttcttgaggattattatcttcggtgtcatccatcacttttatgtcaggaggccttttctgagctttttcacagaggctctcaatgaaagcgccaaactgttaacgcagattttcgttaactaaaattgagcctcacacagaaaaataaaagctatcaaatcaaagaatatgaacacagggttttttacatagttttgtagttaaaattctgcatagtccacgagtcgcaatcttattcagatttttgagtaattttcagggcctctttcatatgaa

SEQ ID NO: 140416 - DNA, 655 bp, Cannabis sativa
taaaagcagcattgttagaagcttcatgctgaattcttttcctcttattcaagtttgcaagaccagagggtggcccccttgcaggtaagtaccgttgataagctcgcaattctgcttctatcttgtccatgttggatgagttaaaattattgatcatattagatacaacaaatccattatactcagaaagaagactattaagtatcaactgaacccattgttctctagataactcaattccaagcaagtttgctttctggaatttcaaattcatcattaacaagtgtgaattaatgctctttccagggagcattttcacactatagagttcatttgcaaaggcatttactaggagagggtcaggctgtgggttgttcattttgatactacaaatatcaataaacagaagtaaatcatttggttctataaattcatacaaaaattcagaaaataacaagtatagcaaatatgtttataaaaataacaaaatgaaacatattcaatattttccaaggttttcaacaagctgatacagtttctcgtttaagcgagagtaaaagatatcatccattgaatggagtagtcaactcatctaaaatgacaaacattctagcaaccttttattggatccaaaagagaatccgacgttgtcccg

SEQ ID NO: 140417 - DNA, 680 bp, Cannabis sativa
atgttgacgatgttctttccaagcctggaataagacaaacaaagttcactgaatggttggagacaaaataagaaaaatgatgatgcacgagaactaacttattctgattttccttcatactggatttggaattcaaaagaaaaaacatggactaggagaaaaaaatggtgtggctattggaagaatttacttcgcacatccttcaactggtgaacacttctatatgagaatgtttcttaattttgtcaaaggatgcacttcgtacgaaaatattagaacagtaaatgagatcaaatatcctacttttaaagccgcgtgatatgctttaggattattagatgatgataaggaatggattgactgcttgactgaagctgcactatgggcaacaagaaaggaattaaaacacctttttgtaacaatattcattcattgtcaagtttcaaatgcattacaagtttggaaatctagctatactacattgtcagaagatttaatttcattgcaaaggaaagatttagaaacaaagatcttcaattaacttaacaacaagttgaatcatacactctatatgaaattgaaatgattatgttgaagatgggaaaaagtttgaaagacatagatggaatgccccttcctaattcttcattaataagagatttaggtaatagactaatcaa

SEQ ID NO: 140418 - DNA, 804 bp, Cannabis sativa
aattgcataaacaaataacaagaacaaatatgggaataatctaaaaacttaaattcataatctaatatagttccatcaacactctagaatgagtgtttagttcatactcacaaatattataaccacaataatcatgttcataattaaataactaaactaagaataaagaagaagaagaagaaaagaactctaatgatgataattgatgatgattgctttgaatctcttctctctcgctcttcaatgtgttttctaatctcaaagttacttgtttctgtctctccagttgtccctcaataagatttacatccttctttatataggccaacaaagatagatcaatcctcttagaattaggatttattttaaaaaaaatgataagtgttgcgctatagcgcctataccctgcgctatagcgcctaagagaaaaaaaattccaaaataaccacgtgctgaaattatctttttttcctccatgcaaaatcttttttccagtcaggcgctatagcgcctaccccatgcgttatagggcctagcaccaatttttttctgcttcaaccttgatcagtaaatcatgcataacttttgcgtccagactccaactgagatgatttaacatgttttggaaagttgggaacgagctctatcattttgggtttcataagctcttcaagaaaatgatgtgaacattatcaaaaatgggctcaaagatctcactccataacaaaatttcttttcagcacaaacctacacacttggagaaaacacatcagatctatataaaaataaatactaattcatcta

SEQ ID NO: 140419 - DNA, 958 bp, Cannabis sativa
ggttgttatttagtgtttgtcaattagatcaagcataattcatagagtaaattaattgatcagaagaaattagcccaattaatttacaattgaacaactactgttgcatttaaggttatttgttatttgttgtcaagaaaaattatttttacgttgcttttatagattaaaatagttgtttagaaatactgatactcataacaactataaaattttcaggatatatatggagtctctgcaagtatcggtatagagcaatggtctttaggatgatattacgaatcaagaagagtattaatatcaagagattgcaattatgctgaattagtgtagataatattgcaggaactagactacaaccctgaaacaactcaaatataactgaaatgccaactgaaggaaggttgtcaatcactctaaatcaaggatgataaaagtttgctattttacttaaagttattaacaaaaaaaatcattttcacacgatatccattgtatgtgatcacattcaactacatagtaacaactaaatattaatctttataatagctacccaagcaatggtatgtaacaatatgacagtggctggaagtgaacataactcatgacactcaattgtgtaggaacttgacaacaacacaacaacaattaaatttttatctgctccaaggaagggattagttttaaaagatgttattttggttgatactgacactttaaaaatagaatcaaccgcaaaacaacaagaaaaaaactaaaagcaaatactcgaagaagctgaatattgaagaatctataattatttgttcatcaattgttttatttttttatatcgttgttaaatagttgttaatagttaaaaaaacttatttttttttttgaatgagttaaaaaaacttattaacaactattgtcttttttctaaaaaaaaaaaaaaaataatactaaaaaaaaaaaa

SEQ ID NO: 140420 - DNA, 1199 bp, Cannabis sativa
tctggctgccacataagaatgtgtggccccagagtcaaacaatactgagtaaaaagagttgttgaccgagagctgacctgccaccactaaagggctggcttcttcatcagcctgagtaatggcgaacaccctagctagagtgggtccgccggagcctttggtgcttcggttctaagttgagggcactccctcttgtaatgtcctggcatgccacactaaaagcacgcttgacctctacactcccccagatggtgccttttgcaactggggcactctgggtaagtataacaggtctcacaactaccttgacgactgcctcgaccctggttcccctggaacccttgttctgacctgagccaccggttgtagtggatgccctccttttctgatccatggccaagccactacctcccctgctaaagcctaatgcaggaggggtgggagccccgacacccactagagtcctagcagactcagtcatacaaccaactgcgccctcagcccgtagtgctttttccagcatttcagcataggtggttttgtcgtcggtagtaatcatcaggtcatgtttaatcttcacattcaatccatccagatacttttcctttttactgaaatcgattggcacaattgccgaggtcaacctcgccaaccgatcaaactgcgttgtgtactcagtaacgctcatgttttctttctgggtcaggtgagtaaactcttttctcttggcacttctgacggcctcattgtagtacttggcattgaaaagttcttggaacttttcccaggtcatcgttgtgacatcgtgtatcatggacaccatgtcccaccatactaatgcgtcttcttgaaactgaaaagttgtacagaccactctatcattcccggtgacgcccatgaaattcaaaatcttagtaatcactgtttgccactgcttggctttcataacatctggacctcccagaaaaactggaggtgcctgcttgcggaacctttcatatagaggttccatctgattcaccgctatcactagttcggcctggacaacaaaggcaggtgccactggaatttctggaacaggcactgcaggagcaccttgctgtcttagtctcttaacttcactgtcttgttcctcaattctggcttgcatttctgcaaacctattttcccaattttgggcttcctgagtagcttgggca

SEQ ID NO: 140421 - DNA, 602 bp, Cannabis sativa
tttttttttttttttttaccttggttagtgcttgagaatccctaaccgattgtccctttgagagttggggggtggaatggtgcttttgagtgttggtgagtgaaaatttaaaaaagtgatgaagtgttttgaaaaaaactatttagcttatatttgtaaaggaaaaaggccttagtcgctgtgcattctaattgactgagggtttccaaaaatacccttagcacaattagcacatgctcttcatttaatatgttagtggcactcctctccttttgacacttgtcatttgtgttagtaaaatttgtttatgtgaaagaataaaaatttgttgtccttagagaaattaaatttcttttcccataattaaatttaaatttcacaaattttgagagaagtcgccaagaagacacagttaactcgtagcgacgaaagtctcaatcatgaactcataaagacaacaaaataatcgaaagacgatacactttttattttcaagataagaggggtacaataacaaaagtctttcttgaaagtttttgacaaacacttttggagggcaaatgttatacccatttttaaaaaattaaaaaagtcaaccttgt

SEQ ID NO: 140422 - DNA, 604 bp, Cannabis sativa
taataataataataatatttgcatacataaatgacacatacacttaaatgcgttaaccaattttacatttatattatgtttattatgtaaaaaacaaagtacgttcttaactaaaattttgagttcgtcactgattaaatagtaaactattttttataaaagaaatctattaagaataaaaaagattaattaaaattatatttttcttataatgtatgaatttgtatgtttacataaactaagatatcataactaagtatgaaactcgaggtgtcaataaaatatttaatttaattcaatttgtatgattcaattcaatccatccaattcacaaaatgcggatatttatatttatacgaatttgattaaaaaatcttaaatccgcacaaaatatgatagattaaatgtatattatatttttatttataaataaataaataatataatctaaaataaaattaattatttctttatatatataatttctttgaatttgatattttatctttaattttatttaatttgttgttaaaatgctagttatgtagaaaaaaaatctttaataaatattaaataaattaatattaaaagtaactaatataaa

SEQ ID NO: 140423 - DNA, 808 bp, Cannabis sativa
  modified_base (421)..(423): a, c, t, g, unknown or other
agcataaaacatattgtatatatgagaatgtatgtatgtgtgatatatatgcatgcttgatgtgattcatacactaccaatacttgtacggtagtggtacagagtgcattgctataacgtattatgtttaaagagtacgttacggtattaccagcacaagtacaaaaaagtacagggtgtgtgtggtacaacacttagtggtactcggggtgcgagataaaccctaccaacactcgtacaatgttggtacgtagtgtatgtagtacagtggctgtaccctagtaaagaacgttcttgctcatttgttaagccttgttaataggtgtatgggcacctagatacaagtttatattatattatttgttatatgcttttctttctgagtttgttgactcacagttctactttcatgtgtaggtannngaaaggcgaaggctgaacaagaatgagcttcgagctaggatgatgttgtacatgtcatggcgatgtgacttggagtgttcgatctctggacatctggggttttattttgtactcgatgtgcgatctgactaaatttattttgaatattttgtaaaagtttaaatacgggatcccaacttttgtaaataaacactacaaaaaacagctacttttagtgacaactttttagtcgcaacataaattttttgtgactaaatgtgacttctgatcacaacaaaaaactacttttcactaaaacatggtatttagacacaagttatcactaatttacttttagtcacaacaagtattgtgactaaaaccacatttagtcacaacaaattgt

SEQ ID NO: 140424 - DNA, 1287 bp, Cannabis sativa
  modified_base (738)..(744): a, c, t, g, unknown or other
tttaccatttatttatcaatttttaatgtcaaataattcaaacctaaacctagaaggattcctataaatagatagtgatggactcaaaactgatagttgatgaaacttaagccttcagtcagatttgagccttctctttttctctctaatttttgaatccttctcactttctctcttcaaaatttgaacccttatagtgatagagtacatgcccacgcatagcaagtcggtactcaatcatagtgtgtaaaactgtaaagaattcaatcaactgaaggaatgttgggctcaaatcttgattataatccgcgagagaaaggaacaagggttagagatctgagtggatggagtcatttaattctgcttcaaccaatgtaaagtttcttgaactttatatgtgtttaaactccattgttttagacattcatgtttaggatgttaaacaacgtacatggtagtaaatctagatcctggtaaaataatctccaacaactagcctcaaagtcatggtaatgatttattttcatgaaatatgaatttaaagcgatgtttgtgtcgatttggatgtgttcatgttggtttatgtgcatatttgatgattgtatggaaattggaattttacgatcacaaatatttttagttttgttctgaaaatattttttctagaaagtagatgaaaacataataaattcaggcttttacagaacttaattaagattttttatgaattagttatgnnnnnnngaatttggatgaaaatatctgaaagttggcactacacattcgcgcatggatgaggcccttcactcggccagtacgtgtcttcagacaagtgcctaaccaaggttactcgaacaaggccttgtctgaaggcctgctcacgttgagctccctcaaccaacagaggcttcgtgcagccttctcactcgcacgtcccctctcatgcgcgcgcacagaggtaaccggtctcgagatacttttggaaggctaaccctcagccaaatttcgattacttgggcgaagccaaagacatgtatctcgaatactgcgcttccgaagtggcttatggtgaaccccaggcgagtgcttctacctctggccagaatgttgatgttccttccgctcagacaacagatcatccacctcctaccggcccagaaaacccgaaccaagagccagggactccgactgtttaaatacttctctttttatctttctttcttatatatatcttattcagccataaggcctttttctaagacatcatgaccggccaagcggtcttta

SEQ ID NO: 140425 - DNA, 1737 bp, Cannabis sativa
  modified_base (1694)..(1695): a, c, t, g, unknown or other
ataataaactatatgattattgttattacttttcttgctgagtcattgtaactcacgggtgctatgtggtgcaggtaaaggcaaagaaaatttagatcaaccatgatgtgacaactccagtaatgtacatattgacccccaccagcctgtgttccgagttactaggagttgttttgggctatatctgctgtgtattctgattatgtcttttgaattatttttcgtttatagtcttttgtaaactttttacaatagggatccccgaaacacagttttagtgccgttatgatgtccgtttttagtgttttattatagtgaagttttaatattatcacagattttagtaattaattaacttattattactaaagtagtttataaaatcacacacgtggcgttcctatgggatagggcattatagcgatcaagaataaattattaattacctcttacttaagaaattgaaatatgcgcctattcaactatcaggctactaacatgcttcctatcatgcttttcttattacatactaatcaaacaagctactaaagcaataaagacttactaaaccgtgagttgagcttgttttttatgatgattatacatatcgtgacgattttcggaggacaacttggcggctctgatactaaattataaaaccccataagtttaggcgagctatcgtgattttatactaactgtgcactctgttgctaatcaacgggttgattgaaaaacatgactaattaaaactttacttaattaacatttaaatgaaaataaataacttttgcataattgggatcacgtatttaaaatatttacaattgtattataatatattagttacaaaagttgctgcctagtgactattaaaaatacaacctgctgtcccaaagatcgtacgcttcaagtctaactgtcccgacatgtacaatcatttgctcacactcactgttgctcagccttagctttgcccttacctacacatgtaaagactcagtaagaaaaatataatcataacataaacataaaccagattacaactaggtgcccatacacccaatcataaccctatcatgcgtcccacgcgtattgagtctagaatgtttgtacaacggtactattgaccataatatcagtctatactcagtactctagtcgtactaatgtgatagcatcaatcagtacttaagccaaacatacaatcatcagtatccaatataactccatgtatactgataccactatctcagtatgttatctatcaggcattgataaatagcacactaagaacgtaataacatatgcatattattatactaatcttacctcaatctcaaatttaggtgtgccgatcaatctgagtggaactactgctcgacggtttataggcccttaagtcacaatatatgcaaaattaataagtgatacgctaaattactttttggggacttaaaatcataactaaaagttttcctatcgatggataacatggaaataccataagtatcactaaaatatgaaaaactaggttttcacaactgctagaactggtaaaccgaatttccaaatcgaaaaatcagttcttagggttctgccaggggaaccgattgactggttctacaaggcatgtaaagcccgcttagttaatttggaaattagcagctgtttatgtttaattatgaaattanntatagctatttaaataatttatttctgttatttatggaattc

SEQ ID NO: 140426 - DNA, 547 bp, Cannabis sativa
catggagaatcctcgtttgtacataattccctctactatgatgtaccatgcagccttccttctcatctttcgagcttcatttctattatctgggacttcctcagtgttgaggtaggttgcaattggcgtcatctagtttggggatgtatcaatcatttcaatctcctcatgttttcttcccttggaattttgctcagatacgctatcatcttttccccctgagccttgtattctccagatacatgatttaccaccaactatgaatcactgcagatctcgatatgtttgaccttcatctcttgggctagttttagaccggtgatcaaagattcatattcggcctcattattagatgctttaaatccaaatttgactacagcgtgcaggtcttttcccccaggtgtgaaaagggcaattcctgcaccggatagttgatctgtagccgacccgtccacatgtagtttccaagtcggcttgtcttcactgttactcggctgaggtgtttgtatcagctcggggttgctttctagtatgctttcttcttttc

SEQ ID NO: 140427 - DNA, 741 bp, Cannabis sativa
tattattattattattatttatcttttctcaacaatcatcttcacttttactcatttcatgttcttatcaactaattaattaatacagtatatatcatgtgggaatatatctcttatagaattttacatgaaaatcaacatactgcatccaaaatcaccattaatttaaagtatggtgctaacaaaaattttattgcaatattctcatacattaatataattaatttttgttacttttttatcaatttattcttaattttattttctatataaactaataaaagatacacatattatattctcataaattaatataattatttttttatcaatttattcttaactttattttttacataaacctaataaaagagagacatattttccattattgttacatactttttagtttcaattttatattattttattatgtatagatatttaatgtgattttttaatttttggttagttatattttttaataaaaaagtgttttaaatttttaatagttagttagctatatgttctaataaaaaatattaatattaatattataaatcttaatttaatcatgcctttaatcattagttatatttcataatttgagaagtttagtctgttgtatatgcattgccaatattttattacagttataatatattctttaaatgaacttgagaattgagtttttacttcagatttttagaatccgtgagcagttattattattattattat

SEQ ID NO: 140428 - DNA, 551 bp, Cannabis sativa
cacaaatcaacaaaatggattgctcggtaaacctatcccaaaaccggttaaccgattttacaaggcctgacaaactggttaaccagttagcactaggtttccccaagcaatccaaaacctgatcaaaacgtgcccaaacctcaccaaaacttctagaacacctatattgacctcaaataatataagtcaagcaatagtgtccagaaaaacattcaaaaaccaaatatgccattgttgagccaagtttgagttcttagaactcaaacttgctcaaccaaagaattaaactccaaaaccagataattaagacctaaagcaactccaactatcacaagaaaataatcaagcactaaccctaatacaaacagtagcaaaatcacaatttcaacatacttaaactaactaataacctaaaaactccaaaagaaaagctagagctctttaccttaggatttctctacttgaatccagccgaaaactttaaaattacaccaagaaaacttcagcaagctgctggttcaagggaggctcgaagagagagagagagagag

SEQ ID NO: 140429 - DNA, 926 bp, Cannabis sativa
ggcataaaacccaacagttccaagtagtgcagaacttagaaacaaaattctcaaagaagctcacaccactccataatcattgcatccgggcactaccaagatgtaccaagaccttaaaccctacttttggtggaatggaatgaagaagaatgtagtagaatttgtatctcggtgcctaacttatcaacagatcaaggttgaacatcagagatcggtaggtttgttgcaacctttgacacttcttgagtggaagtgggaggatatcaccatggactttttggttagattacctagaaccatgagtttgtacgattcaatttggattatggtagatcgattcacaaagtctgcacattttctaccggtaaaaataacctttacaatggatcaatatccagaattatatgtcaaggagatagtgagattacatggtgttccaaagtctatagtcttggatagagatctgaagtttacttctaagttctggcagattcttcagcgggctatgggtaccaaactgaaattcaatacagctttccatcctcaaactgaggaacattccgaaagggcaattcagatactgaaagatatgttacgagcctgtgtaatggatttcgagggctcttggaataaatatctaccactgatagagttctcgtataataacagttatcacagtacaataaggatggctccctatgaattgttatatggaagaaagtgtagatctccaattcactgggacaaaacgggagagaagaaatatctgggtcaagaatcagtgcaacggactaatgaagcaatagaaaagattaaagctagaaagcttgcctctcagagtaggcaaaagagttatgtagatctgaagcgcaaaaatgtggagtttcaggtaggaaatcacgtgttcctatgggtgtctccaatga

SEQ ID NO: 140430 - DNA, 1217 bp, Cannabis sativa
ggtaatcctagtcacacaatctgggattttcacaaatagggttaacccctgatttcatattcataaaatatattcatggcattcaaaattagataatcacatataaagaactcccaaatcggagttcggaatcaaaagttatggattttcaaagttggaactccaaactgcccagaaaatcgagggcgggccgcggcgtgcccagccatgccgcggcacctggggcaaatcccaggtttcaccaacaaggagcggaccgcggcatgctcagaccatgccgcggcacctgggttgaaaacccagaaaccagccatcttcaaacacgaattcagcaaccaaaacacacccaaatcacctcaatatcatacccaatctctcaatttaccaactacaactgttagcaaataatatagggtctaaaacacatatttatgtatcaaaatccaacataaagtccccaattcagattgcatataaatcacatgaaccccaattccaagttcttgagctagaatttacaagctagctccaaacatcaattttcaacaaacacatagtattacagccaagaattcacaagaaaaataccctagaattcatgtaaggttcatccaaacacaaacccatacaataatccacaagatttgaatataatcatgctcatactcacataagaacacatacatgcaacatcacaacatcacaacccttttcatgctcttctaacagcaaaattcagcaaactataactagaattaaagctgtaaaaactaccttaaactcaacccaaaagcaagctcaaaattcctcaattgcaaagcttcaattccacaccaacttcaagcaattctccaaacaaattttgagaaatcaaagaggccaagttagagaaagagagaggggtcgggtgagaggggaagcaaaaccagaattttcattttcatttcttaaaaatttaacttttattaaagtatatcaaataaggtcaaaagaccaaaatgcccctaaggccataaaatatgaataaacactctcaagggcaattaagtcattcatactcataaatttccaaataaaattcagatttcacattatcaaattaaatgtcaaataattcatttcaattgcatttcgggtccgaacccggttctgcccgaaatacctagttgtgactataccgcgccaacctgtcagaacacacctgaaaaaataacaca

SEQ ID NO: 140431 - DNA, 595 bp, Cannabis sativa
ggctagctcaagtggccataagtgggtgtgtgagtgttggaggtcttgggttcgagtcccagataaaatatgttgtaatatataaacgcttaaataaaaaaaaaaattcaataaccagaaagtaaattaaaactttccttattatactttatctcacatatatatatatatataattgtactagaacaataaaacaaagggcaaaagcattgatgtcaaattacaatatttatggcttgctagctctaataattagatgatgattttagaggggtaggataatgtaatagaaccgcgtgtaagatatttgtatatgaatgcgcagtaaaataaaatgtaggattattacataaacaggaaaaaaaattgtgtactatctttgatttactataaatttagatatgcaaaataaaatgttgggtaattaaaatggatggtccaactttcaagttttataccaactcttttggataattattgaaagaccaaaaaaaggtagggaggttttggacgctagaaagtaccgggcgattctcgtccaaatctgcgtatctgtctcaggctcaggaaagagctcctcactgtgaggtagctc

SEQ ID NO: 140432 - DNA, 512 bp, Cannabis sativa
atgtgttattttcttttaaataaattggaaaatcttataagtattaaaaatagttagaatggtatctattttttaagggtttatcaaaagggtttggggtcatttaggtgtggttcaagtcagcaagttgtccatgggattgataatggtgcggttcaacgatgaggctacccgtgatcaagtggtggaggcaggagttgtgcagtttgatcgaaaacttgtgatcgttcgcccctggtctgcagacctaaatgccgtgaacttggttcgtactgttccattgtggattaggcttcatgatttagggttgcagtactggggtatcaaaagcttaagagctcttattagcacaatagggaagccaattatggtggatcaacacactaataactaaacacggttacagtatgctagagtcttagttgaaatggaaatcatggatgaaccacctcgtgttattccctatttcaatgaatttgggcagctctaagaccagaaagttgaatatgaat

SEQ ID NO: 140433 - DNA, 897 bp, Cannabis sativa
  modified_base (112)..(116): a, c, t, g, unknown or other
ttaaaagactataccttggcttgagatcactaacaactagctgaaaattacttgaattactgggaaaaattccaaccctagcagccttaggaattgagagagagagagagannnnnagagagagagagagagagagctgctcagaagaaggttgagtggggtgagactttgagtgaggaccctatttgttggaacttattttaccaggatctatatttactaacatgtatgtttgattaacaccctaaatatgaattctctaatacaatgaaattaaacacataaaaagtttagaaaatcttacattgatggcagcagaataatatcactcctttcgcttagatctctaacccttgttcctttctgtcgcagagtaataacaagatctgaacctggatctccttctctacttcgggtttggttaaccaccatctttcgcattatgattgagtacttaacttgctatgtgtgggcatgctactctatcactaaaggcttgaattggtgaagaacatcaagagggtttgaaatcactatagaaaggagtctctcatctactagttgtctgatagagttagaatactagatttaggttggttgagattggttggaagagaatcagagcatcatgttcccttaatagtatttcaactagggtttaggatttaattatatggattaaaaaaataataatcggaaaaaatatactttagtggtcggccacttaatgggcctcactagttataattttgccactttatttcaaccttatatcctttctttcaataataccatattttccaagttcaatccataaatgtcaaaactatttatttaatacttataattaattatcaaataaaattgtcatttattttatttattaattagacttaa

SEQ ID NO: 140434 - DNA, 771 bp, Cannabis sativa
  modified_base (704)..(704): a, c, t, g, unknown or other
tcttaggtccttgtctggataaggttcccagtcccagtgcaggtcccggtccatgtttggtactggtccttgtctcgggtcttggcctggtctcgcccttggtcatggttccattctcaggtcctaggtccgagtatcgggtccaaggtcccactcccggtcccggttccaatatgggttgtgttcttagtctaggttcaactctcggttgtagtccgggtttgggtcccagtgctaatctcagtccgagtcctagtctttggttcgagtctgagttttggtatgagtgtggttctaggtccaggtcccgagtcacgggtcctgggttccaggttctgggttgtaggtcctggtgcaagtttgcgtctgggttcaggttttggtccgggtatcgatcccggtctaggtccgggactgtgatctgttccacgtctagatccagttttttgtcaaggtcaattcctgttccatagtccttattccgattctcttccgattttgggtctcgggtctaagttttggtttggatgctttgtctagaaattttctagatatgggtcttggtatgattcgaagatctagacgccgaatacgggttgggtccaagcctcgggtcatgggtctagatccagatcccaatctttagtcccgatcacgttcaacttcagatcttgggtctcggtccgtgtccgtgtccgggtccnggtctaagaccaagacttgtgtcgggtcttgggtcccaacccaagtctaaagtcccgattctagttt

SEQ ID NO: 140435 - DNA, 539 bp, Cannabis sativa
  modified_base (28)..(44): a, c, t, g, unknown or other
  modified_base (71)..(87): a, c, t, g, unknown or other
  modified_base (187)..(192): a, c, t, g, unknown or other
  modified_base (394)..(396): a, c, t, g, unknown or other
atcaaattagccatccatcgcattttcnnnnnnnnnnnnnnnnnaattagccatccatcgcattttccgtnnnnnnnnnnnnnnnnntacaaaaataacatatttcacatacaagtcaaataatacccatggagtttaaaaaaaatctccggaatggagaaattataactctaatattcatttctannnnnnggggtccacaaataaattaattcataaataattagaaaattaacagaaattagtgctaattgcctttactaatctaaattattatatcggtcattgcaattattcccccgttaaaaggatttcgtcctcgaaatctaacctgaatggctctggatgctgagtcctcatatcagactctaattcccaggtggcttcttccacnnnactgttcctccagagcaccttaatggtcttgtttgaaagaatcttttcttttctatctaggatctgtacaggttgctcttcataggataagtctgattgcagtccaagggcttcataactcaagatatgagtcgggtctgaca

SEQ ID NO: 140436 - DNA, 1053 bp, Cannabis sativa
ctaagcggtctttacaactattccccccttcaatgacattgatcaaaattgattttctctgcaacatctgcgttaatgcagattttcgttaaccaaatttgagcctaaccgtgacaatctcacacagaaaaaataaaagctataaaataaaaagtatgaacatacaagggttttacgtgattttgcagttaaaattctgcatagtccacgagtcaatcttattcatatttcttattgttttctcagggcctcttttgtatgagttttttcatcaattttttgatattgcttgccactatttataattacatagtgggcagtaaattacaaagttgactgtaatccgtttacaacaatcatcccctaaaatcatggggtttgattacacatcacgtagtgtaaatgcagttatgatttgaaaatcatatagctgtgatttttccacttttgtcgggtcaaaatgattgtatatttatacacgtatttaattattgtatctggggatgcctcgacagaagcttggtagcagtgatcataatagcgagctggggccatttttccttctgaggttgatgatgcttgtcttgtgatgattgcagttcttacatacaaagagttcttcgaggctcgtttgaatgttagcttctgactcgtcaagattgtaggcctcactgagaagatatctgaagttttcaagaagcctcccgatagcgagataggcaccttgcttactaggtcttgagccaacccgactgttatacttagtttgtacattatacatcaagggctttctcagttgacatgtgtcgctttcgtcttcctagatgtaatataatatctaatataatttttttttgaaagaaaatatctaatataaatatatattttatctaaaataaaaattataaaaataggacacataatatatttttggaaaaattctataatgtaccctcttagaaagaatataccgatacatctttatctgttttagtatctggaataatcttttagtcaaattttttctcatggtcatataaattatagttattt

SEQ ID NO: 140437 - DNA, 514 bp, Cannabis sativa
  modified_base (30)..(32): a, c, t, g, unknown or other
  modified_base (365)..(368): a, c, t, g, unknown or other
aaatcacctaatcaaaccaaagtaaaagcnnnaaaaacacaagtctatggattctagggttaccttagcttgaatcccacttgaatttcctgctgaaaacaccaaagatcatcaatccccttgtttttggctggttcgaagagagaaggaaggaaagagagagcttctcttgattttagcttattcctcttattttcttttaatttctctaaatgaaaagaatttattctctaacataatcttgctaaattaacttgctaggtgtcacccaataaggcagccaccaaatcattctttaggccaattactaaaatgccctctaacttaaactagggtattttcaaaactaggggtaaaatggtcannnnccataaccccgctcaaccccaatattttattttctccaatatttttcccaataagaaatatggttgtaaacttacccatgtgatcaaactaaccatccatcgtatttttcgttgtcgctgagcaaatattacaaaaataacatatt

SEQ ID NO: 140438 - DNA, 1112 bp, Cannabis sativa
tttttgtcagttggaagttgtctgccgagtagatagttgattataagaataatccatgtgggtgagctatttatcatctcgatgtcttcctcttcccatatacttgtctgatttagcatttccactggaactaagtttagttcatccaagtcgttctacgaggctaattttgcaaaggcatcaacattagagttttgttctcttgggatttgctcaattttaaaataatcaaacctttccaagttcttccgaactctctctatatacttagccatttttaggcccttagcctggtattccctgagaacctgatttacgatcaattacgaatcactatgacatatgagattcttgaccttcaatgcttctactatcttcaaaccagcgatcaagggttcatattcattctagttgtttgatgcatcgaattgaaatctcagagcataatgaaacttaaagccttttggcaaaattaatattacccctacacccgagccctgctcgttggatacaccaaccgcgaataacctccaagtgtccgcgtctcgctgtacaagaggattttcctctggagttattccttctattaggaaatctgccaaagcttggcccgtggtggatgtttgagggtgataagttatgtcaaactgccccattcaatcgaccattttatcagacttccagatgcatctggttttgataaaacttgcctcaagggttgatcagttaacactttaattgggtgtgcctggaagtaaggccagaacttgtgagatgcgtggattaggcataagacaagtttttcaagagggggataccttgattctgcccccaataaccttttactgacataataaatatgttgttggtgctttccctcttgttacactattgttgtactaatcacgtcttccgagacagctagatagaggagtaatgcctcttcagttactggtttcgccaaaaccggaggtgttgccaaatgcctttcaatgctctaaaaggcttcctcgcattcctctgtccattcaaatttcttgttgcctcgcaatatattgaaaaatggtaggcacttatcagcatgaatttgttaagtgtagccatccttcctg

SEQ ID NO: 140439 - DNA, 824 bp, Cannabis sativa
  modified_base (140)..(140): a, c, t, g, unknown or other
gctctcatggtaagctctcccttttcaacatctatcaaagttcttcccttagcaagaaatggcctccctaaaatgattagaacttccctatcttcctaatgtcaagaataatgaaatcggccggaaaaatgaacttatcnacttgtaccaacacatcttcaattttcccctctgaatgagccatagaacgatccgctaactgcaaagtgacggtggttggccttgcttctccaattcccaacttcctaaaaatagacatagggatgagattaatactacctcacaagtcacaaagacctcttccaacatctcgacccccaatagaaattggaattgtaaagctgcctggatctttcaatttgggtggaattttacttttcaacatagcactacagccctctgttaaagcgacagtttcaaactcaccaagcctccttttctttgtcaaaatgtcctttaaaaatttcacataggttggcatttgctccaaagcttccactaatggtatattgatgtggagttgctttagaacatcaagaaatctccagaattgaccattgtcttgctgcttcttgaatcgttcaggaaatggtggacgtggtttttgcaaagactcttctgcagcagaatgctgacctgatgctgtaacatctgggggaatttcagcaactgaaattgctagttttttctttatttccccctctttttggattgaagacggctccgtactacctgttgcagccacatttgactcaacattttttccacttctcaaggttacggctttgcaatgttctttgccatctcttcgtgggtttttggtg

SEQ ID NO: 140440 - DNA, 1255 bp, Cannabis sativa
  modified_base (438)..(439): a, c, t, g, unknown or other
ttctctaattttcttacagctctctaactttataatattttattagttgctgaaaacctcggtcaacatctctctctctctaactttttttctcacactattttttttttatctttatatatataaatatatattaataagtgtacattttatatttatttttttaacaccttttcactctttcaataaattttatttattattttttaaaaaaaatacaaacacttattctatttatttttctttcttttatatttttttactattcatggtcaaactatttttctttaattaatcacattttatatataaaaaatcttaattaattttttagggcttttttcaattttaacaaaaaaaaaagtaataatgttataaaaatacttccaactggccaaataaataaatatacaccccaaataaaaaaaattacacaannaccacttacacacaccttcaacgcatgatccatccatcctgggcaaccatcgcgcaaccacgcagcaacctaacgcaactaaaacgaaaattcaaccataaagagaatcaccattaattttggtgacttcacctgagaagacgacctgaataaatcaaaacagaagttgtttcgaattcatgaaaaaaagtgtagaaaaactactacgaaactaaaattcaactagaaatccagtttaatttgcataaaactaatgtcatcacttcaatttttcaaatccatgaattgcagatctcaaaaagttgaactggagttcccaaacaattcaactcaagtataatctaaaaaaatcacatcaatactgtagtaaaatattcctggtgtattttcgttgttttccaatttctaatggtgaatttgtttatattaatccatgaagagacaagtagatagagttatgtacgtgaaaacactgttctaatttttgatatttcataacagttgcataaacattttgctaatagttatttcgtctgatgcaaccttcgaccaacaatgcaataactttcatctgattgaaacctcctctgatgcaaccttcggctaaccatccagcaaccttcggtcaactacccaacaatcatcgtctgattgtgtaagtgatagtgtaagaggtattttggtaattaaaagcacataaaaggtataaatgttgtacacacctaatagaggtatttttataaagggttgagatgcaaaatggccctcaatttggtaactaagttagtaaatgtccactttttaaaaaaattaaga

SEQ ID NO: 140441 - DNA, 634 bp, Cannabis sativa
  modified_base (311)..(315): a, c, t, g, unknown or other
gtgctctactgtgcaggaaagggtaaatctatttctgatcagccatgagtgcaggagctgggcgatgtatgtacatgttcgagccacactagatcaagtaggttgtggtctactactgtttaaattttggtaactctgttttgctgcttaggtcggctaaggggaaaatacctgtaatattttgtgaattattttgttttgggatcccaaagcatttaaattttagttgtaaagttaaaattgttacaatttcatttttattttgttttgtttaaagctttatttcccacgctaattttattagtaatccnnnnnaggggattagggtttcttaattatttttggtagcgtgcctaattgttagggcgttgcacggttggtcttctttctttgggaagttggacctccaaggtgttgtatttggattgtgcggactcagtcttggttatgaactcaaactacccttcttgaactgcctttcaattttgattgccatatgcaccaaatcttgaagttccacataatggtgtagttcaactgtattagcaatctcccgatctagcccattcaaaaaccctaccattgttgcctctcgaacctctttcacattggctctaatcatagccatctccat

SEQ ID NO: 140442 - DNA, 633 bp, Cannabis sativa
  modified_base (304)..(306): a, c, t, g, unknown or other
  modified_base (417)..(420): a, c, t, g, unknown or other
  modified_base (573)..(574): a, c, t, g, unknown or other
ggggaccatggacctatattactgagcttccaataagtcgaaccgaatttactgagtaaattccctaacttattaaaacctccctacaccactatagatttggagttgcactctcaattatatagaacgctttatatgttccacgatatagatacgctatgaaaatttaaccatcattctaatcccaataatcaaaaatcctccatagatgattaataccgagtagggacaaatttaccgttttacccctcaatgtatattatccttgaaacatttagcttcctataaatgatatttcaataannnaatataattactgaaataagaactcttccatttatctctattaagccaagctcgaaagaaatcatcatttcacttctatgtccagccagaagctatagattccatatctannnntagcgctcccactcaattatacaatcatattcccaaattgtacgttcgacctgaaccaaatggtaggctttaactaacaactcaaagaacacaaatagaacttttgagatcaaacataaccatgttaaaattaagatcttttgatctaagatnnaccagtgatattgacttagaaagacacaacggtaagattataatatctttaccaagatc

SEQ ID NO: 140443 - DNA, 625 bp, Cannabis sativa
ctgtgtgtctacggtgtcttatcatgttacttatggaggaaaaaagttgggaccaattgtacctggttgtggaatacgtcaaggggatcctatatctccatacttattcttgatctgtgctgaaggtctttcttctctcctatccttgtatgagcaacgtagatggttgactgggtgtaaagtggctaggagcgcgcctcgtgtttcacacatgctatttgctgatgatagctacgtgtattgcaaagctaatgagggtgaagctacacatgtgatacatcttctccatgtttatgaacaagcatcgggccaacaggtaaattactccaagtcctcagtttttttcagtaagaactgttctgtggatactcgggttagactgtgtgattatatggggatggtggaggcgggagataatagtttttaccttggtttaccttgtattttggggcgcaataagaaagctattctcgggtttcttcaagagaagatgaaaaagaagatttttacttgggaaagccgatttttgtcaagagcggggaaggaggttttattgaagtctgttgctcaagcgttgccttgctatgccatgagtgtatttttattaacaaaggagatttgctct

SEQ ID NO: 140444 - DNA, 1102 bp, Cannabis sativa
  modified_base (1045)..(1051): a, c, t, g, unknown or other
ccatatatttgttccatcttattgtatgatcttttccatatcaaataatcatatatctataattcttgatgcatatgaaatacttcaggacttccctactaatgaacaactacatacatttaatattgctcaatatacagaaagaaataaaagtttgttcttcaatcatttataatataatcaaaaattcttcaatagtctatcacaacatataatttacgaatttatattacatagacaatcatacgtaatttttaaataataatttacttacatgtctttatttcatacaaagatctttattatatagtgtgcacgactttaaatttatatcacttaagacatgtattaaattcttctaaaatttttagataagacttatttcaaattctcactatattatgagctccaaataaataatatttgttgcaatatttatgtgacatttataaatcctcataaaatatattccaggctataatcaaatcatctttatattttcttaatatttaagccttatttcaatcagtctcatgtctatgcaaactttgtacaacaatttattttgtgtacaaatacgtatatgaaaatttctcattagaaatatttatttgcacaccctacatgtcttacttcactttatgtgagtaaacttgcctggactgcgtcataatattttggccaaaaatgtcgatgattctcgacaaatctaatactatgatccttgctatctcatgttaatttattgcatatgcaaacattcaacatctattctcgacaaaaattttattatatgataatttcctctcatattgatataacttatagatttctctttaaattatataattttcaaatatatttattatttataggtacccatatagaaccactttaagggttcaattatgatcaaatgtgttatgtctaacttctctatggagtcttttctagagtatcgttttcatcacggttattatttttaaattatcaataatttataatattaaggtatctccgtgagtacctctagatttaacaactnnnnnnnaaaccaaatgaacatttattaataatatctacattgttcatttgcgcttca

SEQ ID NO: 140445 - DNA, 730 bp, Cannabis sativa
atcttaaattttatctacaatcgaaaattaaaaaggtatttatacaataaattattcatttattttaatatgaagtacttgattatatgcttatttaaatatatgttaatgtattaatttatgttttactatgaattactgtgcttataattaaattttataaagaaaacaaatctaaaaaagacataaaataatccttagaaaacaatcaattgcgagtcactataacacatatgatttttgactttcaatgcttgaaccattcttagatcaaccaacaaagtctcgtactcagcctcattgttagaagtgtcaaattggaatcttaatgcgtagtgaaacttaaagttgtttggggagatcattatcactcctgcacccgatctattttcatttgatgctccatccacatataatttctaagtttttgtatcgtgattgacgagtggatcttcttcggagactatctcttcaattaagatattggccaaagcttgacctttgattgatattctcgggtgataagttatgtcaaactaccccagctcgattgaccattctatcaatcttcctgaagcatcaggttttgataaaacttgtcttaatggttgatccgtcaagacttttaaaagatgttcttggaaataaggtcgtagttttcaagatgcatgaatcaggcacaaggaaagtttttcaagagggggatatctagattctgccccccagtaac

SEQ ID NO: 140446 - DNA, 759 bp, Cannabis sativa
agggtccaaaatggtatttatccatttataaatataacaatacaaacaaaatacaaaatattttgattttttttctttctcattttacacttatactatatcaataaagttatagatagatactagcttatattccaacatttttttcccatcatatttaaatattattatatagtatattttagaggtattatttagtataattcaaaattagtgattgaaatcaaatggacattaaaaacaagtaagaatgaatttgtaattttaatatttgaaaaatattattataacaagaatagccaaaaaaatataccacatagatttactaatattatatatttaaatatttgaagaaggtatattgtattaaataaatcattttacatatcaaatccttttacaaaagaattccaaaatataaataaataataataatacatgaagtacaatttttttaaaataatcaattaaaatcgtaaaaataattgtaataatatgtgcatacgttaattaattaaagaattaattctttattttttttatttttatattagagtaattttttaaaaaaaaaaattgagagaataagagataaaattatgccaaaaaaagaagatcacactaaaaaattatatactaataaatgtaagtagagctatataaaaaaataatgccaaaaattaacatgatataataatataatttttcttttttaaaggaataatatagatttttaacttaagcaaaaaaaaaaaaaaa

SEQ ID NO: 140447 - DNA, 813 bp, Cannabis sativa
atgttatgtactccctggaacaccaccataatccttctttatttattgagcaagaataattacaatacaatcgatacgagattctctgttgagttctcacaaagtgttttcactgtcacactttacaccaagaatcttcttcatctacagaagattcttcttacaaaacccaaaccaatcttcttttctctgcacctctctccctacctctcaatcttttctctctccaactctcaatctccttagaagttttgaatctcatatattgttcaaatgacaacgttaaggtggtatttataggcttaggatcaagattctaaagtcggtggctgcaagaaatgaggttgttaagttagttagaaataactaacttaaccaactcctctttgagtgaagtctccatgttaatgaaggtaccagggcctctaagaacataaataagcttctagactcaagggcctcggatccttgctaaagacacttccagataggataaagcatgctgaagttaactatctttattaccattccaggagggataacaagccaactagaactcctttccagggaagagctagctatcctgagaactggacccggagaggacatgatagtcatccgtgaactcccttccagacctgactattattccacacaactccttgcaagatcgataattaacgagtggacaacttcctagaaatatcgtgtgtagagacctttttatttggaggaactatatacactacaagaaaagtatcttgtagctaccaagtattttgctacaaaattttagtagcaaattctaaataa

SEQ ID NO: 140448 - DNA, 1527 bp, Cannabis sativa
  modified_base (196)..(198): a, c, t, g, unknown or other
gcaacactatcatggactattagtaattttctagcatatgcaaatttattaggatggagcactaaaggaaaatatgcatgcccatcttgtcatcaagacacttattctttgtggttgaagcatagccaaaagtattgttatatgggtcatcgtcgttggttagaaaataagcactcatttagatatgatgaaaagnnnttcgacggtacaaaagagaaaagattggctccaataccattaagtggttcaatgatactagataacttagaagactactgttaatgagatttttgttaactagatttgagcctaaattgtgataaacttgcactaaaaatttaaacagtaaagaaaaaagtaagaacacgaaggttttttatgtggttttgcagttaaaattctgcattagtccacgagtcaatgttattagatttctgatacagttctagggccttctctcttatgaattttttgtctccttttttagtgtaacatgcctctatttataattacgtagtccgacagttaattacatagttgactgatatctttacaataattattccctaaaattgtggggtttgattacataccacgtaaaataaatgcagttattatttgaaaatcacacaacagtgtttggtccacttttactgggtcaatacatacgtgtattaaatacgttataaagtgtatcgttctgggacatctcgctaagagcatagcaacaataaccctggtagcgagctagagtttcccatatctttctaaggttgatattgtaaatctcgtcgtttatgttattgaaggcacaacgctccatctaacaatcgcagttcttgacgacgaggtgaacttcaacagctaacgtcatttgactgtcagcttctatccgagagaactgacccgtcgagatgatgaatctcattgaaagatgtctaaagttgattagtgaaagtattagaaatgtgccttcctatagcgagatggacgcctcgctattagttgttttgggtttgcccgactattatacttagtttgtatactgtgtattatacgcttagtgtcttaatagccattatatctcacctacatttcttcatgcgtaatgagattaatgcctcaccttacacatttaatggcatatgatttctcgataacgcatgagacaacagtttgtatatctttatctcgcgtaagacgttatagtcagcaagttgtaaatatactctgttacttctgcattaatgagttattccattttcaaatgtaattacgctacattcattgattcatattcttcctaatttgacacatttcctcctttgaaatgatagccgaaggtataacaattgccccttaaaaagttctttttaataaaaaaatgctttttaaatgatctcagagggcacatttgtcataatcccttcttcaagatcacgtatgttcttaattttgacggcttcatggtttcgagggtcattattagcattaatgacctgccctttccacttcttcactcccagc

SEQ ID NO: 140449 - DNA, 1022 bp, Cannabis sativa
  modified_base (861)..(869): a, c, t, g, unknown or other
ccttttatagtatttcaactagggcttaaggttgaattatatgaattaaaaaaaatattgggcaaaaataaatctaaggccaaccacataaaagggtttatttcaaccacttattcttcttttaataatactatatttttcaattcaatcttgttatacccaaatttggctacactttagagggtgacacatgtcaattagtggaatatgaaccacttgatataataacattatatcatttaatgcaaaaaggaataactcattaaatatagaattaatagagtatattcataactcgctaactgtatagtttaaagcaaggcaaggatataaactattaataactgtattgacgagacaccagctcacctagaatacacagatccaaagacaagatttgtttattttaaaggactaagtgaagttattcaaagcaacttcactacatatagcaagatgtccacctcgctacttataagaaatattgacgaggcgaatagtttgttaaacacttaacgtattttccacattacaataactaagtgtaacaacttggaaatatgcaggacacgattgtccagtctgcaaggccttatggtcaaagagcagttcttaagtttgttcagtacactggtgctcatgacattgctggagggcatatgattgtccaaatcagcatttgaccatctacgagttaagcgaggtgctattgtccaaatcaacatctatcatctttgaagataagaataataagcagttatgcggttaccaattgttatctacacgtctttaaatgaaatgtgatcaattcccacgtttcatgaaacagttatatatttttgaatttaaatgtaaataacnnnnnnnnnatattcctataaataggggtagatccaacaaaaaaagggacggaagatctttgagagagatacaaaaatactatcaattgtatattgtattaaatactcagaaatatcttgaataagattgactcgtgaagtatgcagatttaactacaaaac

SEQ ID NO: 140450 - DNA, 604 bp, Cannabis sativa
  modified_base (557)..(557): a, c, t, g, unknown or other
ggatcggatgaggaaaaaaaggttggattggatcggatgcccacccctagatccaatggatgttggattagatcggttctataattaaatgtatttagtgtatatcttttggtttaatttgagtttatctaatattttttagacttaatatttattggattggatgagacccattcaatattttattggagaatttttatacatatgaaaattaagggtatagtttactttttttatggcataaataaataatacaaaaaaaatataagattaaaaaataattcaagtttaaaatatgagaaaaaaaaaacaataaataaatttaataaaacttataataataagttccccgaaaaagtcaccaaaaaagttagtgctgccgagaaagtcaccagaaaagtcaccgtcgtcgaaaaagtcaccgcaaaaattaccatttccagaaaagtcacaggaaaagtcacatgaagtaaatatctcagatataactaaaaataggaccagttttataacataatgaatgaaaacaaataactcaaaccagttataattgaaanataaccggttctgtaacataatgaataaaagcaaataacacaaaata

SEQ ID NO: 140451 - DNA, 557 bp, Cannabis sativa
aagaatcgccgaaccaggaccatagaacaagactaggactgtggccaggacccggacccagaccaagaaccgaacactgacctagcctcaaagtcaaattgagactagaactcaggcccggacacggtcgtgtacccacaccgaaaatgagactcggacctggacttaaatctgaaacccgatcccaaacatagacttggacctagatagggatctagatacgaacccttacttggactaagatccagactgggatcgaaatgctggacctagatcgggaccgagatcataacccagacccaaacttgcaccaccactcgggacctgaaattggagctggacccgaacctagacccagatcgcggtccagacctggacacaaacccggacatagacacggacccgaacacaaacccacacctagaatcagacccaaagctagacccgaacccagacccaaactcgaaaccaaaccaggatcagaacgaagtacatagacccagaactaaatccagactcagatcgggaatggaacttgggactcggacccaacctag

SEQ ID NO: 140452 - DNA, 707 bp, Cannabis sativa
  modified_base (660)..(677): a, c, t, g, unknown or other
aattatgattggatatccgattctattgaatcggttggaattgaatcggtcggttgggattcgatcagatgactttctgcacactcctaatgcatattaatttgttatgagtttctggagaaaagaaaaaactaatttttggaacctaaaaagtaatgtgccgttgctttcacttaaattttcatgatataacatgaatgatgcaactcatgtatccattcaaactaagtaactctatcaatgagtgatgtgtttataaattgtttgtgcatcacatggatgatattatcatagaccattctaattggcaacatgtccatattataaggcattgataagattaattaaccttacaaatttattaccgatacttctgagcatcaatgtgccttgatcaagaacaagaccagatgtacacctagttttatttgtataataccaagttgccaattaagtaccaacatatccacatggactctttgtcatcataatgcatctaaatccaattattttctccagccaatatattgttccatacaataatactctcttattgaattcagcctcgtcacttatgtgattattttccaattgtaaaatataaaacactttacgccacaatgtatctgactcttatttttttattttttatatatatannnnnnnnnnnnnnnnnnataaagtgtgcctatataattgaaattctt

SEQ ID NO: 140453 - DNA, 505 bp, Cannabis sativa
  modified_base (447)..(456): a, c, t, g, unknown or other
tctctctttcggtttgcttggggccgctagggctggggtttttgctttgttattcttgctaattcaactagttggtagtgatcctaagctaaggtaaagttgtttaacttgttcttggtattttcttgagtttttaaggaaaaagatgatgatttgcatgcttaattttggagtgtggttgctgttgtgtttgtgtgttaatttcagaagtttaatcatgtttatttgagtagataagagctggttgtgatgcagcatgttacttgttgcttctttggttcaagattgaaattttttactcaaaactatgatttttaaagtgaaatgatgaaatctgttgctgtacttgttgtagatgtttgctgctgttttcagaggttataatattcttgattaagtattttaaatcaggttgtgatgcatgtaggtgagctttagccaagtttnnnnnnnnnnctcaaagcttggagctcacatggttatttttgattctgtgttttctggg

SEQ ID NO: 140454 - DNA, 553 bp, Cannabis sativa
gagattatccagtaagttgaaatctgcatccttctgtctagagcggaaaaagggaagacccatgtacttaatgttaccctcaggaaatccaatccccaaagcttccttgatccctcttttcaatccattgaaagtatttttgctgaagaaaatcgaggtttttaatttgctaactcgttgccccgactaagagcaaaatctctcaagacaatgccagtagtttctagcttccatcaagttagctttgccaacaagaattaagtcatccgcaaaaaagatatgagagataactggacctcccctactgagccttatacccttaatatcgcctttactcagagcatcctctaacaacctagataaaacttcagcagcctaaataaataggtaaggagacaaagaattccctgtcgaagaccgtaagagggtttaatcgactcaacctgccccccatgaagacagatattgtgggatgaggtagagatacattgagagacccaattgcagaacttttgaagagtactataacaagaaagcacatggttaatgaatg

SEQ ID NO: 140455 - DNA, 561 bp, Cannabis sativa
  modified_base (37)..(56): a, c, t, g, unknown or other
cgctcttccgatctcaacaaggaattaataagttagnnnnnnnnnnnnnnnnnnnngttcagcttattggaagctcagcaatatagatccatggtccccattcggttcagcttatccgatcttccttttcagaaacgatttcttgattaaaaaaaaaaactacatatatatttatataatttttttttatttgcttttcctagaaaaaaaattatttaatttcataacagctattgtttagtattttttttttattattttttgtactttattacttgttatagtgtgatagtttatattactttttattttttgtttattattttttttttgtttagttaaaatttatttttctttattttagctctcttagattttagcaactctaaaaaaatcataaaatacaaaaaacaaaaaaaagtataaaaatcataaaacacttagtattttttacaattatgtaataatacatatgagacaaaccgtgtttgctctatctaagaaagattagttttttaataaggtttgtgttagtgtaccctccaccttacctggaaactt

SEQ ID NO: 140456 - DNA, 671 bp, Cannabis sativa
tttttattagcgagccatcaggccgagccaatttatagactccgactccaactactgcttcgatgacatatggaccctcccagttcaggttgaacactccttctgattcatctcttgtatttgtaatgactcgtctcaacaccgagtctccaccattgaacaatcttttcttgacctttttgttgaagtatcttgtgactcagtgttggtatgcagtgttggtgattaacaactcagtttgttttttctcaagtaaatccaaggataattttaaaagttccttgttttcttcttgattataaaactctcttctgtgagtcgatatatttactttaacaggtagcattgctttcaagccaaatgctaacgagaaaggagtgtggggccagagaacctgaggtagctcgttaacccatctgcctttggcagcgtcaaactttttcttgatagtatcctttagggttttattaatggcttccacttgtccattttcctgaggcttggatactgatgagaagcttctaataattttattcctctcacagaattcaatgaatcaagtcgccatcaaattgtgttccattatcggatactatctttatgggaattccaaacctacagataatgttcttgaccacgaagtcaaggactttcttgtaggttatggatac

SEQ ID NO: 140457 - DNA, 1374 bp, Cannabis sativa
catagtgggtaggctctccacacttcctcttgcacatttcttacttgaaatttgaaatttgatgaaatttttagcacttctttttggtatttttttccatggctggaaatggcattgaatccttgggatttttgagtttttgataaaatgtgagtgtttgacaattggattttgtaacataggctatgggttatggtttttggctctagtctaatgtaatttggtgagaaaatgaataactttgaaacttttggttgggtgtgttcttgaatattgaagaacattatgaacatgcaaaatttcaaattccttccattttcccaacttcgattttcatgaaattggttaaaaggtgtttgtgggggtgtgatgaacttggatgatttgttggcttgaacacactttgtgtttagaagaggacatggagctccccccctttttgttgaccatcaaccgcaacatcctatgaagggtcgggggtgtacgccgagcttggacccttgggggttggggtggtacccctagcttggactcttgggggtcagggtggtgccccttgcttggacccttaggggtcggggtggtacccctagcttggacccttgagggtcaggttagtacccctagcttggacccttgagggtcaaggtggtacccctagcttagacccttgggggtcggggtggtaccccgagcttggacccttggggtcggggtggtacccctagcttggacccttgggggtcggggtggtacccctagcttggagccttgggggtctgggtggtgcccctagctttgaccattgagggtcggggtggtacccctagcttggacccatgagggtcgaggtggtacccctagcttggacccttgagggtcggggtggtacctcgaatttattttattttattttttggttaagcactatgaatgtcatagataaatggcttctttttactttggagctatgtgactctattactatatgctactatgtcttaacttgtctggcatgtaccgcactatgcgtaagcatttttttacagttaaccatgtaccacatataggttgctcaagacattaagcaatgcacaaacactttagaatttgaaaagaaaatttcaaaattttaaaatctatttaagtgagtgtgttttatgcttactagtccatgtatgagcatggttggcccccaaatgactatgtaggttcacctcttgatcacttgttaagtaatcaggactttcacatagcaactattattgtcatgagtttgccactataatttcatacactcttgaccttagttaggcttgcaatttgattcaataacaatcatacaagctacgtcgttatatgaaaaataacttg

SEQ ID NO: 140458 - DNA, 835 bp, Cannabis sativa
gtgaatggcctgctgggcggactacgctcaaaggtttcgacaaaagagaaaaagtactcaagtcggatgaccaccattcaaagtactatctcttatttttgcaattagttttatttgattttaagctaaaagatcagattagatcaaacagctctgatgtaagttactacggtaacaaataaattttcattcaataaatgaataaagatgtctatttcaaaattcaaattgagccgaaattattaacacgttgctaatttaccatccagtgcgtagaaaaggtttggtcgaacccaaaaccatgaacagataaaaagcatacttgtaagaaacaagtgaccaagagtcataagtctgctcggtcacttcgggggcacctatatctgtacaaatcatttggtaaagataaaacaaccacaattgcacgatgattataaacagaggatgaaatttattaaagataataaaagcacgtaataccaagattaaaagctgtctggtcagcctgttgtttgtaaaatgaaaagtaattccaagtttaaagacctcttggccggtcatgatgtcttaaaaaaggccttacggccaaataagatataaaaagataagtagttaaacagctggagtcccaggctctcggttcggatctttttgaccggtaggagctggaggatctgttgtttgaactggaggtacatcagcattctggtcagaggtagaagcaaccgccttagtttcaccataagccacttgggaagcgcaaaactcgagatacatgtctttggcttcacccaagtaatcaaagtttgcctgagggttagccttccaaaagtca

SEQ ID NO: 140459 - DNA, 667 bp, Cannabis sativa
ccttgtgggtagttttctgaatataaaaaatgagctaagggagccctccttttatagttgaaggaggcccacaaaaatagagaaaattacaaattatatatttttgaccatagatgatgatccaacagtaaaaattagcttctgatggtgataattatttttcggagcctagtgaaacccgctgcaggtaacccagagcttattttgttaactctctttgggtgaaatttagtgttgatagctttagaattgtgattgaagtgtgagacacaacttgatagatcattgaaatagttttgaagtgcaagttaatcgcgtcaatcagatcaatattgagtgaattatgacttttttactaaaggcaatacatggcctagcgcccaggttgacatccagcgcccaggttgacatataacgtcaacctgaatgtgggtaagtgtataaacgtccaaaggatgtgctttaagatgcctaagtgatattttgatatcacttagtctgtttctgtattttggcgaagttggtcactagttctcagagatgttgctattctgcataaatgagagacttgaaactcttcattttcgagtgagttttccatgttggaaatgagaaatgcaaagttatgaatttgacttctcttacttcatggatctttgttattgtg

SEQ ID NO: 140460 - DNA, 679 bp, Cannabis sativa
tcaggaacaatagtgggggctggaaactcagtgacaccctcaggagtattagtcatctcaaaatgatcaaaataaccactattacgtacctgatttgtgctggcagcagaggaggacataggtgatgcaggtggtgattgcggctgtgagttgttcccccgtgaacagcatcagctgaaggtcctggtgtgagtgattgagatggtggatttaggacagaggcagaccagtaagggacagtaactgagacaggagtttcagcatgatgagtgttcaaaaaaccaagtttaaatggaaactcatgttcattaaagactacatgcctagaaatgtagagacgaccagtgctactcaagcatttataccctttatggctatcactatagccaagattaacacatttggtggaatgaaattggaacttgtgcgattgatagggatgaagacaagggaagcatgctgaaccaaaaactttaagaatcctataatcgggttgcttggaaaagacaagttcaaaaggagttttgtttccaaggatgggagtaggctctatttatgagatatactgatgtttgaaaggcatcccaccagtatttttggggtacacttgcttgagcaaggagagtaaggcccatctcgacaatatgtcgatgtttacgttcggctctaccattttggg

SEQ ID NO: 140461 - DNA, 573 bp, Cannabis sativa
agaactatccccgatgatctcggccctatgtcacaacaacggcaaaccaataagtgtttatcctaaaacactgcttcactactacaataaaaggccttttatgccggtttttaaggctttttatcacagatttccctaaaataaaaaccgggatgtatgccagtgggataaaaggtatttaaaaaaccgggataaaagggatactttttatccctgttttttcattaaaaccgggataaaaagtacccattttatctcggtttttaaaaaaaagtgggataaaatggtactttttatcccactttttatgaaaaaattgggataaaatgtatccttttatcccactttttctataaaaattaggataaaaagtcttattttttaatacatgcatattcttcctatgttataatatattaagactgcctatataatatatatttcacatatatgtacagctttttattagaaagcaaataaaatttattgtactaacaaaattatttacaaatgataaataaaatattttttacatacattcataccattataactttatatatacaaacatta

SEQ ID NO: 140462 - DNA, 545 bp, Cannabis sativa
  modified_base (507)..(520): a, c, t, g, unknown or other
ttgaatgtgttttacaaaatttttccatgaaaataattttatttttgttctgaaaatattttatttagattgcttttgaaaaattaagcaatttttttacgcaatcgattccaataaaaattgaaaaagttatgaattttcgaagtttgttgagttggtgcatcgagtgcactaggcactcggacaagacgggttccatgtgcgtgacaggggacaaattccctatctgaagcacacgcacgcacgacttcgaacacgatgcaccctacatctgcccgtgtcttgatgctgcgcctaccgaggattcctgcatgtccaccctacaaatctctatgtccgcgcgcagaagggctgcttgcaggcttcttgggctgcacgtgcagccctcctgggcagacaaccaccaagtgcaattttcatggggttttttcccaattttgaattttcctgattttcaaaccctaaatttcaaaataaaatataatttttaatatatttaaacttaannnnnnnnnnnnnnttaataatatttaatttttaataga

SEQ ID NO: 140463 - DNA, 796 bp, Cannabis sativa
atccggaatcaaaagtaactttattgtctattttaaattttattaattaaaaaagaagtaactaataaaatttaatccgtcaactatttttataggatactaaaaagtatttgttatttcatatttaaaagttaccatatggtatgtattttatataaggttattttataaatttatttcaataagtttttaaataaacttataaagaaaccaaataatatcttaaatatcataagaaaaaaagtttacatattacaaaaatttatacatattttgctaatgagctatttgataattattaaagctcagtatattcaaaggtaatgtaaaagttgttataaaaataaaaaataaaaagttacatacatgtattttgattaacaatattatataattagaaaataaaataacataaatgtatcttgatcaataacattatataaattaaaaaaaaattatagcttcgaaacttgaaatttaactaactgaaataataataataatatatatatatgataatattatcttaaaaagaagcttattaaaacaaaactaactagtattttagtgatttttttaataatatttactaaattttaaatatatttctttggttaacaaaatataagataaactacaatgttgtttttcatttcaaatatcttatcgttaaaaattatttcttacacattaaaatagaccacattaaattatgatgatactattcttaattccaaataattatgatacaattataatttttttaaaaagtatgataaaattaaaaaaaaaaaaa

SEQ ID NO: 140464 - DNA, 554 bp, Cannabis sativa
aaattaatatatgaaaaccgttacgtttaaaaaataacctaaaagtcaagtattttatgtaatatgtaattattattatgaaaattaactcatcattaaatgtaaagttacaaaaaataaaataacaacattgcattattatttctctcttaagggatagttatataaatataggatagttatataaatatatatatatatatatatatgcatgagaagagatgatgatatgaaactatcgagggagaatacaaaaattggtgacgcttggttaattatttgcttttttttttcttggttggttttgctttgtgggctttacatatgttagcctcaatttattcttagactttgtatttagttagtatttttttatgcatttttttagagaatattttctaattcatttgttgtctctttttacaggtcattctcataaaaaaaatctaatgtaatgagcattgcaaaaggaaaaaaaacggagaatgctagcttttttgttgcttatcattcttcaccggttatttcaaactgtgagtacaacttatttttgt

SEQ ID NO: 140465 - DNA, 1197 bp, Cannabis sativa
  modified_base (344)..(359): a, c, t, g, unknown or other
aactttcaatcccaataatcaatataaacaacattaaatttcaagctctcaaaatctataaaaataaataaataaataaataaaaacagatctcataaacacaaactcaaacatctgaaccccagtaaaatactaaaactcaaatattaaaaacacacacaataaaattcgaacccaaaacttaacacacacgtcagaataaaaattaaatcataaatgaggatttatgttactattttttgaatttcgatatttattagcaatagatttaatattttaagtatttatgtcaaaaaaaatttaatagtaaacttaaaatttttaatataattttattaagtaannnnnnnnnnnnnnnntacataatttattttttatatataatttaaaatattttatatattcgccgcgaagtgcggatgtttactagttcatatagtgtgatagattttttagttgataatatttatataaaacaagatccattatttttttaaaataaaatagcatcacaccacagattataatatttaagtgcatatttatatatttagtctgaatactccatatatgttttttggttgacaattgaaataggaattaatgaatatgatgtaataagtttttggttgaagcagaagatcagaatgaatatgatgtacgttttagtattatcacacacaaactaattatagtttaaaatttaaaactctaatttgggaataataaatatgtatgtatacaaatatatgattatgtacgaattggttagagaaattaagaggctgtttggttttacagtttaaaaactgttttttgttttctaaaactgaaaacagtttttaaaaactattaggagtcgtttgacaaaaatttttaaaaactgttttttaaaaattgatttttaaaaaattagaaaacaaaaaacatcaaaatgctcttttcaatttttaaaaacaatttttttggtataacatattatattttatatttcgctcacatactcgaatcctagacccgaaaccatacccgaacctaaacccgaatggattattgtcatggtatggtgctaaaatattgatttgttttcgtaagaattaatctaaaaacaatttttaaaaatttgtgccaaacaccattaaatttttaaaatgacaaaaaattgttttctattcttacttttaaaaacacaatttt

SEQ ID NO: 140466 - DNA, 542 bp, Cannabis sativa
acttcttgatttgaattatccttcaggagaaagaagaagctagattcattcccggccggaccttagtgaagatccttactcttctgctgaagagctattctccccaataaagatccactctagaaacccatgagattcataagaataggaagagaacctaaatagaatagaggcagaacataggaaaacagttggtcacacaactattttggtaaaacagttgctgatgaaagtataatagcaatgattcctagaaagggttcctcgtgaaatccctgtcaactttattgggatcaatttaatgttgggattttttttatttgggaccccattaataaaaatttattaatatgtgttggatcatcatatacataaatccaaatgatgtaatttattttagagcataattgtcattagttactcattttttactatttgtcctcattttgcatcataacatttcatactcataaattcccatcattaagacaataaggcttgagaaaagaagtagcaataactatactattttgtaacactgc

SEQ ID NO: 140467 - DNA, 1002 bp, Cannabis sativa
tacagagaagatcaatcaaacaatcaccagtatacaattacacacaaaaattgagaatcactctaatgtagagagacaacaaacatgtcaagagacatgactttcaaaaacgacttgaaacttccaccttttaattgaacaaattgaataaaatttgaaacaatgagaaaataagataattagttttctcaaaaggtagagcgccacatcatttgctgaaacaacagaattatataaatatattaagaaacaatccgcgcttcgcaacggatattttataaatattaaattatttaatataaaataaattatatctattatttaatgataactaaataataaaattgtattaatttttttaaaaccaaaaattgtattaaattgtaactttactaaagtttaatatatttttttaataatatgtagatagtaaattttatatttaaaatattaatgtatatagttaaaataatattataataactaaaatgacatgataataaataaataaaaaaattgctacaaatatacatcatgttaaattttgtcttaaatttaacatattttgtagaatatgtcaaatatcatattttttaccatactattgaattattattgataacttaattaatattgtcgactctcaattttcttccaaacttaataatttattaaaagttgaatataaacgttatttttataagataaagggtctttggtgtgattttcgagtatgtcttttaagatgaataaatttgtaatcaattaatcaagaaagattttaaaaaagtaatgtattacgtactctatttaaatttgtgattaaaagaaattgattttattttattatatttaaaaaaatctccatgtaaacagttcactacacaataatattttagtttaaagtaatctttaaacgttattattcaagttttatattagtttagtttatgctctaacaatattaatgaaattgagatatgctatgtaaaatataattta

SEQ ID NO: 140468 - DNA, 516 bp, Cannabis sativa
ttttctctcttcaaagcatggcagccgaaccaccctcttctctttctttgcttttctttctgcaactcaacacagcccagccgaagctcttcttcttccttccttctctctttgctgaaaaacgcagcaacacaacaatggtaagaaaaatgttgctgcgttatttttcttcttcttcctttctcctttcttcaagctactgctgtagctttcatggcagccccttgttccctttcaaaacctgcaacacacatacaaaaacacaacccgaaacagtaacaacaaagatcaaaaatgatctttgttggttacaagagatataaaccgaaacaccacagaaaaataaatgaagaacacaacaaaatttgatttcggagttccccttgaaatcaagagtacatctccgtcaagcttccctcaaagacgcttgattcttcactatcaaagtccaaaccgattacaaggatgagagattcctagccacaaagttcagtaggtaatctctattctttctct

SEQ ID NO: 140469 - DNA, 783 bp, Cannabis sativa
  modified_base (600)..(603): a, c, t, g, unknown or other
atgaaggtgcatagatcattaattaatcagatatttatagggagaatctacataagatgtttttgaaacaaagatgattatttcggtgggatgtgtgtaggtacgagaaaatacaaccttattgctttattaatttcctttctttattccaataacactaacactttttcatttttttattctttgcactttgtttttttttaattacctttaagacattcatagagtatacatatagggtaatattatggtaggacttaacaaaagttccctaccggtagggaactttttttctaaccgttgattttagatcttgtggttattatgaagtaaggtgtatactcttactataggactgcttgtatacaattaaaactttatacatattataaaaatattttaataatatatttattttaaattaatattaataattaaaaaattattaatttttattttttaattattattattattattattttctaaaattaatttaaattaattttatatagatatttattttcaaaaattcttctgatatcagatcgcttgaatgattttatatgcccttcaattggaaccgtaccaacttgcttnnnntaaactcaatttttttggcagaaaaaataatatcaaaaccgaaattattaattattaatttttttttataagtggcgtctcaaaagagcagccaaataacaaaataaaaaccactggcaaaacagtcaataacaccagaatcacacacagcctaaaagaaaaacaaagaaaagactaggt

SEQ ID NO: 140470 - DNA, 1611 bp, Cannabis sativa
aactctgatttttccgcttaggtcagctagtaaaaagacttgtaatattttgtaaaatatttttgggatcccgaattatgtcacttttgattgtaaagtctaaagttattaaaaattttattttcattctattttaaataaaattttaaatttcccgcgcttatctttctagtaatctcgaattaaggggattagggttttttaatcagttggcatagcgtgcctaattgttagggcgttatagtttggtatcaaagcgccaaggtttttaaacttcctgtagaccagccgaacatgtacaatcatcgtcagagataagctcggctcgtggtgcagtaagtgttgagagtaaacgctttactgcttatatgattatttatttatcgctttccattttatacagtatgtgagcatctagagtatttatgtgatatataatgccatacttagaatgttatatgataaatatttatttaattggaatgaaataattgagttaggatttaaggcaattagtgcataagtgtggtattggtgcttaactcagggttgttgattacaggggtacttgtaaaaatggacccttcgcaatcatctagaccacagggcgagcaaatagagcctggtgcagaccagacaatccaccaggagcgcctgcgcctctacagaatctaagggataatgcgggggttggcaatgctaatccgcttgccgactggcagcaaatgtttcaagaaatgcgaggtatcatatttcatcaagaggaagaattgcgtcggttaaggaaatcggcaccggctgcccctgttgagcaagtgttaccaccagcttttgtgctagtggtgggtgactaggggttcatgtttccgcttagagattcagtgtttgagcggtttgtgaagctgcaacctccaacttttctgggaggtattgatataattaaagctgaacaatggatgagtacaatcactcgtatccttgataatatgggggtgacgggaacatagagagtaaaatgtactgcctttatgttacaagatcatgcccgcgtttggtgggatatagtggggcagacttggatgttagtgtgatgacttgggaagagttcaagagtctgtttgagaaaaaaatttgtaacatcactgtgaggacctcacatatggaagactttgtgaaactgactcaagggaaaatgtctgtggccgaatacactctggagtttgatcggttgtccaaatttgctggtgatatggtgcctacaaatttcaccaggaaatagaagtatgtgagaggactgaacgccacaatcagtcgggacgtgaatattaccactacccatgacactttgtacaagaaagtggtaatatcagaggatgccgccacggcatcgaatcctcttgtaagtggtaatatcagtaaggggatcgacggtggtaaccctgatcacaagcgaaaagtagatgcttctggaacattagggggtaatagaaagttttgaggaaataaaggtggtcatcagggccgcggatcttcattccaatcttatcctgagtgtctgaaatgcaagaaacaccatcagggtgaatatcgggccaagacttgtttccagtg

SEQ ID NO: 140471 - DNA, 573 bp, Cannabis sativa
ccgaatcagccttctcggaacaagtgctatttcctccatggtttcccacctggatatggtgaaaaaaagaaaaatactcctactgctcgggcaaaccaagtttcagccagtcctgaggcccctgttgccagctcttctcaacttcaactcagccagcaatttatctcactactcagtcagcaaatccaaagcgctccatccatcagtgaaaatcttcctgtggtctcaaacgtctttggtaatgataaactttttcctcttttttttttttttatggattgtagatagtggagctactcatcatatttgtcattctcttcattgttttacatctctaaacactaatcccgttcctaatattgttactttacctaatggccatcaaattcacatcaacaaaagtggcaccgtaaaaatatctgataaactaatactgaccgatgtattatatattccataatttaagtttaatttattttctgttaatgcttatcttgaacattgtcataacaaactcacatttacttttactcaatgtttgattcaagatccctccctgacttctacgattgg

SEQ ID NO: 140472 - DNA, 881 bp, Cannabis sativa
  modified_base (26)..(61): a, c, t, g, unknown or other
attaaatgttatttctaatctttatnnnnnnnnnnnnnnnnnnnnnnnnnnnnnnnnnnnntttaaggcataaaacccaacagtctgaagttcctaataggatttcttttgggaacattttccttacccctagaaaaaaatttcttgtacttcttttttaagaattttgcacagttcctggttagcagatctacagttttatctgagaaaccagcagacacatctgggatacacttcttttcttctttgtgcattgagcacaagtctattgtctcctttttctttgttcacatccttcttctttttttctttcttccaccttgttaaggacatttcataattctacagggatccaataagttcattaagatccagttcgtccatgtttctcatttcttcattggaggttactttagacataaatctcctaggcagaactccaagaaatttacgaactagctttgcatttgaataagtctttcctgaatcataagactcatttgatatgtcgcacaatttagcatggaactgagccaccatttcttcttcctccattgataaatccttaaatacttttgccaaagcacgatgataggatttctttactgcatccgttccttcatttttaattcgtagttttcccaagcctctctggccatctcacagttttcaatgaccttcaattgatttgtggacactgcattgcacagagcatgcatggccttcgaattaaaattggccctctccatatctttgtgagtccacaagctcataggttatggtttggtgacaccattatccatcaccgttgggcatgtccaaccatcttctatggtcatccaaactctttcattcatcgccctcaagaatgctcgcatttt

SEQ ID NO: 140473 - DNA, 819 bp, Cannabis sativa
aagaaattttaaatcaaaatattgagaaattaaaaatttcttggtaccttcctcctcggtcttgaatttcttttcaaggtgattccaaatttctttgtcatcgttagtgtcggtgtgtaggtcataaagcctatccgagagtgagttgaggatgtgtcctctacataaaagatttccatcttctctcttcttcctttgcgccttgacctcattagtatctttgttggtaagtgtgtgtaagagctgcaaggtggactcaagaatatagacaatcttgagtatggttaggaggaacctcaccttatcttgccacctagtgaaattggtgccatcaaagcggttcaatctctgtaagtcttggttcatcatcttgattgtttctccttgcattgaaaacaaaaagtaatctaattgattattagaaataaatgagagattacaattaaagagtaaaataagatgaataaaagacaaagataattacaactctaagcaaaatattacaaggataatatattaaataaagagttacaatccaaagcacaaaatacaaataaagaaaaagagttacaactcaaaactcaaaactcaaaaatacaaataaatgtaaactatataaatatatatatataaaatattgtgtatatatatgatatagaatatatataaaatagatgatatatagtagagatataaagtatatataaaaagagtgtatatagtatgtgttgacttcgctttttgccaaggacaatgagtctttttgataagcaataaacgatatttcgtaatgaatatataataaagcaataataagac

SEQ ID NO: 140474 - DNA, 558 bp, Cannabis sativa
tgatattaaagttcatattttttttcatgttttcgtgcataaattctatgtggatctctttaatattcgatttagaacattttagatttgaaaacacgcaatttggtcgttgtaattgtcttttctgatcaagtttgggtcgggttcgtcggacccgcgtgtagaaaaacaggtcaaaatcgacccggtttggctgaagaagacgacgcaaacgacatgtcgtttgtagaaaatgacgtgtcttttgtcgaaaacgacatgtcgcttttcgtcttgtgaggcagccctctggtgagtgaaacgacgtgtcgttttgctttttgcaaaaacgacatttcgtttatacagtgcatttttccaaaaaaaaaaacggaaaaaattccgaatttttttataaatttttttatttatttggaatattaattattttcctatttttgcattaatttagtcaataagttgcatttagttaattttctatttttgtttaatacatatatctagtataaattgaaaatggaaatttgtttaatttggtaatttattacatgatttatt

SEQ ID NO: 140475 - DNA, 893 bp, Cannabis sativa
tttgtttttattcactatgttatagaacaggttctattttttggttatatctgagatatttacttctagtgacttttctagtgacttttttcagggaaggtgacttttaagattattttttccggtgactttttcggcaacactaactttttggcaccagcgactttttcagcgccgatgactttctcggtgactttttcggcgaactttattattacaagttttatcaaatttatttattattttttctcatattttaaattttaattattttttaatctcatatttatttgtattatttatttataccataaaaaaatctactatatttttttggtcaacactcgctcgctagattggcgagaagaaataaaagttaagtaagtaaatagagagtgttaggatattttgagcctattatttatgttatttttagagttaattttcttctttgttatcactttttagaatagaagtacacttgttttcgttaatttcaagtttcgacacttggaatctatatattggtcaaatttcacaaaaagatgatctataaaatagagaaaattgtgcaagaaaataaaactaaatcttcaagcctaaataagactatgttctgttcagattttggagaaagtcaaaacataaaagttctagatctctcttttatctttttgtaacatcttgaatcgtctaattccgagtaatattgagagagttatagctaaaatactatcagtcaatgcagtagaaagctcattgcccaaataaaggggggtttatgcctaggcataggttttcaacgtcttttatctttctttctttttttttttatcattttttgactataaaagaagtggacttcaataattttcaacaagcaatcaaggagt

SEQ ID NO: 140476 - DNA, 1478 bp, Cannabis sativa
ggaccttcacctttcaactccacagctccatagggaaacactttgaccacggtaaacggtctcgaccaccttgactttagcttaccaggaaacaatttcaaccttaaattgaaatgtaacatttgctgcccaggttgaaactccttcctaattaaaccttggtcatgccacttcttggttctctctttgtagatcttagcattctcgtaagcctcattgcgaaactcctccagttcatttaatagtcttttctctcctgtagccttcaattccatgttgagagtcttcatagcccaaaaggccttatgttctaattccaccggcagatgataagcctttccaaacaccaaccgatatggtgacatcccgatcggtgtcttaaatgttgttctgtatgcccacagtgcgtcatctaactttttagaccagtctttccttgatctctgcactgttttctccagaatcatctttatctctcggttaaaaattttagcttggtcattactctgaggatggtacagtagagtagttctatgacggacaccatatcttaaaaggagtgcttcaaactgtttgttgcagaagtgactcccttcatcgcttatgattgctcggggagtaccaaaccgagtgaagatcttcttttgaaggaagcaggacctgttttaccgtcattttgtggtgttgctgcaacttcaacccatttcgacacatagtccacagccaatagaatgtacagattgctaaaagatgaaggaaaaggatccatgaagtctattccccacacatcaaacaattccacttccaagagtcccgttaaaggcatttcgtttctccttgagatattacctgtacgttggcaacgatcacatgccttcacaaaagtattattatctttaaaaaaaagtgttggccaaaagaatccactatgcaacactttagcaacagttcttgtcccactgaaatgtcccccacatggtaaagcatggcaatgatttagaatagagtacatttcctcttcaggcacacatcttctaattatctgatcaacgcagtgcttgtagaggattggctcttcccaataatagtgtttcacctttgaaaagaacttcttcaattgttgacaagaaagctcaggaggagttatttttgcagccaagaagttgacataatcagcataccatggtaccatcaggttttctctcacactaaagagttgttcatcaggaaattgctcatttatctgtacctctttcgtattctggctctcttccaactctagtcttgacagatgatctgctatcagattttcagtgccctttttgtcctttatctctaagtcaaactcctggagcagaagtacccaccgaatcaatcttggctttgcatccttcttggttataaggtatttaatcgccgaatgatctgagtagacaacaaccttattcccaattagatagggtcggaacttatcacaa

SEQ ID NO: 140477 - DNA, 747 bp, Cannabis sativa
cctagttcggttccagttctagttgcaattctgagtttgagtttggattcaagttcatgtcggggttcgagtcttggtctgagtttgggttcggattcggatttcggtcaaggtccggatcaagctccgggtgtgggttcgagtccaggtccgggtctgggtctgagtccaaagttccattctcgatctgagtttaagttcagttctgggtctaagtcctggtttccgatcctagtctgggttcgagttcaggtccgagtctaggtctaggtttaggtctgattctaggtctgtgtctgagttcaggtcccgagtaagggtccgattttgggtttgggtccgggttcgggtttgatcctggttcatgtccaggttcctatcctagttagggtgcggggtaggtttcgagtctggatctgacttcaaattctcgggtccaggtcaagtcctagtccaggttcgagtcccggattccgatttgggtgggttcttgggcctaggtccctggtctaggtcccccatcaatgtccgattcctaggtcttggtcttggtccaggtgcaggtttgggtcccgagtcttggttcgagttcgggtccgggactaggtctgggtcagggtccgggacccggtttgggtccaggtcctggtctgggtttaggtcccaagtcacaggtcccggtccgggtcgaagtcccagtattggttctggtctgaatttgggtttaggtccgagtcttgatctagg

SEQ ID NO: 140478 - DNA, 635 bp, Cannabis sativa
agttccaagcaatgagtcaggggtgagggtcctaatctagttccactttgggtcctcggtcctggtctgggtcctaggttagggtctgggtttatggtcgggtctcagtcctaatttttatggccatgtcccgggtctaggtccctcatccaagtctgagtcctatgtcccagtccaagtccaggacccggtcgtgggtcaagtcctagtctgagtctgggtttgggttccgatctcggtttgggtccaaatttgggttcgagtctaggtccaggctcggggccgtgtcccgagttccaatctgggtctaggttccgaggcccaagtctaggtccccaatgtaggtccaggtcctaggtcccgatctgggtccattcaggtttgagtacttttcctagtttaaatttcgattcagtttttgggttcgggtttgggtctgggtctgggtcggggtctgaatcctggtccgagtctaggtctgggtttcggtccagttccagatcctggtctgggtttgggttcaggttcggtccgagtttaggtcctaggtgccggtctaggtctgggtctgggtcagggtctcggtttgaatctaggtctcaagtttcaatctcggtctaggtctagtttgggtt

SEQ ID NO: 140479 - DNA, 563 bp, Cannabis sativa
cattatttctagctgccaaataaggacaacaacaaccataaatcatcaatcctgataaccataaaacttatgacaacaaacaactaacatatgtaacaaaactttaaaattatacatgtcaaatcctccaacatgagctgaattgaagcattgtttacaaccataaaaatcatgtttaaatgcttcccatagggcttgtataggaaaccaaaaggaaacaaatattgaaagcttcttaccatgtcctccaaatcaagtcttgtaaaaccttcaattttatagtgattaaaatactcccacgaccctccctcatatcttctatttccaaatggggaaaaccatgaagccccatgtataagcataactgtgaattcaccctcctcattccctggcagaataacaacaagcaatagtaaaattgaaatacaaagcctaaactaaaagtggaagttaagttcgaaaatattaacttagcttttagccaacgacaatgagtctttttgataagcgatcaacgatatgtcgtaatgagaatatatataagaaagaaataataagacaca

SEQ ID NO: 140480 - DNA, 1124 bp, Cannabis sativa
gagcctcttgaatttgaaatactcctccctttttcttcttaatttcgaaattcctatagtgatttgaggaatcacccacacaattcaagtcaatactcagggctttgtggaagattatgaagaattccaacaatagaagaagattcaggtttagatcttgattatactctgtgacacaaatgatcaaggcttagagatctaaacggaaggagacattatattctgcttccatcaatgtaaggatttttttaatctcttatttgtttatttcattattttaagaaatttatatttaggatgtttgattatagtcctataatcaacatacatgttagtaaatctagatcccagtaaaataagttccaacactgtatcccttaattcaaatgatgaggataatgcaattggactcatactagtgtcttctaaatcgatccaccacacacaaggaataatgttagctattaggataaagtgtatattattgctcttgttgaattctcaacacatgagcaagaataattgagacagaaaactattttcttttctcctcttaattttgaaaattaatgtgtaaaagcgtgttttgatttctcaaattaagtttctatttatagtagttgaaaccctttaattaaatcatatttaattatttaaataaataaatatctaaaaccgaatttagttactgatatttatgagggaatctctcaactaattgagagaatatcacaacaactttaaaatatctttagccagtttttaaattcaaatatttatctaattaaattaattaaatacttaattaatctaaaaagacaaactccataaggacaggctacatgttaggcgcttaccttgtctgtttaggataacgatggtgtcttttgtcctgacaacttttgtctcaacaaatcttgtcttgacaaattattttttaacaatttttgtcttttcctatttaattaatttgaaaaattatttatttattacaaaaataaataaatactatttcactaattcaaatagaatttttcaaacgacattatactactctttatccccttccttgacagtatttcaaggtggcgagttggggactatggacctataattataagttc

SEQ ID NO: 140481 - DNA, 1150 bp, Cannabis sativa
cattcttcaaaccctgtacccagcaacagaatgatggctcgtacaaagaaaactgcacgtctggctgacgcgtctgacccctaagtggctcggcacgccactttgcgcagcgccgaacaggatccagcaacccagattgacgaggatcatgaaggggacgctgaggttcaagagattgaggggcaggacgatgtacgtcttgatagttcctccgaggagaacgaagaggcagaggttgtacccccaaaatatgggaagtacaacaacgttggggagccagtcgatactgatggagatgtcctggttgatggcgtggactacgtcaatgaggagcttactgcggcggttcctcatagaaggcagggtgccttcggcttaaggtgggtaagccctccgtccaatattatggaggcgtgccttcgaattcttgaccagggcagatacctgggtgagctggactactacattccctcccataaaaatcgtgccacaaaccctaaggtcagcaacgagcattgatgcccttgcatcaatacttcaaggatgtggcggacttcttctgcctctacccggcccagttcactcctaagggcatcaagtatctgtctgccctcttcgtcctctatgcctcccaaaaatggggtatgccctctccccacgaggttgcttggtacttcgatttgaagtccaccactaagaaaggcaggttggggtacttctacttctctcaaccaagcttcaagtggttgacgggcacagacgataaggccatcaacaagattgggcaattttctgatgagtacttcatggtggatggcaggagcatcgctcgcactcggtttcaacagattccgacctatcaccgccctcctctcactcttgatcttaggaatagagctcaaaaacttgcccgacttctggggaaagaacagaatattatctagatgaactctgaggataactttgtgaggtacgggctctatcccaaggagtttactactaagtctgtgacagggaagaagaggaaattaagtgctggccggaccgaagggaggtgaagggaggtgcacgggctgagcaatatgctcaggagcccttgaatcgcgaggatgatgctgaggaagagcaggtgactccactgaagaggaag

SEQ ID NO: 140482 - DNA, 663 bp, Cannabis sativa
agtttataaaaccacacacgtggagttcctatagattaggacgttacatcaactctctatttttcagtagtaacctgaatccactttttatacatgattttgaatgattcagcaagagactcttcacagattttagaatcattagaatcagattctacttgtttagtggtattattcaaatataccagtctggctttttcctgtaaaacacacaacacattaattataacagaaattaagccaacattctcagaattttcttcatcactttttgtttcatcatcactccatgtgacattaaaactttttttattctttttcaaagtgtttgcacactcagattgaatatgcccaaaaccttcacattccttgcactgatttccctttttgttagacacacatggttttaaagaagcatttccctttgaaaattttgagttattctttttattactcatatttttcatatatttttgaaaattcttggttaataaagcaatttcatcatcacattcactaccgaaaattttattgtcaacaacttttaaagcgatacttttaccttatcaacaatggatttaggtttgtccttttgcttactttgttgattcaattcaaaagtacgcaaggaacccattaattcttccaccttcattgtgctaa

SEQ ID NO: 140483 - DNA, 824 bp, Cannabis sativa
  modified_base (280)..(282): a, c, t, g, unknown or other
tggccttggggtggttttggaaaatttaaagttgaatcacgtaaagctgaatagaaaattcttgtattatgagcagaacattcccacccagcatatgcatatataaattgcatatcaaaattacatattgccataatatactgagttggtaccccttttctaccaacaaatggtacttgatcttcaggtggaattacgacatttacatgtacatcgtctattgcacccagggacggacccattaacattgatgtgagggctatagcccccactaacaaannnattgccttttaaaaaattaaatgtggattttttaatttaataattatagaccaaaatagtagaaaagctcccacaaaattagataaatttagtaagagtaattataatgtagttataaatatttttttttataataaataagcccccataaagtaaaaattatgggtccgtcactgattgcaccaatacagttctagaaaaagaataccagattataaaattatactctagcttgagaaaaaattaataaaaaaatatataattttaaagtatgacttaccttaaaatgaggcatatatctagactttttcaatatctcttcaggaacatctttaaattttgggtctggtggttttaatacatctatacttatatgacataaagcatctaaaaccttgttgaaatatcgactaactgtctcgcctgagtgttggagtccctcttgtgttaatcgatttccagcgtcgtgacctaatgtaaataaaaacatgcctaatatttcaagagtacacatcctttttgaaccctcaaatccataatta

SEQ ID NO: 140484 - DNA, 876 bp, Cannabis sativa
  modified_base (609)..(609): a, c, t, g, unknown or other
cacctcgcgtataaattcattaaccaacaacttatccacttcctgcatgagtgccccttgtctctcgaaatccaagggttgcctgttctatctcttggctgggtaattaagatcgacatttaagtggtggcagataatcttagggtcgtccctatcatatctccatggctccaggcgaactgagcttggtttgccctcaaaaagcttattagttgctatttcaattattcatctaggttcttcccaacgtatacacactttgtgggatttcatggatctagaacaacttcttccaactcctcaattggtttcaataaatttctttcatcttgaatccgaggatcaagatcttcatccttcttctcgccttctttagtcaagactgccattagctagtaattggcctttctgttctacagctctatgtaatagcattcgcaagctagcatgtgctcacctcacactactcccacacccattagtgtctgaaaattcaaggataagtgcttaattgaactaactgtcactagtccaattaacgctagtcgacccagtagtatgttgtaagttgatggcaattcgacaaccaaaaagtcttgcattatcgtngtggataaaggtgcttcgcccaatgttaatggaagcttgattactccttgactagagacactgtcgcctgtaaatccacacagatttaccatgcaaggttttaatttagctttttcaagtcccattttcttcagtgtatccctataaagggtgtttactgaactttcattgtccaccagcaccctttttatctttttgttggcaagctagatggtaattagtagtgggtcgacgtgaggatatctcacgtctttttcatcttcctcc

SEQ ID NO: 140485 - DNA, 1047 bp, Cannabis sativa
acccgtagtgcaacaccattattagtctgaccagatcgccggagagcggtacgaccgcttcatttgggaagtgcagaaaggttggagccattatcttccgtccaactagacatacattgtctggctaggtgttgctaatactcttcccgttggccgtccaagtttgggtaactttggcatcccaattgcagtccctgctattacagttgcacgtcatacatattagtatccgtctaggaggaggatgatggcccgcacaaagtagacgatgcggaaggtcaacgcatctgatcctcatgtggcccaactcaccacatagccatgttgcgaacaggattcgcccgacatggaggaggagatgaggacattgaggtccaagagattgaaatgcaggaagatgtccatcctagctgcccttccgaggccgaggaggaaggagtggctgaacctccaaactttggagggtataatgaggccggggagtcagtgtttgtagagggtgaagtcttggtcgaaggggaagactatgccacaaaggagcttactgaagcagtttctcacaagaggaaaagtgccttaggtgctagatgggtgagccctccatccaaaataagtgaggcacgcgtgaaggccttggataaggctggatatttgggtggactggagtgttacattccttctctgaatcaccgggcaatgaacccgtagaaagggatgtgtgctggtcgggtgctcatactaagcaacgggcaatggtgccttttgcacccgtacttcaagagggtggcggactatttttgcttttgtccaacccagttcactcccaagggcatgaagtacctgtctgccctgttcatcctctacgccattcaaggatgtggtgtgttgtccccatacaaggttaattggttctttgacctgaagtctacccccaaggaaatcaggtcggggtacttccacttctcttagttagactttaagtggctaatgggcaccatggacaaggatgtcaataagatcgggggttttgttgacgagtactacttc

SEQ ID NO: 140486 - DNA, 1626 bp, Cannabis sativa
aaaaatttaatactattatggaagtggatcaggtaccccaacttgtgaagtgtcgcattcttgtggaaactctggaggacaatgcccacgattggttcaggcaattgcccgaagcatctatctcaacatgggagacctttgtcgaccttttcctcacacattttcaagccacgatgacatataggccaacaagactattttaaacgttttaatgccgaagtaacaaaagtagagaaggctcccgagtcttcgctagtgtgtatgtttataacaggtgtcctgccaggaactaatttctgaaaggatttgcaagctcgaagacctgaatcactagtcgagtttttcgctatggcggagccgcataagaggattaaaaattctctggctgaattagagaaaggcaaagataaacgtaagtcactagtgctgcggtcacgatcccgcattcccagagggaaaaattcaagaggaaggagtcccagaagacgcagtccacaaagacagcggagtccaaagttagccaagtccccttcaaagaaggagtcctctccgaagaggaagggtggtccacgctttgtgaattatacagagttggcagtccctcgggaccatatctacgccatcgaagagaagaacggggtcttcaaaaagcctcccccaatctagggaaaccgcgacaaaagagacccgaagaaattctgtaagtaccacaagggtattggtcacactactctggaatgttggtttttgtaggatgaaattgaagagttaatcaggcgaggtaagttcaacaagtataagaagaatgaggaaagtcatccccaagcagatgacaaagaggaaaatcacaatgcgagtggttaaaggactcctcgcaatatattgactattattggcggaccccatatcgtaggagattccaggaaattgcaggagcgatatgcaaaagaagccaaagagaagccgctcaccaacgtgaacaatttgagtgagaggctaaaaaagttgttcaaacgggaatgtgatgatatcacattcatggaaagcgatgccagatgggtccaccacccacattctgatgcactggtcatcgttgctaatattggaggagacaatgtccaccgcatacttgtggacaatggaagttccgtgaatcttctgaatttccagacctttaaacaaatgggattacaggagaaggatctgcgacccgtggtatcgagtatttatggttttagtggagacaccattgcgctgaagggaatgatcaaactcccaattactatgggaaccgcacctgtggtggctaagtcaatggctgacttcgcgataatcgaccaatactcggcatactatgctgtgattggtcgttctatgcagaaagagatgaagatcatgacatccatttatcatctcaccatgaagttccctactcccgctggagtaggatctgtgcgaggagtccaatcgaattcacgagaatgctacaatgcagcgttaaaactcgtagagaaaaagtcagtcaacgtcatttaattgctaaaggcaccaccccctcgacaggagatgttcaagataagagaaatatcgcataaagacgaaccagacttggatcctagggtcctc

SEQ ID NO: 140487 - DNA, 1358 bp, Cannabis sativa
tgtcttttgtagatgaacccaggttagttttggggaagcgaacaccgaatcgactaggatctgcttcaactcttgcacgaggatcatcctcgtctttgttctagtactccctcttcaagcaacatacattttgattcaaatctctcgtccatccaaggatgatggctcgtaccaaatagacaatgcgtaaaatcaactcgtttgaccctcacgtggcccaatacgccaccttgcccagtgccgaacaggatccacccatgcaggagagggggatcatgaaggggacgctgaggtctaggagatagaggaatagggcgatgtctgtcttggaagtccttccgaggaggagggtacacccccaagctttgggggatataatgaggctggggagccagttgatgcagacagcgacgtcctggtcgagggcgtggattacatcactgaggaacttactgccgcggttcctcacaggaggcagggtgctttgggcaccaggtgaatgagccctccgtccaaggtcaccgaggcacgtttacgggatctcgaccagggtggctatttgggtgagttagattgttacattctcgcctttaccagtcgagccacaaactctgagagggggatgtgtgcctggtcgggtgctcatactaaacaaggggtactgctgcctttgcacccatactttaggaaggtggcagacttcttccgtctctgttcaaccaaattcactcccaagggcatcaagtatctgtctgccctgttcattctctacgccacccagaagtgggatatgccttctccccatgatattagctggttttttgatttgaagtctactcccaagcaaggcaggtcgggatacttctacttctctgagccagactacaagtggttgacgggcaccggggacaaggccattagcaaaattgggcattttgttgacaagtatttcatggtgggtggcacgggcaccacctacactcggttccagcagatccctacatatcactgcccacccttcacacttgctctcagggatagagcgcagaagcttgctcagctgctgggtgctgcacggaatataactttgttgaccttcgaggacaactttgtggagtacgggctctacacgaaggatttcattcctcagcctgtgaaggagaagaagaggaaatctagtgctgaccgcactgagggagctcatcaggaggatgaactcattcaacttaagcgtgaggctaagttgaagggagtgcgggtgccaaacagtatgctcaggagcattctgagcaggaagatgaggttgaggagcagcaagtgagtccgctcaaaaggaggaagaagcttcctgccgagca

SEQ ID NO: 140488 - DNA, 527 bp, Cannabis sativa
cactttgggtgtttgttcttctttcttattttgttctattctcaagttttatattgttttcttgttctcctctaaacactcctatatatatactatcatatattcatatattgacaatatagtactatatatattatatatacatactatatatacactctttatttctctactatatataatctattatatttaaatattctatatcatatatatatactctattatatatatattctatatcatatatatatcagatatatatacactattatatataggcgaacgattttgtgcccagaagtgtgaatcacggattggaatccattgtacggcaggttggtcccacattagagtagttttttttttaattatttaatttagttggcaaccggttattctaggtttgtgaacctgttgtacagttgtttttttatttaaaaaataaaaaggtacaattaaattactgtttacgttagttaatgtaggaaaaagtacaacaactttactgttcgtggcagttaatt

SEQ ID NO: 140489 - DNA, 654 bp, Cannabis sativa
ctggggtttggggtttgggatttgtggttttaaggtttggggttttaaggtttggggttttaaggtttggggttcgaggtttgaaggttttaggtttgggtttttgggtttggtgcttatgggtttagttattttacatcaggcttttggggtttgggttttgggttttgactttggggttttggtttgggttttgggtttttaggtttgggtttttaggttcgggatttagggttttgtggtttgggattaagggtttggggtttggtgtttagggtctttagcttttgggattttttggtttgaggtttagggtttggggttttgtgactagggtctagagtttaggatcttggacctagtgtttggggtttgaggttttaagtctgcggtttggtatttgggttttagggtttggggtttaggggtttggggttttatggtttgaggtttggggtttggtgttttgtgtttggggttgtaatgtttggtgttttggggattagggtttgggatttagggtttgatgcttggagttttggggtttggagttttgaggttttggggtttagagtttgagatttggggtttagggtttggcagttttggcgtttggggtttggttatgggaatgggatggggaatgggaattca

SEQ ID NO: 140490 - DNA, 542 bp, Cannabis sativa
gagtattgaagatgttgctttgttacctaaactaagctttgaaaaatggagtaatgctcaaaggatgtctatggttaccaaccttaatctcgtagggttgcgcttgagcattagacgacactaaattttcttaaaatcaaagttaatgttaatggagcagtatttgatgatgatgggtggtttgactatggttgtgtggcatgaaattcaactggagtagttttagaagctaaatgtaggagcaaagtttgtaaatttgaaccacatgtagttaaaactttgggcattaaggaggcatcaagttggatcaaggctcatgaatgataaaatgtgatgctcaaatcagatagtattaccgtaatcgatgattttgttaaaaataaaaacatagtcttttcttatagctgtgtaattttggattgtaagtagggatgtacacagggcgaggaattagtagggaatgttctccctatccctatccccgttaaagattttaatccccacccccgcctcatctccgcttattctccatcggagatggg

SEQ ID NO: 140491 - DNA, 669 bp, Cannabis sativa
attataaattatattgtcaatatcaaaccattaaaaatttacattatatagattcttcacattatctattagcaatctgaaaaataaagtaaaatttacacatttaccttgtaaataggaatgacatacccatggggactacacgccattaaattggctacatcaatatcttgtgtcttggacatagattagaaaggaaagggtcacggggagggtttgtggagagaaccactaaaaataaaacatatggtgagaagaaatttgactgctcgtggtttaaaaataagcacaaatccaaacctccaatagatatgttcttcacaaatctgttttacctaaatacaaaatacagaaatcaacaatcaataaaaaaataaaaattaacaaatatgtatatatatatatgaatggatacggcttgcacaaaaaactcacaaaagaaaattatttttcattactttaccttgtcaataggagaatgttgatggagactactaaacatcattaaaattacttacattgagctcatgggtctgaggttggacaggataaggttttgggaaggccttactgtcgatgtggataggtgaagggtttgtggagagaaactctctcatctaggttgaagaatagtcatgttgacattagttggatgagtgagagtatcat

SEQ ID NO: 140492 - DNA, 618 bp, Cannabis sativa
ggatcgcggaattttataaatgtattactttaagtttctaattaaattagaaaatttaattaatcacatttttcattaatctcgttgattagcaacaagctgaacagtataataaaaatcacactagcacgcctaaattagttagggtgttacaagccaggtgagaatgcaaccaaggcagttaaggaaaagttcgagcgttggcagaatgttaacaataaaactcaatactttatgttgtctagcatggttgacacgttgaagacaagatttgccaatactctcatggttgcagaaatcatgaaccaattaattgatctgttcgaaatggcgtcagatcaagctcattttgaggcgacgaagaattttatcaatgcacggataaagcctcattagaacgtgcgtgatcacctgctccaaatggctagttatttccaggaagctgaaaaccttggagctattacagatcaggaaactcaagtgaatttgattttaaatagtttgactccaacttttttgccctttaccttagattatgtcatgaacaagttgacttttaacttccacgagttaatcaacaaccttcacacatttgagaatgttaggtccttttttggc

SEQ ID NO: 140493 - DNA, 824 bp, Cannabis sativa
ttgtatgagaactctatcaacggtaggtatttactccacgagcctttaaaatcaataacacaggctcgcaacagatctttcagtatttgaattatcctttcgtactgtccatcagtctgaggatgaaaagctgtactaaatttcagtttagtacccatagccctttggaaactctgccaaaacttagaggtaaacttcgtatctctatccgaaactatggattttggtacaccatgcaatcttactatttctttgacatacaaatccgcatactgatccactaaaaaggttgttttaactggtagaaaatgtgcacacttcatgaatcggtctaccacaacccaaataaaatcaaacaaacccgtagttctaggtattccaacaacaatgtccatcatgatatcttcccatttccacttaggtagggttaaaggctgcaacaaccctgcttgtctctgatgttcaacccttatctgctgataggttaagcatctcgatacgaattctaccacatgcttcttcattccgctccaccaaaagtaaggtttaagatcttgatacatcttggtggggttgggatgtagggaatatggagtagtaagagctactttaagaatttcatttttgagttccgcattattaggaacacaaaccctggttttaaataatagcatcccactgtctgacactgtaaagtccctagcttgactagctgatacctcttctctcatctttattaactttggatcagttaactgagcggctttaattcgttttaatagatcagattacagcgtcaagttatgaagcttgcctacaacaaa

SEQ ID NO: 140494 - DNA, 508 bp, Cannabis sativa
  modified_base (64)..(70): a, c, t, g, unknown or other
ctcggcctcatcttcaggattcaagggctcctgagcatgctgcttggcccttgcacctcccttnnnnnnngcttcacgcttaagttgaatgagttcgttctcctaatgagctcgttcagtccagacagcaccagatttcctcttcttccctgccacgaacttaggagtaaagtcctctagatagagcccgtacctcacaaagttatcctcggaggtcaactggataatattccggtcttccaccggcagccgggcaagtttctgagctttatccctaagagcaagagtgaggagaggacggtgatatgtcaaaatctgatggaaccgagtccgggtaatgctcgcatccttcaccatgaagtactcataagcaaaaggccctatcttgctgatggccttgccattcatgccggtcaactacttgaagcttggttgagagaaatagaagtacccctacctgccttgcttgggggtggacttcaaatcaaagaaccaggaaacttcgtga

SEQ ID NO: 140495 - DNA, 504 bp, Cannabis sativa
tatttccttaattagaaatattctaataattttcacataatatatattatatatgtatcacatacataaatattctcgtcataaatatatactatcatttgtttaacatatatataatatatataactcatatacatgttatatattatgtatatctcacatatatatgcttacatataatatattcaaatatcatattatatatcactatattaatatgacatatacactgatacatatctcacatttaataacataaaaaattgcatatctcaacataagaaaatatgttaatatatattttactattaaaaaaatagtaaatcacaaaatatcaccattcttacccatgtgttaatttcttaccttccattgaagcaaggtaggaaagaataaatttttgactgttagaaattattgtgctccaatagaaatatcatatcaacaagattacaactctatgacaaattatacaaaggaaaaaatatagattaaataatgtta

SEQ ID NO: 140496 - DNA, 626 bp, Cannabis sativa
agcaaccgtgagagcgagcagatgtagattgtacatgtcgggacggttaggcctagagcgtacggtctttgggacaccagggcttattttgtatagtcgctaggcgataaacctttgtttatgcacagtgtaacttttgtaaatacttttgtaaaggggatcccaaatttgtatataggttattttatgtttttaattaattaagtaaaattttaattaatcacgattttcaataaacttgttgattagaaacgagctgcacagttggttaaaaatcacgttaacatgcctaaaatagttagggtgttacatggcacttatgaaagaaatgaccaataataccacatgttgcccttaattttgcccaaaatacgtggaccaatgcgactgcgacacgcggatttgaaaaatatggttctgagataatttaactaagtctttttggatcaagagtatcaataagaaaatacctcccagagaagatatgagggctccacgtacttccggaggaagagctatggcaaagcacctccggaggcaccagaccccatttgaagagtcacctcgcatttaatgccgcatgggagaaggcgtattgaaactaccataagtattgaagtctgacg

SEQ ID NO: 140497 - DNA, 527 bp, Cannabis sativa
  modified_base (32)..(38): a, c, t, g, unknown or other
tatttaaaatttcgtgaaaccgtatttttgtnnnnnnnttgttgtttttatgtttttgtaaaataatatctgggtaaagtcatatttatagtgatataattatagtaaaagataattgtgattttacgttcaaataaatgtcttaaaatagccatgaaaactatattctcaacttacaatattattttatcaaaggttaattagtatctccgataatggtagtctttatgagttttgcgcaacggtcatagatacttggaatcttcttctacgatggaggatttggatccgcctccaagcttcatcatctcgtttgggtttctctggtggaccctcgattcggcattcgagttgcgtctcccatggttaagttgttagataaattaaataacccaaaatacaaaattgtatataatatagaatacaataataataagcaacaattaggtataagtacctaattgatccatagtaattaccacaatttgatgataatgcaatactatcaactaagtcttcctccctag

SEQ ID NO: 140498 - DNA, 604 bp, Cannabis sativa
taacaaattttaaaatctcaccattaaaataatcaatttttaaatttaaagcttaaaatacaaaaaattaataataatctattaaaaattaaatattattaattttataattgatatttaagtttaagtattaaaaataatattttacttttgatttgtaggttttgaaattggaaaaattcgaaatttgtggaaaaaatccacaaaaatcggatttgggatgtggctgcccagaagactacacgtgcaacccatgaaggctgcaagcagcccataagcgcgcggattagggagatttgtagcgtccttgactgagaaatctcagtcacctgcagggtggggacgcacgcggatgatgtcttggcagggtcgtcgtgtccgaaggtccaacatcagtgagcttcacacaggtgatgtcctaggcacgtgcgcacgcacgagcaccttgtccgagtgactggtgcgtgcgttgcgagcctctcgacaccactttgacccgaaagttcaaactttaatatcatttcaatttttattggaattgagttccgtaaaaacaaaaattgcttaatttttcataaggaatccaaatacaatattttcagaa

SEQ ID NO: 140499 - DNA, 723 bp, Cannabis sativa
acacacacacacacacactaaaatacaaaaatacaaaaaaaaatcccttacaaatataattagaacattataaaatgcacaacaatattctaaaaacaacatttaagtgtgaaaactagttttgaacctagaaaaaaaataataaagaagatacttaaaatcaaatatataataacatcataaaatagagtaaccccatcacaaaacccttaagacatgtgaacccaatttcaaaacccttaaaacctcttaaaccagtttaaaacccgtggatagtgtgaaccctgtaatactagttacaaacctgtgaaccttgtgaactattaaatgaataagtgtacgagactgatgatttcatattttcattacaaacaaaaaatttcaaaaatattattttattgttagatccaatgatattattatttcagctcagaaaatggttattaaaaaatagtttttccttctatttttcatcgttgagtaaactatttatttcattaaagcaaccgaaaaaaaaactaattttatcaacaacctaatgaaaaaaaatataatgcaaaaaattataatatgaaaacgatacaaactttaaaaactaatttcgaacatataaattttatatgaatatctagtattcaaacttctaacttcattctttatattagcattcaatctttcatttactttctaaaaaatcagaattgatttaagcatacaaaatgg

SEQ ID NO: 140500 - DNA, 705 bp, Cannabis sativa
  modified_base (671)..(672): a, c, t, g, unknown or other
ggtaacatttatcaaattggccaagttaactttttttatttatttttgtgtggctggcacaaacatgtggacagttgggttcagctcacaagaagtggattggatatgctgggccagtggattggatatattgggcctttcttggatttggatttagcccaaggactctataaatatctctcttaaaaaagcaatgatgcatgaatgttagagattgtcacatccataatttatgaaaatacaatataattaatttacagcataaatatctaagtttaattttcgattataaataaatacttaagtttaatttttaatggtaataatatataaactatatttctgaaatttccgtaagtacttagccgttaagtatcaagtcaatgaccacatgacagtttctgattagttcaggtcattaaatttttatttcttatttttaatttaaatatatgaattagaaaatgacatgtggataataacttgatacttaacagttaggtacctaaggaagttctaaaaatataacataagtattattaccgtaacaaattaaatataggtatttatctgcaaccgataattaaacttagatatttatatacaaccaataattaaatttaagtatttacgctataaattacttgttgccctctattttgcctaaaatnngtggaccaatataaagacgacacgtggagctga

SEQ ID NO: 140501 - DNA, 1278 bp, Cannabis sativa
attatagtatcttaaaaaatcaaacaaaatctattgaaattctaataaataatttaaagaaatgaagagaaaattaaacttattttttacaaactcatgttttaaaaaataaagacaaataattagaaattaaataaaaatataaaattattttttaagaaaaataaaaattaaaataaaaaaaatgttatgtttacttaataaatttatttttttttttttctaaaaaaataggctcaaaattttacccgtatgcttaccgagatttttgaaaatcgattataaaatgattaagcttaacaaagaaatgaattaaaaaagaataaacaaagatttcgtggttggagcgtaaatgaaccttagtccacgagttaatatattgagctagaaaagtttcaaagtataaggaaactaatattcgatctgttaggaaaacttggatttgactattatataacatgttcccagccactcatgttattgagctcctaaaatagaaattgtaaaaatcatcttctctgagaaactttaactagtaaatcaaagaacacaatgaacacaaataagagttcacgtatactcagaattcaggctgatctaataatgatcatcgttaagatatgaataactctttcatagtaaacgacacattaatgaaagatgtttattacatatcagtccaatcatgcatattgagttattcataacacctttacgacatatctatccacatatgtaatctgaatcaaaatctctctctctcacacacacacacactagaagtatagtgtatagtaaactgtacttagcaatttcatattaaagattcacaatacttttaatatactacaaacttattttatttatattatataatcttaattctcttgtatgtccttacaagatcataccttatctatatgaaaaaagaatttttagatatttaataaggcactccgtatgctaacacatccgagagaggtaatactcattttcgtatgatccatgctccttgtccgaaagagtggatcaacattacacaggggttttcacccttattttcttgaattagaccatctccagtaccctgttacgcactactggcttagggtagacgagattgttgagattctgacccactttatcccgccttttcaatctagtagggtagaactatttactttgatgcaatacctaggtttcttccaatacgataatttcttaggttgtgatgatgtttttctgttttcataggggggtgtgaattacaacgattaa

SEQ ID NO: 140502 - DNA, 1516 bp, Cannabis sativa
taccagcgcaataccaacttttgctagcacagcataaaaatgtgctggccataaaaatgtgctggcaaaagtgacatttcttgtagtgtctattgttatcgaaaatatatttatcttttgtcggtgcaacccagaacagatcctccaaagcatcacactgtctcaggtgcagcttacaggaccaaataagcttccaggcagaatgcgcttgaccaaaatgagcttcttgatcagactagtacgcccctttcacactaaaaagctcattccaagagtctttccacaccaacaaatccttatcctgattactcagaattgctatcaataaaatcttctcaccaacctcctggccaaataaaaacaagacatagctcttattccaatttttaaagagaaaaatccaacagatcagccactcttctaagactaggggccttacttctcactctctctatcacctccctgaacttctcataacccaaccacggacagttgccactaaatctccacatccctcccattcgctaaaagcatataagagccttccgaaattactttcctaacttccaggatgccttttcacactagagaatcaatggccttaggatgaacacaccaaaaggagatccaagaataatatttctccttaaaagcattaacacaaaatttatcagtactgcttgccatttcccaagcaagttttgcaatcagagctttgttgatatctttataccttctccacgcctctaatccaccaaaacctccaaatcatggcatctaaacgtctactaagatttgtgggaattaaaaaggtggacatcgagtaaataggcagagccagcgcaactgaattaattgaagtcatcctacccacataagatagagttctcatcctccacctttctagtctggcccttaacttgtccataaggaaataaaaatcttgagagcaattccttgacaacacaatggattctcaagataaaccccattgaatccatctcatagataaggagaaccctttcaatctccttttttcttccacacgaacacctcttagagaaaaatatgccaaatttactcttattacaagattgtccataccaaatttcatatttcttcaaacaaacccacaaggtctcagccacctttgagctggcctgagcaaaaatcatagtttcatcaacaaacatgaagtggaaaagcagggtggcacctctagcaatttgaataccatgaatttccccaccatcctgcgcacgttggataagtattgcaagaacgttattacatatgagaaataaaaattgtaaaatagggtcaccttgacgcaattcacgagaaggtttacatcgattaagaaaatgaataatataagcacactaaatatgaccagaagactaatataaaatattacaattaaaatttccttatatagaatatttataatattctaagtattttaaatttaaattaaaatttttttatataaaatatctatataattttttatttt

SEQ ID NO: 140503 - DNA, 987 bp, Cannabis sativa
ttgtgattttttcggcgataatgccaattccgacgaattttctggcgtcgacaacaactccaacgaatttttccgacaccggcagcaaactccggcaactttttcggcactaatgacaattaaaactacctaaacaaataaaaacattaaatatatgatttaaaaacttagtttacatatatatgacatatcaaataccataaaaagaccttaaaacaaaaaaaatatcatataaattggtcaaacttaaatgtgtcatatttatcataaacttaaaatctcataataaatgtaatttcttcaaataaaaaaagcttcactaaaatatagctataaaaggatgtaaacaaaatataatcaaagaagaaggacgttttttagttgtagttgaattttttcaaaaaaaaaatacttagtttgttatggtttgacgaaataattactaatttagtttatatacacacacgtgcattactaatttaatatatatacacacacgtgcatgtatcaataatggttgattataaaatagttactaattaataagtatcgttacgtgtgaattagtattgtgagatggcgaagtgtatagctccttccaacttgtaattaggtcggtcctgagttaaaatgagttatagataaaaagaaataaaaaattaggtctttattataaagataaatgatatttttaaaaattattaaaaaatgtatattttttaaaatgtatttttttatttaagtttttaaaataagtagactctaagcgcgagtttagcctacctatacctaggaccgaccatgcttgtaattaaatatatatagtagtgcgcatatattcaggtcggttctatgtataagtgagttaggttcatactttttaggagctcaaaataaaaaataaaaattcttattagaattttatttaggctaattaggattttttttttcccgaactttaatatgtaccaaatcataccccttgaa

SEQ ID NO: 140504 - DNA, 783 bp, Cannabis sativa
gaaaattaagaaaaatttaaatttcgaaaatttattagtttatttattttgaaaatttattttattttcttattttgttaatatagtcaattaaattatatttatttaaatttttcatttttatttaacacatatttttatatatataggttatttagtaagaaataaattatggaaattttttaatttggtaaattaattacatgctttatttttacatgtaattataataattgtgattgttatacctaaaattcggttggaggacacgtgtcaagataaagggaatgtaaaccctgtgcaatagctttttatggaataactcattaattacgtaagtattaaagtatatttgtaacccgctgactgtaaagtcttaggcgaggaatcaatatacaaactggcacttagtgtattaacaagaaatcatatgtcgctaaatatgaatagcgaggcacctgagaaagtgacacataccgactataaaagtccttagaatgcaatgaacaaactaagtgtaaaaatctgattggctcgaaaaacaagtaagcgagatgaccatctcgctatgggaagacttcctatagctttatccaactaacaggagcgaggcttacaaccctggcgagtcagaagacttctttataaataacaacgatcggacgcaagacattcattgtcgacctcggaaggatacacgatacattgtcaacagttaaagacgtgtttaatacacgatagacttgacctagtaaaagcggaaaaatcacaactatacgattt

SEQ ID NO: 140505 - DNA, 925 bp, Cannabis sativa
ggatgacaagcacttatcaaaagaaggtggctaaacaacttatcaaaagaaggtggctttattactattggtgatctagtcttaagaagggtctttccagccactcaggaacctggagtgggggtacttgggccaaattgggaagggccatatgaaattgaggatgaaatgagctccgggacctacaagctaaaaagaatggacagatccatggtgcctagggcctggaatgctgatcacctccgaaagtattaccaatagtcgaaaaataaaatttatattttgtaaagtaaatttgtaccagacaaatatatgcaacctctaatttaattttgtaagcctaagtgatgtaaaaattaattttcatgtcaattagggggtactaaggcatatcacacggacaaatgtaaacatatcaaatttaagaaagttgatagctacatatatgcaaacataatatgaattgtttggatcccaaagagataaaaacttagaaaaagaaaaaggcctagggactggccataaatgtctccccttaagaaaaagaaatgaattgtcttagaagcagggggaaggattgaatatgtaacaacaaaaaaaagaggataataataacaatggtgatagacaagtggttcagccagctcgaggtggaagacgaggacccctgcgctcctccaacactgcatctagccttttcttcttctcccagaagcgaacaagaacctcttcaggcttgggataaaagtcgaggttaatgttctggccattggtctgccaggccatgaagactccatcgtcaaagcgctttttacagtgttggcaagtgatcggggccaggagggcatctcttttcgccttagctgcctctttctgagcctgttccttaatgaccgctctaataatttggattagtaaaggcaat

SEQ ID NO: 140506 - DNA, 525 bp, Cannabis sativa
gctggccaagcaagcctggcgcatcctcaagcagccaaactcaacggtgtccaaaatcttatctgctcgatatttccctcagtcctcttttcttagcagttctacggggcattccccttcttttgtttggcgtagcatttgctggggaaaagagttgcttcgcaaaggtcttatctcaaaaatcagaaatggacagaacacttgcactatttcggatcattggattccgggtttccgtcaggtttctcccttaacccctgtcccggagaaggtcgcatctttcatcacctcttctatgtcttgggatacaactaagcttcagagttgtttcccttcccacatagcccagactatcctctccattccccttcccctcaccccttcccaggacgatctcatttgggaaccctcaaactctggggtttacactgttagatcaggttattaccttagtttctctactacttcccctccggacatcccttcttcctccgccccttcgccttggtggaaatccctttggca

SEQ ID NO: 140507 - DNA, 1256 bp, Cannabis sativa
gataatctaacctttattaaatatactcatgacatgtttctaatattccattgatcttctcaggttacccacctttcaagaataaaacatcatactatttttacttcaatcttcatgcttctcaataaccttctttaattcttaacatcatagcaaaagatatcaatcttggaatctcacaagattagattattccttcgtatgaattctatatccttatttattgtataaattatctatactgatagacagcatattaactcggtatcttcaaccgttactattcagtcgaaatcataagatcccacagtacctaatttataattatgtatttctattccttctatgggatctcctaaggtgatctattgacttaacttagtaacaagttaagtattcgtttctgatagatattcaattagagcattctttatttccacccactaatatatacttatcttaataccttgtaaatttatacttattaacacatcccttcttcttgattatctctagaacgactactgattttgcatcctaatatgaatctttctagcgtactttgtcctcactcatacgctttccaagataactcattggaagatttcccatcttgagattaccccaagttaagtatgcttaactccaaggtaagctcatggtgggttatcataaagtagatgcttctttgtcgttcctaattgtatttcttgctttcattctttcattaataaaatttaattgtcatcactcccttcattaatctcttgtaattcctcatcggtttttgttcacttaaacttgagaaattcccatcttattgtcaacttgaatcttgttcatttctacttattttaacttgcatcaatttctcttgagctaacataactttaaaatttcccaatcacttacagttaactaccactataaagtaaattaatgtaacctatacggtagaggcaacattgctcataccaagtacgcataactaaactgaaaaatacacatttctcgaattatcaactaataacaattaatcaaagatcattctgtgatcctaaaatttcttttctataattggtagagatcttgatgatattttcaacacaccaagaaatatacatacctcatgtatattctctgttatagtgagtgtatcgttgatgatgctaatgttgggattttatgtcctaaataaaactcatttcaatctaatctgatttgttatcaatgaaagattagaagtcatttatgtt

SEQ ID NO: 140508 - DNA, 1180 bp, Cannabis sativa
gctttggagttgctgatgggcggagtcttgaaggaattcaccagggtaagtctttcttgacacttgcctttaattttctttacatagcgcaaatgctaaagttttttctttgtgctggtcggtctgaagttggcctactcttactcttgggctaagtctgctacttccaggaacacaactctgtccaacaccattagggcggaggtggacttggccaagaaggatgctaacgatgtcaaggcagaacttggagctgttcagatggagctgggtgaagccaacaagaagctctttaccgcacagaagaagatagctgagctgactaaggatcttgaggtttcgtaccgtcttgaagagaccatcgagaccttatctgctgaagtgaacagtcttcaagatgagaacacttctcttcgagcagttcttcatcgggtggaggaggagaagaagtctaaggaggaggagcttttggccgaggtgacgaagctgaaagagaaggttaatgctctagagatagccgatcttgagctcttctttgacttttggaaggctaatccttaggtcaactttgactacttgggtgatgctgaggacatgtacctcgagttctgcacttcccaagtagcctatggtgaaactgaggcggctgcttctacctccggccaaactgctgatgtacctcccgttgaaacaacatatcctccaacttctactaccccagaagacccgaaccaagagcctgggactccagctgtttaaacacttctccttttaccttttaattttttatatatcttattcggccataaggccttttctaagacatcatgaccggctaagcagtgtttaaatttggaattattttttatttttcagacaacaggctaactgggcagcttttaatcccggtattacatgcttttgttatctttaatgaatttcattctctgtttataatcattgtgcaattgtgattgttttatttttaccaaatgctttgtagaggtataggtgcccccaagtgaccaagcacacgtacgactcttggtcacttgtcttttacaagtatattgtttatctattcagtactttgggtttgaccacaccttttgtacgcactggatggtaaattagagacatactgataattttgacttaatttgaattttgaaataactat

SEQ ID NO: 140509 - DNA, 505 bp, Cannabis sativa
tttatagtagagattaggaggaaaatatcaaaattttcaaggttttagaaatgactatggattttatgttaaatttatcgttaatatgaactttattcaagtatattgttgtttattttcttgtatatacattcagttgtgtgttttgtagatttgttagtaagaattatatttgtattttttgggtttttcttgattttttttcttcataaaattcgattcattcgatatgtgttcgatgcttactggattattagtatttttagaggttaggaatactattttgatagtgttcgatagttgctcgatatagattagttatattatatgttcgattgttacatgatgcatatttgatacacggtaagttgtgtgttttgttcaagtgcttcataatacatgttcgatgatactctatatgttcgatgatgtgtgtgatttatacacactaaaaaatagttacttttagtgataactttttagtcacagcataaattttttgtga

SEQ ID NO: 140510 - DNA, 560 bp, Cannabis sativa
ctccacctccagtttcatgtcctgtacgtgcatatttgtcatcagattcggaaatcaaagatgattttcccattagactacataaaggtaaatgccaatgtacttttcctatttcttcttttgtttcttataatcatctgtcctcttcttcttgctcttttatttcttctcttgattctatcactattcctaaaactgttcgtgaagcaatgtctcatccccgttggcttgctgcaatgatagaagagatgaatgctttagttgcaaattgtacttgggtcttggttaatttaccttcaggaaaataggccatagggtgcaaatgagtgtttacggttaaattcaattaagatggaacaattgcttgcttaaaggaatgtcttgttcccaagggttatgctcaaacctatggagtggaatattgtgatacttttctcgtgttcctaaactcacatctgttctactgttcatttccatggcagctactcatcattggcctttgcatcaacttgatattaaaaatgattttcttcatagagatcttgaggaagaagtgtata

SEQ ID NO: 140511 - DNA, 701 bp, Cannabis sativa
agtaggcggcgtaggctccgaattcccaacttttttcaccttagtcacaaataatggcataaattttgtgttggacattgttgccctcatctctaagaacgttcttagttggcgttctttgttaataacctctggcgaaatcatttgtcccttcatgtacaaggaataaatatccaatttcaaatcatacgccaaaggaacaacctccaactcttcatataaaatctgacgcaattgttatatggttgtgtcagtttaaactgtcaacgtcaaacttccttcagctttataaacccaattaaaaccttcaacacaccaaacaccatcgtacgatataacaagaaacacaattgatcctataatttgaaacaacaaaaggttcgttagggaacaataccaaaaaaatataaaaaaccaaaaatagagaaatttaatataattgacaacctatcgacatctcatcaatatcccatcgataagaagtgtcaagattttgagcagtgagaaaaattgacaaagtgttgataatatatcggtataatgtcatgacattgaggcatttgagacactcaacaaaattgttgacatgtcgataaagattggcttcaagaacctatcaaaaatctatcgaatagcatttgagaaagatcatccctgaccttggaacatcttcttcgagaatctttcgagaacttatcgat

SEQ ID NO: 140512 - DNA, 755 bp, Cannabis sativa
ttcttcatgaaaatctgctgccactccctatggttgagccgaaatgtgtgtattcaaatgggcaggttgacccttatttataatgttgttgttggatgtgatgtgttgtgtttttgagctgagaaaacagttagaaaactattatttttttttttccttatcttgctgaaagttagttagagtcttgagatattgttatttacttctttataggtaaagagcttaaagatctaagcctatgaaaacataaccgactactccaagagttataatggtctgttgaggcttgtaaaagatcttattttatttttccttgtcacttgttaatgagacagttagtatgggaatttatccaaaaatttccacctaaatttccatactaacagtccaaaaaagtctttgcctttgctgtatttatttgttgatgtctttgagggtcattgcttgattaagtttccatttaacatcttgtgtcaactcccaacaggttcatacaatgcttgaacttgttgagagacaccaccttagttcccatatctgatgggttctcctcagtaggaactttttccacttgtatctcaccttgagtcaccttgtcctttataaaaggatacttaatctctatgtgtttagtccggtcatggaacacagggttcctacacaggtgtacacaactttgactatctaagtacactctaggaacctcttttttaagtaacttgatctctgtcaagagtcctttcatccatatggct

SEQ ID NO: 140513 - DNA, 814 bp, Cannabis sativa
actttgctagggctgaattagagagtcagggtaggactagctttattgccttttttgctaagtgtatactgttctcgcgaatgttctaagacttgacttattttattgtgcagcagccagacccatggatgaactcttggccactcttgctggagcccacagtcctgatgcttccccgcctcctgcttcttctctgttggtcactcccgggaggtcttcctccagtgccccttcaggcactattgtcttggtggacgaggaggaggttcttgaggaagttaaagaaggtgaagtggagttggccgccctcgagcgtaagcgatagggaaggatggtggaggaggagccttctaagcggcccagcagggtgggcactccggccccgagccatgactctgggattccttccgaggcggaggaatacactgtgcctcacggcaaaatgttgactccggtccaaggagatgaggagaggcagaatctctggatagccaaatacaattatgacctcgacgagtacagccgggggcatgctgaggaggagaccttgaagaggatcttacgggaggagcagcaaaacactctcaatgaggaggccttccggaatccctgggacctgaacatggacccactgacggactggttcaatcgtttccttgggcccaccttggctccctttgcctcgaagatggccagcgagtatgtgtcccatctgactcagttcccgcctaaacggtatgccacttgtgcctccttgaactccgtctaccaggttcaagatatcagcaaagccatggctgcggtaggtacttgc

SEQ ID NO: 140514 - DNA, 536 bp, Cannabis sativa
ttcggtttcctttcttcaacgaccagaactagttcttcttgctcatgttgtattcttcgggcatacctttcccgggctttgcccgaatctctagctatgtgcggacctccaataatgacttgcagatgtccatctactggtggtggtagtaaatctttgttgttatcacctttttgattttgatagaccttgacatatttttgcacatgcagattattctttcttatcaaaaattcaatatcccacttcagattgttgtattcgttggtgtcatggccataatccccatgaaaacggcaagacttggtcatgtctctcatgcttatgtcttttttcatgggtgtgggcttcttgtatggagctaatgattgagtagccatgtaaatagtttctaaatcttctgttaggacagagaaaggagtcaacttggtaggattatgttgggctttgtgccataaataaaactcaacttcaatgtaatctttatcatttaattatcaataaagagatagaattattttcatcacttatttagt

SEQ ID NO: 140515 - DNA, 579 bp, Cannabis sativa
  modified_base (416)..(419): a, c, t, g, unknown or other
tctagggatactgaattccttactacttgttaagtgcatccgaataaacagaagacatatctctaattctatccaaaataaaatagagataacacagttaagaattttcattagttgaataactttgcagtattttcgaaacgacaaagttatttatcttcactgatggagcttaaattattatagatgggtttttacatccttctagaataattaggtcactttcagagatcctccttgactatttcctaatgttccttgttcgattacatcttagatggctcccactcaacagtaggagtttggttaaatttgtgtacatttaacctcttactattggttttcggggacatcttgttgtgacatattatcttagtttgaaactgtaagttctttctagactaagtcatcaacannnnaatctagtattaacattaatgtaaaatacttccttaagattaagtaatcattagagataccataaaacaattcatcaggattaggaatttttcctaagtcattcgaatagaccatgcaaaaaattctcctatcttgtcctcaaaattctgataagttatt

SEQ ID NO: 140516 - DNA, 755 bp, Cannabis sativa
  modified_base (43)..(55): a, c, t, g, unknown or other
tctcaatagttcaggggccattttcaatgaccttaaaagttcnnnnnnnnnnnnntagtacatgtcaaagttcaggggcaaaaatcctaattagctaaaataaataaataaatatttattatctaaagttttaagtttgtctaatattaataaaattataatttttgtccaattattttatcaacacaaactctaataggaatcgtttggtacgccatgttgtattatatcatattgtattgtatttattttgggaaaaatgaactttcttattgggaaaaataataagcttccaacgcaacaaaataataaagaaatgaagcaaagtaattcgatttggtaaaattacgaaacccacaaggagagatatgtttcacttttaactcaaaattacacattcactatctcaatctctctctataaatctcaatacactatttgcttcttactcattttttcacattcacttctcttttcacaacttgctcttcttcttacacacaacagtactctcaaacacaaaacacatatttataggaaaaataaacttggataccaagacatattggggaccaagacattctaaaacttttttaagaagactcttcaaaacttggctaccaagactcattttctcacaattaataattatccaaaaataaattgcaacttagcaaatgtagataaataaattaatttgactcaaactccaacaatttccactttgacttaaattctctaaactcacaactcaa

SEQ ID NO: 140517 - DNA, 630 bp, Cannabis sativa
ataattctagtcttgaccacatttcttatacttttactaatacaagaagctgacaaacacatagcattaaacaagcaatcgttcctgtttctccaaatgtggtaaagagtggcttcaaagactgaattcaacacttgctcggcaaaatctggtttggttgggaaacatcgctgctgcaactcactgaaacttttcggccagcttaggatacctgcccagttttctacaccagcaattaccttcttagtgaagatgcaatctataaataagtgattatgggactccatggcatcctcacaaacagtacaaagagctgaagtgatgggcagaaatttgcttaaaagatcacgggtgagcaattgttcattcatgatttgccaaaaaatgaatctatgtttaggaacaatgaacctatgccaaatagaagtagcataagaggatttggcaggcccaataagatcaacatagaacttactcaccttgaatttattccccttagccgcctggtccaacatgacattattggtcatcattcttatcttcaaaatctttttaaaataccaactaaagtcatgattcgctgaaatagaccagaagtcctcatcttttaagtaaatggaattgatccac

SEQ ID NO: 140518 - DNA, 652 bp, Cannabis sativa
atatttttctattacgatttttttctacttagttttgacaatataattttctttttgtactattacattatttatttttcatgaaattttttttgaacaatatagaatttgttgttacaactttttttttttgaattagtgatagttaaaaaataattataaactataaaacaacataaaaaacaacaaaataaattcacatatatacaataaaaatattgtcttgaataaactaaaaatatacatgataaaaaatacacataaattaaacaataattgtacaaaaaaaatagaaaaccaattatagaacacccaaataacaacataaaaataactataaatcaacagaaaaataacaagatatcattcttgttaaaatatgcaaatcattcatattttaactctgaataaactataaaacatctaaaaaatatatactacttttattaatcatataaaagatagaaaaatataaaagaggtgctcttaatttttttttaagagagagaaagagtgttaaaaaccgagacataaaaatgtacactaatgatgtgtatttatatactaggaaaaagctatgtgccaagcacgtatacttagttttatgctaggtattttctactttatttacaaataatacaataaataattg

SEQ ID NO: 140519 - DNA, 740 bp, Cannabis sativa
ttaacatcattaaatagttttatcttttttttttttgtttttatttttctttcttttttcttttaaattaacatttttaaaaataacattttcttaaaaaagttcacacgttttgcttaaattaatatttttaaattaacatcattaaatagttttatctttcttttttttttttttggttttttctttttttcttctttttttttttaattaacattttaaaaaatgacattttctaaaaaaatctcacgttttgcttatccttttttaaaaaaaaaattaaaatttttaaaaatgatatattttatggctttttaatttttttttctatcacttagtagaatttatatatatcctaaattatttctcttaaattcgtaattcagtctactataacttctcttttcttctctcatgatggagaataaagattagagtttgtagaatgtgagaatttcttataagtctgtgatttttattgatgagagatgattattattttattcatattttccctctattgtttttttttaatcatttatcaattattaaatactcaatatatttaccatttatcctataggaaaatctaatgcaggtaattaacaataaaaaaaattagtttctaagttaagaagctattaaatttattcttaggtttttattaatcttttagacctctatttagtttatttagagatatttcttatattagtgttttgttatttttttatttattt

SEQ ID NO: 140520 - DNA, 919 bp, Cannabis sativa
  modified_base (697)..(699): a, c, t, g, unknown or other
ttgatcgtcggcttaaagatagcagaggccttgaaagtcaaaaatctcatttgtcatagtgattcgcagttgatcatgaaacacgtcctcagggaataccaggccaaaggcttgaaaatggtgaagtatttagagaaagtttggaagaacttggacagattcaattactttaaaatcaaacaaatttcgagagaacaaactccaacgtcgatgccttaacaaagctggcctcgcagaatgatctggatgaacttaattttgttccagtagaaatccttagctagccaagtacatctgaaactgaacacgtcgagatgatagatagctctcttacatggatgatgcctattatcagctatttactcgatgaacaacttccaaatgacaaaaacaagtcacgaaaactattgtatacagtgcctctctacacaatgatcgaaggaaaactatatagaagagggtattcaatgcccctactttggtgtgttcctcccgcagaagcaaacaaaatcattagagaaattcatgaaggcttttgttgggaccatggaggttggcaaagtctatctaaaaagatcattagacaaggatattcactgcccaacgattaataaggacacacatgagtttgtcaagaaatgtgataagtgttagaggttttcacatatacctcgtgtaccgccaacagaacttagannnatgacctcgccctacccatttgctatatgggggattgacgtaattggggaattacccactgggcgaggaggagctaagtatgtggtggtagcagtcgacttcttcactaaatggtcggaggccgagcccctcgtcttcataacctgcaagaaagtccttaacttagtcatcaagaacattatttgtaggtttggaattcccatgaagatagtatccgata

SEQ ID NO: 140521 - DNA, 1498 bp, Cannabis sativa
ataccaaattgtaataccctactattttaggcgtgttatcgtgattttatattaactgtccagctcgttgctaatcaacgagtttattgaaaactatgaataattaaaagaatttacttaattattttttaaacaaaagtaaatatcttttacataaccgagattccgtattaaaaagtatttacatttgagttaaaaaaatattctttacaaaagttgtcgcctagcgaccatttaaagtacagcctgctatcccaaagatcgtaagctccaagcctaaccgcccgacatgtacaattttcatctgctcgctctcacgattgctcaaccttagctttgcccttacctacacatgcaagtaatatctatgagtcgaaagactcagtaagaaaagcataatcataaacttaaacatatatccagactgcaaccaggcacctatacacctaatcataatctactaactgagttaggaacattctcgataaagtatgactaactgcgaatccagcctatactcagtattctagttgtactgatgtggtagcagttagattatactatctgatagcctagcatatatctattggcatctctatgcaactctatgtacacctcactgatgccccgatatgctaatccgatgactatagatttgccaaatatatatatatgttggtatctcagtgcaactctatgtacacctcactgataccctgatatgttattctgacagcaactaacatgtaccctaaacatgtatacataaatgtaaccattttactaatcttacctcatttctgaattcaagtgtgccgaccatcctgagtggaacaactgctcgacaatttatatgcccctaaattacattatttggaaaactgataagtgacatgctaaatcacttttcggggacttaaacttgaaactaaaagttttcctattgatgaataacatggaaataccctaaatattgcaaaaacgggaaaaactaggttccctaaaatggcccaaccggtagaccctaactgcaattttggttctgtggggtttcctggggaccaaccagtcgaccggttcagtgcaggaaaagctcaaaaattcactacaccctcaatttgacctcaaactttaccagaccttccagaactatttaatataccgtaatagacatatttcatgcaacaaaataactcaacacgctcagaatcaaaaaccaccattagagagcaaagtttgagttcttaaactcaaagctagctcatacatcaaaatatcccacaaacctagttcaattcaacctaattaaccttaatgcaacttcagaaaatataaacaaacaccaatcaacaacacataaccctacttgccaaaaatatgcataaaaacttaactagaacttatgaaaactaagaagaagatgctatgagtttaccttgatttgaacacactctaaacttgttggaaactctttgaattgagcaaaaaaaaaaaaaaa

SEQ ID NO: 140522 - DNA, 655 bp, Cannabis sativa
  modified_base (104)..(112): a, c, t, g, unknown or other
atatggcaagttacttttgataaataagatttattatgttagataaaaataattggttgaaattatttagggaaattattttatatactgtttttttaattttnnnnnnnnnatttacggtttgggtttttaaagtcgttgcagcgctagttgcaataggagattctatacgatttttatttgttacaatttagattgcagcgctagttgcaataaagatttctatgtagaattccgtaaaaatgcaaaataaactcttttaaagtgtaaaaataaaaagccccaattattaatcagatagatgtgtaaaattttgtatgcatacattattactcataaattcattaaaaacaaagatactttattgaacaatttttagttaaaatataaattttttgttactaaatatgtttagtcacagcaaaaaattatttatgattaaaatagtatttagatataaattgtcactattttaaatttagtcgcaataattattgtaaaaaaaatacattagtcacaaaaaattataatttttgtaattatacctttacacacgaacatttaaattaagaataatgtttataattaattacatttttttttttacttttattaataagttttattgtctgtaaaagtagaatttttatagtgg

SEQ ID NO: 140523 - DNA, 948 bp, Cannabis sativa
  modified_base (49)..(61): a, c, t, g, unknown or other
ttgggtacaatacatataaaaagatgtatgtttcaaataaatataaaannnnnnnnnnnnntgattaattgattaataaaaggggcatttttcaacttcccccttaaaattatgaggaacatagggccctatattggacctatcgggctatctttttcaacgttcaactccttcatcattaaactaccatcgggtcccatatcgagcctacatcggatctgcatcaggcgaggcgaaaatcatagattccactccaaaatatagatttgagcctaaaaacctcaaaaattacatattctccactaaaaatacaaacttaaccctaaatctgattgctttaaccctatatcatgaaaaaataaaataattacagttaaaaactcatgaaaaaaaattaggaattacctttgacgaagacattgtcggtgttgggtggtatggtcgcagtggtccgtgggtcgtgtggtagtgtggttgcaaggtcgaggtggtccgtgagttgtgtgggtggtctgattgtgtgcttcttcatgttcgtgtttacagagagcgagagagaagggagaaagagagagagagggttgttcaaatggaaggagtacaatggagttttaggaaaaaataatatatattcgaccaatatggaatagtttaggtttaggaaaacaattttggtccaataaatacattagtcaaatttaccaataaaataaagtgtacttataatttattggcatgtaaatataagccctctaaataaaactctatttttatattaaattactaaattatcctcaaaaaatttaatcaaaatgataattttatttttcatatcaaaatttgatgtaaagaaattttctttttttctatatccacgaaaaaaaaaataacaagatggaatgaacttattttcttttcattcttacactttcatatatatatatatat

SEQ ID NO: 140524 - DNA, 951 bp, Cannabis sativa
ttaattaaaactaattaattgagactacaaacaatattatcccaggcagtgtggggacaatggccctatgtaatcaagctctcaataagtagatctaaattttaccaagtaaatttcctaacttattaattcctcctgacttcactatagatccgaaattgcactcctaattacatagaacactctatatgcaaaaaatagatgcgctttgaataacccattgtttcaatctaaatagtcagagatcctctatagatgatctatatcgagtaaggacaaatttgtcgttctacccttcaatgtatttcatcattaaaatacttagctacttgtaaatgatatttcaataaactaatataattactaaaatgagcggttaatcatttattgcgttaagccaagctcaaaggaaattatcatttcacttttaatagttatagaagttatagattccatgtctatgattagcgttgtcactctattgtactaccatattggcaagatttaagtattgggaagatccactttgtcaactttaacgaacaagtcaaagaacatgaataatatatttaagccataacctaaccatctgaggattaagctctattgagctaaggtctactaagtgatattaacttagaacgatatagcggtaagtttattatatctcatctaatgtgaatatcggtccgatctgattaatactccatacattcgatacaagcattgtttgccaatgtcctggaaaggacatactacttatctaaggtgtaagtaaactttatcgctgattatcatgtaagtgtaaatctagtgtactgacaaatcactagattaaaacttcaaaacatataatcagattattttccactatgtagacaatattataataatgaataactatatgttctaaatttaatagaatttatacattaaacatataatcatgaa

SEQ ID NO: 140525 - DNA, 554 bp, Cannabis sativa
gaaaaagaaaatataaaaggtaaacaaaataccagcactcaagcatcccaaatccatccaaatgccgtcctcttgtgcgattttcttgactgtacagaaacatcatccagtcctcttgtgcgattgcaacatcatcgtcatcctcttgtgcgattgcaaccccaacactcaagcttcccagatccatcaagatgccccgatctcaaccttgttgtcctcttgtgcgattgctctgtccggcttcgagcagagagaaatcgagaaacagagggactaagagagtggatccagaaagagagggattgagagagtggagagaactcaagcgagatcgagagggagaacaagcttcggtgggaatctcgtccatcggttgtggtagaatgcctcaccggggtcgggcggaggtgcgccggagatgatacctgtgagaagagagaggaggaggtgataggttaggttgaagatgagaaaggaagaagacggatagagagagagagagtaaaaggaaaaaaaatatttattttcttattttttataatttaaaattaatt

SEQ ID NO: 140526 - DNA, 609 bp, Cannabis sativa
tcatcaagggaaattcaaagatcaattgcttccgcaccaagaactcatcaagaattcatcaaggaattctacaagaacacagattgaaggaggatgtcgatgggtaggtttgaactagaaaagttcgatggatcaactgatttcgcacaatggcgagagagtttgaacggtatacttgtgtgccaaaaggtggcaaaggtacttggagatgaaaaattgctggctgagaagaagcagaggaaattgtagagatggaggagatggcatactacaccatcatcatgtacctgtccaatggagttagaagaaagctaattcaagaaaatggcaccatcaatattgagcaagattaatcttcttgaaagattatacgggtatagaatgaacttttctctatccttagatgataatattgataaatttaatgaaataattattggtttagctaacattaatcgtaaggtagatgaagaaagtcgagcaatcatattgctcaaatcattaccaatgtcatatcaagaagttaaagcaacaatcaaatatggaagggatgtgatcttgttagtgttggaaattattttaccaggatcttaaatttactcacaagta

SEQ ID NO: 140527 - DNA, 688 bp, Cannabis sativa
acacatatttataaaaaaaaatttaaaaattatatatacaattaaaattttaatgtaaagaaaatagtaatttaaaaatttaatacatataaaacacatatatttcaaaactttataaatcaaatggatattccattcttatatataatttttttttttgcataaaatttaaatataattaaacatttttttttatatataattttttcttcctttgaatttattattttatttattttaatttgttgttagaaacataaaataacaataaatatttattttattttgttgctaattatgtgaaaaaaaaatgtattttttcataaatattaaataatttaatattaaaaagtaaccaatctaaaataactgatccaatctgcactttgcggattggattggattggatctaaaatatgaaatccacactaagtggggatcggatgcactatgagcaaaatagtgcggattggattggatgaacacccttagttattgtcactgaaaaagttaccagaaaagtcaccatcactggaaaagtcaccagaaatagatgtctcagatataaatataaatagatttggttctataacataatgaataaaaacaaataattcaaactagttataattaaaagggtaaatagcggcataagtacccaaaattttaagtttgtaaacggcataaa

SEQ ID NO: 140528 - DNA, 555 bp, Cannabis sativa
tagctaagggcctataaatagagaactttagctcacttcttcatttcactagaagccaaatagctatccatcatactctctcttgcctcccttctatttatttttctatactaaatcttttatagctaatcacttgttttctcaaccatacacaccatcataattactataagctctaaacatcgacatcctctcttaaccatcaccatcatccttccataaatatatatatatatatacatcttcttcatcattttgatatcaccatcatcattttcacattcaagatttcttgctctgctagtttttctttggaaactaaggtaatttttatacttttagatttttagattcaaagttaagatttcatatatatatatataaatattatacccctataatattttctaattaataagtgtaaaatttaggtttgacgtaagaaaattattatttttcaaggattactcttattgcaatcaaggctaggactccacattcaatgtaaggaaattaagtagaaaaatataagttttttgtatgtaataacattca

SEQ ID NO: 140529 - DNA, 1648 bp, Cannabis sativa
tatgggggcttttttattattttggtttataattatcaaattaaaaaaaatatatatttaattttttaaaatgcaatatttttgttagtgggggccattgataagagtaggtctgtctctgtttgtattaaaattattaaaaatttgaattgtataaaaattaatcttttatgaataaatttttaaagcttatgtacttaaggagaatagtggtcaccttaaaggtggacactatatttggctagcatgattcgcttggaattaaaagtgtgagaataacaattcgtttaatcttcatacaagactaaagcatgaattttgaaggatgagacctaaatttcctttagtgttttacttattgatggaaacctatcttaacactagtaaaaattaagtcttaagttcaacaggttataacaagtcaataaaatgaatgtgatactcaattgtcccatctatagataagtacatgtagtgaagattagaggtttaaaattgaaaggtttttaaatagagtcttatgcttaagaaaactcacttaaccttaaagaagtgtctaaagagttgtgagatactaaaactctacctatatggactttgagaattgagagttattctctaaaaagtcggatttgtgcacatgaccattaacgatgtaaaagcaatccataaggttcttgagtgaacataacaaaagtgtgtgtgttatcaccgatttgttattaatgaatagtggtttaatgctacggtaaccaaaattttgataaactttgttgtacttatactaaggtaaaactcaagtcgaaatatattttacactatacataaatgtaataacttcaattagagtggagttattcaatcaagatggggatattatattactctataacatgatatatatttgattgattaaataaaatattgtgttacaaaattatttgctacaaatgagatattatttaatttagtagaggaatactatattattttataatttagattaaataattaagttataaattaattcagcatggcaaattattaattttttcaaattataacatacatcatgaagttataaaatgtgtgtagaatgatcacaaaataggagttgcaaatcctttaatttgatgatcacttgaatatggaactctcacctcttttcactcttaaattagtaaaagatgttactaattgtttatgaatgtgaatgaatgatagctattgaaaatacagttgttggagaattgatttattcatttatagggtgtataaatagttcaaaattaagtgggagtgatttggaacaatttggagaagaattgaccaaagctaaaaaaaatagtaactagtaactagttactattttttttttttttcagcacacaaatgtatacatttttgacagtttgggagtctttctaatagcctaaaactcaactaaaccatccaattaataccataaatgctcaatttatgattggtaacatccaagattttatggtggccatttatgttcatatgagagtgaaaactctatcgagacatatattgttcacttgtaagagatgtagttgaaatcatttgttgtggttagaattattatattattttataatataataagtgtagattaaaatgtggt

SEQ ID NO: 140530 - DNA, 1015 bp, Cannabis sativa
ttcagtagtacttaatccaattccttgtggttcgacctcacttgcgtgagatactacttgattacgtatacttgcgtaataaacataaaaattcgtaacaaggtccccctgaaccagaattcccgtttagtgcaggaaagattcaaaaattcatatctcacttaaaacaaccccaaatcataccaaacattctagacctgttccatatatctcaatgaacatattcaaggcaataaaacacaactacatgcactgaaacaaaacttgccattaaagatccaagcttgagttctaaaactcaaagcttgcttaaacctaataacagcccacaattcaagcttaattcaacataatctagcataatcaaacctctgaaaacaatactaaataactacagcaaacacagcagcaaaaatactaattcatgcaaaatttcaatcttaaaactcaaagaactaaagaggaagttgcaaagaggtttaccttggcttggattaaacttagagctgctggaaacttgcaagacttgaagaacaaaatcaaaccctagctgtaactagggatttctaaaaagagagagaattgagagtgaaatgtgatttttcctttgctttgctttttctataaaaatgagataaacacaccatatttgatcaattaaaccaacttaaaatcaaattaattaacctaactaaagtcacaaaaagaaaaactaaagattggcaaaatgaccattttccccttccatactattagccactaaaggtcagtaagggtattttgggaaattctaaaatccagacatatcctggcattcccaatgtctaactaaactgccccgctatacttaaaatactaggatgtgattctaatagccaaacttcgggttcgaatgttgtcgggcactgaaaaggcaaaatcatgaaatttttatatgtgacaccaaaatgcgttatgaattcaaataaaccatcataaattaataatttagaattaataaataatttccataatt

SEQ ID NO: 140531 - DNA, 998 bp, Cannabis sativa
caattagagcagttgttggactgcccaaatctcctcattttagttgcaccaggtggaggttcatccacttctctttttctagatttcttgggcctaccaggtaaaacagtttctggtggtgggaggactggatttttgcctttatcaggccagtgttcaggactaggcataggtgcaattgcccctgcataagtgcctatgaaggcttccttcttgtaaacatgcagcaacaaaatcataaacctgaagccttgaataccatatgcatgctattgcatgaccacatgggatacctgtgaggtcaaatgatctgcaagagcatgtctttttctccaaattagttgctaccacctcaccagaaggggctgtgacctggaataatccaccaacagacttggtgcattggcatttcagtgccaatttcttgttcttctctaggatgtcaaagatccttttccccactggattgttccacttactcacactttctctttgtttttgcattctatccatcaaccaatatcgaacatactctaacaatgtgatgattggcttgtctctaccatctaagattgctgaattgaaactctcacacaaattattcaacaacatgtcacactgaacaatgtcctgaagtgggatttggtccactctgttggtgattttttggatagccaatcaaaagctttttcattagtcccttttaaaacatccaactttctcttgaattcctcaacagtagttgccctagcacatgcccatagttgttgcttcaacaataatcctggaaactccttcttaaagttggcataaagatgcctaacacaaaatcgaacctcagatccttcatacactgtccccacagccctttccaatcccttttgtctatctgaaatgaaggtgagttctgcagtgttctccatgtttaagtcctctttcagtagttcagcaaaccatgtccaactgtcagtgttttccttttcagttacagcaaaagc

SEQ ID NO: 140532 - DNA, 557 bp, Cannabis sativa
  modified_base (26)..(28): a, c, t, g, unknown or other
  modified_base (164)..(174): a, c, t, g, unknown or other
tgttatagaaccaattctattttaannntaactggtttgagttattttatgtcatttatatttatttattatgttacagaaccgggttatatttaaataataaccaatttgagttattattttttattcatataaccggttatatttttagttatatatgagannnnnnnnnnngtgacttttccagcgacgttgactttttcgttgacgttgactttccggcatgttgacttttccggcaatttttccagtgccggtgacttttccggcaaaacttattgttgttttacaaatatgagatttctactttttttttacaaaaatatggcataaaaaaataatataaatgtaaaaaaacaaaaaaaaaacccataaccacttagttttatttatttatgccataaaaaagtaaactcttgaaattttcccttattttgggtaatttttactatatatatatggaacacttcttaatgggtattatccatgaattgttactaagcaaatttaactataaatattaattttaaaaatatcaaaccatcgaattttgatct

SEQ ID NO: 140533 - DNA, 552 bp, Cannabis sativa
gctgggtctgaatttgccaaagcatttggagtcctctgtttgcgtaaacttcaaactcttctttccctggacttggattttctcaatctttagagcccaaaagatatgctctcaaagagcttggagtgtcatttaatggtacgtttgctttgttattataattatattattctttttttttacccctctttcatatccatccgtttgcaattctccaagcttctttcgctgattttgcttctaaccgattactcaatgagtggcttgaatacttggagggtgacgttcataagttacaatcacaatgcaaggttgtgagtgagcaacgagacaacacccaacaggagaatacttgcctcaagcaagaaatcgagaaaacaaagtacgaagccgagaagaagaagaaggaagccaagaaggaaaaagaggaagccgataaggcgaaagaggaggtcgtgaacgcaaaagaggaagctgagaaggtgaaagaggaggccatgaaggaaaaagaggaagccgagaaggctaaagaggtggccgagaaggcaaaag

SEQ ID NO: 140534 - DNA, 1328 bp, Cannabis sativa
  modified_base (820)..(820): a, c, t, g, unknown or other
ggatttctccttcatcagtttctggttgtcttctttctggctgttcattcttattctcagggcgtgtctcattttccgcgggttgttcttctcgggccttttcctatctcctagtttgtgagccacaaggtctacctcgtggtcttctcactccaagttcaggttgattttgagagttcgtcccctgcgccgccctaatcgaggctgtctcacgttctaacttagcgttttgacgctgcgcctcttccaaacaacctctcaggcggcagctttccgtttcataagttctttctcccacagattgggcacctccacggttgagctcttcatccctcgtccagggattctgaccattcccacactgatttctcctcgagcaagttgtccgcgtactaggaccaacatcgggttgagttctccgaggacgtgtggtccgagcactagggccaccctcaggttgagccctcctggaacgggtggtccttctagagtgcggattggtagatcttctggagcccatgggctcttttccagaacgatggttagtttcctcatgtagggtgttaatattctctggattttcagccatgaaggaaaaggtttttcttttacaagaagggagggtttcttctgaggtttttcacagggcctctcaatgaaagcaccaaactattaacgtagatttttgtcaaccaaatttgagcctcacggtaataattccacacagaaaaaataaaagctatagaaaaataatatgaacaaagggttttttacgttgttttgcagttaaaattcttcatagtccacgagtcaatcttantcagatttctgagtatttttttaaggcctctttcatatgagtttttttcgtcccttttttgagattgtttgccactagttataattacatagtgggcagctaattacaaagttgaccagaatatggttaccaccattatccctaaaatcgtgggatctgattacatatcacgaaatgtaaatgcggtgtacgatttttaaaatcgtatagctgggattttctcgcttttactgggtcagaaataacgtgtattaaacacgtctttaattgctgaatctggagatatcacgaaaaaaacttgattgtagtgatcccaatagcgagctgggaccattcttctttctgaggtcgacaatgtatgtcttacgtcgatcgcgggtatacaaaaatcttctaacttgctagtgttatgagcctcgctcttgttagttggatgaaactatagaaagtttcctcatagcgagatggccatctcgcatacttgttcttcgagccgatccgactttta

SEQ ID NO: 140535 - DNA, 603 bp, Cannabis sativa
agttagtaatctactatgtgcgcgggcagtttattatctaccaggcttttgatttacgagcagttatcaattctacctcgcaataacagttataacatgtcttaagcaaacttgaatactcttttaatgatcttatcactttgtgcatttttgatttcttacatgaatagttatattatctatccatacactaggtttaagtacttttgtcaagacaccttgatgtctcatttaatactttcctatattgtgcgagccgttaatatttagcttcacacgcgagttatgagttatatctaatttataacttttgattttcctttctcgtcagacagaatttaagtcaaagagttatgatggtttgatccctttctcgtcagaaaggttttgatcaaaaacttcaaaaaaaaaacattagaaattttttaaagttgtgggtttgcactagatcatgtatttccagatgaattctggttaattatacacaaatatcccttaacaaaagaaatgatccactttattcataactgaagtttaaaatattacatcagcaatgcgagttacaatcattaattttactggtagtagggtcgcaaatgttcc

SEQ ID NO: 140536 - DNA, 591 bp, Cannabis sativa
taataagtttgtaaaaaaaatttgaataaataaattaataaataaacaaacataacaaacatgtaacagataattgaaaagttggttaagatatttatattttaaataaaatatttaaaatatatctcaactagaatttaaaatttaggttgttagaaaataattaaaatctaacaaatctcgtaaataatttaaattctaactgaaattcaaatatctaactaatttttaaatttttagtttatttaaaataattaaattcattaaatatcttataatatctaataagatagtataatataatatcttaatttaaaatttagatatttctaatcttataatttaataaattaaatataataaaataaacaatttgaaaaataagatatttgatggttaagatattatcaattacttaataattaataaaatatattttaagtttcaatgtcttttaatacgtattgtattaaaattatatgttcaataaatatttaacataaaacattatcaataatgattgtaataactatttaagaattttattattaaacatatttatgatacaaattattttggctaattaggatt

SEQ ID NO: 140537 - DNA, 1194 bp, Cannabis sativa
tggattttcgcttgtttaaaagagactgatgttttttatatgtcttttttaatttacgccaataatgtactttcaaagtctcatagttgtttcttccaccacaaaaattaattttttttttagctgttatgaattttatttttctttttgtattgtttatttgagatataagactaaagcataaatgccaacaaagtatacttgctcattaatctccaagggattattttttattattattttttaacagaagactacactttggtatctaaaaaaaaatctttattattttttttttaatatcatgcttctatttattttattattgcagataaataagagacataaggcaggaatttaaatcttctttcctctgctagtatgatgtgcttgcttttttattatttgtatcaagattttaaatttaaaattcagtgggtgctactttattattatttcttttttattcttttgtttttttgttttcaaaagaaggttgcatccttaaatacatataaatattacttttgaaataagatttttaaatacatataaatacaatgtcacctaggaacgaggcaaatttatccatatttttttttaagattgcaatatatatacatatatattgaatttcaattcccaagttcacattaatatacccacgttataatacatttacttaccaatgtaatttagattatataatttacattggtagatagcgattgctggcttagctacatgtatatggtttgagtttttagtttctttcttgatacatatgtatgacaatattattttttttttaaacaattggttttaattttggttatggcaatgtattgtgtgtatcgcgggcaattccttgaaagcttttagctacttcgtacttatcatttaaaatggattgatgatgtaggattatttagcaaaaaaaaatgttacaatgttatgagtagacaaatatgtatatggagattgaataataccttatgatgattttggtggcctgccatgatatttgtttgccccgtattgctcatactcttggcctttgcttcttttatatactctctttttttttagaggaaaatttgtgttgcttctcttgtactgtagtatgcataattttatatacaaatatatatatatatatatattttatgaattgtaatgtatatggttgtggat

SEQ ID NO: 140538 - DNA, 987 bp, Cannabis sativa
  modified_base (747)..(755): a, c, t, g, unknown or other
caacacccttatggtagttattctagcaacatgaccataagtatcaaaataatcaataccctcattttgcctaaaacctttagctactagcctagctttaagggtttgtatagagccatgagtgtgatatttcttcctaaatatccacttacacccaattactttacatccttgtggaagatccacaatatcataggtgtcatttgagagaattgagtccatctcatcatcaacggcttctctccaaaatgtcgtatctctagattgcatggcttctagaaaagtcttaggattatcttcaataagaagtattagagaaattttccttattacttcttctctagtcccttctagcatgtagaaagagattagttgagaatctattttatccttatttagacttttctcttttctcaccctttgacctctcctagggtcatgggttgttctacaactttagcattgttctcctcttgagatcctcttttagaattagaagcttaagaattattttcatataaaatattattaccttgaggtgtggaactttgagagttgtcctcatacagcttattatcaaaaaattctacttatctagattcaataacaatattggattccacatcaaatagcttatacaaaatactattgttggcataaccaagaaatccacattttatggcccttgaacccatggttctatttggtttggtcttcttacgataagcaaaacacccccacactttnnnnnnnnnaatatttggttttctttctctccaaaactcatatgcagacttgtcatttttcttcataggtattctattaagaatatgacatgcgattaaaagtgcctcctcccataagtttttattcaacttagagtacactatcatagaattaacctgttcaagaaatattctattcttcctttaggctacatcattttgttgtggtgtatgtggtgccgaactctcatgaattatatca

SEQ ID NO: 140539 - DNA, 590 bp, Cannabis sativa
tggatgatttgaagtaataaagttcctacttttgttcaaaaaaaaaagtaactaatttaagcatagaaattcaaatttcccttttattattcgccatcatatcagatcaaaatctaatgcttatttcttgaaaaaaaaaactcacaacatataataatcacatataatcataaactataattaattaatgctaatttcctctctaatccatattctaagtacacggtcattacacttttcatgtaagggggatggacaaaaaaacttttaggttctctctaagcctttttcttcttctaagaaaaacctagagggaaaaacacaatagtaggaattagggttcttcaaattgtgagacctatttgtaatacatcaagccttcttaggccaatacattgactcgtgggctaaagttcattgatacatgaaccacgtaaaaattttcatccattttatgttggttttatggtactaaatcaggtacacaacagaataattgtggctgattattattgtaccatatgtccaagatcaccatatgtacatatattaaactagaagtaaatagatgaaaaaaaatatttacctct

SEQ ID NO: 140540 - DNA, 1236 bp, Cannabis sativa
ttatcacaccccaaacttagagcattgctcgtcctcgagtaatgaaaaacaaaaagaactaaacaataaaaatagaaaatgacagcgacactaacatgcttgcagcagataaaatattcctctttcacacttggtttagcgacaaaaatgctctcagaattagatggaatggaagtgtaattggtggtaatgaatatgccttgacttgtgtgtttcaacagaattttgcatgctatctatggccttaatacttaataagattaattcaatcaataaagtgtgcaaatacttcccaccaacaccttgaatttctataacaactaccctcgatcctcaagtttaaaaagtttgcttccataagttgaactagtgcaatcctctccactaatgtagcttagctttacatcgtagattaaaaggactttcataggcttgtaatgtgaggcttaggctcaggtttggtgaaggatgacatttttaggctcatgacgtaattacctcaatttatcaaggactttttctttttctctcgagcactcacccaaaatttcattttcaacccacaatattcattcaatctagttcccactctcttgctatatgtatgtactatatatatgtgttttttttcttcaaatcaactagataaagagagagaaaaaacaacaacctttttctttaattaggggtggtcaccccaaacttagccttaaacttgcctctttttttttctctcttattttatttaatactatgattgtacatatatgtatatatatagttttttttttttgtattttcttttctgtttttttttttcatatctatatatatagcaagaggacttgaatattatgtgaatcaaaactcttaccaacccaaactcacatcgcatcattatctctaatgtgaacttgttttaccacattttgtaaagattatcctcgcttccctatccccaaatgatgtttggtttgtccttgataaattttagcgattaggttcgggttgtgaaggatgaaatttatgtgtgtgtgtgagtttattaactttgatgtgtgttaagaaaaaaaattaggcttttggctcaattagaggtgactattgacaattgaatattctcggattggcttgaatcaatcgtccaaaaatggcctaaataatttccaagttataaagctcgctaggatttcgcctcaaggattacactaaccaattctagatgcttaaactttc

SEQ ID NO: 140541 - DNA, 503 bp, Cannabis sativa
  modified_base (135)..(139): a, c, t, g, unknown or other
ctaaaggaaaagatgatataatgaaaataccaatttgtaagatgtttattttaatctatagacttttaaaacttgcatatgttcaccactattagaggaaaatctttatgatagtctgtataccttctcctctannnnnctgtttggaattgattaatgaattgaaacgagcaacaaataccaaggtctataatagaatcttttataaaaacaactgagaatgtaaatctcatttgttattaattcttatttcaaaatgaacttcttagcaatgaatttggttttatatctttataattcttcatgttgtctaatgagtatttattggtgaaaaaacttatgcttaatgaatgttctcaccccattaggcaactttaataaagatatacttaattgctctataggatattcatttattcattcatggcatattgtaccacaatttaaattttgtgcattcgatagtttaatttgtgttgcaaattaatattgtagttgaactc

SEQ ID NO: 140542 - DNA, 634 bp, Cannabis sativa
atttggatttataacaatgggtaatacacaatatttttggtaatagtgtgttctatgtaattaagtgttcaattctaaatctatagtagcacaaggaggaattaataagttacaaaatttactttataaatttcggatctacttattgtaagcttgattacataagatcatggtccccacactagttgagataatactgcttgtagactgagttaattggttttaattattcaattataattataaaattagactatgtcttatttatgaattttcactaatcaatgacttaattgtgaagaaaagagattttggggtttatttattgaatgagagactaagtaaggtctaataattaaataggtaaatgactattttatttgataattaattataattattaaataaattagttttgacatttataggattgaaattgtaaaatatggcattattaaaagaaaaaataaattatgaaataaaatgctaaaattgtaactagatggaatccaccaagtgtgggctggccacttagtgtatttttgcttattattttatattttttaatccatataattaaatcctaaaccctagaagaaataatactataagagctcgtttagaacgttgtatt

SEQ ID NO: 140543 - DNA, 896 bp, Cannabis sativa
  modified_base (27)..(43): a, c, t, g, unknown or other
attagcaatttaacgccgtagaatctnnnnnnnnnnnnnnnnntgtaagtgttttattcttagtaatgtctatctgaatagtggctactaagagtaggacttacaaggtatgaaaccatggtagaagtttataaaataagaatgaccttgactctcaactaaaatgaagcaacatctgattctcttttcgatcgaataaaaggttactagaatggtgttcattttagttgagctgactgctctattcaatgaatgatatctttgactctccccaatacaaagcactgtatcagtttgttgaaaaccttagaaattatttaggattgtttattttttgtattttcacttgtaattcctgcttgctaagtgcttaataatttctgaatgtgtatgattttgtattaaacctaacttgaattctatttaatgatatttgtagtacccaatatgactatgaagaaccctatggtgtcactgttgactgacaacaagctctctggagctaactttttcaaatggaaaaagaacattaaattgctctcataggtgaaaataccttgtttgtgttgactaaagagcctcccgagtagccaggtgagaatgcgacaaaggcagtcaaggaaaagtttgagcgttggcagaatgctaacaataaagctcgatactttatactttctagcatggtcgacaccttgaaaatagggtttgtcaatagtctcacagctgctgatatcatgaactagttgactgaactgttcgggatggcgtcaaatcaagctcggtttgaagtgactaaaaatttcatcaatgcacggatgtagcctgatcagaatgtgcgtgatcatctgctctagatggtaagttacttccaaaaagttgagaatcatggagctatt

SEQ ID NO: 140544 - DNA, 560 bp, Cannabis sativa
agaccgtattttctgtaaataatattaaaaaaatcgtaaaaatatttaaaattccgtgaaactgtatttttataatttttttgttgtttttgaaaaataatccctttcttaagtccgacccaatacaaagagagcatgcaatgattttttttaggattataaatttctaacttatttactttattaatttctttcatactgtgtaaattttatactgtatactatgttacattttcacttttgttctaaggttgtttttaagttattttaccgttgtttttagttgttctgttttgtattccactattgttttataaaaacacagtattttggaaaaaatattcgtgtgacagtatttttgtaaaaattaacccaaattccatttttataagttctctttttgtttaagtaagttgctgactatttttttttttatctttctttctttctctcatctctatttttcttttctatttttttatctttgtatatatataaatatagggatataattttgtcccgtgatgtactttcaaggaatgtattctgtggtacattag

SEQ ID NO: 140545 - DNA, 600 bp, Cannabis sativa
acttagacctcatttgaatctattaatcattgaagacactaaaaaaaatgtgggatcttatttaaaaaaattatgtgaattttttaaaaaataaaatatttttaggtttttgggttagatatggaccctaagtatgggcctagcctgctttaacttaagtacagcctcaaaaagagatccatttcataacaacgaattagtatcagagcctaagaatagttagagtttttatgaagaaggttttcacgtttacagtgttgctgacttatattttaaaaaacctattgaacaaaatatgagtggtagtgtgtcttatacaagaaaaaatatgagttgagtcgtttagtgcaatatttataaatttatagggtaggtgtgatacaatctttaagttcagtaattcatattaaattttagtcgacttattcatttttcataaatagactaatctattttttttatacaagttcaaattcctactacatatttttactatacatttaataagcaaactactaatgttttttttttagttttaattacttttatataatttctcaataataattacggctttttttgtgttgttttttttttttt

SEQ ID NO: 140546 - DNA, 655 bp, Cannabis sativa
ttatgatttttaattatttttctttatttggtaagatatgaatttataaatataaataagttagattttaaacttcaaaaatcttaatttatttaaattatttattaggttctcaataattttagtttaattttttaagatacgtgtttataaataaaataaaatttgaaaatatttttttaaaaaatactttaagtttttttaagcaaaattatattttgtaattaatttgatatctttatcaattttttttaataattagcatttttgcttcttgaattttcggcactaccaggttttgtctcctaaaatatacagcttgttaaaaattctccttaaaatacaacatttacataattatgctcattctattaggtttcgcttattttaccattaaaaattcgtatttttatcccatgaactttaaccaatacaagattatccccttttattaaaaaaaataattttaaaaattataatattctattttttaaaagcaattataatattctaataattcagaaaaaaataataaaaattattaaaagatcagataaaaatattaattttatttaaaaaaacttaaattatttctaaaaaaatatttttaaattttattttatttataaacacgtatcttaaaaaatcaaactaa

SEQ ID NO: 140547 - DNA, 755 bp, Cannabis sativa
aaaatctaatttgtattgttgcaaatgtaagcatgaaacataaatcaagtttctactgaaatttggaataaataagacattgtctaaatccaaaattttgttcttaaatatgagtttggattttcctctagctctaaccgataccatttcaccattaccaacgttaagtttcaactctccaaattttaaataattcaagttttcaagaaattgcaatgaagaacatacatggttagtagatccaaaatcaagaatccagacgaatttgtcattctctaaaacacatgattcaaaactaaagcattggaatcagtgcttatgtttttggattgttcttatgctggttcaatctgttgtgaaagataatctgagtaagtggaatcactttctctatgcttttcaactgagcctgaagtagtcggattgttggaggaattattctcaatatcttcagctttccttttggccttatctgcattactggagaaggatctccatgcaagtgaaaatgtccgttcataatcacgcaattcagcgtctagcttgtctatgtcagatgagttccaattgttaatcacgaattggttaaactcaggtgataaggtgttgagaattaaatgaaccttctactctctagataaaacaattcccagcatagcttgtttttggaatttcatgttcatcatgagcaagtgtgaagtgatactctgatcaggagtcatcttcacacattgaagttcattcctaaaggcata

SEQ ID NO: 140548 - DNA, 744 bp, Cannabis sativa
taaggggtattttgggtagaatttaaaaatagtggaattgttttgtacaaattagtaaggggtataaaatttgatatgtgttgtattattaaggtcaaaaaatgaaattttccttttgttaatatgtaaaaatataatatcaatatttagaaatttttacactaaatacctaaattgacactttttttacatttataccgatgttcgataatttttacatttatataaggaaaattttcatatatatacgtaatttacaatttattaacgtaaatgacgttaattaatctaatgcactcctaataacgtgacacgtcatcaccacctaccgtaaatccaaaaataaacccagtctgtaatcttcatcaaacgcgctgtaatcatccgaaattcaagggatttaatttcttaaacagcgtgtgatctataatcaaaaaaggaaacctataaatctataattcaaaatttgagaattcaaatcaaaacttgaaaaaaaaaaaaccattaatgaacacaaaaaaagtttcgttcgacaaccgatcgaacatcctaaaaacaattttcgattctgaaaactgcaataacgatttgcaaaatcgcttccctgcgattatacaaatcaatattacagctgcaaaacttctctccagaaaaaatctccattaaagaacaaaaaaaagcttcagatttcaaacacaatgtgtgcctataaaataataaactaattagtctatttttttaggt

SEQ ID NO: 140549 - DNA, 565 bp, Cannabis sativa
tacgtttatgcccaataatttcatatcaaattttactcgtgttggtccgtatttcttaaacatgtaaatttattttcatatcttacttaaattcgtattttatttttcatatatatatattacaattagtattttatttgtatattttaaaattttaattatatttatataattttttagtaataatttacaaataatcatatcaaaaaattattaaaatttaaatttaaatatttataaatactcaaatatgattataaattttataatcatgtattaaaaaaaattgaatttaaatatttgattataaatactcaaatttttatatcacaccctataaataaattaatttataattttaattttttgtatttttaattttaattataaagttataatatttagtattatatttaagttttattattttaacttatttataattgataaattaatatcttattattaatgatattaaattataaggttttataatatgtcgtgtcgtatttttcagacttgtcgtgtgtcgtattttttgggctagtctattcatgcttacgtg

SEQ ID NO: 140550 - DNA, 556 bp, Cannabis sativa
tgggaggattatatcctggagtactgcagaggtgttcatcaggtattgttttagtaagattttaaatgttgaactatgattataagtatattatggtttgttgattgtttagcttttctgataattacaggcccaattctttccaagaaatgagttcatttacttcattttgcatcttaccgaccataggcactgggtgactattgaagttgacatagagctgtggaaaattaacgtgtacaactgtgattccaacatttgtcattggaacgccatggcacccatcttgaagacttgggaagaactgttgccctcactaattcatgcaaccagggattttccacataataaccagatcttgacatttactacgaaggagatcaacgtgcttccaaatatgcatgcgagtcgagccactcacaacttagctccgaaggcaacaataaggtacgtagcgatagaaaagtactatagtattaaaatattctttacattgtactaactttatattttatgttgcatttagtggtggttgtggcgtttattgcattgagta

SEQ ID NO: 140551 - DNA, 1703 bp, Cannabis sativa
tagtaaaatattaatttgtaaatttatgctctaataaaatattaaaaaattgagagaattaaagagaaaaaaaaaataactttaaagagatttcagaccgccacgtcaccgctccatacttctcctttatatatatctataaaaaaaatattttttctatattctgcaaagtggaaaaaaacttcacacatatatatagttatgaagatatatatatatataaataattgaataaatattagttgaacaatagaattagtatataaataattttaaatttatttttgtgtattctttttttaaaaaatatgtgattaaaaaataataaatctatatagaaaactctaaataataataaaaaaacatcatacaacttcttatatatataaaaaatgagacaattttttttttaaaatatatattattgtgaagaaaattagaaactaaatatttcttacacaaaatagagatctaaaacagaaagaagataataaatttatagaaaattcatcatataattttaaaacaactatcatcaccgtatcttatttgtattcaatactgtatttaaagttgatgttatcaccgtatctcacatgtaattatcattaatattctttctaataattttgttttgtacataaaataaattaaacaatgatcggtaagtatttacttttattatgtgagggaagagagggtgataaacataataagtttagaattttgatatttttggcgtatgagttaataatttattttaataaattatattagttaatattaactatatctctctctgaaaaaaaaaaatatatgtagattaatttttttaatacatatatatttattagttattatatacaaatatatagttattttttttaaaatttttaattgattagtgatctctaattaaataaaacagaataaaaaattaaaaaaaatgagaaaattaaggagagaatttaaagtataatacaaaaaaattaaaaaaatgagagaattaaagagagaatagatatttagaaattttattttttaattattaattagttatcataaatttaaacattataaatagatagtttgactttgctttgttagttattatgtatgattatatattttttaattattaattataaaatagatagtttatttttttcttaaattatttattagcattttttttttaatttttacacttcaaaatacttttttttttttacattttaacgaaactctagactgaaacccctatagcaactaatggagcaacctaaatcgcaaccaaaatccatatagcaacccacatgaaaaccaccacaacaacccaaaccgcaaatataacaaaaaagttaaaaaataatatatgaggtatttcccctattattattaaggtattatatatattttaaaaatataaaacttagaagatatatacttatgtatatctgaaaaaaaaaaatgttctgtcctatgttaatacaattttttttagttatatatttttgtttttattattattaatattattattagcttaattagaattttttttttaaaaaaaaggtaataaaaaaaattagagaattaaaaaaagaatagatagaggtattgaagcatggtatataattaagtgaggatgaacaaaaatcaatgtatatatatgttgaccgagattttcggcaactaataaa

SEQ ID NO: 140552 - DNA, 1298 bp, Cannabis sativa
tgccacactctcagaagccgccaattaatggaaattcaagttgacatgaagagagaaagaccagtcgattctatgagtgacttcctcgatcgcgcaaattgttttaaaaagctcgaagaggccattcagcgagcagaagtcaagcttaagccaggccagtcacaagttccctctgctggaacatctgttcagttcccccagtacccaagaaattcaagctcgggcggtaaaaggtctaacaacaacaacaagcaaggaaatgggaaaaagggaaagttcactggcaaagccgacaggcccctaaggaaaatccttccaaattcatcgctttctctctcttgactgaggatttggagaccatctacatggtcactcagtcagtagctctgtacaagaaaccttctcccatgaaaaaggacacaagtaagagggacatgtccaagttttgacatttttatggagattatggccatgacaccaacgaatgcaacaatttgaagtgagaaattaaatttttgattaaaaagaataacccacacctgcgaaaatatgttaagaccgatcaaaatcagagggccgctcagacagaaaataatcaagatttactgccaccaccggtggatgggcatttacaagtcattattagaggctcgcacatagctagagtttcaggcaaagcctgggaaaggtatgccggaaccttatagcacgagcaaaaagaactggtcctgaccgtcgaagaaaggaagccaaaattaccatgggtaggggaacccaccataacgttcaatgaagaggattctgtcaaagttcatttcccgcacaatgatccctttgtcgtggaagtacagatagcaaacaaaacggcctgaactatgatagataatggagcctctgcaaatatcttgttcaaaataccatatgaaaaaatagggctccaactcaaagatttaaccccctttcttcagcttgtatatagtttctccggccagactgtcgcacctctagggaaaatttgcctaccgctcactgttggacaagctccgaagagcataaccgtaatggcacaatttttgatattggatgttccatcagccttcaatgtcatgttgggccgaacagccttatatgaccttaaagctgtcacatcaatatttcattcgtgccttaagtttccaacgaagaatggggtcggatgcctgagaggaaattaacaagttacacagaaatgttacaaccttgccttgaacaaggctaaaaaggaagtatcctttagtcagagtttgggaaaggtaaaa

SEQ ID NO: 140553 - DNA, 856 bp, Cannabis sativa
  modified_base (52)..(54): a, c, t, g, unknown or other
tactactacacttgatttgtatatcaaggggttgagattatttgaaatgcannntttgttttatattagtgcaagagggagtttgttgggttttatgccctaaataaaaagcatttcaaagaagccttcacggaaataggcctcacggaccgggatctttcaccatgcggttcccagctcacagtgaccaatggaacaacacttatcccaatgggaaaagtgaggctcccagtcaccttgtgcccagaaacaccccaaagcacacgtttgtggtggttgactgcccaacagcttacaatgcaatcctcggtcggccggcccttgtggatttcggtgtagtcacatcaattaggcacttgtgtctaaaattccctactcaggaggctaggataggaaccgtaagaggaaaccagggacaggccagacagtgttacaacgttgctgcccacctacctgttctaatggtccgtgaagttattgagccaagaatggcggaagaagatgagttggatccccgtgcgggatccaaaaaaattatagaacccatggaggatgtcgaggaagtatcggtgtgtgacctcgacctcaccaaggtccttcggctaggaaaaagtctagagccggaggaaaaagaaaaaataataaagacgctaaaagctgccacggatgtttttgcgtggtgtcaagaggacatgaccggcataagcccccacgtcataacccacgtccttaacgccaacccgaacatgccaccggtctaacagaaaagacgccccctcgactcggtaaaggtagaagccctagagaaagaggtggaaaaattactaaccaatggcatgatccgagacgtgtatta

SEQ ID NO: 140554 - DNA, 525 bp, Cannabis sativa
taattcaaaaaagaatagagaaaaaaaaaatgaaagtatgaagttgtaacaacaattttcatgaaaaaataatatagtgtacaaaaagataaattatgttgtcaaaactaattaattcaaaaacatgttgaggaagattaagcttataaatggtcctttagtttatatcacaaaatactaatttaaaaataatagattaactcctatatttatgagaaaatattagtaacaacatcagggccactttatcaatataaaagaacaataatatccccacagttgcctagtcaccaaatagatagatttaataagtcaataaaatacaaaaataatatctagcatccaatccatcattcctcatttctaactaacacttagctaatttaagtcatccagactatcctttttattaacgcagatttttgttaactaaatttgagcctaatcatgataatctcgcacagaaaaaataaaagttataaaataaaatgtatgaacacacaaggttttttttacgtggttttg

SEQ ID NO: 140555 - DNA, 608 bp, Cannabis sativa
cttcaatctcttcaaataactcgtcgtagtattgaaaagagtcagagttgttttgaacatcttcagttgttggtcgaatgaaatcttcaacaatggaaattatctcgtcgattttatcatctaaaattggctcaacaacttccgtccgtgcaacaacttctgtttcggactccccgtggtgaatccacttttgataaccatgatcaaaactccaatcaaatatatgcgcttccacaatgtgtaaagtctcaaatcgagtatttaagcatctaacacaaggatatctaatttttccataagaatttttataatctgaagccatcgccaaaaaaacttgtagacactcccaattatctttaccactttttctccaagaagtccaagacttatcaatcgccatctagaattttaaaattttatgagttttagcaacgtgaataaactaattaaaatcttatgctattttatgattttagcaacgtgaataaagtaattaaaatcttatgctattttatgaaattttatttgtaaattaaattaattatttatttttattagctagggaaaatttatcactttagtatattgcaaacaaagtgtacaccaac

SEQ ID NO: 140556 - DNA, 625 bp, Cannabis sativa
  modified_base (228)..(254): a, c, t, g, unknown or other
  modified_base (327)..(330): a, c, t, g, unknown or other
agaaattgttatatttgcattctgtatttcaataacatttctatatattaaaatatattttatatcataattttttaatttttattttcttttaaatataaagaaaaagttaatattacttacgcaattccaacatcgaatattgccccatagtttttcccatagtaagtaccaaattggtttataaatgttattttcatgtgtctgtaaataataataataataatnnnnnnnnnnnnnnnnnnnnnnnnnnnaataataataataattaatttctcttttgatttgtaccattaataaattcaacaaatttatttatttatttannnntttttttaaaaaaaaaaacctttatttctgtgtttgaaggtatatatttgaagaacaaattgccattattgaaaaatctgtaaatttatgaagaaaagaaataattaggttaagaaaaaaaaaaagaaatgagatgtaaatggaataaatgaacatatgcatcatacttactctttttttcttctttctgttgtatatgcaaaagggcttttttcataaatgtacaacaaaaacaaaataattacaaaaaatgtgcaaaaaaaaaattattttaaaaatttatacattttgaaaa

SEQ ID NO: 140557 - DNA, 977 bp, Cannabis sativa
ctagcgctgcaaccacattagaaacccaaaccgtaaatttttagaaacccaaaccgcaaatttaaaaaaacccaaaccgcaaatttaaaaaaaaaaaaccgcaaatttaaaaaaaaaaaaaaagtttaaaaaatagtatatggggtaattttccaatttttaattacaaatatacacttataaagttttaaaattatataaatacactttgctcactaaaaaataaaaaataaaacaactaaaaataacgagaaatcaaactcacgacaattataaatcaactataaataaactataaaacaacttaaaacaatcagaaaaaaaaatctcataataagtaaaatacaactataaataaattatataaaagaacaatttattattttgactgcagagaaatttttttaaataagaaaatttcaataaataaaaataaattttttctatgttaatgtatttttgtaatttttataaatttttgatctattatataaattaattttataataattatttgatcaaagctcaaatgtaaggacgtcaagctagcgaatttcaattattactttcattattagaataaatactcgtttgcaatcttgtattttctcaaaatacatatacacgactttaactattacaaaaatggttttttatgatgtttttaaatagtcgtttaaaatattcctgtcggtttctataaccgtcgcctatacgaccatcgtaaaatgggaaaaataggcgacggttataaactgtcgctaatgttgacttcctgacagtttaaaactgtcgcctataccatgttattggcgacggttttaaaccgttgggaatgtaaaaacaaaaagaaaaaaaatacaaaattttttgccgttaatggcaaaaaaatttgtattttctcccatttttttcccgcattagttttataattttacttaaattaaaataatacaactaattaattttattacaat

SEQ ID NO: 140558 - DNA, 608 bp, Cannabis sativa
  modified_base (45)..(45): a, c, t, g, unknown or other
ttaataattatttttgtattgggatatgtgtatatattaatattntatatttgaaatgaataaaatataataatttttttttttaaaaagtagagtttctgtaatgtagtttaaaaaaaaatttaacgtatggtgtaatataaaagtatgcagtaaaataaggaaaatagattattggactattggtgatgtattttaatggataggggagagaagttgttaggagggctcttaaagaaactgatgaaagccttttttatcacatttagcaaaaaatttagataatttctgttataataaagagattgttatgagtgctctgtgtataataactctagctactctctttatgctacatgtttgtaagagtggcaagatttttttttttattattttatatgtttatagtagttattttatcatgctttctcgtagggatggatagaatctaatacaatctaattgaactgaactgaagtaatctaatctaacccaattacaaaaaattagatatcaaattataattgaattagattagatgttaaaaatgttggaatttattttaccaggatcttagatctacccacaagtatgttgtttaaacatcc

SEQ ID NO: 140559 - DNA, 621 bp, Cannabis sativa
ttaataaaaataatagaataaaaataaaaatagtaatgggataaaaaaagaataggaataagattaattttgaacaaaaatactattatgtttaaaatatgattaataaattaaattaaatatattcaacttatatatattttttaaaaaatagaaaattgatatatatttaaaaaaaaaattgatatatatatatattataaaatatcttatatataaatttttatttattgaatttaaaataatatattgcttctgctggaatattgcagcagttgctgctgctggtgtacatgaaagtgagtttttcacttggttctgtgatattctgcagcagggtagcaagcaggtagcagaggaaactgctatgatcttgtggcggatttggttggcgcggaatgacatattgtggaataagaagtcgactacagttttagaagttgtccgttcggctaggactaatcttgacacatggaaaaatgctcaaacgagggtgtttactccattgttgaatgttaatttcagcagtggaagagagcattgggtgaaaccagttttaactaagttcaagatcaatgttgacggggctctttttgattctgaaaatcgatttggaattgg

SEQ ID NO: 140560 - DNA, 1403 bp, Cannabis sativa
  modified_base (1007)..(1007): a, c, t, g, unknown or other
tttttttttttttttcttttaactgcttcaaagttcttttaaactcggaattcagcggtgtgaatggtgtagcacttcgatttcttcgcataaactgaaccacaaagcaacaaacaaaataaaatctaatttaaagtaaaaacttttagtaataatattaccaataatttaagaatttttaatccccagcaacagtgcaaaaaaattgttacacattgttgttatagcaaagttttaatactaaaaaagttatcgaacccacagggattgattattaaattttactaactattatactttttaattttatattttaattagacaacacaaagtaaattataattaagaaacaaataataagataaataaaaaaataaatagacaaataacgtttttcaaatagaaagtaaaaacctgattgattttcctatttcaagctttgaatctaaatttgttgattatctcaatttatcctataatttgtagtttcaagaatcctaatgtaacctattaacctctctcgagcgatgatagatttaactaaaattaacaaacacgatatctctattcaatgttaatcttataagcactcataaagcaatatgattctctttaaatgaaactcatagaattagtgaaatctctaaatctcacacttttcctatgtcatgcaattctaagtccgattttagattacctctctcaagtgtaaacctcaaatctctatactaattaatggtgatcaagcattaagaagatgatagttagcacaaaattgcataaagaaataacaagaacaaatatgagaataatctaaaaacttaaattcataatctaaaatagttccatcaacactttagaatgagtgtttagtacataaatacaaacataataaccacaataatcatgttcataattaaataactaagcaaagaataaagaagaagaagaagaaaagaactctaatatgatagttgatgatgattgcttgaagtctcttctctctngctcttcaatgtgttttctaatctcaaaattacttgtttctctctctctagtcctcctcaatatgatttacatgcttctttatataggccaatagagatagatcaatcctgaaatactcatgtgctgaaattattttttttttccgtaaaaaatattttttttccaaccgtgcgctatagcgcttaccccccgcgctatagcgcacaacaccaaatttttctacttcgaccttgctcaataaatcatgcataacttttgtgtccgaacttcaaatgagataatttaacatgttttgaaaagttgggaacgatctctatcattttgggttgcataagctcttcgagaaaatgatgaaatcattgtcaaaagggatattggcggctaaaatacctgaa

SEQ ID NO: 140561 - DNA, 1013 bp, Cannabis sativa
taaaacaaattcattaaaagttaccattttcttatttattcattatttttaattttttataccaccttaaaaatacaataacaattattttttaaaaactttaatcaaagttttattcatttaattgcaatttttatttaaattaaaaaaaattaaattcttctaattaatctttttaatttttaatatttaaattctttattaatctattcaaaaactaaaaaaaatactaaactttttaaaattatataaatataaattaataatttaataaaaaccaatattattatttaaaaattcattttacatattacactataaactaatacacataaaacaaatttaccaacaaacttatcattctaaacttactaaacttactttttaaatttttactaaacttaccaacaaacttatttaatttaaataaaatctaacataaaacaaacaaatacacattattaaaaacatacatttcaatatgaaaacaaaaagtataatttaattactgaaattaattaaaaatactagaaaataacaatacaatatatatatatcatggtatagaatatatataaattttatacacattaatatatactatatattttatatatactatatattttatatctacatatatataaataaaaaaaaatataaatcttatatatatatttagaacatctatacattaaaatttctatatgcacaaataaaaaaaaataaatacctaaacatataaatcctaaaattatctatataaatatatacatttatacacagatatatatataaatttgtatccaaatatatatatttaaataaacacagatatatactaattattttatatttatattactatgttattacatacacaaattaatatatatatacacagatatttaaaaaaaatacccaaattaatttataaactctaatattatctatttatttaataattcatgcagaatatataatttatagatctctaaaaatatttgaaacct

SEQ ID NO: 140562 - DNA, 556 bp, Cannabis sativa
  modified_base (178)..(181): a, c, t, g, unknown or other
ccacgaggattgtagttaagtactttaaaattaaattcttacttctatttgactaaataaaattaagagagaaaattaaaataagaaaaataacgaaagtagggaagcaaataaataaaggaatttaacagtgaaaaaatgttaaggcttcgacttcaattgtatctattgattatgnnnnaatatgattatcttcctattaccaatttctatgcaatagcaggtttactaagataatttatagtcttctcacatatataaatctcaattacatgcaaataacatgtaacagacattaaacatagaaatcctataagctactctcgtcctatatcgaaattcaattctatttcactatagcataattgacactcacttctcagatctcacatcaaaatcatagacagttaattggtaatcaggcaattaaaagtaaataagtaccaatcaaatagaatacatagaaactgggggaaaataaattatatattaaaaccataaaataatgtcaacaatatccatctaaatcctgattaagtttttagctactcatgtt

SEQ ID NO: 140563 - DNA, 641 bp, Cannabis sativa
aaaacccttggagtgatgaaaatggttctatgctcccattaaagagtgcagatggccaacaaagtgagtgttctaaggactcgaaaacagaaatgggtttgcatcctcaagatcagtctggtccgcatgtcaaaacatctgcgcttactggagttggattgcaagagttgctggaacttatagatgagaggctgaaggatcaagataagaagttgaatgctcacaatgttgtggagaggagcatcttcaatcgaaaatggaggccccctcgagaagaggaagatggcatagctgttgaaaagtaaacacttcaatctggtccatttgttgttctttcctacatctaccttgggtcgctccatgactgaatacttgttacatactgaaacagctgaatgcagatcgatttctcttctctttggtagctcaaaaactttgttgtccagaagcagttttctggtatttctcaagggaactcttgcaactaatgaaattacacaagttttcctcaaatctggcatttttattgtgaagaatgccgtcttttagatatctatcataagcgttcttttttccccaactaataaagaacttgcgctttggcttgaatgactaagggcatgttgtgttttgcacttttt

SEQ ID NO: 140564 - DNA, 582 bp, Cannabis sativa
ctctctctctctctctccaaccactaagagaactctctaagaaataattttaaaaattatgaagctttaggattttctaataaagtgttcctttttatagaaaacttcatcttctcaatatgatgaacaacttagacttctttatatagtgtctaaaatatcatcctttgaaattctaactcataacctcttatggatgttatggactcattaatattgaatataaatacgagtaaaagaaatgtaactcatgcacacactaaacattaagaatttcaaaattaagatgtataacacatttttatatacttaattaatatatatgataatagtgtgtacatattatcatatatgttacatattatttattcattatacatatttaatctatatattatattattcaaaagtaataaaaaaaaattatgaacacatcaaggatcattatgtgaaaatttcaaggcgctttattaaatatataattatagggcaagactaccggtaggaaactttttttgaccattgattttaaatcatgtggttattatgatgtaaggtgtatactcttacgataggactgtt

SEQ ID NO: 140565 - DNA, 884 bp, Cannabis sativa
acgattgcacgaaaattataaacatagaatgaaattcattaaggataacaaaagcacgtaataccgggattaaaagctgctcggtcagcgtgttgtccgaaaaatgaaaaataattttaagttgaatgaccgcttggccggtcatgatgtcttagaaaagtccctgaggccgaataagatatatcaaataaaaagataaaaaagagaagtgtttaagccgctggagtctcaggttcttgcttcggttcttctgggccaaccggagcaggaggatctgttgtttgaacaggaggtgcatcagcggcctgactggaggttgaagcagctgcctcaattttgccaaaagccacttgggacgcgcagtactcaaggtccatgtccttagcatcgcccaagtagtcgaaattggcctgaggattagccttccaaaaatcaaagaagagctcaagtccggctgtctccaaggcattgaccttctcgctcaacctgtccacctcggccgaaagctccccctccttggcttcgttttcctccttcatctgatgaagaactgctccaagagaagtcctctcgtcgtgaagactgttcacctcagcagataaggtctcgatggtctcctaaaaacggtcagcagcctcgagatccttagccaccacagtgattttcttctgagtggcaaatagcttcttattagcttcaaccaattctaaccgaacaactctgacttctgccctggcttcttcagcatccttcttggccaagtccgcctccgccttaaaggtgtcggatagagccattttcttggaagcaacagacttagcccgggagtaagtgtatgccaacttcagaccagcctgcacaaggaaaaaactttagcatttgag

SEQ ID NO: 140566 - DNA, 683 bp, Cannabis sativa
gacaccagagcatcctggacgtgtgagggctactaggtatgctagtacttgaaatgttgtttccttagttatacaaaaaaatcatagctaattttatttcatgatttgtaggttcctgaccaaagtatctaaactgtttggtaggaagaaaggggaagtttttgatgttgtagctcggcaacagaaggagattgataaattaaaagccgaaatccaatcccttaaacagaagaaaaatactgcccaacaagaggaagaaggagaggtggctgatcaggcatatgttccacaacaatatgctcgtgaggatgagggtcgaccacaaatttatactgaggagtttgtttcaatcaatcagccgcctgtcctgtaccatttcgatgaccagagggcccttaatcaacaagtatacctctgctctgacaatatcgacaatattgtggcccgagcgtatctgtacgagcatgagggtctaataaaatttcactataaagactacgatgattcacatgcacaggttctgattttggaaatgctgcaagaggatgctgaaatctcaatctcaattgaagggtatagatatgttaaggaagtagaaaacatgttccttccttggcctaaatacgtaattgcgacacccgaggtaacttttgttataaattaattattaatgattagtggag

SEQ ID NO: 140567 - DNA, 532 bp, Cannabis sativa
tcatatttaggatgttaaacaacaaacatggtagtaaatctagatcttgataaaacaatcctcaacactttagtattatggttggaagcgccccaagttgataatatctcaacatgggcgttgggtgcctagagcacctaatgcttcgatgctcaaaactaaaggtgcttcgaatctgattctattgcctccaatatgttcatgacatgtgtaattcatgtcccagtacaaagttagacccacttgtactaagacaaactcaaaaattgaaatcctagttggaatgtcaactcgggcgctgggtgaaaccctaggccctcaggttgacttctggggtgttgttcatgtatttttagcttccatgccttggtgatttcttcatggtacaaaatactgaaacatagtgagttggaaacaacctaacatgatccaaacacccattccagagttctcgaagtcaacttgggcacatggctagggacccctgttgtgaaaattatatacgcaagtatacgcagtcaaacaagtaata

SEQ ID NO: 140568 - DNA, 524 bp, Cannabis sativa
atatatataaataattttattttaagaacttaatttgtactatttaatattcttatatagttaaaataattttttacaactaaaatattttttcttaattttttgtttgttcaaaagttaaaattttattttttattttatttttaaaaagcgattgtcaatgtcatatatttatagaaattgatttttttattttagtatttttggtattttttttttgtaagtttagtttaaattatttaaatggtcaaatcggagataaaaatatgaatttttctttctttaccttacaaaggaaaattaaaaaaaatatttttatattttttatttcttttttaaattttatgagagcttcatatcaatgtatcaatatcaatatctatacatatatatataaatatttataaaagaaagcataaagagaatgatgtgataccttatatgagtttccttttattttttttgttttattttttatttattttttatatttttagtaatataagagctatttttaaaaactc

SEQ ID NO: 140569 - DNA, 770 bp, Cannabis sativa
  modified_base (44)..(50): a, c, t, g, unknown or other
  modified_base (488)..(492): a, c, t, g, unknown or other
ctttattgatgttgaataaaatagattacattgaaatggagttnnnnnnngggcataaaacctaacagaaagatggtgaattgaaaacgacttagagggatccaaacacccatttcggagtttctagagtcaacctgggcgcagggttagggaccctcacaagtcgactactatgattcgagactactcaacttcgggtcactagggtcaattttcaggaaaacatttttatataaaatattgcattaaatataatttaatataatattatatagtagaatacagtataatacattatactaaaccaactcaaaaaaataaaattattaatttataatgattttttaacacgttattgaagaaaataatcaaaaaagggtcattttcgacaaaaaaaaaacgagaaaactttaacaaaaaaaaaatgaaggaaattttatttacatcctaaaaatttctcaccatattttaataattttattttatannnnntttatatatttaattgtattaaatatacctattaaacaaaaataaattatattttaaatattatgaaaaaaaaattaaagtaaaaaattatagggaaaaaaacacagaaaaatacaaaaaagaaaaaaaaaattacaaaaatactatgggcattaaacatttatacagtttacatacaaatatttataaaaataccacatgcactaaaccttcagctgcacggagcgaacgatgaagatgaacatacatcgattgtttcaaatcaggaaaacaaccaa

SEQ ID NO: 140570 - DNA, 580 bp, Cannabis sativa
  modified_base (527)..(529): a, c, t, g, unknown or other
ttttttttttttttttcttgatttcttttaatttcttttacaagagaatgaaaaagactcacgaaaaatgttaaaagaggtctttgatgtaaaaatcattaactattcgctaaacgttatgatctcgtgataattttattacgggtagctaataataatacttgacaatatactttttggccaaaatctcataatctaacaaaagttacttcactcattaaagcttctcccttttggaacagatcttcctcctatggctacctctcaacctgtgtagaggatttgcctttttattaatttggttcgtggtattgtgtttgatcccttaataacaagtaaacaaatttgaaaaataaatataattggaaaaatgatatatacttttttttaaaaaaaaaaaaaattacttaattttgataatttttacaaaataattagtctaaaaattcgaccatgtctagactgtacgaggccgagggcatcagggacggagggactttagcccatatgtgggctaaagccctcannnaaatatatacatcaaattttttatatgtagatatatacatatattaattca

SEQ ID NO: 140571 - DNA, 561 bp, Cannabis sativa
  modified_base (500)..(504): a, c, t, g, unknown or other
cttaaaaatgctaaaaatttccacatcgttcaaaaatataatattttattttatctctcttccacatcatttttgacactcttacttctaaaaatactccaatgacatagcactcttcaaaaataatataattataatctcttgcattattatttaatatacatcttaatttttagtaacaataactttttaactttacatttttattaaaaagaaatgaatagcattgtatagtatctatgcaaatttctaaaataatatctatctctctttaatggtataacatctcaatattttatcacttaatatgttcatttcaacaaatattctctaaatttttattattggagatgctcttagcattgaaaattactaaaagatattattggtgtttaacactctcctcgatattatactgctattaatataattaagtatcgtccaatataactaaaataaataagagaaatgctaaagggcaccactggtgcctagcaccnnnnnacgtgtcaatatcgctattggtgtaattaagtatcgggtcccatatagtttaatata

SEQ ID NO: 140572 - DNA, 515 bp, Cannabis sativa
ctcatttttatcactaaaataagtataaataaataataataagagagaaaaataaaatgacaaagtgattttttactctctctaaaatttgatgcccttttcattgtatttagtttttttttatagtgcaaattttctcctcaaatatggtattttcgtgtaccatttagtaagataaatggcagaaaaagctgagaaaagtggaagacaaaatgtcccatttgcgtcaggcggagtggggggaaaaagtgggtttgacgtggtacttgcgtctgcagaagaagtccactcgcacatatgttgagctagtaatactaacatatgtatatatatggtccattctggtttggactttggagacttgggccacgtgaagcaaattatgggcattaggccatgttggtgatgttgatgattaaaggaaaattatagtaaatggtctaaaatcataggagtatgttagtttatgtcctcttttcaaaaaaaatatagcaaatggccctaaatcataagac

SEQ ID NO: 140573 - DNA, 1306 bp, Cannabis sativa
  modified_base (1153)..(1153): a, c, t, g, unknown or other
gctagggagataaaccttactcctacttgttgctctaacatggatcaaacacatgcttggtggaagatgtggtggaatctaaacttgcctccccgaatgaagctgtttggatggaaactttgtcgaaagtggctcccggcaaagtcaaatttatgtcatagaggtatgaaaatcgaccctacttgtaataattgtggcaggtttgaggagtccctatcccatgccctatggacttgtgagaaagtcaaaaaagtgtgggaacttatgccttgctacaagttaatcaaagaaagtagaggtcattccatgatggatttgctagtggaatttagacaaaagctagctagggaggagtttgaagacgtgatcaaagtactttgggccatatgggaaaatcggaataggcaatggaacaatcaaccttacatgaacggggctcggttgctggactgggttttcagcagctacccgagagatgagtatacctgtgaaagagggattatcactactgtgccctctgttgttcccaaagatcattggtcggcccctcctgttggcacttactgtgttcactgtgatgcagccatccaaccgaaccaagcaggggtggggctgggctatatttggcgtgattggtcgggcaacattgtctctactggcatgaaatttctccctgtttgctgccctgtgatagttgctgaagcaaaagctgttgtttccgctctgcaggataggccgatgaccatgtacaactcttatgagatcagatcggactgcaagcaattggtagatgatatctcagcaaatgatagctttcttggtactgctcagccgattgtaaatcaaattaagagacaccttggtttttcctcttgtacaaagttcattcatgtaaaaagagctcataatgtaggtgctcataacttagctaagagaagccttgaaaacaaattcacccattctttttacaattcttttccggattggttagctatagtttgtaaggctgacctttccaattctttgtaagtttgttggtgttgtttaaaaagtttcttttcaaaaaaaaaaacaaacaatgttcatgtaacaaatgtgaaataagatattaatataattaaattgttattttaaactaaccaactaaattttnaaaatttagggttgttaaatccaaccttaaaaatctcatcaaaatttataattcaaaaataaaaactaattcaaaatatcaaggtttatttgaattattttatcaaataagataaatgatttgaaaaataatattttcaatatcattttctaa

SEQ ID NO: 140574 - DNA, 731 bp, Cannabis sativa
tttcaccctgccttctgacgttttgctgggcgtccattattaggacttagcctgcgaacccacaaggcatgcaggttagacagtggtcaaaatattcttaagacctcatttagggttttaaaacattaatttactcatttatacaatatatcttaagcagtttgcaaaaagtaaagcttacagaaccgtgaggtaagctcgacattggccttgattgtacatatcttgacggtcatcagtgaacaacctggtggctttgataccaaactgtaacgcccgtatttgaaatatactaaacttaaaagataactttatagtattataactttataatcatatgggtcaggatcccaaatttcaaatcacggtttaaagtatttttactattacaaagtctactagtatatatatatatatttttttgttaaaatataactcaaattattgaaagaccaaaacccttcaggttgcactgccgcggtatgtacaatcactgccgagctccatctcactgttcctccagcttagcttttcctttacctacacaaggtaccaaactgatgagtcaacagactcagtaagatatgcaatacatatataagcaatgctagtccagctttatgcttaagccgccctgagctcaacaaccgtgctcaccaaatggttaataatgtttttaagggaagtacgaccactgtaccaaatgcactaatgtaaagaccgcttagttt

SEQ ID NO: 140575 - DNA, 794 bp, Cannabis sativa
  modified_base (286)..(294): a, c, t, g, unknown or other
tctcaatagttcaggagaattttaatggcaaaaaaagtttaggggacacgatttactaaatgtcaaaattcaaaggggaaaattactaattaaccttactattattataacggaacttattataatataattttttgtttaatttatttaactttttttcaatttaaataatttaaagaccaaaatcatctgtcaaatagtaaatatatctatctgttctatataaagtgtaattatataacagaattcttggtttatgaaaaatttatgggtgactttttatttnnnnnnnnnataaaatgatttattattaaaaataaaataatttatgagaaattcatggtcactttttaaaaatatactaattaaaaatatcttgatttaaaacaaaatttaaaaataaactaattactaaacacatgagactcttcttctaatctattataggtgaccaaaagttacccattagaaaagatcatttgttttctaaattgtaagtattattttgtgtattttttttatttactaatataaaaatagaacattgcgattattttcttctatgacaacaattcatctgttacgattcttcttcctctttctctatttcatcaatactccctgccaccaattcaggcttgatgaatttcatagatatagttttaaataaataaaataaatgtacttaagtatcatagtatcataagtagattttatttattaaattaattatttacactatatcttatcatcttacatgaaaaataataacttttgttaattccatttttggc

SEQ ID NO: 140576 - DNA, 1433 bp, Cannabis sativa
  modified_base (1156)..(1158): a, c, t, g, unknown or other
aaatctgattatattgaaatgggcattatttagggcacaaaacccaacattggaaaccttagagaatgggatctaccaaaattttttgaacacatcatagtgttacctcccaaagaaagaatgaaatctggagggccaaggaaaagaagaatggcagcatcttgagtaacaaaaaaatagaacaagtgtagcaggtgtggataaaagggacataacaaaaaaatgtgtagaagaattacagcatagaagtacaaaacaactattcagcaactagaaaataactatactgaaatatttacataaacatacatattttttttcattgattgtttttttatttttaagtggaactttttatttggtaaaagtttttcaaacatattattgagagaaaatggatattatgatcattaatatagaaatgacattaatattacagttaagtgattaaatgtttgtttgattaattaaaatcaagttgtaaataagttgatattgggatgtttttaacccaaaaaatgaatattaacattattaatattgaaataacaaaagtattacagaaaagtgtttaaatgttaggttcgttcattaaaagcatgttgtaattaggttgttattgagatattttcagggttaaaatgaatatatctactaaaaaacaaaatgtaattataaaataaagacaataaacatataaaaacacttgctaaaaataacaatttgtctatgattatcaatataatttgattataaaaataactacaactaaacaattagtcctctagctaaaaacaacaaagacataactaaatcaaattcttctttggaccctttggaggagtctcatcatcaatatcaataaaatctatttttttgatgcgagcatacttgaagaataacacaactagcctatcacggtgtttctcaacatcaaatatggaagggattagtttcatatcaatgaagtattcgacaaacgaagccacaaaacaaccacagtcactggaaaactgttggattttgtgcttaaataaaactcatttcaatataatcaaatttaataattaataaagattagaaattacttttatattgtatggttcacatgatttatttcatgattatgtttaaataaattctattaagtccagannntatataaatatgtatatatatttgttcataattatagtgtcgtcagcatagtggaatataatcatgattgtatgttcaaaagtttaattctcatgatttgttagctcactggatttagactggcatgataatcagggataaggtatacttacaccttggataagtattatatcatttcaaagacattagcaaagtttaccagtatcagatgtatggagtatacattgaaaaggaccgatattgatcctagataagatatcataaacttacagtta

SEQ ID NO: 140577 - DNA, 1239 bp, Cannabis sativa
  modified_base (789)..(792): a, c, t, g, unknown or other
actaaacctaaaagtccatagtacattaattaaaaatataattctcataacttaaaaaaaataccctttttttttttttgagttaataatatattttatgcaatcactatttccacatcgagttatctagactagaaaataataaccaagtattttggttattacagttccacccaggtcggcccgcacccttgatattggtttgaggtaagaaaagctttatgcactgctaatcgtattggtaagaaacgattattattatttgtgactcgattttgatcgagggaaagttcggtctttaccgttaatgaaatgagaattactcctaaagtcgccgttaggtttcttacttatcggttgctttatcggccagtgatagtgacatacgtagctcatggttaataagtggtaagtgttggaaacggtcattaccattatgagtaattactcgttgaaatcggagataggtttcttacttatcgttcgctttatcgggcaacgatagtgacatacatagctcgtggatagcgagtggtaagggtgctttatgaagcactgcaattatgtgattatgtattgaatgaatgtctgtttagtgaaatgatgaagttgttgattataagttactatgattttctcataatgcgtaatatgcgtgttggtatagatattaaattatttatgcatgctaaataagtaatgaattatgattatgcatattatatcatattgggattacttgtgtttaccattgccttgatttaatagcttttcttgctgagtcattgnnnntcacgggtgcttcgtggtgcaggtaaggaggaagaaattgtggtcagccacgagtcaaagatctcccaacgatgtacatatcaactgcggtgtttcggctgccagtggataggatccatccttttgactattttatggaaatgtaaccctattctgtaaatctggttttaagctaaggtgtaaaagtttttgaacaggggatccccatacttagcaatcttttgaaaagttacgttttagtttaatttgaaagtttttaactaaaccgcacttttcctaaactaatagattaactaagaattagtttgtaaaagcacacacgtggcgtccctatgagacaggacattatatatagggcccgtttggtatgcaggattggactgaaaaggattggactggactggacaagattggattatactgaaagtaatcctgtgtttggtttaa

SEQ ID NO: 140578 - DNA, 790 bp, Cannabis sativa
gaacttatgcatcgacgagaaactatgtgagtacaagtgtgcatgtcgaggcttcaacctcgctgcgtgaaagagaaacaataacgataaaaatacttgtcgtatattacatggtatacaaactaattaagtataaacagtatggtgaattaagatgacatatagcgaggtgcctatctcgctgtaagatggcgtacatgcgaggaagattatctcgacaccagaaaatatagttatcagagttaaaacaatattaatctcgggaagtctgatgacaagcaactgctccccatcaaagttaaccgggctcctagcgaggcatccccacgaagataagatttaccatatatccttaaatgtgcatccatctcggccccataaaagcgggatacttacaactgtgtcaattataaatataaacctcatttacttagcgtgatttgtaatcaaatctcgggatttgagagaataattgttgtaacgattatagtcaacttttgtaatttactgcccactatgtaattataaatagtggtaggcaagatcaagaaaagggggagaactcatacgagagagtttctaaaaaacacacacaatcagaaatctgaataagattgacttaaggactatgcagaattttaactgcaaaaccacgtaaaaactacatcactcacatgagatgaaaaaaatatatattttttgaaaaaataaataaaaaaaaatgagagaattttggaaaaaataaataacgtatatattttatatcaattaatatttatgaagctaataa

SEQ ID NO: 140579 - DNA, 1261 bp, Cannabis sativa
taatttaaaaaaaaaaagccaaaaggtggcaaaaaaatctaataagtaatttttttgttgagttgtcatttatttttatttttttaaaaaataaatgaattaaggaaaaaaaatatattttatatgaattaatatatgtgaaattaataaaaaattaaagaaaagagagaattaaagagaataaagaaagatgatttaaaagtatttttagaccacaatgtcaccgctttatatttctcttttatatatatatatagatatagatagatagaaaaaaataataaaagataaagtaaaacgtggccatataaaaatataaaaaaaaaaaaagcaaaatgtgttaattttgataaatgataaaagatataaaaatgataaattataaagtaaaagatatttaaatatgttaattttgataatatttttttaaaaaaatattatttttaaaaattttatttttttttaaaaaaaaaacctaaaacgaggccatataagcaaaatgtggctatataatttaaattttagaattatcaatttcaaaaaaaaaatatatatatataaaaactaaaaagtgaataaatatatttagattttataatttatatatatattatattaattaatatttatgaaactaataaaaaaaattaaaaaaaagagaaaagagatagtgagattaaagtgattttagagtgaaacatcaccacttcatacttctccttatatatagatatagttataataatttgaatagaaaattaatatatatatatatatatgctctttcaattaatatatcttttgtcaaagcaaattgcggtgaaacccacttatattttaatttttatacacttagctcatttattattttttttgtggcaaaatcctcttatgttttaacttttatacacttaacccccttatcttttttttttttgttgcaaaaccctcttattatgttttaatttttatacacttaactcccttatttttttgtagtaaaacccctttatgtttatttttctttgcaaatttgagacactagttaaatattactgttaaatatcaagtggatgaccactgtatacacctgtgtatttgtaacggcaaaatctcgaagttgatattgtagtaattcagttagtatttacggtagtatctatctaaaactttaagggtctgtttgaaaacaactgtgtaattactatgtagtgtaattactagggtagtaattacactgtatagtaattacattgtattt

SEQ ID NO: 140580 - DNA, 746 bp, Cannabis sativa
gttttagaagttcatatgtaggatgttaataacatacttgttagtaaatctaagatcgtggtaaaatagtttccaacaaagtctgctaagcttcgaggagaaattaataatttctgtcagctagacaatgaatctctccgtgaggcttgggagaggtttaaggatctcagcaggaagtgtcctcatcatggtattgagaagtggatgctggtccacaaattctacaacgggctgattggtaatacaagaatgattatagatgccgcagctggtggggcatttatgagaaaaagtgcgaacgaggcctatgatttgcaagaagaaatggccctgaataagcagcaatggccaactgaaagaagtcaaacgaagatgatggctggtatgcatgaggtacacgccatcaccaaactgacagcccaggtagaggccctgacataactaatagctgtgcaggcaaaacaggctcaagttatttgtgagcttcgtgggggccctcacccctatgaggaatgcctggtggatgtgaacagtttaccaatggattaagcgaaagccattgggaactattcttaaaacaattattatgtgtacaaccaacaggggttctaccagcagagaaatcagccccaacaaaaccaacaaaaactgcaacaacaaagtcctactggaggcttaaatatccaagctgacttattgctccaattcatgatggagactaaaacctctattaaaactctagaaac

SEQ ID NO: 140581 - DNA, 651 bp, Cannabis sativa
  modified_base (599)..(599): a, c, t, g, unknown or other
tatatatatatatatatagggcaactaaccctcataaaaatttacaagttgtaatcatattagttattttcattaattatgtttagacaattgttaaaaagaatttatgtttaaataaaaatctagtatggtataagttcatttatagattaatgtaagtccatgtgatttgttatgcatgtaagaaaaaatttatatcaagttttacaattatatattggagcataatactaaaaattgatgcaaatatatcacaaattattatttttgtcaaatatagtacaatttttacttatctcattagagatgttcttgtaaacttatatataataataacaaaaaattaaattctaatcgaagttaataaaggtatgtacatattaataacgaaaatattaaagatacattaagttgtcaagcactacaaaaaataacattgttgttgatgtattttaatattagtttccaaaaattttaatttaatatgatttagagaaccactaactaattatgcaccttaaggtgccacattgcaacaataataataaaaaaaaaatctgtaatatccaatgagtctaatggtaaataattagggtttntatttatattatgagttaatcaggtaataagtgggattctgatcctactaat

SEQ ID NO: 140582 - DNA, 678 bp, Cannabis sativa
  modified_base (618)..(637): a, c, t, g, unknown or other
aaaaaaatagacaaaataaaaattatacaaaacatatcaacatatacattataaaaaaattacaatctatcaaattgcttgttacattttttaaaaaattacaatctttcttcttcttctaaaaaccctaatctctatctttctctctcttagctatccctctccactttgcctccttctcttaaggttcgtcgctccgatgagaacattagggacgaagctcggtgctattgtaccatgtctaacaatttctctgccaagtatgtgcccttcaacgttggtgttgacctcgcttttagccaacgacagtgagtcttgattgtaagcgacaagtagtatgatatatattatataatgaaataaataaagacacaagagttttatagaggttcgaccccgagcagttcggtaatagcgtactcttcttagtttgtattgatttaagaacaaagaatataatgattccttttcttagagctcttacaataatatctctgaatatgaattgttagataagtttctcgacccctttgcccaatgagaatagatcactatttatagggctttaagtttggagggaagagatcactttgctatatcatttatacggagctaagnnnnnnnnnnnnnnnnnnnnttgaaggtgtaacggtaatttagtccttattcaatgtagat

SEQ ID NO: 140583 - DNA, 1109 bp, Cannabis sativa
  modified_base (461)..(486): a, c, t, g, unknown or other
  modified_base (582)..(594): a, c, t, g, unknown or other
agatcaaggagaaagattccttttcttatagctcttacaacagtatctctaaatatatgattcttagataatagtatagtcttagctcaactgcttttcgaccgatcctccttcccagtgaacatacatcactatttatagggctaggaagcttgaggaggaagagtttcccctctcgttacaatgtgtataaacagaaagatcttgggatcaatgttgaatccaaggatcgtgggattgaggctgaatacactaatagtgggatcgtgtgtatgccatatccacgtaaattgatccctgagttatacaaattgtgttgatgactcatgttgcgaaagatgaattcgctaagtgttggttgctctgcgcggatcgctgaatatcttgctctaggcatgctagcgaggcatcgtgctcggcctatcttcccgagcaaatgttccaagtggactccacgtgtnnnnnnnnnnnnnnnnnnnnnnnnnngtgcaaaaattgggataacaatttccattgttggttctacagagttattgttttagtgggattcatcaacaatagatggacgttcattagcaattnnnnnnnnnnnnntctcgaaagataagtattattgtttttattcttagtaacgtctatccgaatagtggctgctaagagtagaacttacaaagtatgaaacaatggtggaagctgaccttcactctcggctaaaacgaagcaacgtcagattctctttttgattgcataaaaggttgctagaatggtttccattttagatgagttgactactctatttaatgaatgatatctttgactctcgactcaaaacgaagcgctgtatcagtttgttggaaacctggtaaattatttaagatatgtttttcttgtattttcacatgtctttcttacttgctaaacgtatgaatatttctgaatgtgcatgaatttatattaaacaatgttgttttctgttattagtgttgtaatataatttcgaatattcattgctagttgttgagttccctttaagccaacgacaatgagtctattttataagcgataaacgatatgtagtaacagatatatgataacgcaataataagaca

SEQ ID NO: 140584 - DNA, 2480 bp, Cannabis sativa
ttttacttttgagcaacaacccacgttatatgtatatatatatataagtttcaaaagtttatatttctttatatatacatatataaaagtttgaaattttattgattgcaaaagtgattttttttctttaaaatttttgttttttcattatttttttttaaatttaggcaagcctacgtgatctcccattctaagagaatatatgtgtttagagtttttgcggctaaaccctcccaacggtcgttttacttgcatttaactctctaagttcaaattttgacagtaaaatcctccaaactactgaactagtagcaaacttaagatatcattcggttaactgtcactatgggttgtttatgtgtacaatcttgtacacatgataagtttatattggtacaactaatattattatttaaatattattttcaaaattcattcgaaaattaaataaaatattaaaaaaataaaaatatattataattttttaaataaattttatatttttaaaataataatataagatgtaccaatataaatttgacatatgtacaaaagtttacacataagcaatctatattggcaagttaattataaaaaaatagatgacactttaaatttataagcaatttagtagtttagagagtttaactatcaaaatttgagcttggagtgttaagcaagtggcaatttagtagatgacacctaagcaatctatattggcaagttaattataaaaaaatagatgacaccttaaatttgtaagcaatttagtagtttagagagttttactatcaaaatttgagcttggagtgttaagtacaagtggtgtgatagttgagagggtttagccgcaaaaaactcatgtgtttatatatatagtcctcttgagaaaatcacaaaacactcacattatttatttattattgtatttgagctctctctatctctctgttcatcttcttccatttttttacttttttttttcaagtctacaacattactcaaatagaagctaaccctcttttgtagtaggtaacaaaaaaaagtatgtgaatgaagaagaagatttgggaaagataagagtgtggttgtgtgtgtatgaaagagatggagagcttgctctgtgatgagcttcttgtagaaatctttcagatactcccactaagttcatgttctttagtttctttggtctcaaagcattggttccatctctaccgcacttccttgtccaccatctttcttcaacttacccttttctgtgactagtttattttaatgttgttttctttcatttctttatcacattttcccaaatattattgtactgctctatttttaaaagtaataggagaataatgaaatttgtatgtaagttattttcttcagtatcctatgctccaatatatgttcagtttttcctccgttttagttgttctgcttcttttcatttttgatgtcttctcctgtatgctctcttgttgtgccccagttcctcccattttgttgtatttattatgttatttcttttcctagccaactttcattgtaacgccctaacaattaggtacattacgaaaaccgatatagatgccctaatcccgctaatccgggatttttagatagataagcgctggtaaatttaaactttattaacaatggaatgaaaatataacttgtaataatttttaaactttacaataaaccaaaagatacaagttttgggatcccataaatatttcacaaaatattacaagtttacttcacgtgacgacctaagcgacaaaatcagaggttacaaaatacatcactggtagaccccaacccgcttggtctaatgtggcctgacatgtacaagcatcgccaagctctcgcactcatgactgatcataaactgatttatcctttcctgcacaatagagcacctgtgagccaagcccagcaggacagtaaagatatcaataatcacaaataacataccacatatataataatgccatttcacttgttgtctatttgatatagacttgtgtgttacgctcacatgcccatttatgtctatgtggcatagacccacgtgttacgctcacacgtctaaatacaataaggccttagaacagttcatctcggttctaattactgagtccaaccaaattatgccttgaacgcataattcttaatcttgacatatatagcatggcatagtatttaaacatcaataactactagggtaataaccctaaaccatataaccgctcactttagggtaataaccctaatcccagttttaattaatcataattataatattcaatatgagcgccaccacgcttaaatctacgtgctagctactgtcttacctgatgtcccgcaaatgtggagattccaaatcccggggtactcctgaccaagtaccggtaatcctagtcacaatttttaatattcacaaatagggttaatccctaaatccacttccacataat

SEQ ID NO: 140585 - DNA, 527 bp, Cannabis sativa
ctataggtcggccagggtgagcttataggccggtcatgatctgtgcacaagcgggtcggccaagaagtgactttcggactaagggagctttcgtttgacaaagggaatctgacctctataaggaaatggtgtacaaagttgtcctcaacttgcaaaaggctggcctcctcttggtggagctatagtgacctgccaaatccatacgaccccgctgtcgattgatcactttttgaggtcaacagatatgtacttaataaaaaaaatatcaacgtatccatttttcatgatattgaaaaaaaaaaaaaaatatcattcataaaattaaaaagaaaaaatcattgataaaaaaacaaaatatatttatgagcaaaaaataaaaaacatactacaaaagatcattttaaaaagattaattaagatttttttttccctgaactttgacatgtatcaaatcatgccccctgaacttttaaggtcgttaaaaatgtctctgaactattgagattgttgaatttaaggatttttgt

SEQ ID NO: 140586 - DNA, 839 bp, Cannabis sativa
cctctgtatcgtttcctgattgtaatttcagtttggattctattccaactgttttgttacctgttttggtgactgatatggttatctaataaaagatgaatttccatttaaaaaaaacatactcgtatgtatatataaattattaattgatttctttttcaaattttaatttccttttcaaactcttatagatctattattttgtacaaatagttgtttgatttattagttttttcaataaataaaatatatggtgaatcattattctaattaattatgtataaatcattaatctaaaatttagtcccacatataattcatccctactaattcatataattatgtgaacatatatcctattatgatgaataatattgtaatttgcaatgtgtaattatataacatcaaaacatcaaaactccacttataatccaaaacaacttcaatgattgaaacaaagcaaagcaaaaactcaattatactttctttatctaaaccagtactaaaattagtaaatacttaacttgtcctaaagtatatgggacttaaaacgaaattaaattttaaggccctatataaatattttaatcattattaaaatattaattctaatactttaatgtaatggtaatactttttaaagttcttaaaagtttaaggtttcaattctccttaagtacatatttaaaatttctgaaaaaaaaaattaaaaagtagaagttgggaattaatcccacaaccttcttattttaaattaagggatattggcggctaaaccacatgaaatttacggtttgtaacacttaaccacaaaaaccgaatttttggcggctaaacta

SEQ ID NO: 140587 - DNA, 546 bp, Cannabis sativa
  modified_base (55)..(57): a, c, t, g, unknown or other
aaactcaaatttctaaaatttaaaaaaattataagaaaaatatgttattacaatnnnggctaaataattaattataattaatatttttttatattgataaattagcatgtattttataatatatgttatgccttttcaaaaaaaaaataaatatatatttagaatgaaaatatttgttgtagtgaggtttaaaggtgtaattaacggttattgaagtttttaaattaccataattaaattgtaaggtattaatgtattaatgtatatatggaatgaggaaaaaaaataaaaagaatggatataaaaaataacttttatgtcatcaggtaagattaaaataaaaaatatttaatttaaaattttaattaatagttataaatatcaaccattaaatttgatccaatagctaataattgaatatccattcatatgcccatatataaatgagattttttctattatagaccaaaaatagatgaaatttacatttatggccctaaaaaaggaaataaacaaaagtggaaactaaaaagttggtaattacaa

SEQ ID NO: 140588 - DNA, 546 bp, Cannabis sativa
  modified_base (505)..(508): a, c, t, g, unknown or other
tagtaaattgggtagaccctttgatagcagatataaaagatcaaaaaaagaagaaaaggatcagaaagcaaaaggctgtttccaaaagaaacaaatttgaacaaccaaaacgaaatataataactctggaggagttcttaccaaaagagttacaggacaaggcacctggttatgatgatagtgtgtcagattgctgcatgactttgttgacaaaagaagatcctgaatctacctcacctgaaagtgaaaaagaggtagatgaaattaccttgcaagatacgcggtagaaaatatttgcaaagaaggaaaaagaagcgaaagagcttgaaaaagctaaccaagaccttcgaaagccttcatcttcgtccaaccaagaattcgctaatgacaatcgaagaggcaaaagcactagtgaagatgaaataacgcgagcaaaatatgataaattggctcatctaaagcgcatccctgctcttttaagcgtttatgatgcactgcaaatgtnnnntgagcatagaaatgcacttattgtcgcattgacaagtc

SEQ ID NO: 140589 - DNA, 841 bp, Cannabis sativa
  modified_base (460)..(472): a, c, t, g, unknown or other
  modified_base (781)..(793): a, c, t, g, unknown or other
aagtttggtaaacagtcaaaaaatagttttttgaataatttttggagaagctacagttaacagctgaagctgctccaacccaacatttagaaaaaattattttgattaaaagactaataatttttttgtactaaaaccatatttacttttattacatattaaaaaaaattaatataaactaattaaaataaaataaataattattaaatctcttatttttttaaacaacatcaacctagaatttttcttatatacttgagtttctaattttttttacatttgataaaacataacaaaaaatactataaattatttttatcagatgcatataaatttatataagaaaaaaaaaataaaagtatataaaaaataagatattatatgaaataattttttaaatatttttgattataataaattagattataacattatcattatcattataatagatcttaannnnnnnnnnnnntttgaaatttataatttaccaaatactcaactcaattttttttctacagttttgctacagctgttttttctcacaaacacaactacaactattttttcccacaacacagatgtgccaaacgggctagtgtttgtattttattttattttattttttttaaaaaataaaataatatattttttaaaaagtacaaaaatataaaaaaaatgagatataaaaatatacacttcttatatatatatatatatcactacaaaaaactactactttcagtgacagcttttaatcacaatataatttttttgtgannnnnnnnnnnnnttagtcacaacaaaatgttacttatgactaaaacatagtatttagtta

SEQ ID NO: 140590 - DNA, 727 bp, Cannabis sativa
  modified_base (484)..(484): a, c, t, g, unknown or other
tttcgaaatacttgaggtggaaaaaaggatcttctttttcagtgtacattttccaggttggcattttaaacttgtggggcaacgccaagagattgatctcgggggataaaggggttccacgtgcttggtccaactcgagatcattgtttctctgaccggccatgccttggaacatattctttagtccgtccagctgtgcctgcacagttggactaacctgttctgcattttggctgatctgagtcacgtcagtatctttttgaacaggaatttgagcgcgggttccaggctacatgatcagcgtgtcaagctgatcatctactcctctccttctattcagatcatttatgagatcatgagtcatccccaacctatcgaatacgaaagcgcccgactctctcagtgattggttggtttggctaatgtgctgacagacaccattagcctggttggaattgccgggtatgacttctcctgatgaatnactagacaaggtctgcccacctacaacttggcccacaggcggaacctgtgaccggagatttggtagctgaccatttatagtctgagaagtattcatcgctggatcttcgtctgtttcacccagtgggatgacattttagggttgctgcccgacaaattgataggcttttcgtatcagcacagtggcttgccaactatgattgtcaatctctgcatgatgagcccttaacgcttctatctcttt

SEQ ID NO: 140591 - DNA, 739 bp, Cannabis sativa
  modified_base (516)..(519): a, c, t, g, unknown or other
aaaaccaatcgtttttagcttaaaacaaaattaaaccataccttaagctttcccttttcaaggatttgctatcccgctactattagagcttttcaggttgaaaatcaaagaaaatgattaaaaaaagggaaagtttcattgaaggagaaggaagaagatttcgtactgtttttcatgtgatataaacatatataatatatatacataaacttatcagtatttactgtacaaactgataagttttaataaaatattaaaataatattatgataatataatattattgataatattaataaaaaatttattattaatagttatcttattattttttagccactaaaaaatttctacttgtagggtatttggccaatttcgagtattccaaaatatcccggtatttctaaaatcaacttatctcaataattctatcaatatttttaactaaaatcgttgtgatatttttagcctccaattgggtctccaaggtcgccgaacctaaaaatatttttattnnnnaaataactcatattatatccatgtatttcaaataaatcttcgtaattaacaaattacgcttatttatccacttatcagatcttcagggtcgctagacctgaaaatatttttatcccacgtatagctcatattacattcacacatgctatataaatctccgtaattaataaattacgcttatttacacacttatagtaaaatttaaattttttgctgaaat

SEQ ID NO: 140592 - DNA, 1419 bp, Cannabis sativa
atttttaactacacttataaattaaggggcatcatagtatagtgtcataagtacagggactaaaaaagctaattattctttttataataataagtttttttactaaaaagaaaaaagtggcaaaagaataaacaagaaataataaaatttggatcagattatatattttatgctaaattttaactactttctacactaccattagaatttaccatgataaagatatataggccaaaatatccatatcaaccacacttttatataaacattattatctaaactcacgaactaataaattattgtaaaagcttaaacaatcaatcctacccagggccggctcaagtgttttgggagttttgtgcgaaattttaaaattggatttttttaaaaaaaaatcgtgtacattaaaactacaattctattactagctttttttttttttaggattcattcatgaattttcaataataaattatttatttatatatataataggaaaaaagagacaaaaataaacattttctttcaaaaaaaaaaaaaaaaattgggtcttaaaaaaatggaaaccttgtgcaatggcccaagctgcccaatgcttgggccggccctaatcctaccatccacgttttcatgaacttatatatatataatattaatttattataaatgaagttttaaaagtacacttttttatattttatttacaattttatggcttaaaatttttaattaggaaaatacgcatgtaaaattttaaaattataaaactatactttgctcagtaaaaagtaaaaacaacttcaaatgaacgtgaaatcaacttcacgacaattataaataaactataaaacaacaaaatacaatcagaaaaacgatcatgacaatacagttataaataaattataaaacaaccaaaaaacaataaagaagtatatttttataaataaaaaaattaaaataattttttttccgtattaacgtatttttgtaattttattttcaaatttttagtctacactacaaatttttttacttttagttacaacaaaacttgtgactaaaggtaaaaaagctatgactaattatatatcattattcatatatattgtgattaaaaggacgtccgtggctaaatgtattaattacaaaatcacaatttattgtgactaaatgtgtgtttagtgttgtgacttattggagaacattgttccacatggattaaatgtaaaagtattgagccatatgtaagaacatggactactccactcaacaccaattggttttgagatggaaccccatgattctcattatggtatcagagccatatccctagcgggcttttgatccaaatctatccaaatggtagaaagacgcttgagatccgaacaaaaaaaaaaataagcgagcaaatggcatggc

SEQ ID NO: 140593 - DNA, 1272 bp, Cannabis sativa
tagaaatacagtagaagaaaagtcaaagataagacatgtccaccttgaacccaaagttaagggatttaacataaccactttaatagtgttacagttttctattagatttagattcaatagtttgacagtttatttcgattttttaattactttgtcatatgcaaatatcatactcatagtaaaatgtgttttcattctatgacccaatgaaatgtgaagagaacacaaattattggaataggttagctccctaagaagtccttattcatgaaatctaaataaagtttgtgacctatatggctgatctatttatttttgaatattgttcgaatttattgtcatatttattcatgtagtttccgttcatgatatccgaagtctgttatagtattcaaaatttgaaattcgaatgtcaacaagtattccatgaaattaatttgtattgtacgagtggttaatttgtattgtacgagtggtttttgttttgtttcatttttatatattggaattatttcaaaagtaaatgagattgtcatcattttaaagtacttgattgtgtaacatgtaataagaattaaaaatggtactcttaaaagaaacatgttagtggttcagaatcctttttttaggcgaatcgctccattgtatttaacaattacactatagtacatttaacaatcagactatagtgcaaataatgaaatgatgttatatataggaagagatgcttacctgttattggaaacatacaggaaaataagtgtagggatgtcatgaatacactgaaattttaaagaattgcaatgaattatttaagaaatttgtcttccaacattttagtgttttaaatttttgttaatttaagatattttgtcttgtgtaataggtttttacaatggtgtataaacggaagaggggtactgctacagaaaaaaaaaggatgcaactgagataaaaaagaaggattcgaaggaagcttgggcgaaatattagtaagttatttgtcgcagttttttttcgcgctaatattttttggttttgaaaataatatttgtaattcccttcctttatttaattgatgcagccaagccaatttcaaagcttatgctgctgcgcatgcagataaatcaaaagcaaatgtgagtgacttggagtcactactaaaaaaatccaaattccgttggttttacactgtcggccaaagaattctcgacagtccataaaaccgtcgcctatacgagcgtcgcagatactggatagaatagacgatgg

SEQ ID NO: 140594 - DNA, 559 bp, Cannabis sativa
gatcagagatgcagaagcagagagagcctcgagagagggcttccttcttggacggttgagcattcttagttttggccattgctctttgaaactttagaacacaaacacactctcacacttgaagaaagattagacttttgagaaaaaaataaaaagagaagagagagtggtgaacgtgggtgagtgggtagttgagaatatatacactttgattttacttacccaaaaacagaaaaaaaaaaattgaaaaaggaatgtaacttccttaccttagatacacgtgtggagagaaaagaggaaaccaaagtgatttttcaaaaaatggtcaatgtttccttaaatggaaaaaggaaaccaaatatccccacaaaatctaagtattaaaaccccaaccaaatccgaaattgccaccaaaaaggaaaccaaaaataatttattatttaagaacaagtttcctaaaaccaccaaaataagaccaaatctccaaaaataaaggaaacacaatataaggaatgaaataaagacttgtttccataaaagaaaaatattaacaaagaat

SEQ ID NO: 140595 - DNA, 564 bp, Cannabis sativa
catatatactaaatgacattgaactttgggtttaagttcaatagttatgaacttaaaagaacaagataccttaaaagaaccatgaatcttggattacattatcagaagttttcagctatcctagaaagatacagcgatgctgactggaatactttatcagatgactccaaagcaaccagtggctatatttttagtatagctggaggagctatttcttggaaataaaaaaaaaacaaaccattttggcacagtccaccatgcagtttgaaatgatagcactagcaactgctagtgaagaagcaagtcggttgaggagcctgctagcttagatccctttatggaaaagactgataccagctgtgttaatccactacgatagtactgcggctattgcaaaagttcagagtcgttattataacagtaagagacagcaaatacgtcgtaaacatacaactgttagagagttcctctctattggagcagtatgagtggatcatgtacgcattgatgaaaacttagtcgatcatttgacgaaaggattagctaaagagaaagtttttaaaa

SEQ ID NO: 140596 - DNA, 1763 bp, Cannabis sativa
aatgggttggttggtaacaccagaacactcatagatgttgcagctggtgaagcattcatgaggaagagtgcaaatcaagcctacgatttgttagaggagatggccctataatcaacagtggccaactgaaagaagccaaacaaagaaggtggctggtatgcttgaggtggatgccattaccaagttgacagctcaggtagaggccctaactaaattgatagttgtgcaagcaaaataagctcaggatgattgtgagttgtgtggaggccctcatccctatgcagaatgcccaaaagatgtgaatagtttgccaatggatgaagctaaagccaatggaaattactcttagaacaacaactatgggttcaatcaaggggggaatcgaaggaattctgggttctatcagtagaggaatcagaatcagatgcagaaccaacaacaaccacagcagcaagggtctagtgggagttctggtcttcaaacagacttattgctacaatttatgactgagacaagatcatccattaaggacctatagactcagagggggcaattggcaactcagataacaacccttcctcagggaactttgcctagtacaactgaggtaaatcctaaggaaaattgcaaggcaattaccttgagaagtgggaagaagtatgaagggcctaatgggggacaaccagtggaagaagagattcatgatcaacctgtgccatcatcaaccgaaaagaagactactaaaggtcctgcaccagaacaagagactccacaaattactatacatcatcatgtgaaaatatcatacccacagagactccgaaagaccaatctagacaagcagttctcaaaatttctagaggtctttaaaaggtttcacatcaacatcccttttgttgaagccttggaacaaatgcccagttatttgaagttcatgatcttgtcaaagaagagaaaaatggaggactatgaaacaatggcattgactaaaagctgtagcgccatactgcagaagaaacttcctcctaaactcatagatcctggaagtttcaccattccttgcactattgggggaatagaagggataaatgcattgtgtgaattgggggctagcattaacttgattcctctgtcagtttttagaagattgtagttgggggaagcaaagccaaccacggtaaccttgcaattggctgatcgatctctagctcatcccacatgagtcatcaaagatgtgttagtaaaagttgataagtttatttttccagctgattttattgttctgaatatggaagaagacagcaatgtcccaattatattggggagaccattcttggcaactggcaagtgttgattgatgttcagaagggtgaattaaagctgggagtgtaaggggaagaagtggtcttcaatgtgctaaaggcgatgactttcccaaaggcaagtgataactgtttctttgttgatttgatcgataccattgtggaaaagaaaaagttgatagaagatcctttagaacttagcttaattgaggatgatttgactgagcaagaaggagtggaggtaagggagtatgctaaatggcttgattcttatggaccactgaatacgaagtattatgaagagttgggggttgtgccgagggagcttctgccatctacggagaaaccttcagagctagagttgaaggtgcttcctaatcatctacgatatgagttcttgggagaagataagaagcttccagtgatagtgtcagcttcact

SEQ ID NO: 140597 - DNA, 574 bp, Cannabis sativa
actaaacgcaaattaaataaagaaaattcaacgtcattattgcataaacgcttaggtcatatctcaagaggtagaattgagcgtattgtgtttgatgatattttagagtctcttgacttcacagatttcaatgtctgtgtagattgtatcaagggaaaatagaccaaaactaagagattaagtgccaatagagcttcagaagtctcaaaattgattcaaacagatatttgtgggtcattccctactgcatcttggaatggtcaataatattttatatcattcatagacgattacttacgttacgggtacataatctcattcatgaaaaatctcagtctatggacgtgttcaaagcttacacagctgagttgagaatcaactcaaaaaaaaaaaagattaagaacgtcaaatctgatcatgttgttgagtactacggtagatatgatggctcaagtgaactaagtctaggaccatttattaaatttttagaggaatgtggtattgtcccacagtacaccatgctaggatcacctagcatgaatggtgttgttgagagatgaaataagactcttaa

SEQ ID NO: 140598 - DNA, 510 bp, Cannabis sativa
taattaacaagttaaaattgtaaaaatatatgtttatttgtaaatatttataaaattgtatagaattatgtaattatgttttttgcaaattttatgtaatattgtacatttacttatatataaatgaaaattgcctaaaaaataataatttcacatacaattagataattttattaatattatttttatttttattatgtttcaattgaaatccaatattaaaattatatttcactcaatttagacattctatagtataagagatatgcttttactaattagtaattaacgaatatatttagatactaatgagtttttttttgtaacaggtagcacaaatatttaaatttcaaaattagtacttataatttttttttgttatttggataccaattgatataaacttgcatatgatatattataaaaattattttaaatactaattagtatcaaattatatagtgaaaattacatcaaatgtgaaattttataaaaaaaaaaagttacaaa

SEQ ID NO: 140599 - DNA, 997 bp, Cannabis sativa
  modified_base (507)..(511): a, c, t, g, unknown or other
  modified_base (786)..(795): a, c, t, g, unknown or other
  modified_base (941)..(952): a, c, t, g, unknown or other
caatcattcaatttaattaaacctcaaaatctaatagcattacaaattggattggttgatttttcaattagatatttatttacacattccatttttattataaacttaaaaacatgaaaagaaaaatacataaaatctatatatatacatcttttatttaaatttaatactttataataatatcatattacatgtttaatgcaacaaaaaatttgaaataactacagcaataaccaataattacaaatacaataaaaaaaacagtaagaatataattaatataattaatatatatttaatatttttattatatatgtataaatataaataagttttttctgcaagaataaataagctttttttttaatatatattaaatatacttagattagattgatttttaattaaattttgagattaacatctaataattaattcaattaggactcgtttggtataccgtattgtattgtattgtgttggattgtattgtattgtattagtatnnnnnaatataatactatgtttggtattgacttatattaatatattgaattgtattagtattatttaattcgggtttcggttccggtcccgggtccaggtccgggtcctaaattcggattagagattggtgttgaccccgaatcctttgtaaatattataatacaagctaatatggaccatttgttgtgtattaaataatacaacatacattgtattaaaaaatttagtcgtaataattaatacaatacattgctttatccaaacatagtgttatttatnnnnnnnnnnaatacgacccttatacggcgtacccaacgagcctttagaatcttattttgaacattcaagtgaattcttattagatattcaactttttgtaattagattaaattaaatgagtttgattcgatggtggcgtttggttgggaggaatnnnnnnnnnnnnataggaatgggaatgagaataagaataggaatgaaataaaattta

SEQ ID NO: 140600 - DNA, 996 bp, Cannabis sativa
tatatatatcttcttttttatattatattatatgtattatatattacatgtgctgtaattatctcttctactatttttatatataatacctttatatataaaaaatgattatctaactatttttgttaatttaacagaatatactttagaagtaaaagaatattctattatttttatatataaaaagtggctatttaactatttctatttgtttaacaaaatatactttaaaaataaaataatattcgatctgttaaatttaacggtgttagtaggattagttttataaatatatataaatattaatattatttattttacattaagtataatatatataaatataaatatcttatttgtaacgttattatttattatttttatttttaaaattgagagtatgtttaattttaatattcttaaattttatattaattttattttcaaaaaaaaaaaaaaaaacatttatatttattttcttcaaattttaaaaactttaacttttttttttttaataataagtggtttccttttaatttaaaaattttaaaatacacatgaaaaaaataaaaagttaaacatataactaaatatacatgcaatgtacgtaacaataacctagtcagggccggcccaagcattttgggggccttgtgcaaaattttaaaattgagctatttttttttaaaaaaaaaatgcttgggccttttctttaagattaaaactacaattctattactagtattttttttaagattcgttcataaattttcaattataagttttttatatatgtatatataataacaaaaaaataggccttttctttcaaaaaaaaaaattgggccttaaaaaattagaggccttgtgcaaaggcccaagctgtccaatgcttaggtcggccctgaacctagtatatatataatttaggctaattagtaatttttccccctgaacttttttggtcgttaaaaattccccccgaactattgagat

SEQ ID NO: 140601 - DNA, 611 bp, Cannabis sativa
taaaggacatttgaaggttgttattaattaataatattgatagggtttcttttttatttatcgagaagcgaataggtcgctcataggggtgtttgcgatgcaagtggtgtgatttttaccatttttcaaatcaacttgcacatgcggtttttccaatttctcaaactgcacccgcaccgcgaaactaaaaaattacagaaactgcatcgcaaaaaatggtgcggtgctgtgcagtttttacagtttctgcggtttggactatcaccaaataattaaactatcacaaattctacaaagcttgagcaacacttgtcaaaaataccataaggcttcactactacaaaaatggtttttctcaacatttttaaaacactcatttaaactattctcgtcagtttctataaccgtcgcctatacgaccgtcacaaaacgggtaaaataggcgacagttaaaaaccgtcgctaatgtggacttaaaaccgtcccctatagtataggccatgatttaaaacaatggcagaaaaatttgtattttctcctattttttctgcattagttttatagttttacctaaattaaagtaaaacaactaattaattttgttacaataa

SEQ ID NO: 140602 - DNA, 522 bp, Cannabis sativa
gttttatttacaatttgacggttaaatttttaattataaaaatacggttgtaaagttttaaaattacaaaaatacactttgctcagtaaaaaataaaaaacaacgagaaatcaacctcgcgataattataaataaactataaattaactaaaacaacaaaaacaatcaaaaaacaaacccatgacaactataatacaacaataaataaactataaaacaaccaaaaagactatttattaaatttattgaaaatatatttttgtaaagggtaaatacccttttaaaccctatattttgtaaaagttattaattggacctttgttttattaaatgacaaaattgaccttgtattttctaaaatgataaaaataggaccttgagcttaatttttgacaatttttttttaatatgaaaaacttgaaaacaattcctaacattttttttttttttgagaaaatcactgccattataaattaaagtcatttacaacaacagagaaaataggatagggaatttctccta

SEQ ID NO: 140603 - DNA, 1048 bp, Cannabis sativa
agagaattcaagggtgggaagggcatatcttatctcgtacgggaaaggaggtattattgaaatctattgctcaagtcttgccgagttatgctatgaatgttttcctcttgccgtcagacacttgcaaggagttagagtggcttatggccaagttctggtggcactcagattcaagtagtggtaagggtattaattggatgagctgggagcggttgtgtcgtcataaacatgcaaggggattgggatttcgaagcttgagagattttaatttggctcttttggggaatcaatattgctgtttgttggttaatgctgattctttggttagtaggctttataaggctaaatattatgctactggtaatctgtttactggtggattgggagacagtcctagtttcatttggcgtagtattcttgaagcaaaagatcttatccacgcttgtgctcaaagaacaattgctaatggggaaaatgtatccattcttaatgatccttggcttccacataattcaaacaactatgttgtctaacggcacccttctcttgtgaataagtcggtcagctacctctttcaagttggtactcgtgcgtgggatgaggatgttgtgagggacatatttgttggccgtgattaggaccttattttttccattcagctcagtgattcagccgctaatgatggttggagttggtgacttgagacttgtgggaattattcggttaaaagtgcatataagttcttgccagaatctaagggtgcttggtgccgggaggccaatactgatttttggaagcggctttggtccttaaaaattccttctaagatcagtaattttttatggcgagctgcttcgggtgtgcttccaacgtgttttcaactccaaaagcgttatgttcctgtcaatgctgacaaccctttgtgcaactctagtactgaaactattccacatgagttggtggaatgctcggttgcaaaggctgcttggcatcgtagcatagtggacgtcggggctggggctgtaacgttcagcagctggttgttggg

SEQ ID NO: 140604 - DNA, 860 bp, Cannabis sativa
gttatggcttaattgtgaagaaatggtattttagggtgataactctatgaaaatagagttatttatatcttttggggcattagattagcttttttctcaagtatttttagtttattttagtgatttttagttggttttatttagttttgcataaatattaattttagtatttttagattaatttttaattaattttgtaatattttatcaatttatttagtttttcattttataagtgttaatctcaatgttgtgtatttttgtaaaatgtttaaatgcacatttggacttattatgtcgtgaatatcttgtagtttatggactcaaaaaaggcccaaatatctcattttgtctaaaatgtcaattcaatttgctatgaccattattctattgggccatttctattaattacaagatatgaatgaaattgaaagaaaagaaagaaaatgggtcaagtcacatgatacattttggaaagaccatatatatgctatgcatatatgtaaaagggaagtaggcgtgaattacaaagaaggagagggggaattgaagaaaaagaagcaggcggcagtgtgctactccagggacgccaacaacaagagaagaaaatgaagaaaaagaaaaagaaaaagaaaaaaagagagagttttatttagggtttaatttagcatttttatttagagattgacaaaaattaaaaggaagaagaagagaaatttggaagaggaacttgaagtcttgtgacaagctccaaaatgggttttttatttctatatctcttttcttttaaactttgtaatttttgcacaatccattatgagttaatttttcttttgctagaattattttgttgacttaaa

SEQ ID NO: 140605 - DNA, 505 bp, Cannabis sativa
  modified_base (38)..(62): a, c, t, g, unknown or other
gtgtaaaaatgaaaaaacccttattattattattattnnnnnnnnnnnnnnnnnnnnnnnnnttattattattagtattagtattattagttttgaatcatttattttctagacttatcaattaccttttttttatatatatttttattttgtgcgagaattggatacaattctatctaatttctcattattaatcaatagactttatttgacatattttttataagagaaaattgtgaagattaacttatttataaaaatgagtagttaactcattctttgatttgttttatatatacaacaaacatactggagtcaagtcgaacatcatgttatataaggtcagatatgataataacaacatcttgaatgtaatgataactacaagtgagatacggtgatgataatagttttgaaattatttgataagttttccataaatttatcaattcttataacagttcgagggatcaagcctaacatcatgttatataggtcgtgtctg

SEQ ID NO: 140606 - DNA, 822 bp, Cannabis sativa
  modified_base (334)..(338): a, c, t, g, unknown or other
  modified_base (606)..(607): a, c, t, g, unknown or other
  modified_base (748)..(750): a, c, t, g, unknown or other
  modified_base (784)..(786): a, c, t, g, unknown or other
ttcaaaaccgtcgctaatgtggggttcccgatggtttaaatcgtcgcttatacacagttataggccatagttttaaactgtgccttatagtctggttacatttttgaatttttttttaacgacggtttttttcaattgttccatttgaaaaacagggaaaagaaaacaaattttttgcaattttttccttgcactaatttttagattttgtacaaatctgcatagtcaacacaattaaactaacactatcattgtctaaatatatttaaaattctgtgtagtcagaataattgaactaacgctaattaatatcatctaaatatatttaaaaatnnnnnattaagttaacgctaattataatctaaatacatttacaaatctatgtagtaacgatatatgtatatgtatagacactgactaacacggtaactattgttgctccgcttctgctttcaagtaatgaatccaccgatcacgcataatatttatctcatcattagtgtacggagtagagaacctatcatgtcaggtcaacatttgtattggatcttctatgaccatgaaactgtcaatgaatttcatgacgtagtatccacactgtttgtnntcgggttgttgaggacaaataggagtcatccactgagtaggtcgatcaggtcctcctaccatttggttatacatggtgaacatgttagaatatgtgccctaaataaaatccatttcaatataatcaaatttactagttaannnagatcagaaataacattttaatgttgcatggttnnnatgatttattttatgattattttttaatgtataaat

SEQ ID NO: 140607 - DNA, 541 bp, Cannabis sativa
  modified_base (110)..(141): a, c, t, g, unknown or other
ttaaaatctgactataattaaaaaataaaataatcaatttttaagtttaaacctcaaaatatcaaaaaaattaataataatctagtaaaaattaaatattattaatttannnnnnnnnnnnnnnnnnnnnnnnnnnnnnnntaatattttattttgaaattaggggttgaaaattgaaaaaaaatcgaaatttgggagaaaatcccacaaaaatcgcattttaggtgtgctgcccacgaggaggctgcatgcagcttcctacgagcgcgcaaggaaggattggcaggggtgatgggcggcattccttggcacttgcagggttcacgtgggtggaatgcagcctttagcgtgtctgaacgggtgcaatgccgtgtcttcagacacgacttgtccagcgcgtgcacaaccttcttatctgaagctcctagtgcgtgcgtgcaccaagcttcaacaccatggacatccaattttcaaaccaccataacttcttcgttgttttatcaaaattgagtttcgtaaaaaacaaaattgcttaattttt

SEQ ID NO: 140608 - DNA, 796 bp, Cannabis sativa
acggcaactaacatgtatgctaaacatgtatacataaatgccaccattatactaatcttaccttgtttccaaattcacgtgagttggccgacctgaatggatgacttcgtgttggatggatgccccaatcacaaaacataaatggataaacaacgcgctaaaatcctaatctgggaaacccaaacctccaacttaaggttctgctattgataactaataccccaataccctaagtatcaaggaatcacccaaccaaggctctaaaactaacacgaatcgaaaacacgaaaaattcgggaaaccagtttctgatccgattaaccagttttataggacctaagaaaccggttaaccggtttgcactaggtaaccgaaaataattcaaaaccttgtccaattcgtatccaaacgaaaccaaaccttccagaatacctataataacctcaatcaacgtaaaccaatagtagaagccagaaacatacacaaaacccaaacatgccattattgagccaagtttgagttcacttgttcaaccttaaaatcaagctccaaaaccagtaaaatcagacctagaacaactccataaatcactagaaaacaatcaagtacaaaccctaactcaaacagtagcaaaaactcaatttcaacatgcttgaaccaactgataacttaagaacattaaaaagagaaactagagttcttaccttaggatttctctacttgaatccaaccaaaacccctccaaaatcactgctaaaaactgaagttcttgctggtacaaaggaagctcaaagag

SEQ ID NO: 140609 - DNA, 600 bp, Cannabis sativa
aagagagagcattatagtcattccaagtttaaagattgtgttggggaatgtcaattggaggatgttaagcaaagtggtagtttctttacttggaataataaacaacaaggagaagagcgagtttattctaagatagaccgaataatggctaatcagaggtggttggatacatacgagaatgctgaagctttgttcctcaatgaagggttatttgatcatactccggcgatattaactatattacctactattctaaatggtaggaaacctttcaaatattttcggatgtggtcaagtcatccctcttttgagcaaaagatggagggtacatggaacattgaggttcaggggtcaagcatgttcaaggtggtgtccaaaatgaaggcccgattggaagagtgtcaagtagagattcagaggaatcctagggatcggcgtgctcagcaaaaggaattggaagctagagaagagtaccagacagtccataaggcatttatttcctttcttcagcaaaaatccaaagtaaattggattaaggaaggggatgagaatacaaaattttatcactctagcctaagagaaaggagaattcaaaatagg

SEQ ID NO: 140610 - DNA, 716 bp, Cannabis sativa
ctaatgacaactgtccatgtaccaaatcgtattcccaaactttgacatgtactaaattgtatctcttgaaccttcatctcactacaaaaaactgttacttttggtgacaactgtttagtcacaacataattatttgttactaaatatgacttttttttttatcaaagaggaagagaacttcattaatcaaccaaccgaatacaaccacaatacacttctccaaagaaaagcaacatagcaaactcctaataattacatatcaatctttgacgtaaattcttctcctctctagaacctttcctatcttttatcaagatgagcctatattaaacatcacttttaattttgttcactatacaatttacagtattagaaaaaaaggagaacaagcaattgtttaagtttttccatatgtggtagatcgaggcagccaatataaggactctaattatttcaatgatgttcggcctagtgttgcccagccacacactctagctagcaaagttcttggaccaaccttcaaaccccatccattgaaagagagaattcaacacctttgagacaagttgcatcaaaaaaaataaatggtggtggctctcagcttcactgtcacaaaccacacagtgtgtattcgagattggggcgaagccagaggaaactctggtggaggcccgcagcgatactgacgtgcaaatcgttcgtctgacttgggtata

SEQ ID NO: 140611 - DNA, 504 bp, Cannabis sativa
tttattgtgatagtaacttctacagttaaaaaatttcaaggtaattgctctaaaatttataaaagaaagatggtggtccattcaatctatctatctatctatatataaaggagaagtagaagcggtgatgtcacaccctaaaattgctctaaagctatttttctcttctttccttaattctctcattttttttattttttattaactttataaataataattctaaaatctatatttaaaaatgagtatttaattaacattattgagtatttaattttttttaattttatttaatattacattcttagcttttgatttttttaattattttttttttcaaaaaaaaagatctcatacgtattttttttctttttttttttttggttttttaaaatatcatatttttagcttttgaatttatttttttaaaaaaagatttctttttctttttcttttttttgttttttaaaatagcacatttttagcttttgaactttttttttt

SEQ ID NO: 140612 - DNA, 800 bp, Cannabis sativa
  modified_base (260)..(267): a, c, t, g, unknown or other
acccataagaagaaatcactggccaagcctatcgatctcgagtgtttggacaacgagatctaaaagcaagttcctcctccagttgttcccaacgccaatactcctcaccccgaggcgacccccgctactgcttcttcgagccaggccatcgagaccctatcggtcgcagcaggggaagctgggtctgaatttgcccaggcatatggagtcgcctattggcataaacttcgactcttcttccccctgattgggattttctnnnnnnnnggagtccaaaagagatgctttcgaggagcttggattgtcacttcatggtacgttggctttgttattataattatattattcttttttacacctcttgcatatccatctgtttgcaattctccaggcttctttctcttcttttgcttccaactgattactctctgagcggcttgagtacttggagggcgaggttcttaagttaccaggatgactcccaacaagaaaatccctgcctcaagtaagcagccgagaaagcaaaggaggaagtcgagaaggcaaagaaggaaactgagaaggcaaaagaggaagccaagaaggcaaaggaggaggccgagaagaccatcaaagcccaagctgatgagtttgagaagaaacttgctaaaaaacttgctgagaaagaagtcaagaccgtaggtgcgataaggttggttttcacactatataccgggcctggctttggaaccctaatatggatacctgcttcttggaggagaaggaagaggaaaatttagctctttgcgagaagaccaaga

SEQ ID NO: 140613 - DNA, 606 bp, Cannabis sativa
ggtggaggcattaacaaagttggtaattgcacaagtctaacaagctcaagttgtctgcgagctgtgtggaggacctcatactactaacacctgcccaatagatgtcgacaatttgccaatggaacaagctcatgccattggaaactatcacaataattatggtcgtcaacagaacttccaaaagcaatttcctaatcagcaaaaacaagggttttatcctcaacaaagccaacagtgtcaacaacaacaacaacaacaacaagactctagtggagggtctaatcctcaattagacacgttgctacaattcatgacggagattaagtcttccattaaggtcttggaaactcaggtggggcagttggctgctcaaaacactaacaaggctcatggtaacttgcctagcactactgaagtcaatccaaaggagaattgtaatgcaattaccttgagaagtggtaagacctatgctgggccaagcaaaaacaagccaaaggaggaagatggtatagaaccaacaccaatacaagagaaggagaagactattgatggtcttccacaaaaagaaactccacctcccatcagcattgaccatcacatcaaaat

SEQ ID NO: 140614 - DNA, 1201 bp, Cannabis sativa
aagttcactgaggacttcgatgccgcccagtatcgcggatagctttccatcttcagttactcgtgaaactttggttgcctctgtcatgaatctgctgatgtatgcccgaatggctcacctactcgttgcttagcttcgaccaagtctcccaaatgcaatggaagttggcgtgaagaggagaattgtgcatggaattccgaagagaatgttttccatgaactaaactttccaagagtcaacttgaaataccattgttgagcggcttccgacagggttccagggaagattctggagcatatatctcctcgtaccccttgcaaatccatttgcatttcgaagtacttgagatgggaaagaggatcttctctcccggtgtacatcttccacgttggcattttaaacttatggagcaacgacaggagattgatctcaggtgagaaaggattttcgcatcttcggtccagctcaagatcattgtttctttttccagccatgtcgtgaaacatatttttcagttcgtctagctgtgcctgtacggctaggctaacctgctcagcattttggtcaatttgaattacgtcagcatctttctgggagggaatttgagtacgggttctgggctgcatgattgtcgtgacattcagctcgtctactcccctccttctgttcagatcattccttaggtcatggatcgcccctaacctttcgaatacagaagtgcctagctgccttagcgattgatttgcttggttgacgagtggaatggcaccattgatctggttggaaccatcaggtatgacttctcctgatgaattaccaaacaagtggaactcgtgactggggatagggcggctggccacttgcagtttgggaagtattcatcgctggatcttcgtctatttcagacatgggaatgacattcggaggttgctgacctacagtttggtaggcttttcgtatcagcacggtagcttgctgactacgattttcaatctcagcatggtgagcccttaacgcctctatctttctatctctccattctgtaagcatacgcctttgttcttcgaacgtgagatttaccacagtgtggagttcgccctgatgatgattcagtgtattgttatgattctgcatgagtccaagagcgtcgcagagattttgtaactcagtagcatctctgatggtcgtctgggcgttggtt

SEQ ID NO: 140615 - DNA, 814 bp, Cannabis sativa
  modified_base (467)..(472): a, c, t, g, unknown or other
atcctaccaactccaaccaatgcctctgtcccatatttaaatcttcctgggtaaagaattatttaaggttcttggttggtgtaaatctcacatttttctccgtagagataatgcctccaaatcttcaaagaaaacactaccgctacaagttctaaatcgtgagttgggtatcactgttcataatcctttaactaacgggaggcataagcgatgacccgatcaacttacactagaaaatacacctcagaccctatctggatgcatcgtagtaaactacgaacttctctttatcagatggtagggaaaataccaaagctgtaatcaatctctgttttaactcccgaaaactcactactccaaatataagaatttgggactgtcctaaaaataatttttttttcagggactgttgctaaaaaaaattaagtaactatttaaatctgtcggaaaaaatttagtattcccgnnnnnntaaaatcgtagtaaacaaaataggagacgttttttaaaaccgttgcctatactataagcgacggttttaaaccgtcacctataagggtccattaaaaaatcgtcacctacttctcgccacatttctcacgtgcccacctactttttttctatttcccacatgcccacttatttattctcacctatttattctacatttcccacaccctaaaatgaaaatcttaactctttgaaaccccacccacgcatccgtaccatcgccctcctctctcgccatcttcctccctttctcaatctccctttcttctcatctctctcgtctatcgatctccacccacccctc

SEQ ID NO: 140616 - DNA, 679 bp, Cannabis sativa
  modified_base (634)..(643): a, c, t, g, unknown or other
ttccctttagttgcatatgtataggtttttggatttttattgacaagtgagcatgattttagagtatgaaatgatttgaaataaagtatggttattgaattcattaaaagtagtaatatgttttattttcttgggtttggttcacatttatattgttaatcaacattgttgttttttgtgtgaaaaaaaagaggagtttaagaaccatcaaggttgttgattcatgattgtgctttagtgttcattcatacatactactctcaatttttgaattttgaagcctaatatagttactaatttgagattagatcatttttttttattattttttgctgaaagttagggattatatcttggttccaagttttttctatgtcgattccgatgttcaacatagtttttatttgatttttatatttttttctgtgatgttgcttgtgcaagttgagcgactgttttttcgttatttgttttgtgtgtgaaaatagtttgtgggggtgctaaataaggtgaaaacttctatcattaaatcagtgtcaagaaaattttcgaatcccccaaaaacaacaagtttgaacttgacatttcaacaaaagaaaaaaaaaacaagtgtgaacttgaaatgtttgacagnnnnnnnnnntaacttctttaacatattgaaagggtttgtctttac

SEQ ID NO: 140617 - DNA, 1036 bp, Cannabis sativa
  modified_base (31)..(43): a, c, t, g, unknown or other
  modified_base (75)..(87): a, c, t, g, unknown or other
  modified_base (312)..(332): a, c, t, g, unknown or other
  modified_base (494)..(512): a, c, t, g, unknown or other
gtggaggacccatatacattacatttatttnnnnnnnnnnnnngacccatatacattacatttatttattttatnnnnnnnnnnnnnattcttaatataaaaaactaaatattagttgattaaataaaaataagaaaggtgcaataccatagctgagtaccagtgcaatatatggaacatgattatcgaattgaagtgtcaatatcatgtgaaaattattatgagaattgatttttttttaaacaattataataaataaataaaaataacacaaaatagaaccgattttataatataatgaataaaaataannnnnnnnnnnnnnnnnnnnncggttataattgaaatataactgttctgttatataatgaataaaaataaataatacaaaataactcaaaccaattataattaaaatagaactggttctataacaatattataataaataaaaataaataacacgaattaactcaaaccggttataactaaannnnnnnnnnnnnnnnnnnataatgatgagtatttttggggtagatatagtatgcgtgtaattatttgttgagttgaagcatgttgaatgtatgtttttgtttgagtttattttatttaactagtttttgtgtgtgagtttttatcttagttactttacggaaccagttttttgtcttaaatttttaactagttgagaaatataaccgatttttttatataatatttgagttcttgtgtgttattatttgagtctatttattttgttatggaaccgattcttttcatacatgcctcaatattttttagaattgagttccatttcttttaataaaaaattatagtcgatttcatgaggtattatgtattataaggtattttattgtggaactagttctatttttaatttatgtttcagtgttttaagaattgattttctctttattttttaattgtaatcgtttgaattattgcgtgttacttgattgtatttgttagatctggtattgtatctgaccatggcaaaagagagaagaagaagaga

SEQ ID NO: 140618 - DNA, 833 bp, Cannabis sativa
  modified_base (749)..(750): a, c, t, g, unknown or other
gacatgattgtccagtctacaaggccttatggtcaaagagcagttcttaagtttgctcaatacgctggtgctcatgccattattggaagacttatgaataaatcaagtcgtttatgtaccgggcaagacatctcaacgagatacgttttgcggcgtgtcttaatccacgtcagcattgatcctttaaaagcagtttaaattacagctgtgtgattttcaaataataactgtatttatttacgtggagcgtaattaaggcccacaattttggggaaatattattgtgggattcgaatctgaatgtaattatctgcccacctatgttactataaataggggaagattatacaaaaaaggggacagaaaaaccttgagagaaaaaagaatacactgatggtaaagaaccctagttctgtattagaaagatctgaataagattgactagtggactatgcagagtaaactgcaaaaccacgtaacaacctggtgttctttctatttctattatttttcttagatcacttataatctctgtgccaatctattacgaaaataggctcataatcgttaacaaaaatctgcgttaacaataaggaaaatataaaatgataaataatagacaactagttttttacgtggttcaggtgttaatgatccctagtccacgagtccgttgtattagccttgcctgtgagtatttaagtattatatgtgtttacaatatgagtattgttgaccgagattttcgnnaactattaaaatatgattataatatcgagctataagaaagtgagatgaggatttttacgtgtttggggcgttaatgagcctta

SEQ ID NO: 140619 - DNA, 529 bp, Cannabis sativa
aattataatatatgtaagaaaaaaaaatatatttgtagggtattttaaaatatgatatattacttttctaacaatatatatatatgtttgagaaattatactctttatagttacatatatatattaatttattttatttttttttaaaaaaaagtactaaggacataaataataataaaaagtaatatttttaaaaaataaaccaagactgaaaggaaagcggtctaaccattttcgctcagtcctcctcacgattcacttcactgtatttgcattttcatcttttccctccctctcgatctcgcctatatatacaccatttttcaaaacgaggataacattattcaaaatagaaagaagattatagccattatcatcgtttttgcctccgctgttttcaaacacagttttttcatactcggaccacacgattctccctcaccaccacctccacctccacctccgatgatcgattctccatcaccaccacctccacctccacctctgatgatcgattctccatcaccac

SEQ ID NO: 140620 - DNA, 790 bp, Cannabis sativa
actttccccagccccgtccaccattttgctcgacttcacccctccaccttcatcttcagcattcgaaccccagaaacccacagccgccactgttcgaactcccacgcccatccgcctctgtccccgtcagaacccgaccaccgcaccccacagccgaaccccattcgacctctttcacagaacaccgaaccactccccgtccgaccccgtccaaacccagaaaccaccttcgacctccattgttccagcccacctttcgactccgccaccaccattcgacccccagcaaacccgaacctaacctccaccattcgaccaccaccccaggcggacccgacccccaccatcacctcccccatctcagcaatacacaacagccgccccgtgccttgctccgatttgcccagacccgaagcccataaccaatttccccatctcagcaacccaatctcgccattgctcgttgaaatctctgtaagttttgagaattttttttgcaatataatgagcttgatgagatgcatgctaaatcggaaaattattctgtaatatgctatgctatcttgattcttgttcataatcggagctgtcattggccatgtttactgagatttcaattacagatttggtttgtggtgttgttgcggtaaattttttttctcaaatgttgtgaagatactcttgtcattgctgcccatttttgttcatgatgataattttagtgttgggtgattgcattttgagaatctataatgtttagaggattgcatattctagggctcattgtgct

SEQ ID NO: 140621 - DNA, 515 bp, Cannabis sativa
acatttacaacaaaatattattgatgcagaaattagttgtggttattatacaggaaaaagagtatttttacccagaataccgtttataccaaccgcaaataaaaaaaatatccatttacttttaaaagaactcaatttcctatatgattaagtttcgcaaggactataaacaaagctcaaggacaaactttagactttattggattatatcttccagaaactgttttctcacatggtcaatagtatgttgcattatcaagagtaaaaacaactgattctatatatattttaattaaacctgatataataaattcatcgaaagctatttttactaagaatattgtttacaaagagattctatcacaaatacacttacatctttaagttatagacattataaaaaaaattggttattaaattaataatttattaatttttttagaacttaattttacacttcaggaacataaataaattttggtaagttattgttttatcttttttattataattgt

SEQ ID NO: 140622 - DNA, 1309 bp, Cannabis sativa
taaaataatttccaacatatatgtcgtgcatatttggtccaacaagactgcatttcatgcaacattttaaagttttgcctacaatgtacgtcatatatgtcgtgcactgtagtcactgcctatcttttttatgtataatttaattatattttatatatttatattattgtacttattaaattaagaaatattttttggacaattttatcatgtatatttttaaaagtaatgtacgaatatactcttatttattttaatactcgacagacttttttagtctattttttatataatcgtgtatattatagttatttaagacatcatgtaaaattttaataaattagaaaaatttaatacaccgaaaataatgtacttctttaaaagtgttgcactgatatactcctacctgtttcggtatttgagagacttatttagtcttttttatggtcgtgtacattatagttatttaagacatcctgtcaatttttaaaaaatttaaaaaaatttaacatgccaaaaataaaattcaaactttctgttaaagaaatgcattgtaaaaacactttataatatatttttttttttgtaaatttaaatatgaatacataaattattttaatgtaatttctttctaatgtttattctctagtaatataatatttatgtaattacaatataatattttaatttatagagttttatctattttattgtattattatctttaattcaattactagagttttatctattttattgtatcattatctttaatttaattactaagtttatttaaattattagttgaatataatagttgtgataatttttattaattaataggattaatttttaatttattgtaaaacttaacttggtgtgtatccttgtacatataaccttccaactttctatacaagattgtacgttgattatatgtttttttcttttttttcattttgttagtcaaagcgtaattaactaaaagataactacatgattagtttctctatacagaaaatgtaagtaacgcaaccattttcaagaagagctttgatttgttattgattataagtagtttaacttcaaataatcagttattcggcctattttaaaagcattctgtgatagagcaaaacttgataaaatgtataataacaactccttaaaaaaaaaaattcaagtatcggtatccatttcaatcaactctggatattcataaacctttatcgtgattctttcttaaaatgactgaaaacttcaagactcgcaaacttcaaattagaagtgatcataaaacaagtcagaa

SEQ ID NO: 140623 - DNA, 506 bp, Cannabis sativa
atgaactactgccttcagtagtaataaaacaacaaataactcactcaatattgatatgattgatgtgattgaacttgcatttcgaagctattctaatgctatatcaagtaatgtatcatacttcaatcgcaattctgaaactattgatctcaaatttcaccccaagagagttacaaaaaagaagctctaggttatccacgatgggtcctatcggactccgaaaaataactatcaccatcaaaagataattttcatcgttgggtcatcatccatggtgaaaaacatctaattttattttcccctatttttgtgggcctccttcacctataaaaggagaactcccttagctcatttttcacatttagaaaactacccacaaggtcagagcttctctctctagtttctcttgataaattggagtttctgacacttagcctttttttataataccatctcatgaggaatagaaaattgaattagacatagctccattactgtcgcaatac

SEQ ID NO: 140624 - DNA, 681 bp, Cannabis sativa
caattactaattgaattgaattgattcttttaattggatatctaattacacatctaaattttaatattaacttaaaaatatgaagaaaaaaatagataaaaattaaatattatcacttatttaagattaatactctataaagatacattccttacaagtggtgtacgtaaatgcaataaaaaaagtttaaaataattaaaataacaacattgttaagtaataaaatagaacaaaacatcatgaaaataaatacacaaaacaactagtgttgtaaattcaatacaaaaaaaattcaataaaagtataatatatattatttttttaatattttttattatataaataattttttagcatgtaattgaattggatcagtttttagttaattaacatcctataatcgattcagttccaattagaatttaactttgaacatttaattcaattcaattgtaattgaatatctatttttttttttgtaattaaattaaaatggatggattgaattcaattaaattcgattagatgttgtctattcctattttatagcacatatatatatttgtgatgcttcttttaacctttgactctctcattattacttattcatcacttcatgtcatgcattttgtaagtgtcgtgttttgtgtggcaaattagatattactgttgtttggtaat

SEQ ID NO: 140625 - DNA, 1369 bp, Cannabis sativa
taaataaataaacaaacataacaaacatgtaacacataactagaaagtaggttaagatatttctattttaaaataaaatatttaaaatacatcttaactaaaaatttaggttttaagaaattatttaaaaaaaattaaaatctaacaaatctcctaaataccctaaattctaactgaaatttaaatatctaactaattttcaaattttcagtttatttaaataatttaagttaattaaatatcaaatatgataatataatataatatcctaattcttaaattaaatgtttctaatattacatttaataaattaaatataacaaaaataaacaatttgaaaaataagatatttgatgattaggatattagcaattttatttaataattaaataaaacaaaatttcctaagcttgaaaattttatggttactaaaccctaaaatatctattcaaaccaaaattaataaattttcaaaaatttcatgttattttgcataaaataaaatttttaattaaaataaatatctaataaaataaaatgtcaaaactaatatttttctaatattataatttaattttaataaaaagtattttaaaataaaaaattttaaaaatctgatatggttagcaaatttgagatttaaagtagattatttctaaattttaatatcaaaataagatcatttcaaattttaataataaaataagtaatatcagatctcataataacataagtaataagatatcacaaaaataagattgcacaggggagtcccctcgcacgcataaggggcatagcacagtcaggaggggcttaggatagcccttgtctgagtaaactcggtcatgggcttctctgaagtcgcgtgaagcccttgtccgcgctcgcatgcgtgttgctcagtttcaaatattttcattcaaatctaaaaactcataactaattcatagaaaatccaaattgagttttgtagaagcctaaatttattatttttccatctactttctaggaaaaatattttcagaatgaattaaaaaatacttaacatcgtaaattgtgatttccatacaatcctcaaatatgcacataaaccaacatgaatacatccaaatcaacacaaacatccaaatcaacacaaacatcatatcaacacaaacatcattttaaataacacaaacatcattttaaattcaaaacatcattttaaattcatatttatcattttaaattcatatttcatgaaagtaaatcattaccatgactttgatacaaatttttgggaattattttattaggatctagatttactaccatgtatgttgttgagcatcctaaatatgaatttctaaaacaatagaatttaaacaca

SEQ ID NO: 140626 - DNA, 503 bp, Cannabis sativa
tcccaaatcggagttcggaatcaaaagttacgaacttttgaaaatcaactcaaaactgcccaaaaacacgagggcgggccgcagcaagcccagaccatgcagaacccagaaaaccagcagcaaaccttcgaatttcagcaaaacaacacatccaattcatcccaattcacatccaaactcacaaagcaataccacacattaccaagctcaaaaatagggtattaaagttcatacaacatgcattaatacccacaattccagctgcaaacccaaccaaataatcacataatttctgacctagcaagtacttaatgaactcaaccaaataaacacgtataagctcacaacaatatcttgaaattcacaattaaaaccacaagatcaagccaaattcctcctatcatgcacatccaagatcaacatcccttttcatgtttatcaacaactaaaaaccagcaagaatctcaattaaattcaaagaaggagagttacctcaagcctta

SEQ ID NO: 140627 - DNA, 625 bp, Cannabis sativa
actcgacctactatgtccacgggttcgcaattctcatgtgcttgagcttgcttcatctcgcattggtcatctccttcgaaagagattagatacacgtcctctacttaagtaagtgtgcatattttctctatccgcgcaagaaggccattgcggatgtctcggggggagaccactggacctaggttgattcctaggattcctttcattatcacgaggaaatctctagtttcctggtcgaggttaccttgcttctttattcatgcgagatgattctggcatgtcagttcgttcatttccttagttcgcaaatccatgggaagtccatggaacatcacgttgatgttcttgattccttgtattatttgggttaggttgattatccattgggacatcccttgtattcccaagttgttcctcctgagggattcccttggttattttcctgcctcctggtcctagagcctcgaggtcttcctcctggtctccttacagttggatcaagttggttttgaggaattgttccttgtgcagccctggcagccgcagcttcttactccaattcagcatttcatcggtttgattcagccaggcgttgtcgaagttgcctatttttcaattctactag

SEQ ID NO: 140628 - DNA, 819 bp, Cannabis sativa
ctctttctctcttcatcttcttcttcttttctctcatctactttatattattttataacaaatccatactaagtagattcctttggttactaacccttataacaatatttcctttttaaaaaccaacttttgaagaatacaattataccataatttctttattagtttaaaatctttgcctttacaatacctaattttccctgaaatctcatattagtcaacaagactgagaaatctaaaattattgaattctaattatagcaagaaattgatagaaaaaacgtttaatgaaaaactactaatatataccttatgaacctattaagaccccaattaaattgattttaaaacactttccaaaaaagtctcctaatcgattgaaagaaaaaatgaaagacaacattcaatttatacctaccatctatctatctatctatatatctatataattctcttgctaagcaagatgacatgacaacttaacaatttaggattctaatttttctttttcttttttttttttgatttttttgactttattttatttctatactctattaaaaattctatatttacattctaaaactgaaaagtcactttttaatttatttacattatatatgcattagtaacttacatttaatttgctttacataatgcatgcatacattagaaacttacattacactataatgatttcattagatataaattaaaacactactaccaaaaacccctttagaggtggtttttaagccctttcagggtcgattttggtaaaattcgctaccgacattgatcagggcgacgctaaagggt

SEQ ID NO: 140629 - DNA, 617 bp, Cannabis sativa
ttgtatgaagactaaaaggttcggcaatggaaggaaaatggctttgaaattggatatgtcaaaggcctacgatagagtggaatggaactttttgagaacaatgatgcgtgggttgggttatgaggaacaatggattaacaagattatgaagtgtgtggagagtgtctccttctcggtactcattaatggggaaaaaataggtaaattccaccaaactaggagtcttcgccaaggtgactcactatccccttacctatttcttctttgcttagaaggtctatcttgccttattcatgaggccaaaagggctggaagaattaatggaatccaatttggaagagaaaggattaaagtttcgcatttgttcttcgctgatgatagctttgtttttcttgatgcaaaggaagaggaatgtgatactatgaagaggatccttcaccaatactccaagctctcgggtcagcaaatcaacctcaagaagtctgaagtaagcatgggcaagaggatatcaactagccaaggacaagctttagctcaacgattgggggttcgactagtctctcaccatgccaagtatttggggcttccgagttttgtgggaagaaggaaacaagagg

SEQ ID NO: 140630 - DNA, 830 bp, Cannabis sativa
  modified_base (27)..(37): a, c, t, g, unknown or other
taaatggtgactaaaaataattagtcnnnnnnnnnnntgggtgactaattaatgagttttaatgaccaaaaaattagtcggggaaaatgggtttttttttatagtgataggatcataatctcacttattacttgattaattaactcaaaatgtaaataaaaaccctaattatttaccattaagctcattaggatatcacacgaagaaattttttttattggagaaaaacaagatgtaatatttctatcaatatgcagtatttcattttagtattaataaatatataacctaatttctagaaaaagagtaaaaaaaaagtataaaatctcttatgtcattatgggtgaagcaacactaaaagacaaataagattgatataattaaaagaggggtgagaaaaggattgggtatgtgatttatgcttaggcatatgaggtaatgttcaaaaaattaattctagatattatttagtattattttaaaaatataaagtctaatttatcatttaacaaaataaagtgttcaatcaataatttttataaaatatagaatgcgaattggtatctactcttttaataatgagaaaaaggatattcaatgaaaaaaaatactactacaaaagtcagaatttgcgactgtcctaaaaatattttttttcggggactttgctataaaaatcaagtaactgtttaaaaccgcgggaaaaattagtattctcgacaatttataatagtaattacaggaataggcgatgattttaattggaattcgtaaatttgttgggcccttatacctgacagtttaaaaccatcgcctatagtataggcgac

SEQ ID NO: 140631 - DNA, 522 bp, Cannabis sativa
  modified_base (29)..(31): a, c, t, g, unknown or other
  modified_base (234)..(235): a, c, t, g, unknown or other
aaattagaatcagaataccctacgacctnnnaatgatctgacttcctgtatgtgagcaagtaatcttttgttctctgaagatacctcataacccccaacccgaataaacttccctaaccaaaccgaataaaccgataaaaaatacaacccaaaataatagaatgaaaatctaaacggcccaataatatatcaggtggtttacaaattattctaaaccgcccaattaacctgaannaaccgaattaaaccgatttatatattttcatagaagtgtatatattatatcacataaattagatttattagttaaactattttgtatttaaagtttagacattttagtgtttaatttaaaacttagactttatagttaataatttttattgtatttggatattaaagttaaagtgtgaaatctctacaatattttattacttttttttaattattttattcaattattttatgtttactcaattatatttatcttatattaaggttcttaaaattaatttaaactat

SEQ ID NO: 140632 - DNA, 619 bp, Cannabis sativa
agaagcttcttgggtctggctggtcattatcgtcggtttgtagaagggttctctaaaatttcagcacccttaaccaagctcattaaaaagaatcaacattttgtatggacagataagtgcgaagcaagctttcaagagctgaaagagggactaatcaaagctccagtgttagccttaccttctgataaaatcctagtttggttctgggttcgagaccgggtcccagtccctgttcaggtttggggcattgtctaggtttggtttcgattatgggtctaggaatgagcttggatctgggtttagggtttagtgtgttttagggtttagggtttagggttcgggttttcaatttagtgtttacggtttacgattaaggatttagggtttagggttagggtggagattagggtttagcgtttagcatttagagtttagggtttagggtttagggattagggtttagtgtttagtgtgatacgaaccacacaaccagttgtgatgaaacccaatagcaattatggcagcctctaagaattctcaaaatttggatgtgcaaccgcgacccaatgcttagttaagcatgaaccttggtattaaggaagacgctacaaacggtggt

SEQ ID NO: 140633 - DNA, 726 bp, Cannabis sativa
tatgaatcacaacatataagcatgcatatacacttaacatatacatacattcgcatatccatatcacacattatatgcaattcttaccttctttccagattcaaacgaattgatcgacctgaacggaaagtcccgtgctgaatggatgccctaatcacatattaaaactgggtaaatcacatgttcaaaaccctaaaccgggaaacccaagtccacaactcaaggctctaatatactcactagggattacattaacctaggaaatagggaaacacccaactatggcactgaaatggacgagaattgagagaactagtttttcggggaaccctaccaaaaccggtttaccggttttacaggtactggtaaaaccggtaaaccctttttttataccagtctccccaaaaactcaccaatttgctcaaaacttgtccaattgccaccaaactttctacagtacctaaatagggtatatacaatatattccaaccagaaaatctcataaaaactcattgaatccaaacatgccattaaagatcaaagcttaagtttcaaagcacaaacttgtgcaattctatcacaactcaataaaaccaatatccagaatttagaatcaacttaaaaatcaacttagaaatcagattacacaaactttaaaccctaacagcccctatctttcaaaattacataatcaaaccaattaaaactagagaaacacataactta

SEQ ID NO: 140634 - DNA, 761 bp, Cannabis sativa
gtttgataaataataaaaatagaagaaaatcgttaaaaatatatataatagatataaatttcatataaaataaaaattattaaaattaaatatctttacaaaatttttagagtaaattatatactttcaattcaacttctcataccaaaaatatagaaaaaaaaactactttgctttccatccttcatattctttattcttcatattccttccatcatactttccatactaaccaaacataggattagattttgtacggagaagtagggttgttcataaattaatccaatctaatgagaaccgaccgccaaatattggatatccaattatgatcgaatcgaatgttggatggggcgtctaaaaatctaatacatccaacatccaatcgaactaatttgtatttacatttagtttggatgagtaattaaattttatattgttatacgtcaaatctatatgtatatatgaaaattaacattaaaattttactcttttgttcttggattggatggatccaatccaatccaatacatattggacctaaaatattggatagatcctatctgatccaaaaaaaaataccaggtctaaaatattagataaactcaaactaaaccaataaatatatatataaaatacattcaatggatagaaccgatccaatcacacatccaatagacgttggatcaattggatgactgaaattgattggatcagattggatggtaaaatctaacatctaatatatgattggatcggat

SEQ ID NO: 140635 - DNA, 503 bp, Cannabis sativa
cactgcaaaacctcttgtactctcaaaatctctagacgaagaagaacttgggatgtacctggctgtcacggagcatgatgtaagtgcctactgatgagagaggaaaacaacattcaacatccggtctattacattagtaaaagactcattgaggctgaagtccaatatccattgatagagaaactcacttactgcctaattctagcaacaagaaagctaaggtcctactttcaagctcaccctgttcgggtatacactgactaaccattacgccaaatattgtaaaaactggatgcctctagcggttactcaaatgggtagtggaattgggccaatatgagattatcttccaaccccgaacaataattaagggtcaagccttagcagactttgaagtagaatgcacgggcaaggaaaaaagcgtattagaaaataaccccgagccagtacaaataccagccaagtaacagtgaagaaaagccgacttggaaactacatgtgga

SEQ ID NO: 140636 - DNA, 529 bp, Cannabis sativa
aggatgttaatgaaacatacatggtagtagatctagatcctggtaaaatatttccaacaccacaaaccatagactttgatgttctcatcaaaaccttgataatagaaatgagaagtttgcttatgttcattgaatagactgaacacggtttcccatcttatccttgtattttgaaaactctaggttgctccatgtgaatggctaaaccatagttgcctaggcttcgagtcataattccttattaggattgttcattgcttgtttgaaaaaacaatgaatcgtcatcattagtatcatctaagtcataacaaggtagattcctagaaattctcccactatgacaaggtacaatgattgtgtctgggaacttcagtggtataaacctctttagttgcatcaatacaacaaaggatttaggactaccttatgtaatataagataatagaatatttttggaaatgaatcaaatagcatctccaattgtgtgctactttggttttgaggttacattttgttgggttttatgccc

SEQ ID NO: 140637 - DNA, 914 bp, Cannabis sativa
tttggtgtataaccaaagagatcaagaaaagataataaaaattttattttatgctattttacaatatcttatgctcatttgtacttactttacaattacacttactttacgataattagtataaatccttacaattactttaaaattttattttattatttttttaaattataaatgtaaaagtttttaaaatttaaaaatattacttgattacattttaaattttataataaatattaatttataattttttattttatttatttaaattacaaattacaaactttttaaacttcaaaatatcacttgcttatattttcaatgttgtaataaatattcatttataattttttattttatttatttaacttcaaaagtacaacccttttaaagttgatactatcgcttgcttacattttaaaatttaacaataaatagtaatttacaatttacaattttatttatttaaattaaaaattacaaacttttttaatattaaaaatatcacttgcttactttttaaaatttaacaataaatagtaatttataatttccaatttaatttatttaaattaaaaattacaaactttttcaatattaaaaatatcacttgcttaccttttaaaatttaacaataaataataatttataatttccaattttatttatttaaatcaaaaattacaaactttttcaatattaaaaatatcacttgcttactttttaaaatttaacaataaatagtaatttataatttccagtttaatttatttaaattaaagttgggttttatgccctaaaaaactccatttgaatgtaatctttatcttttaaatatcaataaagaaacagaagtatttttatcactttgtgtgtcatttggttcatgttatcatttatatatttatttgatt

SEQ ID NO: 140638 - DNA, 1190 bp, Cannabis sativa
  modified_base (462)..(462): a, c, t, g, unknown or other
gtttgcatacgcgcatgggacggacacaccatgctgaaaagagacagaggtctagcgtatgcaactagtttggtggcttgtctcaagggccaaccaacacacatggaggcatggcgccttggggatttatccatggatgtatgggagtccttgggcgatgagggagactgttcagacagtatcgaatggggcacgatagaagcgttggcacgttgacttggtgttggcatcttgccacacatgctaccttggtcacgagtgttaaggtgagcatcgatgttggaatttgccttatcatagtgggaacctatagacagtgcgagtatcttagccagagagcctcgatgcatggatgcactcatagatgcttgcgagcatgacttggcaggagttattcgagagacgaaagtgtgcacgaggcacacggtcgtgcaaaaaatgagcccattgttactcggatgnttgaaggctgaccttggcttagagaagtcaaggtgccgcacgggtgttctgctgcctgaaaaggtgagcccgtgacagttggtatcagagccaagttcatctcagtgggaggtgaacctggttggcctatcttagagaggatgtaggcatgtggacagattaagatggtccgaatgttggaacaagatgtcgttgatccagttagtcttttaaaggggatcagtagactgagatggagttggcgtgtgaagtttccgaagggacttgtctagagggacttggctttagtggaagtgtgttctgtaggtgccgttgggtacggttggtttgcgaacctcaccccgaggggtgcaccatacttattccttgtcaaaaggagtatgcattggacaattggtgggtgagatgctatcagaggatgtgttagcttcaggatcaatgttgtaagggctacttggtttgactggagggacattgtgagagactcgaagtaattcatgttgggggaagtattctagtgcggaggcactactccatgggtgattctaaatagcgatagtggcacaggttctttgatcaagtctaagagtgggagggagagatcgtcatcaagagggtggttctatggtggtagaggaacaagtgtagacttaggatttggatggagcttggagtaagcttaagagtcgagatcagggagattggcctgcggtccgtcgatgagggca

SEQ ID NO: 140639 - DNA, 501 bp, Cannabis sativa
gtatagtttttttatagtgtaaatttttggtataataataaaattttttaattattaagcatataaattcaaatttcccatgaaaatttaactcaagtggtgcatacttatacttgagttagtacacataagtcattattagtgaaatttgtgatacactaatatttatgtcttagttgattctaaattcttctcaaataaaagccagagacattgattagcagcaagaaaaatggaattaattcaactcaaaagtgaacaagtgttaatcaaatgagtcatttctatttattagtttctcaactactcaaaaaaattccttttctttgtaagaaaaaggttgaaagtatatgatctacaaaattgttttctatgaatctatgtcagtactacaaataacatcatcagttcaactgagatgtgatatcattaaagaagtcttcactgcaaggaattgtgagtccacccattggatggtcatatccgaattcttgttcagcc

SEQ ID NO: 140640 - DNA, 937 bp, Cannabis sativa
atttctggtctttattaattagtaaatttgattttattgaaatgggttttatttagtgcacaaaacccaacagagacctcattcccagccttgggaaatttatcaacatcaatgataagctggtttgtggatttcctcatgtaggctttagtcttggtccttttgggttctttagtagaatccgcgacctaatcagcttgaactaccttttcctggatctcttgtcggcttggggaggacttttgaacatgctctcaaaatttatgtccattcctgtgaagataaaggtaaaaggtcagtgagcaacagtgatgttgaataaaaacattgggtctgcaaatggtgttaaaaaaataggttcaaaccaagccacaattcgcaaagaacgaggcttgccttcaaaaatctattgtatgaatcacctattacgacacctttcaatggggttcatagctccgtctagtcagctctctcagatagaagctgacatacaaatgatgttgactgctgaggtccactttgtcaccaagaaatgcgattttcagatggagtattatgtcttcatgagcgcaaggacgatgaggcttacatcatcaatctcggagaaatatgggaaaatctctacctcgctaccaaggtaattgatgttgtgttcccatcgagacatcccagaacattacgatttacaaggtatttaatacacatttatattgacccagtaaaagcggacccatcacagctgtgtgatttttaaatattaatcacatttattttacatggtatggaatcaaacccgacaatttcagggaataattgttgtaagatattagtcaataatgtaattaactgccctatgatgtaattataaatagaggcaagttatactaaaaaagggacgaaaaaataattagaagaaaaaggcttgagaattgtatca

SEQ ID NO: 140641 - DNA, 549 bp, Cannabis sativa
agagtattccaaccattaaataaagtaaacaaatgaaaaggagtgattaccatacctatcactcccaatcctgattagtaaacatgccattagattgatatttttattattggaccaatttttaacatttatattatctttttaatttttaacatttttactttttaaaattttagggaaatttacggcataaatactttcaattttatacacttaaatatcatatctttttttttttggcggatttaataccaaacattgtattttaggtttctccgttactactgttagttgtaacttaatgtacacgtgtaaagcctagattaaatccctttttttttttaaatgtttagttaaaattaaaaatttaactttttaatctaatatatttaacttaaattttatttccaggttcaaacccttatttttatccatattcttcctcctacctagggatgtacacggggcggggaattggcgggaagtgctcccccgtccccatcccgttaagaattttaatccccatccccgcttattccccatcgggga

SEQ ID NO: 140642 - DNA, 746 bp, Cannabis sativa
tctctttcaaccttgccaccttggtcgaaagctcctcctccttggcttccttctcctccttcatccgatgaagaactgctcgaagggaagtcctcctatcttgaagactatttaccttaacagataaggtctcgatggtctccttaaaacggtcagcaacctcgagatccttagtcagctcagttatcttcttttgagcgacaaacagcttcttgttggcttcacccaactccaaccgaatagctcagttcgtggaagcagcagacttagcccgggagtaagtgtaggccaactttttaccggcctgcacaaggaaaaaactttagcatttgcgctaagtatggaagattaaagggaagtatcaagaaggaaaagtcattgtcagcaccagctagttgttcactgaccttaggaactagccggtccatgtaatgggccagcatgtccttgcccctcttggcctctagaagcaccggaaaagatgtagtaagtgcccgcacccgttcaggatcactcctgacctgtccaagcttcctccctgagactccttagacttagcagctttgggggtagaggggtttgcagcagttagctcctcagaaagatcaatgacctccccagcacgcctcttttccttacaagatgacccctcaccgcccttagacttcttggctggaggagaggcactagaggttccgcccattctcttcttcagagcctcaaacatctgtcgagacatatctgta

SEQ ID NO: 140643 - DNA, 742 bp, Cannabis sativa
tttcattttctctttagtaagctaacttttaagtcttgcaaaaaattattattttaattgtgtttttttttttttttattaaatgttgcttgttttttgtgggaaataagaattaacttgctagaaaaagagaaatgatgcaaaggaaaagttggagcaaaagttgaaaactagaaggaaatgctgaagcaatgctatagcattctaggcagtttgggcagtgacgtgaaaaaaagtccaaaagaacaaattttagttgtccacatcaacatgagcgtgtttgtcactaaaaattcaaccagctggatgatgtggagaagaagactaaacctagtggactaagattgcagaggattgggctactatttttagggtgtcattttgtacccttttacccaacaacaaaaacacatctaagtacaccttcttcatgaggatgatagtagctgccattttttgaaagagaagtaattgcaaaaagtacagagaggaaggaaagacgggggacccaagtgcaagaaaaagagaaggacaaatgacctatttgtttgcatttcttttcccttttcttttatatttttttctttgctttcatgtctttaaatactagaaacttgttaaatagtaaacaaggcagcagccatggatgaaccattttgaatttggattttattttttgaattgaatgtgagctaattttcttaaggcttgaatggctatgaactcctatgttgggtatgat

SEQ ID NO: 140644 - DNA, 1181 bp, Cannabis sativa
atttttcctcacttgatttataagattttgtctaaccaagaggagttgattcttgggaatgaaaccatgcctgctgttggtaccactttcaaagttctagaaaaatctggtaagaaaaatactcagtctgcttcccctggtgctactgatgaacctgttgctgcatctgcctctacttttgcttctacaaaaacggctgaattcaacttacgtttggggagaatggagacaagtcaagccttacttctcaagaggatggacgacatcatgaaattcttctgatctaatgatgatgaataagtggtcctatttttatcttttaccttttatttatgtgttttgaactattatgattttgttcatattttttttttatcttggctccttgatagacaaaaaaggggagtagtatttattttttggattgtttgttacaactctggacccttattttagggggagttgttttgtttgtgggttgtgcactttttcgtttaaaaagttactttgtttgtggtttgtgaacttttccgtttaaaaagtagtcttgtttgtagtttgtaaatttttccatttaaaagttattttgttttatgcgttagagtgctttcatgcagggggagtatttttatactcttttgtttttgtttctaacacttgatgtaggttttctccaaataaaatgttttgtcaatcaaagtggcaaaggaagagattgttagttctatttttggtatattcaattgacaaaaatattttattatttattattaatttcgataatgttaatattggtttccttatttttatctaactagctctgtttctctgatcttgtgtgagttttccattttgttaaatcagatttcttgagtagaaaatcggagctaaactttcattttctataaaagggaagtcgtacttactgctcacgattctataggtacagaaatgaaaattcatgggctgattgaagatttattttagggaattttctagtgggctatggtcttgttcagactgtgtgtaagctttcaataaggtgtttattgattataaatacaccttataggagataggtttagtatctcttttgtatctttgtatttcactcatatctttagaaaagagagtctttgttttgtagagaagagctggtttgactcttactcagtttattt

SEQ ID NO: 140645 - DNA, 522 bp, Cannabis sativa
cttctaccctatctaacctcgcatgtatttgttcacactcctctctcagcatcatcctcatctcccccatcaaagattgaagttgtagaattggaaccgtagatggtgtagttgtattatcggttttttcttctggaacttttgacatgattaaatcctgaaaaaaataatgaaagaacagataaaaaaaaagacctcaccacactccctcacgtgtttcacttaaaatatttgtcactcaatttcactcgtgttttcactcaaattcgatggcttttaccctcaaataagctcacacctatgcctttttccactagtattcttctttacgttctttaaaaattaagcaaatagtacaagagaggattgaagcagcaattccaaccaacaaaccaaacgaacaacgatgaaaactaaaaaaaaattatgatttttggaacacttgtgtggggttttgggaaacaagcctttagactatggagactaagaaattacaaaaaaaaaaaattgaagagagatttt

SEQ ID NO: 140646 - DNA, 673 bp, Cannabis sativa
attttatatcaagatttacaattagcaatagagtacaatagtaaaagttaatataaaaatattacaaaattactttttacgccaaatataattcaacttttacatctcttattaattaaaattaaagttttgattaatgctctttatatatgtagtaaaccactacatccccagattcgaaccactagggatgcacaaaatatgggtcaaaccattcaacctggccaacccaacttattttatgtagtaaagggttatgttaagagtaggctatgactcattggattgaaaagtgatagaccatataattatgggttcgttataagttggacacattttaactctatataacccaaaccaacccatttcttgaaagatgttctaaatttaagacaactttcatacataaaatatattttatattcacaaaatacatacaaatatatattttacgttttcataaataaaaaaaattacattgtgataaccttagaacgtgaattaaataaaacacatcactaacatgtagtctataattactctactacttctaccaacaagcctaatgtgagaatcattcactattattaactgtgctactcacacaatgataccactactatcttagttttttctaaaagcactatattacacacacagatatatatatata

SEQ ID NO: 140647 - DNA, 840 bp, Cannabis sativa
cacttagccacattatggactacaaaattacaagttctactaacatacacaaaattacagcaatgtatccgtttagtttaattgaattggatattgcccagccaatgtatactaagttctataaactttttatagcttttaaaattataaaagtcttcttatggatgtttagacaaaaaataaaaagactttttaaattaaaaattgttttggaagtactttttataaaaaattgaatatttcataaaattatgtaaacctaaatataaatcaaaatttacatttatattgtagttctacttagggttgtacataattttttgtaaatcgcttaacctgaacaacccgcttaaaccaaaccgagataacccgacgaaaatataacccgcctaatctttatattgggcgggcagaaaataatatcaacctgcccaatcaacccgaactaacccgaccaacccgatttagagagtttttttttttaattttttttttatatatatatatgtttttactatatataatctatatattatataatttatgtacatatttataaaaaatagaaagttcaaactattatatttttttacggcggatgatttgaactttaaattcaatctttatatttatttttatcacaataactaaaatataacaattgagtatgaaaaaaaataaatattaatgatcggtttgacgggttaaccctgactaattcattgggcaggttgtacttagatttttgtaactcgatctttacattgggttaaataaaatgtaacgtaaaccgactaaaccgaccgacgtacacctcttctacctatcaaaaatagaagc

SEQ ID NO: 140648 - DNA, 819 bp, Cannabis sativa
tttcttcatatttttattttactaagtgttggaaaattcatcttgaaagcttggattcttggtgggttttgtgcttcgctttgtttggagcttgaggtagttattaaccccttttgtttgctgatttttcttgctgaaatttattgttcaaaatcatgaaaatagtgtatgatgttcttggtttgcatgtggggagaatcaatattaatcttgagaaatttgggtgtgaattgcttggttttgtaatggattatgttggttgggttctagatgagatttttgggtaattttcatgtttaaattcaagtttttgtttgatgtgttgttgctggaaaaataagtttgatgcttgcttgaaggttcaatttcttgattaggaacttatgatgaattttactctaggtttggatctttgatttcatattgtttgaatatgaatttctatacatgtggactgaaattttaagcttaataatgtgtggtttaacttttttttgtggtagtttaattgtataagaggttatgttggattgaagcatgtttgggttgaaatggatgagtttagggggctgaaattcattgtaaaatactgatttttatgttgcttgtttttggtgttgttggagagtgaattaggtgtaattcctctctaattacttggtttatgctaggtaaaagattgtgggttgatataacatgaaaaattggtatttttggatgcattttcgtggctggaaactggatttcctggggtttcaaacccagtagccgcagccattttatggcagcatgttgtgttttttttttttttgatttttt

SEQ ID NO: 140649 - DNA, 776 bp, Cannabis sativa
  modified_base (63)..(69): a, c, t, g, unknown or other
catacatccccccgtactccttgtaaatccatttgcatctcaaagtacttgagatgggaaagnnnnnnntctctcccagtatacatcttccacgttgccatttggaacttgtgaggcagtggcaaaagattgatctttggtgagaagggagttccgcgagctcggtcaaactcaagatcattgttacgctttccagcgacgccatgaaacatatttttcaattcgtcaagctgagcctgtatggcttggctgacctgcttggcattctggtcgacttggattacgtcagcatctttctgagcggtgatttcagtatgggctctaggctgcacgattgttgtagtattctgctcgtctggtccccttcttctatttagatcattccttaggtcatgggttgttcccaacctatcaaacacagaagagtcttgttgccttaatgattgattcgcttggttgacaagttgaataacgccattattcttgttggagcgatcaggtatggattctcctaatgaattaccggacaaggtctgcccgcctacctcttggcccacgagcggaactcgtaactggggattgggcgactgaccattagttgtctgggaagtattcatcttcgggtcatcttccgtttctcccaggggaatgacattcggtgtttgctgacctacagtttgataggctctttgttcgtcaaacgcgagatttactgcagcacacagttcatcctgatcatgatgcaaagtgttgctatgactctacatgagtccgag

SEQ ID NO: 140650 - DNA, 502 bp, Cannabis sativa
gtgctggccgacctgaacggaaaacctcgcgctagatgcatgccctaatcacattatgaaaccgggtaagttacaagatcaaaaccctaatcccacgaaacccaaatctacaacccttggttctgctatactttctagaggttactgtaactctggaaatagggaaacacctaaccacggcacggaatggacgagaatcgagaaaacgaagcatttggggatcctgcaaaaaccggttacccgatttgcaccagtacacaccaactttttcatttcttgctcagttctccagcaaatgcaaccaaaccttcaagattacctgattagggtatacacaacatattccaaccaatatttcacagaaaaacttagtgtaaacaaatatgccattaatgacctaaatttgagtttcaaagttcaaacttgctcaactccacctccatagctcaaattcaataaccagaacttcgtatcaacttaaaattaacataaaatcagaacc

SEQ ID NO: 140651 - DNA, 672 bp, Cannabis sativa
aaatagaaaacttactttttcttctagccttacaagcttcgactcaactacttgaacaacaatattagcagtagcaacaacatctgctcttcctgttactggacctttgttaagaacaaggtatgtgctaccacaacaataaattaatcttcatggcagcccatatcattgcaacaatagaaatcccattaatctcttcattcaataactggaagaaaaaaaaattacaaagacaatttaaccatgagtaatataaactctctataatatatgaatttcttttcttagaaaaatctacaatctcagctttcagtttgcgttcgaataacactagctggatcctctataaatgcaaaattaaaaacatactaactatacatttttctaaataaatgtacaactaaaattattatagaaaatcattcaaaaaaattattatggaaaaaaaaaaactaacatgtgtatttggaggagtgggtcttgattggttgtgtgtcttggtggaactgaaggagagtggttgtgggctgaacaagaaaaaaaacaaagaaaaaaattaggatcccaaacattgtaataaacaatcacataaatgattatccaaacactaaaatgtataagattttcttttacatatcttaaatatagataatgtcacgacccgagccctag

SEQ ID NO: 140652 - DNA, 630 bp, Cannabis sativa
  modified_base (463)..(464): a, c, t, g, unknown or other
aaaattaatgataatctattaaaataaattttattaatttaaaatattgatatttaggtttaaatattaaaaaaaatattttattttgacattacggtttaaaaattagaaaaatcccacaaaaatcggattttgggttgaaaccatgcaagctgtccaagaggaggttgcgtgcagcctcctacgcgtgcgcatggatgaggcaacagggtgcatgtgtggggattcacggccacttccaggtgtcagctcgggcggatgcatggtctgtgcgtgcgtgatcgaagcttcagacagggtttgtcccctgtccgtgcgcgcatcacctcattgtacgaagcatctggtgcgtgcaagcaccatgctcgacatcggcggtaatgattttcaaacaaccataactttgtcatttttcatcaaaatcgagttccgtaaaattaaaaattgcttaatttttcacaannaatccaaataaaatatttttagtacgaaaataaaattattttcatgaaattttttgtaaatcttatacattcatcaaataacagataaaccaacataaacacatccaaatcaacacaattaataatattcattgttttaaatccatattacatgaaagtaaatcat

SEQ ID NO: 140653 - DNA, 737 bp, Cannabis sativa
  modified_base (51)..(62): a, c, t, g, unknown or other
  modified_base (430)..(449): a, c, t, g, unknown or other
ttaatataatatttcaaataaaaagataaaattatcttttaatttaaaatnnnnnnnnnnnnaaaatatctaatcttataattaagtaaaataatgtcctcactttagtgtttaccttggttaaaaatctgtatgatagattaatattttcatatataaaattaatattttccgcaaggcttaatttggaatcaaaaatcaaatttgcctttgtgaagacattattttaaatgatatatgtactaatttttaatatatttagtatgtggaataagaattaattatttattttattaatggatcatttcaaaataaataaataaatgaactgctaatttaaaaaattgaatcagttaagtaaataaatagaaagacaaatattaaatatctattaattagttatgaggatcaatgatcctctatatgaatnnnnnnnnnnnnnnnnnnnntagattactgttacaccctacaatatatttaatccttaaaacacttaaccctgtagaaatgatatttcagcttatgtgaatgagatctccaccatttattttcgtttggtcaagctccaaggagatcatccgttacttactattcttcacgcagcttgcaaaataatagaaatcaacaaatagaaattaattttacttgtcaaacgagctaagaattaggtggctgattattttctctgaaaggaatgagatgcattgtgttactttcctgaagtcattactttctat

SEQ ID NO: 140654 - DNA, 1664 bp, Cannabis sativa
tcccgcatctgcgactctaattcctaagtcgttagttgtaattattctatagagacgacacgtgtatgattttataaactaaattaatactaatatattaattaattattaaacaccggtaactcatattacattcacatatactatataaatctctgtaatgtataaattacgcttgtgtaatatctcagaaaataaaataatatttaaatagacatattttattaaatatgtaaatattttggtaacgaagtgagattatgatcttacttagggtaattactgagaatttattgaatgatatatatagcgtaatttattaattacggagattatattgagatatgtgagtatcgagaatactattattgaaataaaaatattttatcgggcccggcgactgtggaaatttaacgatgtggtcagaaatgtcacgacattaatgggaaaataattttgaggatattccggactagtttataattttagaatgtcggtttggtggattagtaaaattaccaaaatgtccctaggctatttttaaaatttaagtttctttgaagggtaatttagccattctttaaaataggtattttatactttaattgttatgggctgacttttaaaagaaaaaaataaataaaacaataataaaaataagaaaagaaaaccctatttaaaggattagcttgcaaggcaagaaacaaaacactccattctccttttcttcttctccttcgagcaagccaaagccagccaccctagagggatttttttcagcttcctaccctcatttcagagctggttcttgtcccaagttagcctagaagtgattgaggtaagtttacaccttataggttgtgaaatttttatgattttggctggtttaaggttagggttttgtgtttctgtggctgtagggattaaattgagtttgagttatgtttaggctaggtttttgagcatgttgagaatggttttgagaggtttatttggctgcttggattgaaatttgttggatgaagctaaaagttgaatttcttcacttgcacatgtgattttaaattaaagattgaatttttgtgttttgaagcttgagatatgttgtattatgattgttatactgttctggaaggtttgaacaggtttggagaagatttggtttggttttggagccaaaaacccgagtttccattttttgcagcaggggaaaccgattaaccggtttcacaggcatagtgaaatcggtcgaccggttttggcaacagtgggggaaaactctagtttctttgaaactgatttcgctcggggtgttttcagaacttagaataggttattttagtgatgtttaagctattttaaactagtggagagttagaaatttgtccgattatggagctagagcttgtttggaatatggataagttatttatcgaatttctttgtcgtgacataggacccgggatcgcttagcttgttttccactcaggtcggccgtacgtttgagttctgaactaaggtaagaaaagtggtaagcaccatatatggcaaagtgttatcggttgaatgattatatcttgattattatcaagattcttattaaaagtatgtggagcctaggttatgacctagggattgggagcggttattaccgttacgagtaa

SEQ ID NO: 140655 - DNA, 649 bp, Cannabis sativa
ataaaatggtcaatcgaactggggcagttcgacataacataccaccctcgaacattcatcaagggccaagccttggcagacttcataatagaaggcataactccaaaagaaattatgcctgttcaccgagacgcggacacttggaagttatatgggatggcgcatccaacgagtagggctcgagtgcaagggtaatattaatctcaccagaaggctttaagtttcattatgctttgagatttcaatttgacgcatcaaacaatgaggccgaatatgaaaccttgatcactggcattaagatagccgaggcgttgaaagtcaaaaatctcatctgccattgtgactcacagctgattgtaaaccacgttctcagggaataccaagccaagggcctgaaaatggctaagtatttagagaaggttcggaagaacttggaagtattcgattactttaaaattgagcaaattctaagagaacaaaactgtaacgctaatgccttggcaagactggcctcgcagaatgacttggatgaattgaacttggttccggtgaggatacttagcgagccaagtatatgtgaaaaggaagacgtagagatgatagacagctctcctacatggatgactcttataatcaactatctactcga

SEQ ID NO: 140656 - DNA, 1010 bp, Cannabis sativa
  modified_base (817)..(823): a, c, t, g, unknown or other
aagtgtctaaaggcaagagaaatatattcatagcataattcggcaatgcttgagcaatagatttcagcaatacctcattttccgcatgagacaaaataagccctttccaaccttgaattctcttccaaagcttatccttaagaaagccaaggatagcatttttattcctcccaaccgaacaaggaaggcccagataatagccattttcatctgcctcataaacttccagcatagcatagatagaatcccacacctcactaccaatattattgctataaaacacaaaagacttactgaaattaattctttgttccgaagccacctcataagtacgcaacagctccttcacattgtacgcttcctcctcagtggccttacaataaatatagctatcatcatcaaagagcatatgagagattaccagcgcacctcgagcaattttacatcccgtgagtaaaccactttgttcataactacgcaacaaactagaaaaaccttcagcacaaagaataaatagatacggtgataacgggtcaccttgacgtaatcctctttaagcaacaatgggccccaactccttccctccgtgtgaaatggtataggaaacagaagatacacattacataactaagttaatccaacgaccattaaaacccatccttaccatcatagcacggcggtaaccccactcaagcttatcatatgctttgctaacatcaagtttaagtgccatctaaccatccctccctctttgttttctctttaaatgatgcataatctcataggcaatcatgatgttatctgagattaagcggcnnnnnnnaaatgcactttgagtatcggatatgatagacagcataacacgcttgagtctattagcaaccactttggacacaatcttctataacacattgcataaagcaattggtcttaaattccccatatccataggttgcttcttcttaggaattaaaaccaaaatagttttgttaagatctataggaagaaac

SEQ ID NO: 140657 - DNA, 518 bp, Cannabis sativa
agtaatgtaaatatgtacatttatttacattattaatttaatttttagttatatgaaattaatatttaatttaaatatatttaataaaaataaaaatacatatgaaaaaaattatatatacgacagaagttattatgttaatagtaggagtgttcacggattggtttggtccgaattttcatattttttgaaccaaaccagtataacgaattttaaatattggaaaccaaactagaccaataaatttctcaaaccaaaccatttgaaaccacggtttaaatggaatttataattattcatatttcttcagtaattgtactatttttactaagtttttaattttatttttcaaaatatatatttaacatgataataataaatctgtaacatataaataacaatataaaaatattttttaaagtcaaacataacataaaaatttaaaattcatgcaataaaaaatttgacacacaaaaaagttttaaattatacatatagtcatatataaaaaatatata

SEQ ID NO: 140658 - DNA, 565 bp, Cannabis sativa
acgctaataaaaactatttgcgacaacaatatatacgtcggtttataaaaccaacgtaaattctttaagtgtcacttaaaaacagacgggaatagtgaattttgtagtagtgtagggacgctgaagtccaagaggtggaggatcaaggcaaggtccatcctgatactccttctgaagttgaggaggaaggtgcagctcagaggtttccctttggtggcttgaatgatgatggacaacctatgtctgaggcttgagagatcttagaggccgttgaagactatgtcactgaggaatacaccgaggccattcctctaagaaggcaaggcgtactaggagctcggtgggtttctcccccatccgtggtaaccaggacaaagatgaagaatttgcagaagcagggttacttggaggaagtcaaatgcttccttccctcccccaaccaattagcgaccagtctaagggagggaactgtgcttggtcaggcgctcatgttggaatttattttaccaggatcttaggtttactaacaagtatgttatttaacatcctaaatatgaacttcaaa

SEQ ID NO: 140659 - DNA, 889 bp, Cannabis sativa
aaataaataaatagtaaactaccataaattgtaagagattctaggcataaagaggtgggtcattaattaaaaaaaatgaaaaaaaaaaaaaaactgaaaaggatttaactttaaaaatgataaatattttagcttttatcattatgttgggcctgtgcaattgcacagcttgcacagggttaaagccggccctgagtacacctaatattattatttaaaacttataaaaaattatttcaaatttttaatattttctatttttataattttatttaattttaaaataaattttgaaataaaaatattaggtgtaccgatataaacataccgcatgtttaagagtgtacacataaacagtccatggtggcagttaactgtgaattatttttctctgaatttttccgtctctcatttctcctagaattctaactacttaagcttctatttatagattgataaaatgactaatgtacaaaatacgcttacgacaaattacataaggaaaatttgcacccagaatattctaattagattaacaattattacactaatcggtaatgctcttattgactttccgaatcaaaaggcttagattggtatcgatcactgttcatatcacccaaatgttgtagtttatgcttacattgactatcttacagggtatttcaaccctaatcaacgaccatcacaattcaaaatattgaaattgaagaaaatattataattaagtgcaaaattcaaaatatataatattaattacttataattatttataaaaaattctacaaaaaaaaattattattatttttatgaactaaatcttaaataaactctatcttatcatgacgtatgtgtttgtatgtaataaaaaattctataattaatcgta

SEQ ID NO: 140660 - DNA, 556 bp, Cannabis sativa
  modified_base (141)..(154): a, c, t, g, unknown or other
atttgttcgttaaagtcgaccaatagatcttcttgtgacatatagattaaggagacgatagctcaattgggcgggagcgttaatcatagatacaaaatctatagcttctatctggacataaaagtgaaacgatgattttcnnnnnnnnnnnnnnaatagagataaatggttgagtacttattttagttattatattagttcactgaaatattatttataggtaactaagtgttttaatgataaaatacattgaagggtgtaacagtaatttgtccctactctatgtagatcatctatagaggatcattgattattaggaatataacaatagataattcatagcgtatctatatcgtaaaacatatagagcgctctatataattgagagtggaattccaaatctatagtggcgaaatgaggaattaataagttagagaatttacttggtaattctagatctacttattggaagctctgttatataggcctagctatgatccccatactagtttagataatactgcttgtaagactcagttagttaattttaattaat

SEQ ID NO: 140661 - DNA, 856 bp, Cannabis sativa
gactatggtggtccaaatggaccacataataatactcgcagcatatggaaacccgaacaatggtggttccccttacgtttctcgcaaccaaagcagatgcccttttgttcgcaccccatcgacgaggacgagctaatcagaatgaaaactctttctctcccactggtttcttcacgtggcctaggctttgcacgactcattggtctttggtcttcttcccaaatgacagacgacccagcatcgtcgacgagccaaacggaggtcattgccacctagatttttactgggatttaatattaggcattttacaatttttgtatttttttgtttaaagatttagattttttacactatgtttggtaggagggagaagtggagggatggagaggaaaggagggatagaggtgggaggagataacaaatctctttgtttggcaagagggagtgaaggagagaaaggagaggtgagaggatagcaaatctactcaaatatctaatttgtaatccctccaataataaaaggattcgaactctccctcttcaattattgtaaattacataaaaattctcaataaatattattaaaaaaataattataaggataaaatagtaattttataaattaataattatctatcattcaatcactccatccttcttaccaagcaatataaaaggatcattactctcctctcccttccttatattctccatccttcatcaactatccatccatctaactctgcctccttcctaccaaacataaccttggtgtaaataaaattttcttttagaattgctgcaccaaaaataaatattttatattaataattggtgtaaattttacactaaatta

SEQ ID NO: 140662 - DNA, 793 bp, Cannabis sativa
acatacttgttagtaaatgtagattttggtaaaacatattccaacagatttccctgacgatacccgaaagggtactcgaaaggcctattgcaaatatcgatcactttggagtgtcgcggatgtctacctttcacacacgctaaatcaccaagtgacagttatactttttctaacaaagatcagatcttgtctcttatgtccaagcatggtagtgtgcacacctccaccatctttttgctaggcaggtattatggaccaccacttttaaaggtgagagctttgggtgacacatggcctctacttttaaaggttaaaggtttcaaagacacgtgttcactaactacatattgtccccaattgtccagctgcaagatgcacatccaagggaccaaacggtaaaatctcactttgcacgtaatttaccccactagtagattttgagtagaaaccctaggtaggtcatggacatgtccatacccgtcacttaacccataaatacccttctatttccatacgaaaggaggatgacaacctacatagctaaaactctgccaatattactcttggtctttttctttttcaagagaaactaagagtatagagttagagtttccttcaaaaatattgtaaacacatcaaaaacgctctaagaggctgatagactgacttgtggactaagattaattaatacccgaaccacataaaaataaatgaaatttttacactaaaaatctaaaatgataaatttattacattaatacctatacacggctaaaccaacttttttactcat

SEQ ID NO: 140663 - DNA, 1234 bp, Cannabis sativa
ttccaacattgcactctctggtgtacatgattatagcaacaaaaatttacaaaaatatctattgctctaactattcagccgcacaaaccactttcttcaacaacaatagcttccagcaactaaaccagcaggccaattgtaaagaaaccaagtaagacggagaatcttaataaattttggcgacatcacctcagaagaagactgtaagaaatctaaacacatacaaatttgatttatgcaaaattggacagaaaaactggttcgaagctaaaattcaaccctaaattacaattaaattcgaagaaaactaatcctcctaatatcaattttcagagtcataaaatatagatctatttgaaatagatctggagtttctattcaatccaaatcaagtacaaaccaaaaaaatgtatcaatacactagctaatgtttctcccgttgcattaacattatttttcaaatttttaatggtgaatttattcatataaatcacgaataataaagaaaatttgaattcatctagaaccacgtatatagatacattgttctagtttttaagtttctgcgtagttacattgcagttacattaatattttaccaacgctctaaaactagacatattaatgattacgaattgtcaatgatacaataatttttatgatatttgcaagtatttcatatccataattcgacacaaacctctttaaaaaaaattataaatggttagttttattaatatattcatttggttgttataaagttggttaacaaaattctaatagttgtttctccacagaatattattaaggtacaattaattgtagatcagtgacagaaaaaatactgacaaattttttcatgacgatgtccattcacatcttttatatttagttgcatttaagttgtatattagttgtataatagttgtgctagtataatattattatttaaaaaaacacagagttcggaattggcaatacacgactagtacagagaaaactcaattgttgtaagttttgtttgtataacataggggcattattatttgttttaaggtttaatattagttgtctcacagcaaatataaatgttgcattatagtttcataatagtcatctcatagttgacgtacaatgcttaaattttcaaattgtcagaacaaagatgccactactacaaaatgttaggttatttttagtattaattttagattaagtttagtatatttttaat

SEQ ID NO: 140664 - DNA, 730 bp, Cannabis sativa
agatggttataatagctccttttatcaagataactgggaattgatcaaaaatgacatttttgaagcagtcacttcattcttacatataggcaagttgctcaaagagttgaactcaacaatcattactcttgtgcccaaaagcaagtgcccaaatgttgtaagtgattatcgacctatagcttgatgtaatgttctatataaagtagccaccaaaatgatttgtagttgattgaagttgatcctaccagatattgtagctcaaaattaaggaggcttcataaaaggccgctacattgcccacaatattatgatttttcaggatttaatcaggactatgggaggaagaatgcaaagcgtaactgtatggtaaaacttgatttgcagaaagcttatgacacattggaatgggattttttagaagagatgttgtatgcacttaagttccctgtggtttttattaaactaatcatgacttgtgtctcaactccaaggttctctttgcttttcaatggatccttacatggtttcttcgcagctaagaaaggacttagacagggagatccaatgtcaccacttctctttgtacttggaatggagtatctaagccgaatcttgaaggcaattggagataaagaagactttcatttccatgaaagatgtgggaagttgaaacttaatcacttgagttttgcagatgatgtgcttattttttgcaggggtgattataaga

SEQ ID NO: 140665 - DNA, 744 bp, Cannabis sativa
aataggagagtgccatgtggcgtttagtgcaactgggccaactcttaacgggccgggctggccttgcaaatggttttcaaaaataccaattcctcaaaactttattttcagctttaattcctttttttttgtaaatattatatattatatgttaggagaattagaactaaggaactttgtgaggagatgtgtgaaatcactaaattatgtctatttattttttgaagagctggattttgtatcaaatatttttattgtcaaaatatattacataattattatatggtaaccttaaatttgtttcacatgacttagagctagtttgacacagttgtgttgtaggaaaaagtaactgtaactgtgctattagaaaaataaactacagtagaactatagaaaaaaattgagcaaagtgtttagtaaattataaattttaaaatgatgtgagtaagttagattctattataatgataatgataatgttatatttattttattataattacaaatatataaaacttatgttatataattttaattattttctcttaaaagtataaatttatatacatttgataaacataaattatagtatttttaaattatatttttatcatatttaaaataaattattagaaactcaaacatataagaaactctaggttaatgtgaagttagacatttatatgtataaattgaaatatatatgtttatgtataaaatgcggaattaaatcaaacatat

SEQ ID NO: 140666 - DNA, 584 bp, Cannabis sativa
aatattttttaatcctttttagttatataaaaattttacgattaacaaaaataatttataataataaaaaaaaaacctcacattaagttatgcattataattaaataaatcttcactttttcttattttacacttaaaaaatatgattttttttaataagctaaatattaataataacttactttcaaataattaaaaatgtcattttataatcattaaaatttatattttatcttacaaaattaatacattaacaattttgtactaaatgaaaggtttatattttgataataacataattttttctgaatattaaaaataatataattttatcatcatttaaatttataggaaaattctacaataaacaccccaaaattgaaagtacgggtacgttcaaaatcctttgttgttattggctattattgtttctgtgggcctagtcctatgtggtccatgttgtattagattttctgctattaaaaagagggtgcaccaatgtgactcataaggtttcttattattggtacacctgtctacgaagtaaccgtcctcaacctcgtctcaacacctcttcaatccca

SEQ ID NO: 140667 - DNA, 1017 bp, Cannabis sativa
gttatttaagcatggaaattcaaatttcccaatagaaaaactaaaattttaatgaggtattttaaaaaatagagtaaaaacttgtagggagtaatgtgacttggtacatttaaatattgttattttgtaatttaatgtaataaattttaaagagtataactaactactctttaaggcaacaactctagaaaatattaaaagtgagaataagaataaaataaaatttataatgcataaacaaaatttataaaaaaaattattaatttttttttcatattatattgaaatgatcgctgcttctattttaaaatagaacaatcattctacgaaaaatagtaaaaaaatattctattagaatgatattcttatattttaaaatgtaactaaataaagaagtggaattacctccaactaaacactagctaagagtttttagctgctaaactatcgtaactattgtttgatttgcatttaattttataagtttaatttttaatgataaaactctctaaattacctgttagcaaattaaaaaagttggttatgacaaaataaaatttaataataattggatttagaggtattatgataaaattgattgtattttctgtatatgttcgtattagaaattatgttcatatttattatattaaaagcacaaactcaaattttattttaaccattttaaaaaataattacaaaattgagtgtacaaaatagtatttaccactcaatttgaaaacaaaattctcaaaacttaacacaaccagcctcctgtcttgtttttttttttttttttgaaatctacttagtatttactttagtttttgaccaaaaattatttaattcagtttcatttttttgagatatacggctgagatgattttttctttttggcggctgagatgagattatgtaaattgtaaacgggaaatttgaattaatatgcttatattacccaaaaaattttcccctaaatgcaaagttattaaaattggtaatatatgcccatttaaa

SEQ ID NO: 140668 - DNA, 515 bp, Cannabis sativa
tccatccaagaatccaagtttatttttcacagagattgagagttgcattgctctactccaggagacatagttgtcttgcccagtaagaagttgtgagacaagtatgttacctggattgtcgccgtggtgaaggtagtatggattcgttggatcctcgagtggattcttttgattgatgaactggagttcttgatttccatggccagtagaagctgatggactatctgcagatttcgacattggttcttcactttccatttgagttgtggaaggattttcattcgacatgaatgacagacagaagaacagagaagtaggcgcggtagaaaaggtcgtcggagaagaacacaagaacacgacgccagtaccggagaagatgaacggaggcgattggatcgattcaaggaaagtatatatttccctgctctgataccataatgcggaaaagaaacaagatttaaatgttgtttattgattcagtaaatgagaaaaacagaggaggaacatttatataa

SEQ ID NO: 140669 - DNA, 830 bp, Cannabis sativa
atttttaaagttgaggactaatctacatcaaccctaagtttttgggaatttttgccgcaaatttcccttaaaataattcattatttaacttgatatttaataaataaaattattgaattaaaatctccattttgttgcatgtgtgtaacacatagtgataaggcatcgtgttacacacatatgtcatatgccaaggaggatatatgtgtcttttgatttcttaattttttaattaattaaataccaaataaccaaaaaataaattaattttatgtattttgatgaattttgaattaattaaatactcataattatttaataattgtgtttatggcatagtaaaatattttacttatcatataagtcaaatttgcccattgtttgtatttacctttatttattttttattgagctgtcttggggaccataaattgaataattaaactctttaattatgtttgttaatttattaattctgatattcctccgctatgaattcagaattaaactctttatgttatagatttacttttacatgaatcttttcttaagttgttcattgattcactagttcaaccctctaataaattgattcataaattagaatagaagaattaccattttactcttctaatttacttcttactccttaagtaccatcaatttactagtgaataattaatctatattatgatttttaggccaatccaaattcgatgcaatcatatatcggttctatccattggatgtattttatatatatttatttatttaatttgggtttatccaatattttagacctaatattttttggatcggatcggatccat

SEQ ID NO: 140670 - DNA, 1351 bp, Cannabis sativa
  modified_base (691)..(692): a, c, t, g, unknown or other
tgatcctactaatttattttagcataaaatttaaattttgctataagtgagtaaataagcgtaattgataaattacagagatttatatagcatgtgtggatgtaattggaataaaaatattttcgggttcagtaactttgaagatccgataagtggatatataagcttaatttgttgattatggagatttatttgaaatacgtggatataatatgagtcatttgtgaaataaaaatatttcaggttcgacgaccctgaagacccgattggagaccaaaaatatcacaatggttttagttagaaatattgatggaattattggaataagtttattttagaaatttcaaggtattttggggtactcaaagttggtcaaataccttagaaataccaagttattatattatatataaacgaaaacttatcagttttttttatatatattatatatatgttttaaaaacattacagtggcagaagaacgaatgaacgaaattctcattctctcccttcgacaaaactttctccccttatattcattttcttcaattttcaactcgaaaattagcgatctaagatccggtagtagcaggatagaaaatccttgaaaagggaaagcttaaggtatgatttaattttgttttcagcttaaaaacaattagttttgtataggggttttgtgaattagaanngttatggagattctgactttgtagaattgttctttggtacctatgggactaatatcgatgtttacttgttgaatttgaggggattttgagttagaattcaaattttaaactttataaggcttagtccgaatgttaatggagttttttatttaaaggctccattttaatttttgttatacaagaatggtaatatttttggtatatatgcgtcatatgaagtttggagtgatttggataagttttggtagtgtttcggtgagtgcaaaaatttggatttttgagtttcatagtttttagaaattcctaagagatcagaaatcgtatgtttgtcgtaacttttgactcgagtgtccgttttggatgttctatataccatttggaagcttgggacaagctctacaatatggtgtatgttttaaagcaaaaatataaattttattttagtgtatttataccgcggtatttggtagaaaaccctagattatcttatgtgaatattaagaagtgttttgggataaacatttatttgtttattgttgttgtgacatagggccaagatcatcggggaaatttctccacttgggttggccaaaatgtatgaacctggattaaaggtaagaaaagtatattgtactccatagtacgttgtatgtaataca

SEQ ID NO: 140671 - DNA, 529 bp, Cannabis sativa
  modified_base (137)..(141): a, c, t, g, unknown or other
  modified_base (494)..(495): a, c, t, g, unknown or other
taataaatttttaaataattattttttttacaataaaatggctcttgagctattttctaaaaagacatttagacacgagtttaatggttgttgccctaaaaatttaatgaaattatcttatgagattctcaaaaaannnnnaggcttgccacttgcaataggggccaatgccatagctggtttactatctagaaaaaagaaggtccaatttgaatggaaaaaagttcttaatgatattgattttgagttcaaaacaaatcctcaactcgtaggaatttttgaaattctctctctcagttatgttgatttgcctttccacctcaaatcttgcttattgtattttggaactttttcagaagattatttacttccgaaaggaagacagtgtcaactatagattttttgagggtttttttcaagtaagggaaggaaaatcattaatggaagaagctgaaggaaaataaacgtaatctttcacatttgtggaatccaanntttcctctcttctttctcaccataatctatcaca

SEQ ID NO: 140672 - DNA, 743 bp, Cannabis sativa
ttgtttaatcaaatatgggttttataaacggactagctagtgtgacgtctcggaaaatcggggcgttacagaaattacttagttgtgatttattaaaaaaaaaagacttgatagtaattgatactatatgttttcgtttagatctaatgatatagaatatgagtgttacatatgtcctatttaaagtactaatagagtcttatactaataaaactggatgcaaattataattttactaatattgggtacttgtaccggttacaaattcaaaattttgtatacttatgccgcaattattcctaatctatatatttatataaagaagagtttaagattgatgatgtgacattagggatgcacatttcccccacgggaatgggccccgtggggacggggattactttttgtccccgaatgttaaacggggcggggacggggatcacactccccgccccgacggggacccgtttagtattttatcttatatttctagtaattttttatattttataatttatgtttgtattttttttagcatattagtatcttttttatgaattttaagttgtgttttagattataattagtttatcgaataataattaatgtgtaatattttaatttttatgtattttaatatttttgtatattaaaaattttatttttctattaggggattcccggccatgtccccgttcccattaggggattctccgccccattcccgatggagaataagcggg

SEQ ID NO: 140673 - DNA, 1548 bp, Cannabis sativa
gttcggtctcgggacatctgggatttattattttgtagtcggtgtgcgacctggttatgtattttgtataaaagttttaaaatgcaatcccagcacttgtaaatgattttgtaagttataaagttttaacatttaacataaaatttttaatttgacacaattttcgagtaagttctttgattagcaaagatagcactataattgaaaaatcactgtagcgtgccttaacattagggcattacaattttggtatcatagccgccgggttcgtctactgaagctcggcaagacatgtacaatcttcatcagagaaagctcagctcacagttcagtaagctcatacttgtttagtattgtatgtgattaataaagcatgttaggaagcatattagattatagttgtttattttaatgcattgccttaaaatccataagagcgatattaagttttatgatcgctgtctaacctccctggcttatgggttcgcaggctaagtcctattaaatggacgcccaacgaaataaaagaagttagggtaatatggttgagaccggaggcggtcagggaaatcaaattccccggaatccccgtggtcgcggccgaggccgtggcagaattcaaggtggtcatcctgtaaatccaccataaggtcctccggattgggagcagaggtttgcagagatgcaagatcgaatccacaaacaagaagaagaaattctaagattaaggcagcagggtcctactgtagtgcttccacaacaagctcaggtcgttgtagctccagtggtgccaacaaaacaacctgttgttggtaaccgtatggagctgttatgcgagaggttccgtaagcaagcacctccagtgtttttgagaggttcatatgtgatgaaggctgagcagtggctcactgtgatagagcaaattttgaatttactgggggtggttggaaatgatcgggtgacctgcaccacatttcagttccaggaagacgttctcgtgtggtgggagttggtgcccctcacctggaatgtcactgtaatgacctgggaagagttttgagagttatgcaatgccaagtattacaacgaagcagtctgcagtgctaagcagaaataattcactgagttggtgcgaactgaggggatgtaagttagtgaatataccacaaaatttaaccgtctggcccagctcgcctcaggtatcgtgcctacagacttcagtaagaaagaaaaatatctggctggttttaatgtgaaaattagacatgatctggtcattactactaatgatgcaacatcatatgcggagatggttgagaaagctttgcgagctgagggtgcggtaaagtttctccaggagccctgtgtgactccgagtgttggtgggacccccactcttcctacttctgtctagggtaggaatggtggtgattccaccactgatcaaaagagaaaagtgactccggcatctagtggctcggggcagagcaagcggttccatgggaaccaaggcagaggtggacgctaaggttattcttaccctgagtg

SEQ ID NO: 140674 - DNA, 1028 bp, Cannabis sativa
ttttagtatagcgagacaaagacaatagttatagttagagttagacatagacattgagaatatcgagaatagaatagacgagattttagagtttcccaaattacccataagtgctcctttaagctgttttgtggggaaagggcaaaatggtcattttacccatttatgctttgtctttagtggtttttaatttgatttattaatctggatatttaggtatactttagctgagaatttagttaaataaaaggaaagaaaaagatttattttactcaatattttcaaattaagaaaaatcaaggaaaaagctatttcactctcaaactctctctctctctctttttcgttccacgctagagtagctggggttctttatgttcttcaattgttcaaggaaactcagctggtttttaagtgatcttgatcaaggtaaaggtttagctcttctcttcttgttttcttgagatttaagtttgagatttttgcatgattgttgatttgctgctgtagttgctgtagttgctggatgttgttttcagaggtttagttatgatttattatgttgatttaagcatgatttagtagttgtttgaaggtttttgcaagctttgagttttagaactcaagcttgaagctttaatggtgattttgaattttgagctttgatggttgttttgtcacctggaaaatgtttattggggtgtattatgcaggtctggaaagtttggttgggtttggaaacgttttggttaagggtttgagctttgttggttttctgggtaaaaccggttacctggattttgcagcagggggtgaaaaccagtttttttcagcttgtcgtttcgtgttagtttcaggttttcaggcagtttattccctgctagtttgggatatttttttattaagttgcagtaggttgagttttggttttaaacctttgtcccggttgtgatttagcgaatcacttatttgttttggaatcaatgtgatttaggagcctatacttcgtcgagcagttgttccactca

SEQ ID NO: 140675 - DNA, 892 bp, Cannabis sativa
atattttatattatacatataaatgtctaacactttacgcaatagttgagtgctcaaactacgaggttgaatgaacctactgtaccactttctactattatgtctttcgagaggtggatgaagcaaaatatatatatttttaaagttaattgtggtgctgcaatcttttctattaccattaattaataaaattctattatttattaaaacatttatacatttttgttttgggaagagaagagggacaacattcatttgtttgtttgttttaaaataagaaaaagcgtttaatgtatttttattttaaaatcatatatattgacaccaaataataaattatatatataatgatatatttcactttcttgatgtttttccaaatatcattaacatctactgatttttggaaaaaataaataacaagtatcctactaatacgagcttaaattaaaaaaaaaaaaaagttattcgtttatattaaaaaattaaaacttaaaactaaatttttgtacatacagtgtatttggtaatatttttttaataagtattttgtttttaaaatttaaaaaagtgaaaatattttctaaaaacatgttctataaaactgttttcacttttttaattttttaattgagaatcaaaatttttaaattttgaaaaaaaaaaaaaatcactttcaatatttttttaaacaatctttttcttaatcaatattttggactccaaccccaacccaaaccttggggctcagactccggccccgaccctagtcccagactcgaactacgatcggtcttaaattcgaacttggactcgacttaaataaaattaagaaatcaaaatgaaaataaattttatagaacatacctttgttttctgtttttaaaattca

SEQ ID NO: 140676 - DNA, 570 bp, Cannabis sativa
  modified_base (502)..(538): a, c, t, g, unknown or other
cggacctttcgcggatcctgcacctttttctttttccccggggtggaagtaggatttttccactggttcccttcagagggataccgtatggggctatgctccctggacttacgcctttgggtgcttcgtgaggactcttctagtgtttcttcaagtcctgcagggatggctttagggtgtacgtggatcgttgctgcctccatggctttcttcatggcgaccgtcaccgcttgcatccttttgttttgctctttttgggctatgatttcggcttcatgatcagcagccttttgtctcaagagtagttctgtgtaactaccttcgtcgtaggtgtcgtactcgtcgaagtttcctttgtattcgtcatcgttggtctctccccgtacctcagagtccacgttgactcttgaggccacttcctcatctttagggttttaggcgtcttgaggaggacgtggctgaagtgtgttacgagtctctgttgggttttctgccctaaatnnnnnnnnnnnnnnnnnnnnnnnnnnnnnnnnnnnnnaaagatcagaaataacatttttatgttgcatg

SEQ ID NO: 140677 - DNA, 1066 bp, Cannabis sativa
gtcccgttcccagttcccaatcgcggtcccagtctgggttctagtcctagtccaagttcaggtcacggtttttgtccaggtttgggtctcagtcctaatctttgtttagctctacgtcccggtttcaagtcagagttctggtatgagtccgtgtctggctcaaggtccaggtttcagttagtgtttgggttcgggtcttggtttgagtctgggtctgggtttgggtttgggttcttgtacgggtctagcatctggtccaggtcccgagtcacgggtcctgggtagcaggtcctggcgcaagtcttggtttgggttcgcgtttagagctagttttgggtccaggtccaattcctgttccaaggtccttattctggttcttgttccgatttcaggtcttgggtccgagtctgggtttgggtcctggtctagaaatgtttctaggttagggtcctggtacgattccaagatctagacaccgactacgggttgggtcaaaccctaggtcgtgggtcaagatccgcatcccaatcttgggtctcagtctcgtttcgattcgcatcctgggtcccagtccgttttcgagtctgggtttgggagtgagaccgaggtcgggtcttgggtcccaatcccaatcttgggtcccgattctggttctaattttgagtttgggtccccaatgtaggtctggtcctaggtccaagtctgagtctccaatctcagtctgaaacctgggtctgggtcttggtctatgtccgtgtctgggttcaggttcgcatccctagtgccgatctgagttttgatttgggtctgcatctcgatccgggtctgggtctaaggtcctagtctgcttccaattcccgaactcaaacccaaactcagacttggacccatgtctggagtacgggtctaggtctaggtttgggtgtcggtccaagtctaggtatgggtcctaaatccaaacactgactacaggtcaggtccaagcccgaatcaagatctggatcacaatctcgggtccaagtttagttccacttcgggtcccaggtcccggtccatgtcctaggtt

SEQ ID NO: 140678 - DNA, 571 bp, Cannabis sativa
  modified_base (89)..(89): a, c, t, g, unknown or other
tcatgatgcgaaagctgaattcactaagtattgattgctctgcacagatcgctgagtatcttaatcaggacatgccagcgaggcatccngctcggcctatcttcccgagcagatgctccaagtggactccacatgtcaccattctcgtgatgccacatcagagtgcaaaatttgggataatattttccccccaagtctgtacgggacttttgaggttgcgtgtagacttcttccgagctggttctgcctttggatggggacacgtgtcaagcgtgatcgttcaagactcgatgtgaagctgactgggcgtcccttcagttttcggctaataaatgctctgacaattaatattttgaaatttgattttctctctccacggatgacagttgcactcaattactttcgatttcccatattcatttttgaggcgggaagctaaggtgtctgaggtttctttgagacaattacctctttgcttatagatacccacaacattgccacataaattcatttcatcacccttctttgctaagcaagctccagagcgaaaagaaaattttctggcttcaaa

SEQ ID NO: 140679 - DNA, 660 bp, Cannabis sativa
aaaattaaaaataaaaaattatataattttttttaaaaaaaaagatatatacatgatttagaaaaaattataaaaatgaaatcaaaataagtattgaaattaacataaaataatatgatcttgtatctttgtggtgattttgggtaatgatcttccaagaaaataagacttaaggttttctaattttttctcttgataagggaagatgagaatagaatggctcttgcttattgagaccactgccactatataacctaataggtcattaattatagtatttttaattttgcccaaaacatagaaatatcttttaaagtatctacacatttagctcatgacactttaatacataatgacccacaattactaaaatgatcactttatttgggtcaaactttatatagcaatacacaacaaatacatacgagcccacattagagattttaattcaacaatgcacttaggctacatatattttcttatagtgtataaccttattagcgcttaaactttgctatcataattataggtatttcaaaataatctcgtgtattgattatactaacataggattaaaggtatttttctcaatcatttatttatttttcacaaataccactttttgtaattttaattctataaataccaaaattatttatt

SEQ ID NO: 140680 - DNA, 597 bp, Cannabis sativa
attaataattttcgcaacaaaaataaaacaaattatagtcattttatgtctccaacaacacattaaaataaataaaataacaaataacaaattcaaaagaaataaaaaattatgtttaaaaaatatttaattttattttaaatcgtatgttaagaaaaaatatataagaatagaatatacatttgatttattaagttttgcaatataattatattatatgtgttagatttttaaattactattttctatacattaaaatgatatctgtataaataattttttaattttttttttataaatatgtgtggattggattgtatcggttacttttgcatgccaatcaacatccaatccgcacaagtgcagatttcgaatttttcaatccaatccaatccgcactttgcgcattttgtgcacaagtgcagatatccgcactttgcggattagatatttaaccatcatagttacataagatgtttcaatggttacatcagatatttaaccatcatagttacatcagatattgaaacatcttccatatatatatatggaacacttcttaatgggtattacccatgaatagttactaaacaaatt

SEQ ID NO: 140681 - DNA, 1274 bp, Cannabis sativa
tgagcatgtttttgttgagtttttacaaataaatgatagattatctaagctttttaattttttagttgtgtatgtcaacaaaagaatggataggaaaggaaaatacttccttgtttcctcttttattatgccaatgcatattaagaaacgaccaaacgtggccaagttgatgacgaatttaataatttataaaataaaaatatatagacaaactacttttcgatacaaataaagaaaagaaaattaagcctatgtaactaataatgtccacttaaattatgaaagaaataccaaatggcttagatcaaaagtatttgataattattatgacataaaaccataacaaagcttgtaaattgataacagttaggggtgagcataaaatccagagaatcgaaaaaactgttcaaaccgacctaccgaacaccgttagaaccgaaaccgacaaaatcgaaaaccgaaaaacctactaacagttaaaaccgccattgaacggtcgatttttttatgggtaataaaccgaccgaaaaaactgaaaccgaccgttatacatatacatattaatttattattttttttgcatgtattatagttactaataatatataaaaataatatattattgtttttattaatattaaaattaaaagaataagataattagtttttgaacaaataatttgtatgtttgtagttgtaaaatgtagaataatttatttatagaataaattggatcattttttttaaaaaaaaaaagtttagtttgggtagtttaaaccgaccaaaccgaggttcaaaacggtcggttttaagataggttctgaattggtcggtcggttttcagagtgcaccaatccagatcgaaaaccgaattttagatttttatatagaaaaaaactgacaaaaccgactgatgctcagccataataatagtcgttaaactgttaaaagagtggaaagtcagtaaaaataaaatcattcctattttgagacatgacatgcaactccttctaatagtaggtaattagttcaaaagtaaaattatatatatactagtgatgcagattaagactatacatccaccatgttgcttacaagaatatattgttcaagaatcccctgcaacaaaaaagatagaaaagagttggatcgacaacgctaaactaattagtctaagcatatataatatttaatatcacatcagaacaaaattcttaccaaattccagtctctttcttcttttgatctttgcatttgttaaatttacaacaaga

SEQ ID NO: 140682 - DNA, 538 bp, Cannabis sativa
aatgtccttacatcaagatccactaatgaagcttttgttaagatctttttttttggttgtataaatgtataagtaagatttgtataaatgtctattttaaaattaagatattgttttgatagtgaaatgtgaaagtgtgaagttgcactcctatacgagaaagttaaaatatatttggtgtctaaaattaaaatgtatatatttgagacatgtttggtattttaaaataaagtgtaatttagatatgttttatccatagtgtttaattttgatatgtttggtatcaaaattagtgaaatttgagttgtgtaaaaattaatcttttatgattaaattttcaaagcttaagtacttaaggaagaaagtgattacaaagtgaacactatattttggcatgattcacgtataatcaatagtgagaggttataacaaattgtttaatttccgtacaagattaaagtatgaattttcgagagatgagatctaaactcccttagtattttgctcattgatggtaacctatcttaacactagtaaa

SEQ ID NO: 140683 - DNA, 2934 bp, Cannabis sativa
  modified_base (1001)..(1003): a, c, t, g, unknown or other
  modified_base (2514)..(2519): a, c, t, g, unknown or other
  modified_base (2739)..(2748): a, c, t, g, unknown or other
ttttcccttgtctatgctctggctagaggatacttccttcttagccttggccactgcaaggttataacattcccgagaaatctgctggtttcctctcagaaaccccaccccattctttattggaaacttgaggcatgaatggaatatcaacgtaacaacctttaagtcatacaaggctggtcggcctagcatgacgttaaaggctaatggaaagtccaataccaaaaattgtgccattatagttatgctcatcggagcttgcccaacagtgaggggtaggcgaatttaccctagaggtgcgacccattggccggagaaaccatatacgggcagcagacagggagttagatctttgagctgaagccccatcttttcataggtggtcttgaattagatgttggaggaggctcatcttgttggctatctggacctccactaccaacgggtcgttgtgtgaaaatctgattttgacagcatcttcgtcgttgaaggttatggtgggttctcctgcacgtgggattttaggcttcctttcttctacgaccaggatcacttcttcttgctcgtgttgtacagttcaagcataactttctcgagctttgcctgaatctccaactatgtgcgggcctccaaagataacttgcagatgtccatccaccggtggaggtagcaagtcttggttgttatcacccctctgattctgatcggccttgacatacttctatatatgcgggttatttatccttatcaagaatttaatttctcgctttagattgttgcattcattggtgtcgtggccgtagtctccatggaatcgacaaaacttggtcatgtctctcttgctgacatcttttttcatgggcgcgggcttcttgtacggggctagtgattgagtggccatgtaaacaccttctatatccttagtcaagatggtaaatgcagtatacttggcttgattctctcggggagcttgtttgattttgccagtgaactttcccttnnncccattcccttgcctattattgttgctggaacgtttaccatttgaacttgaattgcttcggtaatgagggagctggacggatgtcccagtggaaggagcttttgacttgccaggtttttgctcaccttctactcgctgaatagcctcttcaagtttgataaagcctacaacacggtcaagaaaatcactcatcgagtctaccggtccgttcttccttatgtccttccagagctcaccaaggacttcaatgccccccaatatcgcggacaactttccgtcttcggttactcgtgaaaccttagtcgcctccgtcacgaatctgttgatgtaggctcggagaggctcgcttggtctttgcttgacttcgaccaggtctcctaggtgcaatggaagttggcgagaggaggaaaattgtgcatggaattccgaggacaaagctttccatgagttgaactttccaggtgccagcttgaaataccattgctaggcggcttccgagagggtggcaggaaaaattttgcaacatccgtctcctcgtactccttgcagatccattttcatctcgaaatacttgaggtgggacagaggatcttcttttccagagtacttcttttctaggttggcattttaaacttgtggggcaactctaggagattgatctcgggggagaaaggggttccacgtgctcggtccaactcgagatcgttgttcctctgaccagccatgccttggaacatactttttagttcgtccagctgtgcctgcacggctggagtaacttgttcggcattttggccgatctaagtcacatcagtatctttctgagcgggaatttgagcacgggttccgggctgcacgatcagcatgtcaagctgatcgtccactcctctcctcctatttagatcgtttctgagatcatgagtcatccacaacctatcgaatacggaaattcgtggttatctcagtgattggttggtttggctaatgtactgaccaacaccattaacctggtttgaattgttgggtatgaattctcccgatgaattactagacaaggtctgcctacctaccacttagcccacaggtggaacctgtaactgcggatttggcggctgaccatttatagtctgagaggtattcatcgctggatcttcgtctgtttcacccaaggggatgacattcgcgggttgctgcccaataagctgataggtttttgtatcagcacagtggcttgccgactacgattgttaatgactgcatgatgagcccttaacgcttccatctctttgtccctccattcggtaaacatgtgcctctgctctttaaacgtgagatttaccgcagcacggagttcctcctcatcatgatgtagggtgttggtatgaccctacatgagcccaagagcagcacgaaagttttggatctcagtgtcatctccaatggttgtttgaacattggtagcgggcggaacggctgtgccatgaacgccctggtcggctgctgaactggtnnnnnnagtctcttgcacaccaggtgcaatctcatccacaggagtcgtcacaccgtgacctgcagttgatggttgtctgggatttacggctggcggagcccttgtgtttcctggattctgtagtgcaggatccaccgcatgtggattttctggatcaacaacgcccttacgagtctgtaccaccatcgtacttgtgattaaatttgcaataaagagcgatccttgnnnnnnnnnntcaatgaaagcaccaaattgttgacctcgcttttagccaacggcagtgagtctaattttgtaggcggcaagtagtttaatacgattgaaatgtggtaaagtaaataaatacacaagaattttatagaggttcagccccgagcagttcgataatagcctaatcctcgttatttgtattgacttaaga

SEQ ID NO: 140684 - DNA, 529 bp, Cannabis sativa
aggaaaaacattaaaaaaaatattgagagtaacttttaaaaattatttaagtttatatatttttttttaataatagggtgtatttatcattttataggatgcaaatagaactgcccattctgaaataccagcagccaaccaaactactctaccttccttagtctattctattttttttaatactctattaaaattttattttttctattttatcacacatttatattataccatatattaatttttctatacatctttgtattatttaaaaataattttttataatatattttattcatttaaaaaaaaataaatatactaatattacacatacctacattctaaaaagttttttttttaaaaaaaaataatacaatatttatagcttaatgaatatcatataatttgttagtgttataattttgtgacagtgtttgttctgttcaatgtctagtcgtatctggatttttagtctgttatatctgcactaacgtttgtttacgagagtctcatttaagtgttagttagt

SEQ ID NO: 140685 - DNA, 1158 bp, Cannabis sativa
ctgaccagttcaaacccagccgtttgtggcccagactccttggacttggcagacttgggggtagaggggttagcagcagtcagctcctcggaatgatcaatgacgtctccagaaggtctgttttcctttgaagaagacccctcaccgcccttagacttcttggccagaggagaggcgctagagcttccgcccattctcttcctcaaagcatcgagcatctgccaagacatgtctgcacagaacaaaaatagtacggttagaaagcagccatcagaaaacacaaggcatgaaaatcaagaagctcaagaacaaagtaaagtaaaatgcaaggtgaccacccgcacaagactcaaaagtccatcatcacctgacatcaatcttatctcagacatgacaactttcccttttccaaaaaagggaggagatggccgaataagtgaaatgggctcccttatgcgaattgcatgttcaataggcctgggcaaggcgagagtttcttcttcctcttcagtggagtcacctgctcgtcctcagccttatcttcaggatttaaaggctcctgagcgtactgcttggccctggcacctcctttcaacttagcttcacactttagttgaatcaactgattctccagatgagctcgttcaggccggccagcaccagatttcctcttcttccatgtcacggacttaggagtaaagtcttcgggataaagcctgcacttcacaagattgtcatcggaggttaactagataatattcatgtcttcccccggaaaccgagcaagtttctgagctctatccctgagagtatgagtgaggggaggacagtaatatgtcagaatcttctaaaactgagtccaggtaatgctcggatccttcaccatgatgtactcatcagcaaaacaccctattttgttgatggccttggcatccgcgccggtcaaccacttgaagccttgctgagagagaaatagaagtatcccgacctaccttgttttgggggtggacttcaaatcaaacaaccaagcaacctcgtgaggagaaggagtaccccatccttgggaagcatagaggacgaaaagggcacacaaatattaatgcccttaggagtgattagggtcggccagagaccaaagaagtctgccacatccttgaa

SEQ ID NO: 140686 - DNA, 724 bp, Cannabis sativa
  modified_base (623)..(632): a, c, t, g, unknown or other
taaaaacaaaaaaatagttttttgatgccaaaccattcaaaaaagacttataataagagagagagagagagagagctaagattaacttacgttattctattttatgctaaacttcccgcgcttcgtgacggatgtataaaatattttaaattatatataaaaaacaaattatgcatattaattaataataattacttactaaaattatattaaaattttaactttactattaaaaaaattgtgacataaatacttaaaatattaaatttattgctaataaataccagaatttgaaaagtagtagtataaatcctcaagtttctaaacttaacagttttataattttattggtagccaatttaatggtcttgaaaggagaccaagccaaagaataagaaaaagacaaacttgagtttgggtttgattcatttatgatttaatttttattctgatatatgtgttaagtcctgggttcgaattttattgtgtgtatttttaatgttggagttttagtgttttactcgggttctactatttgagtttgtatttatgagatctgttatttatttatttatttctatagattttgagagcttaaatttctattgattattgggattgannnnnnnnnntttcatacgggaattaaagtttgccttttcgtttcattgattgaaaaatattagtagaaaatttatggaatgagaattttgaatatatgaaa

SEQ ID NO: 140687 - DNA, 521 bp, Cannabis sativa
cctctttggatatttgctctatcagccgagatggggttttgtttttgattccctgactatcgggttgattatgcaggtttgtctctcgtttattagttgaatcaattgtccccgtcatatctaccttaacccacgaaccgtatgcctgagccacttctccattttctttaatcacgttagcccgaatttcagaacattggcgtaattcatgcccaatctttccacaattgaagcacatatatggtagttgatcgtattgaaattgaagccatcggcgccttcctttatgaggaaacaagtatcctgggaaaagtttggattgaacggagttctttactttgaatttaaagaatctgttaattgttatgcgattgatatccggttcttggatgtatataacctctcctgccataccagctagacgaaacatatttgttttcgtaattgctttaattggcagattcagaactcgcccagagatggtgaaagttgtcaacgttgcctcccaatccgtcggtata

SEQ ID NO: 140688 - DNA, 1204 bp, Cannabis sativa
tagttgtacagagaactaagaccacttagtcatgaatagaacaatcaggaacatgttaaagttatggaatctttaatcaatggttgctagtacaggtcaatgatgcccgttctttagtgtaagtaatcttggtttggattatagatgtagtgagacatcaaagtgaaggtactgtatataatagagattatatacgacgatatgaataaagctatctttattaatatgtcatttatcataaagacctaattcatatcataacaatgatcaatagtagatcggcctaaatcttgagttatcatgaactctagttcatgctattagtttctttgattctctcgttaaagtctctcagagaagatgattcttaagacttttgttttggaagtctaataacatggatggttgggaacatgatgtacaattatggaatcctgactttcctaacatatcgaatgttgcttccctttaagtgttaattttggaattgaaatattgagcacaaattcagataggatcttgaattatacttccactagtgaattaatggaactaaaggtaaagaagtaattaaaagggtaaaacattattttgaccaaaagtaattacaaccaacacatggagggctaatcactggaattaattatatcaacggagattgcagttaaactcagtaaatataattttataattactaagagtttattttcatatttatagtggagtaatcatggaattaataaacaatggattattttgttgatgtgactcgataaataatctagtttattggagttcagaattataggtctatagtccccaaattgccaccttaaaacactgtcaagggtaaggataaagagttatataaagatattcgaagaaaatcttttgaattagaaaattagtaattatttatttttataataaataaataattttttcaaattaactaaatagggagaaagacaaaaattgttaagacaaaatttgtcagggcgagatttgccaagacaaaagttatcaggacaaaagacaccaaccttgtcctaaagacagtggtaggtacctagcattgttcctgtccctattggatttttattttttgattaatttattatttaattaattcagttaggtaaatatccaatttgaaatgtggttaaagatatttcaaggttgttgagatattctctcaagtagt

SEQ ID NO: 140689 - DNA, 557 bp, Cannabis sativa
ttcaaagagagaaagagagagagttctatgtttttggttttccttaattcctttattttgcttcaaatgaaaagagattaattaactaatctcttgctgaaatattaacaagcctaggtgtcaaaaatctaggcagccacctatcccaaaccttggacaattaccaaaatgcccatgacttaaaactaaggtatttctcaaaactacgggtaaaatggtcaaattccataaccccgctcaatcccgatatttattttctccaaaatatttcccactaagaaataaggttctaaactaacccatgtgatcaaactagccatccattgcattttccgttgtcgccgagcaaaaattacaaatataatatatttcacatataagttaaataatacccctacagtttaataaaatcttcggaattgagaaattataactctaatgctcattcctaatatgggggtccaaaaataattaaattcataaataatcataaaaaataacagaaattagtgctaattgcctttactaatccgaaatactaaagcggtcattacaaa

SEQ ID NO: 140690 - DNA, 797 bp, Cannabis sativa
  modified_base (581)..(585): a, c, t, g, unknown or other
caatacacatgtgtaaggatgcatctttcttcttaacaaacagtacgggagctccccagggtgacacactaggctgtgaaaaccctaggtcaagtaacccttgaagttgaattttcaattctttaagttcggccggagccattctgtgaggtgccttagaaactgattctgctgtaggtgctaaatcaataatgaaattgatttccctttgcagtggtaaacctagaagttcatcaggaaaaacatataaaaattccccgaacaaccttgatgtcctctagctgaactgtctcaggccgtgtggtatccaatacaacggccagaaacccagagcacccgtcttgtaataaatatctagaagttaatactaaaatcattgaaatccgagatccttgaaccgatcccacaaaaacaaacggttcttcaccctcaggttggaagatcaccatctttcgtttacagtcaatactagctgagtacttagataataaatccattccaagtataatatcgaaatccgctaaacccatttctattaagtcagcactctactccatatcctcaattctgatcggcatagnnnnnatccaccttttggagatgactaattctctgccaggaaatagggttccaaacccattataataactatcatgtggtctatccaacttactaaaaatcatggctaccacataggagtgagtggcccgaaagtcaaacaatacagaaaagtaagagttgttgaccaagagctaacttgtaacaactgaggggctagctgttgggttttgtgccct

SEQ ID NO: 140691 - DNA, 517 bp, Cannabis sativa
gtacatatatttttaagttgatgttcaagtgatttatagttatttttaagtttattttacttttgaacaaaagaaaaagttttttttttttttgaggttattatttagttgtttatttgttattatttagttgtccaaataaaaaaataactttatatttattttttatggatacatatatttttgagttagtgtacatgcgttttgtagtttcttttaatattttttttaagattattaatattttttctttgagttgatgcaagtgtcattctatttaaagtgtatattaaagtgagattatttttgagttgttttttttactgttattaagttgtttaactaagttaaaaatgattatcattcaaaaaaaaaaactaagttaaaaatgattatgtatttaatacttgatggacgtgtatatttatgagttggtgttgaagtattttgtagtgagtgaatgcttttaaatttagtttataaattacaagtgtttttttcttggagttgatgcaat

SEQ ID NO: 140692 - DNA, 854 bp, Cannabis sativa
gatcctggtaaaatatttctaacggatgcccaattaaattatgctactacagaaaaaggagatgctggctgtagtgtttgcatgtgacaaattttgcccgtacttgattggtaataaaatgatagtgtatacagaccattcaacaatcaagtacttgatgactaagaacgatgcaaaactaaagactaattcgatgggttcttcttctacaagaatttgatttagaaataaaagataagaagggcacagagaatttagtagcagatcatctatcaaggttggaacttgaagagagtcagaacacaagagaggttaaaatcaatgtggacttccttgatgagcagctgtttctcttagattctattgtaccttggtttgcagattatgtgaacttcttggctgcaaacattacaccaccagatctgacaaggcaacaattgaagaaattctactcagaagtcaaacactactattgggaagagcctattctctataagcattgtgctgatcagattatcagaagatgtgggccagaagaggagatgctctctatattaactgccatagcttacaatgtgggggacattttagttgaaatcgaactgctgcaagcgtattacaaagtggattcttctggcttactttatttaaagattctcaccaatttgtccaagcatgtgaccgttgtcaaagaactggaaatatctcgagaaggaatgagatgcctttgactagaatatagtggaactgttcgatgtgtaaagaccgcttagtttaattttgaaattagcagttaatcatgattaattatgaaattatttatagttatttgaataattatttatactgttatt

SEQ ID NO: 140693 - DNA, 644 bp, Cannabis sativa
gttttgtgaatattaataattaataaaaaagactataagttataaatcttgcttgatgatgctacatctaccctcctacgtaccaatgatattgtatatatatacattatatttttatatatatatatatatttaggacaatctttaatcctaatttatatttatcctttctttatttatatatatatatatgaaaatgcaacaaaaatatttatctaaatatacatatttcataaacagaggattttcattggtagtaacataatagtactattcgtcaaatttgaatcactctcaataactctatcaaaataactatttttaattgaggtatttattgatttcccttcctattattatgaaaatttttctaccttcaacaagacaatgaatagagcaaaaaagaatgacaaaaataattaaaagaccaaataaaaacaggacataaaaatgaaattagacaaacaatctacttataatgccataagaattgcaaaattcaatttgacataagaaaggacaaaaacatttcaatataatcaaaaagatatttattataaaatatacttacagttagagatggtagagtgattctcttgattggagtacccaacaatcagaccaagaacctttagaaaaaaaaa

SEQ ID NO: 140694 - DNA, 530 bp, Cannabis sativa
aggatgttaatgaaacatacatggtagtaaatctagatcctcgtaaaatatttccaacaccttttcttacagctcttacagtaatatctctgaatatgaattcttagaccaaatctctctaccctttgcccagtgagtatgaatcactatttatagggctataagctttgagaggacgtatttcccttctagttacaattgatatgagcaaatagattgcatagtaaatatagaatacactaatcgtgggatttgaacagcttgccatacctctctaatctgatcccaaagttatagggatttctttgatgactcactatgcgaaagctgaatttgctaagtgttagaatgctgcgcggattgctcactgctcggtctaaaggacttcgtccgagccaatgtgtgaggtgccctgttcagcttgtgtcttgcgagaaggtacccagtgtcgattccacgtgtcgccatcatgtgatgccacgccagagtgcaaaaatttggataacaaaatgtattcctagatttatcag

SEQ ID NO: 140695 - DNA, 792 bp, Cannabis sativa
aaaaataaaacttattttttaaatttaaaaaaattacaaaattaaaatacacataaacttccaactcctccaaaacatggcgaggctgaggacagccatggattcgacgttctgggatttggacgtggctacgcctcgagtccttgaaggctccgctaaggctgtaccaggtgagccattccccatggatgctactcgagcaagtggagctattagaatacagcaagtctccttcttgggaaatgggtttcctcttggcattatcccttcttactttcctacttcatctgtaataagcccattccctactaataagtaataagcccacacacacatactcgctacactattgtttctcttttgttttctctagctttgtttggtttctcaccatcaacacccctatttcaccacatctcatcctctttttcttcctttttctttctgtatccaaattgtaaaaaattaaaaaccccaaatctctcatcactcagatctaccggagagtgaccacgggatcgaagtcagaagcatgcggggttgaaagggttagcaagtttcgtgctaggaatgaggatcgacaagccgaagaggaccaccatattggaatgtgaatcgacagggttagtaattcttagagttagtatgtcatttgtgggttcttctcctttagctctgaatgtgacctttgttaaaaaaatccctcaatgtttacaggtttgagcttgaatttgggcatttggatttgtggtctttgttctatttctaggtttgagtttttaattctgggtt

SEQ ID NO: 140696 - DNA, 750 bp, Cannabis sativa
  modified_base (26)..(71): a, c, t, g, unknown or other
  modified_base (162)..(162): a, c, t, g, unknown or other
  modified_base (351)..(359): a, c, t, g, unknown or other
tttggatgggccctatcatgtttctnnnnnnnnnnnnnnnnnnnnnnnnnnnnnnnnnnnnnnnnnnnnnntatttataagatctattgacagttaaactatgatgaaaatcagatcattggatctgccaacaagtaaatcatatcaatttagatcaaatanataataggtttgtaaaaaaaaatgaataaataaataaacaaacaatgcaaacatgtaacaaataactggaaagtaggttaagatatttctattttaaaattaaattatttaaaatatatcttaactagaatttaaaagttagattgttagagaatatttaaaaaatttaaaatctaacaaatctcctannnnnnnnnaattctaactgaaattcaaatatataatcaattttttaatttttcagtttatttaaataatttaaattaattaaatatgtaacaagataatataatatcttgatttaaaatttagatatttctaatattataattaaataaattaaatataataaaaaaaagtaaacaatttgaaaaataaaatatttaatggttagaatattatcaattttatttaataattaaataaaaaaatcctaattttgaaaattttatgcttagaaacccgaaaatttctattcaaatctattcaaaacctaaattaacaaatttttcaaaattccatgttattttgccaaaaattaattttaattaaaaataaatatctaataagataaaatgttaaaagtaa

SEQ ID NO: 140697 - DNA, 761 bp, Cannabis sativa
gttctacccactcaaactcatatccaccctaaacctagttgctgccatgaagcttaacccaagtcgcctgagttttctcccaaccaattgtgaatacccaggtcagaagctcacaaagtcgacttggttcatctgaagaagattggagctaccttatgcgtcatctacatgagttaaaccaaagcttgaaaaagcacaagtgcattttttattttaagagggttgagagagaagagataactagagtgaatattggaattttttgggctttcactatatcaaatgtggtttgtgtttattttttgggctttatttttattttacattttattggtgttgatatatgaaaaaagtaatggtggtggttgaagtgtctatgttggtggtcgagaaacaaatgtgaggtttggtttgattttgttttaatttttttcttttttgtgatttggatattaaaagtccggtgtagtggtggtggtggttgcggtggtggtgggtagtggtggtttaggcggtggtagtgggggtagatggtggtgttgcgatgatatgaagaatggtgaataggaggaaaatatgaaaaagaaaaaaaaaaaacactgatgtataacaaataaagaaaaaaaaaagtggaaaaaatcataaaaaaaaagaaatttttacatgaaaaatccattttgcacactttattacaaaattacccacacacgcctattactacatttttacttacaaagttatttttattacacatttaccac

SEQ ID NO: 140698 - DNA, 668 bp, Cannabis sativa
tatatggcatagacttacgtgttacgctcacacgtctatttacaataaggccttagtagggtttatctcagttataattaccgagtctaacctggttgtgccttactcgcataatcctattcatatatatatatacgcacttcatagattacgttctttcagtggttttttcctagtgatatactaggtctaacccaattatgtcttatgcatataactcttgacatatatgtgcgcattcagtaaataccaaagaatatagaatcttagggtaataaccctaactttcatactaaataatcaatcctataacatattacggcatgctcgaaataacacttattgagggtaataaccctaacttatgccttcacttaattcgctatataaccaaacatcattgctttcttacctttttaatattctagggtaatatttctaacccgcactactattaaactcaaggtactaatttaccgagtctagtttaactatgccttaggcgaataattctttattccaatatatttagtatggcataacacttagaatcttttaattactagggtaataaccctagaccatataaccgctcattttagggtaataactctaattccagttcttaattaatcacaacaataatgtacaatataagtgccactgcg

SEQ ID NO: 140699 - DNA, 875 bp, Cannabis sativa
cggaagtaggatccatcaaaggtgtttggggcaagtacacactctgggcgaccgagctgaaactgaagaaattgcattatatacccactttattttttatttttttttaatttttacctttatttttatattctttaagatatacctactgttatagatgatgtctctattatacctcttagattaatgtaaatcatgtgctacacttaagtggaatgtaaagatatattaagcaactcactcataacagtgggtagattttaataaaatatgagtatatttttaattaatggatacaaaaaagaagtattcctcaacttatcccgccgaaactcattcaataagggcccactaaagaaaagataaagaagaaaaggaatcaacttaaccgagctgagtatgtatgtgttagattaagataaagtcactttgaaacagtatttaaaccgctcatcctctaaatacaagtcactaatggtacctgaattcttatgttccaacatgtacaagtatccaagtagcttcatgtatgaaaactccatcgtacacctagcatacgtaagtgccttctctctgcacctccacgccttcacataactcatctggatatcatatgtgtcaaacatgtccttctgtatgtctttagtcttgtacttagttccatcttgggtgtacttccccttaataaggtggccaaccacccatggtgctgcttgacggtgatttgaatgtctcacatacaggttacatgtgtgttcgttgtaaaatacagtgacctcataattgtcagaatgcatcttcttcctccccctcaatctccatttacaatctggagccttgcatgtaacgtacaacacattgggggctgacttctt

SEQ ID NO: 140700 - DNA, 593 bp, Cannabis sativa
atcctacaaagtcgaactaccttcttggatgaagatacacccggtccttcacgtcagtaacctcaagttgtatcatgaagatccagaagatccagcgtgaatccaatctaccagggatgacatcagcattcaacgacgcagaagtagagaaccagaagaaatccttgccgaaagaattgttcgtgtgaagaggaagaagaaaaaagaatacctggtcaaatggaagggccttactgatgacgagatcagctgagagaaggcggaggacttgcagcagtttatgcagaacactgaagatcatgcagtaggttcgtcgaggacgcagaacaattaagtcaaggagaatgtggcgtgctcccccgtggcacacccacaatggggtcattttgtaacatgagcatgccttggtgcttgatcattaatcaagtcttgcaccaagcacctcattggggtggagagtcttttattgtttagctttctttcttttgtatttccactaaaatatctatagagagctataatcatgtatgttcctggaaatcccttaaaaccccaataagctcttcaggggggggggtgacctggtgacttat

SEQ ID NO: 140701 - DNA, 511 bp, Cannabis sativa
aagctcaacattcggggaaaaataaagggaggatttttgaaaatttaccttttgccccgaggccctttcatacatctcgagaatttctttaatgatattgcaagactggatggaagcattacagaagaggaaactatcatccgcgaaaagcaggtgggaaatagcgggagcgcgtctagcaactttgtagcccataagagagcgatttctctctttctgctggataagggaggacaagccttcagcgcacagcaggaagagataaggggagagggggtctccttgcctgatgcccctggtcggaacaacattgccagccactttcccgttaaagttgaattgaaaagtggctgtggagagacaagctaagatcaaattaatgaaccgatggggaaaagaaaatttactaagaattgcggcgatgaaagcccattccactctgtcgaatgcttttgccatatcgagcttaacggccatccaacctttcctcccacgagtcctaagctttatg

SEQ ID NO: 140702 - DNA, 1035 bp, Cannabis sativa
ttcttaaataataatagtttgtttaaaaaaataattcataaagaagattttgtttatttttttaatttaaatataaattgtaattaaatgaataaagcttttattaagtttttaagaaagaaattgttaatattattgttatacttaaaagatgaactaatatgtgtgtaattcatcaaattttcattatattttacatatatagttaataagaaatagttgaacagaatacatcataactttggtatacttacaaatatataccatagctttgttatatttgaaaatataacatagcttgtatataattgcaaataaagtctagaacaaaattgttctgtactttatttgcaatatatacaagatcgacggatatacatgccaataaaaaatttcataaaactttcataaaactttacaaatcattcaaactattaatactatatttttcgcctacattgtagatggcgacaatcgataagttggatcaaaatcagaaatcgtggttgtcatgaattttggatggtttacaagctattttaacaatgacatcagaatataaggattgcgatggaagaattagatgtccttgtgtgagatgttcaaataatatgtttgaaaaaatagatagggttagagcatacgtatttgatcgaggtttcatgaaaggatatgagaagtggacctatcacggggagccagaggatgttgttgatggtgtagcgattggcgataatgaattagaggatgaaatgatccctattctagaagacttctttccttcaataaaaaattggatgtacaaggagtagaagaacaaccaaccacaaaccagatgatgatgactcagaatcagatcatgagtgcgttctgacaattaatgttgtatagatactgatggagtatctcacctataaatattgggtctcgttccccgagctcttcactcattctgtgaaaatagcaaaatttcatctaaagagagttgagagagcgaggaagcctgaatttccatatcgaagctatcactgggat

SEQ ID NO: 140703 - DNA, 908 bp, Cannabis sativa
aaaataactgtaaaacaacaataaaacaactacaaaaaagcaacaaaaaattttacgatttttttttatatatttacggatttgtaattgcttagagggaaaacaacgttgttttcatgttgccgtaaaattatgctatattttcacaatttgtaaacaacagtcttttctagaacaacctaaaaccaacagtttgtaagggaaaaaaagtcgataaaatgtaaaaaaaaaaaaaaaaattgtaaaaacgtaaaatttttgttgtttttgggtatttctagaataatcctcttaaattatatatatatatatgactatattatgattaatatttttttattctattattaatttatttaattataatcattctacaaaaatacattatcaaaataataatataatagtaataatagtatacatgaaaagtaatttcaatccaatttataaaataaaaatgaatataatattattttttgcatgttataaaataaaaagtatttaataaaatctatggtgaataaagtttctgacaccaatcttttaaaaataaaaaaggtccctgacactacattttatctcaatttaaataaaatatattttttatgtacatttttataaaattaattcttttttatagaagtagttctccatagtgtttgtcaaaaaaatcaatgaaattaaataatagatcttgtcaattaattttacacgtggattaataacttgaatgcattaatttgtttgagcacttttcctaagtcaagcgtgtctttcacttgcccacctaatcactatcaattttttttttgtctctactgtatttttgtaaataagaaattttaaaaatagtattttagtaaacattaaatcctataaatgtttattttttattatagtagtataaa

SEQ ID NO: 140704 - DNA, 1142 bp, Cannabis sativa
  modified_base (701)..(716): a, c, t, g, unknown or other
tagggcataaaacccaacagctaagtccaaggattcttgacgaggaagctcggataggcctgagcaatcaaagggcggatccgagctggccaagagcggatctgagcaggtgtaggctcctagtccatctttgccggtgcttccagaggcaaaggaagttagagagatgcttgcccattacatgaaccggttggttcctgaggtaagtgagcagttggacggtgttgataacgagtcttccctggagttgttgatgggaggagtcttgaagaaatttaccagggtaagcctttgttgatagtttcctttaattcttctttatttggttcagaccttaaagttttttctctgtgtaggcttgtctaaagttggcttacacatacttccgagctaagtctgctgcttcccggaacgcggctttgtccaacaccatgagggcggaggtagacttggccaagaaggatgctgatgacaccagggtggagctcggagccgtccgactagagctgggtgaagtcaacaagaagctttttgccactcagaagaaaataatcgagttgactaaggatctcgaggcttctgaccgacttgaagagaccatcggcaccttatttgcagaagtgaatagccttcaagatgaaaggacgacccttcgagttgtcttccgtcagctggaagaggagaagaagtctaaggaggannnnnnnnnnnnnnnngtggcgaggctagaagagaaagttggtgccttaaagacagccggtctcgagctcttttatgatttttggcaggctaaccctcaagaaaattttgattacttaggtgaagccaaagacatgtatctcgagtactgcacttcccaagtggcttatggtgaacctgagaagactgcttctacctctggccagaatgttgatgttccttgatgttccttctgctcagccttctgctcagacaactgctcagacaacagatcctccagctcctaccggcctaaaagacccgacccgagagcctgggactctaaatgtttaactacttctctttttatccttcttttttatatatcttattcagccataaggcatttttttcaagacatcatgaccggccaagcggtctttaaacttggaattatttttcat

SEQ ID NO: 140705 - DNA, 620 bp, Cannabis sativa
  modified_base (28)..(54): a, c, t, g, unknown or other
acatcttaggaacatggtagtacaattnnnnnnnnnnnnnnnnnnnnnnnnnnnaatctatagcttctataactattagaagtgaaactatgattttcttcaagcttggattaatgtgataaatgattgaggcctcattttagtaattatattagtttattgaaatatcatttacaattagctaagcgttttaaggataaaatacattgacgggtagaacagtaaatttgtccctacgatgtagatcatctatagatgatctttgactatttgaattgaaataataggtaatttaaatcatatctatttttgatagtgcgttctatgtaattaagagtgcaattctaaatctatagtggaatcaggagaaattaataagttaggaattttacttggtaaattttcggatttacttattgcaagcttgattacataggtccatggtcctcacagtaactaggataatattattttgtagtatcaattattcaattagaattttaaataagactatgtcttatttgtacatttttttcactaagtaaggacttatttgagaagaaaagagtttttagggtttatttattaattaaaaaattttgtaaggtctaattaataaa

SEQ ID NO: 140706 - DNA, 845 bp, Cannabis sativa
  modified_base (500)..(501): a, c, t, g, unknown or other
tttatgagtatcttatacatgttgcaggcactcaaaaccttctcactcacatctggattatatcctaatgctagcaaaactgccttatactgtagtaacatgaagcctcatgaagtcaatcgcattatacagatctctggcttctgtaaacaggaaattccattcacttacctagggataccaatctgtgggaaaaagatttcagggaaagaatgtgatatactagctgacagaatgactgctagaatcagaagttggagttctaggaatctctcttttgctgggaggatcacactaataaactctgtcctcattgctatacaagcatactggagtcaaatcatgatccttccaaagaaagttttgagatctattgaagccatctatcgggcttttcttcagaaagggcaagctatgtttcaaggtgctggagctgttgcttggcatttcatttgtcaacctaaggcaggtggaggtctagggatcaagaacttggaagnntggaacaaggctgcaataagtaagtatatttgggccatttcaaataaacaagagagtttgtggctcaaatgggtacatagtgtctatataaagaatcaaccatgggagacttactctccttccatacattccacctggtattggaagaaaatggtcgcattgaaagatcagatccgagacatggtagattttgatgcttttcataagcaaaaatatagtgttgcaaccggttacaaattgttctctccacctgtaactcggctgtattggagtaaagaagcttggtctagacttaacatcccaaagcatagtgtcatagcttggttagcaatgctcaacaggtt

SEQ ID NO: 140707 - DNA, 1168 bp, Cannabis sativa
  modified_base (811)..(814): a, c, t, g, unknown or other
aagaaataaacttcatagaatttgaaaaatgaatctgaagaaataggtatgcgtagatactttattctatggatccatgatctaattgatagaggaagcactgtaaagatcaattcgcgaggttttgctccgatacaataagaactgcttatttatgtcatgatatgacataaaagttaggaatcaacttatgtaatagagtggatcctctaagatattgagcaacagtgtagcatcagatcctaaagatagtaaaccttttccttcttataattttaagaattataatgcaaggctcgacgcttccataataacatcatgagtagggaaatccaaattagaagaaaaacccaaatcaccataagtgttcgaatcctcaacagtctttgtccctggacaagcttcttgtagttgtatattttgaccttcacctacttgtcctgccagcttcaccaacttatttttggaatatgatttggctttacttttaatcgagacctgtttgcgagtgcatgtcgccccctctttctttctattttcacttccagagcatccatgtgagaaaatgatggaaaatattttactaggatctagatttgctaacaagtatgtttattaacatcctaaatataaatttctattacaatgaaatttaaacacatataaagttgagaaaccttacattgactgcaacggaatatatgactcctcccacttagatctctaccccttgttcctttatgtcgtagagtattatcaagatctgggtcagatacttcttcaggtcgttggattcttcacagtcttacannnnatgattgagtactagacttgctatgggtgggcatgcactcattcactataggctcgaaatttatgaagaacaattaaggagattcaaaatagaagaaagaagaaggaggtctcaatcactctttagttgtctgacaaaatgtaaactagattatgagagattaggttattagataataagaccatcgtattccttttataaaatttcacttaaggttaggactaaattatatggaataaaaacattataatataatggtaaattatacactaagtggctggccatatagattggccccactagttataattttgccagtttttcaaccacttatcttttatttcataaatgcca

SEQ ID NO: 140708 - DNA, 957 bp, Cannabis sativa
accctgatgaggcggtcttgatgcgtatgcctctaaggctattcgggttgaggcatatgaggtgcacgcctcaccaatttagtttcatttgtaattgactttatgggtgttagttgaccttcgatagggcattgcatttaacggggatttagagctgggctcgtgttcgatctagaaaatgaacaatttttttttttttagaaatgtattttgtaactgggtttgagtttgtaactttaattttatttcttattttgtgggtttgaagtgttgatatttattttggttgggtacatactgtacatttggattctttgtatgaaaaaagattagtattggtaaaaaaattgttcatttgtaaactgtgattttgggaaaatgattaatacaaaatattgttcacttaattaaaattattattgttatatttaattgtatttgtatataattaatataaattaaaatttataatatataaaacttgaattaaaataattaaatattattttttgtaggaaaatatttaatgtagtggcactttttgtgtgtcactatatctccaaaaatagtaataaaaaagaaaaaaaaaagaaaaaaaaaggatatagtgacacttcatgtgggtggctgttacctttttagggtgcatttattttttttaagatccagacccttaaatctgaatgcacatctgaataataagatatcacttctcaatctgaatattgaaatatttagactatttgttttcttacctctgaatgtattttttagtgttttttaataatatttttaattgtataatattaataaatttattaaagtatatattattttaaaatattttcaaagtataaaatataatttatttaaatttaaaactaataatatgtgatagtatgaaattattagtttttttttatttatttaaaagatgactattatcattttattact

SEQ ID NO: 140709 - DNA, 959 bp, Cannabis sativa
  modified_base (53)..(53): a, c, t, g, unknown or other
  modified_base (143)..(147): a, c, t, g, unknown or other
  modified_base (927)..(927): a, c, t, g, unknown or other
gatgacaaggctactactttctgttggttagatttccagctgatgcagccccnaagagcagtgaacacaaaccctgttaggctccttctggtttgctgcaaaatttgaatccataaaaccagtgatttcttccttgtactggnnnnncttactgaacacaataccagtgtccagagtacccttcaagtacctcattgtccatttcagtgcttcccaatgttcagggcctgggtctgaaatgtacctacttaccacactcatggcatgagctaagtcaggtcttgaacacaccatggagtacatgagactcccaacacaacttgcatagggaacattgctcatcttggctctttctacatttgtttttggtgactgagatgcagacaacttgaaatgttgagcaagtggtgttgcaactggtttgcacttgtccatgccaaacttgttcaatactttctataggtaggcagcttgaaaaagtactatcatgctagacttaggtctctttatgtctatcccaagaattctctttgctttgcccagatctttcatctcaaactcatcactgagtttccttttcagcttgtcaatctctgacttttctttactaaagatcattatatcatcaacatagagtagcaaataggtttgattattgaaatacccacatgaatcatacttacttttagtgaatccaatattcagcatgtaagtgtcaaaccttaaattccattgcttaggtggctgcttgaggccataaagagactttttgagtaggcatacctcatatggattcccattgtcaaagctctcaggttgttgcatatagatttcctcttccaattccccatgcaagaaagatattcttacatccatctgttcaatctctaggtccatgcttactgcctttgccatcatggctctgantgaagcttgcttcaccactggagagaaaatct

SEQ ID NO: 140710 - DNA, 616 bp, Cannabis sativa
  modified_base (29)..(34): a, c, t, g, unknown or other
  modified_base (583)..(584): a, c, t, g, unknown or other
aattacgtaaaaatgcaaaaaaaaaaaannnnnnaaattgttttaaagtgtaaaaatgaaaaagccactaaaaaaatagggtatatattgggaaacttataaaaatactgaaattttgattaatttttacaaaaatactgtcacacgattttaaaaaaaaaatactttgtttttataaaacaacagttgaacacaaaacagaacaactaaaaataacagtgtaacaactaaaaaacaagcgtataataatagtaaaaacttaacacaatacacaatataaaacttacacaatatttttgaaaaaaattccgccccactgtataaaagtaaaaaaattgaaaatttaagtaggtggtgtaattatccttatatattttagtgtaatttagttaatgacatagttgtaatataattataatataatcactaattattgagtaaaaataagtctaacttagatgatgacacaaaaaagagtttccttaacactctttaaaaaaaaaaaaaaaaaaaaactacgtaacaataatacttttttagggcttttttatttttatacttgaaaatagtttttttttttttnntttttttttttttacaaaattttatatagaaa

SEQ ID NO: 140711 - DNA, 587 bp, Cannabis sativa
  modified_base (206)..(220): a, c, t, g, unknown or other
  modified_base (330)..(333): a, c, t, g, unknown or other
ggcccacagataattaaattcataaataattataaaaatggcagaaattagtgctaattacctttactaatccaaattactaaagcagtcattacagttaggttctagcttaactttaatattcgtgttctttcacttattcgttaaagttgaccaaatcgattagccgaatacttacatcttaggaacatggtagtgcaattgannnnnnnnnnnnnnnatagatacgaaatctatagcttctataattatatagaagtgaaataatgatttcttttgagcttggcttaacagacatatatgtgggagctcttatttcagtaattatannnntttactaaaatatcatttatagaaaactaagtgttttaaggataaaatacattgaggggtagaacggtaaatttatccctgctcaatataaattatctacagaggatctttcattaattaaattgaaacaatggataattcaaagtgtataacattttggagcatatagagtgttctatgtaatcaggagtgtaatttcgaatctatattggagtcaggaagaattaataagttagaaaatttacttagtaaat

SEQ ID NO: 140712 - DNA, 541 bp, Cannabis sativa
aggggagaaaccagctagaagacagataagctgaatgatccaggggaatgggtgcaggaggtccggaccccatccgagaccggcctagaataaaatgacctaagttagaaaaataaaagcccttggcatgatcaccccaccgggtagggggcattctaaatctaagaagacgttcatcaaatcctataggcctacactgggaatactcttgggcagaagggatgtaataaaccgttaagggagacttaccagatccaaatgtgttggcatcaggagccccaatattaggaaccgggaccagcaacttaggccgagaaggcgtccgttctttacccgcttccagtcggagggtcctcccggcggcagcctaagccttgatataagctaactcttgttctctcctgaagaggtacttcttataccggtcctccgccgaggctataatgtccgcctggagcaccttttcagtgtctgggtacgaatttttgggcagagaaccttggagagattgaagtcatccactgattgactccctgagatg

SEQ ID NO: 140713 - DNA, 503 bp, Cannabis sativa
  modified_base (406)..(414): a, c, t, g, unknown or other
ggagttctcttgagaacacccttcaatcattcatggaggagcaaactaaaataaattgtcaaacgatggaagaaatcaaagaaatgaagagtcaattttcaaattgactggatccttgaccatttttgaaagaggcaaacttccttctcagcctcaattcaatgcacaagggcaacatatggctcaaacctccagctctaacgatcaaaccgttaaggaggctaatgccatcacaactagaagtggaaaaactttggaagatcaaccaataacaactaccacttcaaaatctccacatgttgtccctgaaagtgtgccatccaatgcttctgcaaaagttctatttccccaggctctgagacttgctgggagaaatcttgaaaaattgaggagaaatccttgagcnnnnnnnnnaagtgaagattaatcttcctttgcttcacgtcatcaaacaagtgccaacctatgctaaaatcatcaaggatctttgcactgtaaaaagg

SEQ ID NO: 140714 - DNA, 522 bp, Cannabis sativa
  modified_base (139)..(154): a, c, t, g, unknown or other
aatagtatttaccctttataaaatgaccttatttgaaatttaaaatatgatatattttaataaaataatctatataattttgaaaactaaccagatatttatcaacctttgaaaatttgttattttatttaaattaaannnnnnnnnnnnnnnnatgatatttatttatcactttattatattagatatttaattttattttaaaaaataacataaatttggaaaagttagttgataattttgaatagatatttaggtttgttataaacctaatattcaaattataggtttaattttaaattaattatttattttaaagtactttgaaaataaacatttaatttattttagatttttgaatttttaaataactaattattcaatttaaattaaacaaatcctataatcaactatcttatattgttgcatgggtgttttatttattgtttatatacaaacttattttataaaacctattattgtttgatctaaattgctatggttaacttgtcgacagatcca

SEQ ID NO: 140715 - DNA, 730 bp, Cannabis sativa
aaaattaaatttcccttattttattttttttcttcctcattccaaaattactattaaatttagttacttccccaatgaaagattgttttgactttttttttttcataacttgatttatagatttgaaaaaagtagagtatggaaaatgcacaaaaataaaattatcatttttttatcttttgatctataagagtatatgctccttttttatttatttagatatttatttctcaaaattatatgaaagtattaactttatgaattttttagaaatgttaatgtttaattagtatgtatccatgtataaacataatatcgttgataatagaataaaaattattaatacaatgtattaaatataacaattttatttatttatttgtataaatgattttaaaaaaaataatgtaaacttaagtaaaaaaaattacaaagaaagagaatatggctaaaaaaatatctataagataaaaattatatatgctatgtaagatgccttcatacaactctttgtagaggaaaaccctctacgtaatcattgacactacttttttttttcttttttttactttttcaagtaacacttacaaaatgtgttaaaagagttacacttaaccagatatatttttttttgattaacttcatttttcttatcataatcattttaataaataatacatggaggaggtttcaatggttacgtttttattgtaactgtcatggttacatt

SEQ ID NO: 140716 - DNA, 692 bp, Cannabis sativa
tttggttatttattttaaaagtatgaaatcatataaagagcaatgcttacttcactttcaaactattcttcaaacactccactaaaatttgacacttgaaaaattttctagctgcgctatatataatatatattaattttacatgacaatttttttttgaaaaaaaaaattactttacattttgctcatctaacaaaccctcacatgtaatttatcaattatgacataatgtataggaaatcttacaaaaatattcttttgttttttttttttgttatctttatatttgtactgatatttatttagtacaaaattttcaaaaataccgtgtaaaatttaaaaatttacaaaaatattatataaaaaaaaaaacaactttaaaacaattaagataattaaaaaaataacaacttaaaaacaacaaaaaagacaattacaaaacaacagaaaaataacaaaatattgacctcattgcaatatgcaaaataatatcaactcttcaacttgtttttgtattacgaaattcttttttttttttttacttaattttaataacttgatttatctttttgtattactacattatttttttttttatgaattttgcttttttgaattgttaatgtgcggttcaaaccgcaccgcaccgcacattataaaaataccaatttttatatttagttaggtccaat

SEQ ID NO: 140717 - DNA, 586 bp, Cannabis sativa
gtatattttttaaaattataaattggaagaaaaaaaattaaaaaaacttagtataattaaagatataaattttatataaaataaaaattattaatatgaggtgtgtttagaaattcttcagatgtaaataaaatttacttaatatttaaagtagagaaaaaaatgaatagatttcttttttgataaaactaaagtgtgagaattactaaagtgacatatttggacataaaaattacaaatttgggcctgaaacttgaatttctttctattttcttgtttatttttaaaaatatattatatttttttctcaattttatttttctttctaaacttttctatttatatgtatgtaatttcatttttcattcttttgaagggataaaagaaaatgaggaaaatatttcacattcgtactagataaatcatctatctatgtgcataatattaggcgttttcatagggaaatttgaatttatatgcttaaaataccatattatttttcccctaaatccaaacttaataaaattggtaatatatgaccaatttaccaaatttccaaatttaaccctctcatttgaaattcaac

SEQ ID NO: 140718 - DNA, 604 bp, Cannabis sativa
  modified_base (32)..(61): a, c, t, g, unknown or other
tttagaaagttcttatttaggatgttaataannnnnnnnnnnnnnnnnnnnnnnnnnnnnntaaaataatttccaacagatcatccaactgtttctgtgtatctctcacaagtcggggaatcgacccaaacttacccttattccacgccccaactgatccgcacacctaccaaaaatatcaagaataccatcttgactatctaacggtgatgaaacatttggagccaaccaagtctgatgaacaatgtcgtgacaatcatcatctttcaaccaatgagtttcaaaccgaaagcatctcttcctatcattctgcggattcctaataacattctcaagggaagccaccacaggtcgatgatccgaatgaatcaagtcaccattgataacccgaaccaatggatacaaattatgccagtcctggttgcaaaaataacggtcaagtcgctcttgtacatgcaccacaccttgcctcttattgagtcaagtaaagcattgtccttcaaaccccatatcaaccaaggaacacttatccagagcttgttgaaaatcagacatagtagataaacttctatcagcgcctcctttcttctcattaatagaaaga

SEQ ID NO: 140719 - DNA, 1025 bp, Cannabis sativa
aggaaaataactataaaaagtgactcaaaacgtaggctaaaaatagcctaacaatagtaagtacatattaatccttaattgagttctactaatgagttatataattcacgtactaattgctttaatatatatatgatatatgtgatatgtgtgcattaggctcaattagaggagcaggttactcagggacaaattcaagtccggggccaaaacgatatcctgacgcaagcgctcaggacaccaaagcatcctggacgtgtcagggttgctgggtatgctagtacttgaaatattatttctttagttatacaaaaaaaatgtagctaattttcattttatgatttccaggttcctgaccagggcatctaaattgttcggcaggaacaaaaggaaagtgtctgatgttgtggctcgacaacagaaggagattgaaaaattaaaagccgaactccaatcccttaaacagaagaaaaacactactgaacaagaggagaaaggagaggtggctgatgaggcgtatgttccacaaccatacgctcgtgaggatgaggtcgtccaccacaaacctatgttgaggagtttgtttccctcaacgagctagcaaacccgtacaattttgatgaccattcggcccttgattagcaagtatatctctgctctgacaacatcgacaacattgtagcccgagcgtatctgtacgagcatgttggtaaaatcactgttcactgtacagactacgatgattcacatgcccgggttttgatttcggaaatgctgcaagaggatgttaaaatcccaattagggacgtaccaaacatgttccttccttggcctaaatacttaattgtaaaatccgaggtaacttctcttataaattaattattaatgattagtggagtttgaatatcttcaatattatagtgaagtaggtttaatttgcaaatatatgtgctgcggtgggatggatgaataaactactgttatatttgtgttatttgtcattatacaagcatgtttaaaatttt

SEQ ID NO: 140720 - DNA, 520 bp, Cannabis sativa
aatgataaaggaaagacaaagtttgtcaatgatgatgatggtgatggtaatgaactcactggtgatgatgttgaatttgattgtgatgatgatgtttttgataatggaagcttttacaataattaaaatacttattatggatcttgtgtgaccatgtgcgaccaagtatatttcaaagtatatcctaatatgtgtctatgcgaccctgtgtgactatgtgcgaccatggtatatttaaaactttatcctaatattggtctatgcatacaaccatgtgcgattataggcgaccataatatatttcaagtatatcctaatattggtctgtgtgatcctgtgcgaccatgtgcgatcatagtatatttcaatataatattcatttaaatacattatataaatggcaataaattatttaactatatttttaaagttatttcataaagtatgtatatgtatattaaccatagtaaaatttataaattataattaaagtatattatataattgtataagtctagat

SEQ ID NO: 140721 - DNA, 894 bp, Cannabis sativa
  modified_base (32)..(50): a, c, t, g, unknown or other
  modified_base (340)..(342): a, c, t, g, unknown or other
cgctcttccgatctagtaaatctgattatatnnnnnnnnnnnnnnnnnnnggcacaaaacccaacagtattctctccgtaataggatttgacaggttatattcaatatgaactttcctccgccattacatttccttattcacaaaatccttgatattatgaaattcctctctatttgtctactcttctagggatacttgattctttactttatggaaactacttttgtgttagttaggaagtaacactaatagttaatgaattattggtacaatgacaaaaactgtatagaactttccataaactcaataagtttttttcttgcaactttaacattcagnnncactggtagagttagagactttagctaggttttttacacttctctaaaatcactactccacccccagaataatcaccatctcatcagtagacattctagcataaaggcaagtcttgaaacctgatttggtgtagtctaagagtattaaaataccacccttgtcaactaacatatagttcctcttcttgatctgaaattcatttggttgtttcccaatgttctttttttggattaatctaatactaactcattactcccactcaacagcaggtgtctggtctaatgcatgctaaagcatatctgagagctctcactgttgttcctaaggaattccttaatggattttatcttttctggaatagataaaactttccttagattaaatctaagtctaaaagtcgaaaagcttctataaatagccattagaaaaatgctctatttagtaagttgcttgcacttaagtaagtaaattaccaggtttaccataagccacatgtttagataatcttaaaccttgaacactaggatcaagaagttttattaattcctttc

SEQ ID NO: 140722 - DNA, 663 bp, Cannabis sativa
tttcattaattttcttttcaataaatattattttcggtattatctaattttgccccttaaaatatacggcttgttaaaaatttcccataaaatataacacttacataattatgcattttccgttaggttccgtttcttttactgttaaaaattagcatttttaccccctaaattttgactaatacaaaattatgcccctattattaaaaaataattaattttaaagttttaatatttttttttatttttgaaaccaattataatattctattaatttaataaaataataaatattattaaaaatggataaaatattaaattaattaaaaaatattaattttacttaataaaatattttcaaactttattttatttatcaacatatattttaaaaaatcaaactaaaattattgagaatctaataaataatttaaataaactaaaattttttgaagaaaaaatcaaacatatttatatttataaactcatatcttaacaaataaagaaaaataattaaaaatttaacaaaaatataaaattatcttttaaaaaagttataaattaaactaaaaaaattatgtttatttaaaaaaatctatattttttcgataaaaataaaatatactcaagtttgtttcagtaaaatttagtttttacaaattg

SEQ ID NO: 140723 - DNA, 622 bp, Cannabis sativa
tttcaagggatttgaattttaaacctagggtttaaggattcctatataaaggccttaacctctaactgaaaacctaagttccctaagttgcctcttagtcattaagcctccaaattgttctaagtcaaaaccctaatctcgctctctctctctctctctgctacacgcccataagggctctgcttctcttctcttcatctctctcacacgcctctaaggcaatctcactctctcattagagatctgcctgctgattcatgatttgtatccttagagagaaatatatcagatctcacttatagtgatctgaatagtattatctctaggtatcaatacaaccaaaatgggagtaagtcattacccactatcacaagggggccaaacctctataaaaaatctatgtttattactttttcattctatttatgtaacacgtggcaagcatcagatctatacgacccatctgttagttgatcatttttaaggtcaatagtttggtgctttcattgagaatgtggatattgtatctgatcaaatcccattgttaagatgagaagaattcttgttgcaccatatgcatcttcaggtctccctcaagacccacagactgtaggtccagata

SEQ ID NO: 140724 - DNA, 688 bp, Cannabis sativa
aatttaccaagtaaaatcccttttctcttgtaccactatagatttggaatgcactctcaattatatagagtgccctatatgttccacgatatagatacgctatgaaattatctgttaacactgattttttttaacgataataagcctattttcgtgatagtattagcccagaaattatcagaaatttaagaaagaataataaagtagaaataacaccaggttttttacatggttttctagttaactctgcatagtccacgagtcaatcttatgaagacttttctgatacagaactagggttctgtataatcagagtattttcttcaaggattttttgtcccttttttgtatattctgtccctatttataataacataggttggcagttaattacattcaaattcaagtcccacaatgatattttcccaaaattatgggctataatcatgttccacgtaaataaatacaattattatttgaaaatcatacagttgtaatttaaactacttttaacgggtcaatgctgatgtggactcagacacactacaaaatgcatctcgcttggtccacgaacaaacaacttgatttattcataagtcttccaatcaaggacatgagcaccagtgtactgagaaaacttaaggactgctctttgaccataaggccttgcagactggaaaatcatgtc

SEQ ID NO: 140725 - DNA, 578 bp, Cannabis sativa
tttagcgtcgccctgatcagcgtcgatagcgaatttcgccaaaactgacgctgaaagggctaaaaaaccgcctgtaaaggggtttttttggtagtagtgaactatttaaaatcgtcgggaaaaatttagtattcctgacagtttaaaatcgttgtaaacaaaataggcgatattttttaataaaatggattttttaatggacccttataaccgtcgcctataaggatccattaaaaaatcgtcacctacttctcgccacatttcccacgtgcccacctaattttttctatttcccacatgcccacctgtatattctccatttcccacaccctaaaatgaaaatcttaactctccaaaactccacccatgcatccgcaccatcctcctcctctcttgccgtcttcctccctctctcgatctccctttcttctcatctctctcatccatcgatttccaaccactcctcttcccgtcggtctccctctactctccgtcgcatacgtcaaaccaccaccacccatccgtctccctctctctctctctttctctctctacgagctcggtataaatacatttat

SEQ ID NO: 140726 - DNA, 682 bp, Cannabis sativa
caatcgtggaggtgcccagtctatgggagaaagaacttatgaaacagaaaattgccgcttgagacgccgtttggaaaaggtgcagcatagaaacactgagttagaacgtgatgcagcctcggccatggcggcacaggggacaaatgctcaaaattaagggagacctcgtggctcgtgcattatgaggcaggaaaaggcctgggaagaaaaatctagggaaaatgagacactccctaaaatccatatgaacagcaagatgggtgataaccggaaacttatgaatgagaaatccctcatgagaatgaggaggatcttgggactcaaccgagagaatggaggtcacctgtaagaaatcaccaacgttcttcccaaacccatagagtgaggactcgtacaaaccctaatgagtgaaatacgacaaaccgctcttggggggaaagaacagagcgcgaagaagcaagtgtgacttcgaggcagtcaagaacccactgtcgatcaactcaaagaggagaaagtactcaatgagctaatgatcaagaaagtatgggaactagtaaattcgcgagccactcaaagacaaagtctatgaataggaggcgatctctgagtaagacaagatctgccagcaattactcccaaccggatctgcgagagcacttgaatcggaagaaacttaaccttc

SEQ ID NO: 140727 - DNA, 1183 bp, Cannabis sativa
  modified_base (316)..(321): a, c, t, g, unknown or other
ttttttataatttttaaaaatactatttatctttatagtaagggcccaaaattttatttttgcctaataatccattctaactcagggtcggccctatatatgtatacatatatattttttaaaaaaaagaaataaatatatcaactactatttattaaacaaaaaaaaaaagaactttgatttattaaaatagaagctcctacctaaaaattaaggactaagatgcaaaatgaccctaaatttgaaaattaagttaataaatatctttttaaaaaacaaaattaagaaaatagccaaatataataaattagctaannnnnnttataaaaatacatttactatatattattttttaaaaaaatatataataatcaaattaacttatataattttttttattattacatattgttgcctttattttttcccaaaatacgtggacacggataagggtgacacctggatctgaaagaactatcactcacgaaaatcaactaagtcttcgggaaaaaagaacacttcatggaaggtgcctcccggaagagagcataaggcccatttttatgctccgagaggctagaatcatgctaaggcagttccgggaggtaaagagattactcgtacaatcacttcgaatttaatgccgcatgggggaagacgtattaaagcttccgtaaacgatatgacagatggcgtaaccccacttttacggtgattacactataatcgatgagtctagtgacggctacattatgaggaatcacatcagtcaagaggggataaaagattatattcaccaaactccttagatacctacagtataggtcatgtatttcctattttatatttgcaaggaatatgtgcccctatgaagctaacacagtaacacaagcgatctatttttagggattcccctagaaaaatactacaaataccccacaaacagactaaaagggggtcgatcaattagattcaaggaatttaagagagaaaataggagagaaatctaccaagaacattctctgtaacaaatactctcataaatacaaaagactcgtggactaaggctcattaatggcccaaccacgaaaaatctcctgcattaaactttctacagctagtttcatatattatttaattggttgtcgaaaacctcggtcagtatttgttggaaattatttta

SEQ ID NO: 140728 - DNA, 532 bp, Cannabis sativa
ttttgatttcccatattcgtttttcaggcgggaagcggaggcgtctaaggtttctttgagacagttacccctttttgagacttgcctataaatacccatagcattggcacataaactcatttcataacccttctctgctaagttagttccagagcgaaaagaaaattttctggcttcaaagtcgctaaagtgccttcatacaactgctggttggattgacgttactccaacccagacactcgaatcttgagtaagttttcgatttccttcatgcttatctttgcatgtttacattctaaatgcaactttcactacgctgtagaaaaatccttaggaaaccctagggttagaaacttctgcgattcttctttttcatgtcttcatgtgggtttacagccttaaagcttgtctctgaactgcattgcatccgcctttcattttgcttatcctaagcttaatgaaattttttgccctaactcatgaaaattttcagacttcttaagttcttacttttctttagacatagtcgttc

SEQ ID NO: 140729 - DNA, 997 bp, Cannabis sativa
aggcggtgtgggattgcacagcttacccggtgtttcccctacggatcacgggactactcactgtcacaattaaattgttaatggatcccatgattcaaattaattatagttaattgttaataaactaattaaataatttgtaataaaggtgtatttttcacatttctttcatctttcctttttttttttataatattccttcatctttgtcataacttagtaacatgataggaactatccaaattaatataaatcccatttatttttgaattttaaatggactacgttgctaaattatataattattgttgataattttatttaggtccaattagtatggacatactcattaaataataattattttaaataaaggttaaattccttttctttgggccttttgtgagtgttagggccataatagtgggtacaacatactgaacacaatcatccttcacatgaacaatcctaattatgaaagacacatttgccttgtttaaataattgtattaggctaattatattagtttaatctaattacaaaattgagtagcaacataattaattcaaaaaaatatttgaaattaattttttcaatagattattttaattaatttacaaaaatctatatttagttaaattaaatatttctagataatttgtttcagagttaaactaatttgtatttaaaatagtttaattaaataaaaaagataaaaaaaattgatatttaagcttaactaaaactcaagatacttaaatattagatatttttttagacatttaattatgatgaaaattaattctttgttaattttagaacaccataaattagattaaaatttttagatatttaactttatttcgaatttttactaaatatagaaaaattaattgaagttaaattaattttatttaattttagattaacttaaaggggaattaccccatatcctatttttttaactttttttttttcaaatttaagatttgggtt

SEQ ID NO: 140730 - DNA, 595 bp, Cannabis sativa
acacgtgtcgagcgcgaccgtccgagactcgatatgaggctgactaggcgttccttcggttttcggctaataaatgctgtgacacttaatatttcgaaatctgcttttctctctccacggctgacggctgcacttgattatttttgatttcccatattcgcttttaaggagggaaactgaggtgtctaaggtttatttgagacgattacctcttttcgtgacttgcctataaatactaaacagcattggcacataaactcattttcatcacctttctttgctaagtaagcttcaaagcgaaaagagagattcttgactcaaagttgccaaagcgccttcatgcaaactgcttgttggattgacgttgctcgcaaccagatatctgaccctcaagtaagtctctggtttcctttatgcttatctttgcatgtttatatgtcaaatgcatcctctactttgctgtagaaaaatgtttaggaaaccctaggccaagaaatctctgcgatccttctttatcatgtcttcgtgcgattttacagtcataacacttgtttctgaactgcataacgtgtatctttcatcttgcttattctaa

SEQ ID NO: 140731 - DNA, 1147 bp, Cannabis sativa
ccccgcccctactgtgcaggccgaaccggttatggcaacgaaccggatggaacccctatatgaaaggttccgtaagcaggcatctccaattttcctgggaggacccgatgttatcaaagtcgagcaatggctaactatgatcacaaggatattgaatttcatgggcgtcactggaaatgatagagtggtctatgccactttccaatttctagaagacactttagtttggtgggacatggtgtccatgattcatgatttgaaaactatgacttgggagaaatttcaggagttattcaatgccaagtactataatgaaggagtcagaagtgccaagagaaaagaattcactcatttgactcaaaaagaaaatgtgagtgttactgaatatacgactctgtttgattgtttggcaaggttggcttcgggaatcgtgccaactaaatccagtaaaaaagagaagtatctggatgggttaaatgcaaaaatcagacatgatttgatgatcactactgatgacagaaccacctatgctgagatggtggataagacactgcgagctgagggcgcagttggatgcatgacagagtctgttgggactccggtggttggcggggctcgtacccctcctgcataaggttttagcaggggaggtactggttcggccacggatacataaaagaaaaggcatccactgcaaccggtggctcaggtctgatcaagaggtttcgagggaaccagggtcgaggcaatcgcccgtgtagttcttagaccctataaacttacccagagtgccccaattgtaagaagcatcatctgggggagtgtagagggcaggggtgctttcagtgtggcgttccacgacattacacgtgaaattatcctcaactaaaaaccgaagcactgaagactgtagcgaaacccactccatcaagggtgttcgccataactcaagctgatgcagaagcccgtccttcagtggtaacaggtcagctctcggccaaaaaatcttccaaccagagggtgaagaaccgtttgtttttgttggttcggtttagggatctcggttcccgataatttcagttttcacagctaaagaattgttatgtgatggctgtctagcgtttctagccgtggtattggataccac

SEQ ID NO: 140732 - DNA, 1039 bp, Cannabis sativa
  modified_base (775)..(776): a, c, t, g, unknown or other
  modified_base (876)..(879): a, c, t, g, unknown or other
ttaacgaccatgaacaaccttgaatttatacttgtatattgtgtactctaattctttaaatagttaaaaattttcttataccatgtaattcaatgattgagttatgttaaatatgtaagtatatagtcaccaagacttatacaatgtactttaatggtgaaatctctatacaattataaaatatactttaattataatctatagattatacttaaatggttatacatacatattttataaaataatcttatttatatattgaatctcaaatatataatgtaattaaatagtcatctagacttatacaatgtattttaatggtgaatcactatacaattataaaatatactttatttataatctatagattatacttaaatggttatacatacataatttataaaataatttaatttatatattgaatctcatatatatataatgtaattaaataatcacatagacttatataattatataatatactttaattataatttataaattatactaactgattatactcgtagatacttaatgaaataacttagaaaatatagttaaataatttattgtcatatatataatgtattaaatgattatattgaaatatactatggtcgcacatagtcgcatagaccaatattaggatatattttgaaatatattatggtcgtacatagtcgcacatggtcgcacaggagcgcatagactaatattaggatatattttaaaatatactatggtcgcacatagtcgcacatggtcgcatagnntcgcatagaccaatattaggatatattttgaaatatactatggtcgcatatagtcgcacatggtcgcatatagtcgcacatggtcgcatagaccaatatnnnnataaagttttaaatatactatggtcgcacatggtcgcacatggtcgcacaggatcgcacagaccaatattagaatacagttttaaatatacttggtcgcacagagtcgcacaagaccaatattagaatacagttttaaatatacttggtcgcacagagtc

SEQ ID NO: 140733 - DNA, 516 bp, Cannabis sativa
taacatatatgtttattttattttatttcttgtccagtacttcttcttcatattcttttcattttttttaagtttttgaaattttcagtaacgtttttcagaaaaataagagtgtgtgatttttttattctgattttacagaactgagcttgcaaatataacatctattgtatctagtattgaggttgtgcaaaagatggttacttttttttttttaatccttcttttcttttgttttttatttattttagagttgttttacagttgttttttcatgatttatttatttgaggtcgattttattgttcttgctctatctcgccaaaattaatggttattttctgggtgttctcgtgttgctgtagtggatctgtttgtaggtgtgaaagatagaggctataaatatatttcttcttctttctcaatggttatttttgtgctttttttactttaattctcctataaattcatttgatgagctcactggtgaaagggttttgaggtgtgtggttcttt

SEQ ID NO: 140734 - DNA, 955 bp, Cannabis sativa
gcatataatgtcaaatttccctaagattacaactctatgataaataatacaaaagacaaaatcatagattaaataatattataacactaaacaaaatatacacataaaatagagaacagagatgaagaaacgaattacaactcaaagcaataacataaaacacaatatataaatagcatatatataagagatgtgagagcaatctcaacgccacatacaccacaattgtataatagggaaatcactaaacttgaataaggtcttacacctttgtccaaaaacttattttctccctaccacaagcacttagagaaaagaaaagaatggaaatagctttctagatttatcaagcttatagtttctagcaaggtgctctctttgatagaaactcacaaaaattgtatcttcacaagtgaaccgaagacctctatttatagtgtttaagatcacatattttgaaattcaaactcataaccccatgaatgttatgtaactcctgcataactcctataacattaagaatttcaaattaaaatgtgtaacacctttttacacacttaatattggtgataattgtagaggttacaaaatgtaaataactccacctcttatattacaatttatgtgaatattagatgtatgtaactctcaatcatattatatatacattaatctcatattaatatataatatgtctcattttaatattttaatctatcttatattataacaatataatataatattcccccgctagattaaaacttgtgacacactattgtaacattatttaatcaatcaaatattatatatcacccactttgattgaataaatcaaatacttttatagagatcttgcttagatgcatagagtaaaatgtctttcgacttgaattttaccttagtgtagttaccacaaagttatttgaaattttggttgccgtagcattgaacc

SEQ ID NO: 140735 - DNA, 570 bp, Cannabis sativa
catcaactcccccttgtcttgatggcagtcttgagcgaaatatcatcaacctcctggtacaatgcgacatacttagcctccacctccttgacttttgcacgcacacgctccaactcagtattcaacgaggaataattctgtttgagcttgtcatatgatgatttggtagtctctccttctagtttcaagttctccacttccttgctaagtctagaatgctccttgtttaaagctctgttcttttgatcaagcgaaattgtgtcacgccttaagtagaggactgcttgaatagcctacaaaaagcaagttgaattatcatgagtaacacacaaaaataactacatatgtgtacatacaaattctttccaaacttacttggtaaatcgtagaaacgccgtaattcgctcgccccgcaagtccgatgcctctcaaacgctcttcacctcttggatcgagaagagactcaacatgaccttcgatagaagcaaggtcagagtaggccgaaataatagaagagatggacaggttgatcatactctcctcaatagacaactcgttgtcacccctcag

SEQ ID NO: 140736 - DNA, 744 bp, Cannabis sativa
  modified_base (603)..(624): a, c, t, g, unknown or other
tggggataactttccatgaatgttgaaaatactaccctgttgtttagcaatttttttttttttttttggctagtttttcttccccgaactttgacatgtatcaaatcatgtctcttggatttttttggccgctaaaaattctcctgaattattgaaattcttagattaaaggacttttgtctaatttcattcaagtttactgtttcagtaattgtttatgtacaaaatcatactccacagactttgatgtctaccaaatcatgcccattgaactttaattcatgttagaatttttttttactaaaattagacaaaagtccttaaatctaaccatctcaatagttcaagagaaaattttagcggtcaaaaaagttcaggaggcataatttggtacatgtcaaagttcagagaaaaaaaattctaattattttttttttactttttggcaggacactcatggttgtctattatccttgtgaggtagaatatataatatttctctgaatcttaaaatattatatattctcaaaaagtaaaattagaattttttaatatgtactaaatcatatcctttgaactttaattcatgttagaatttttttnnnnnnnnnnnnnnnnnnnnnnttaaatctaacaatctcaatagtccaggagaaaattttagcggtcaaaagagttcaggaggcataatttagtacatgtcaaagttcggataaaaaaaatcctaattagtttttttttttt

SEQ ID NO: 140737 - DNA, 960 bp, Cannabis sativa
ttcccattcccttgcttgtggttgttgttggaacgcttgccacttgagcttggattatttgggtaatgagggagttgggcggatgttctagtagaaagagccttttgacttgccaggcttttgctcaccttccgctcgttgaatggcttcttcgggcttgatgaagccttcaacacggtcaagaaagtcactcattgagtctaccggcccgttcttccttatatccttctagagttcgccgtggacttcaatgcccccccgagtatcgcggataactttccatctttagttacccgtgacacttttgtcacctccgtcatgaatctgctgatgtatgcccggagaggctcacctggtctttgcttaacttcgaccaagtctcctagatgcagtggaagttggcgtgaggaggagaattgtgcatggaattccgaagagaaggctttccatgaactaaagtttccaggggccaacttgaaatacaattgctgagcggcttctgacagagtagcgggaaattttttgcaacacatatctcttcgtaccccttgcaaatccatttgcatttcgaaatacttgaggtgggaaagaggatcttctcttccagtatacatcttccatgttggcattttaaacttgtggggcaacgccagaagattgatctcaggagagaaaggagttccacgtgctcggtccaacttgagattgttgtttctttgtccagccatgccatgaaacatgcttttcagttcgtctagctgtgcctgtacggctgggctgaatgatctttctgaatcacgtgctcggtcaatttgaatcacgtcaacatctttctaagcgggaatttgagcatgggttccaagcttaatgatcgtcgtgacaatctgatcatctactcctctccttctattcagatcatttcttaggtcatgagtcgtccccaacctttcgaacacagaa

SEQ ID NO: 140738 - DNA, 920 bp, Cannabis sativa
ggaatgggaatgggcatgggtcgaggaatgggaatggggattgagaataggaataggaaagggaatgggccagggaaagggaatgggaatgggggacgagaatggaaatgggaaggggtcgaggaatgggaatgggaatcccaatgggaatgggaatgggctagggaatggaaatggtgatgggaatgggaatgggaatacgaatgggaatgggaacgggagtgcgaatgcaaataggaatgggaatgggaatgggaatgggtcagggaatgggaatgacaatgctaacgggaatggggatgggaatgggaattggaatgggaatcagaatgggactgggaatgcgaataggaatgagaatgggaatgggaatgggtgggaatgggtataaaaatgggaatgggaatgggaatgggaataggaatgggaataggaatgcgaatgggattggttttgggaatgggccagggaatgggaattgaaataggagtgggccgggcaatgggaatgggaatgcgaagggaatgggaatgggaatggaaatgggaatggagatggggatgggattgggaatgggaataagaatgggaattggaatgggaatgggagtgggaatggggtcggggaatgggaattggggtttacggtttacggttgttgttggggttggggtttaggggttagaggttagggtttagggtagggttgggggtaggggtaggggtagaggtttgggatcaggggttcaggggttagggttcaaagtttacagttcagggtttagcgtttaggggaatgggaatgataattgaataaaataaaatttaaaatgcatacaaaattttataaaaatcattaaatttttctctagttacatgatagttgtcgttctttcaatttcgaaatagaatattcattcc

SEQ ID NO: 140739 - DNA, 594 bp, Cannabis sativa
  modified_base (99)..(104): a, c, t, g, unknown or other
ggagatatgtcccggatgctgcttcattgcataaagacttagcaaatagtttggattataagttgcttgatccacgtgtccctgtctggttggtccacnnnnnntgggcaaaatcaggggcaacataagccaatcctaaaaataaggacgacactcatccaaatcaatttattttcatactttttagagataattgctttcgtattaatttatacataatatagtatatattattaacaaaattgtatatattatattaacaaaattatatacaacaataaaataattataccatacctacaaaattatataatatatatcataataaaataaaaattaaacataatctaaaataaattgatatactatataataaaacttatataccatattaaaagaaaaaaaacataatattatactatacaataataaaaaaaatatataagatactactaataatatatatcatgtcaacaaaaatacaatacaaaatagaacttatatattatttgaaaaaaaaaatgatatatcgtataacaaaaaatacatataccattcaccgaaatatatatactaacaataataataagaaaa

SEQ ID NO: 140740 - DNA, 507 bp, Cannabis sativa
tttgaataattttcctttcatggttagtgtaagaggagcgcgacaccccactgccattcccttgtggcagtgcccaccaaaattgatggacgctgccatttccatatggtagtgggtgcatatgccttttttcttgagaatttgatgccatattgactttatgcacaaacttaagtcattttcatgccccaataagtcaagtccttgttagtttccttgatagattgaggtttctagggtgtaaacgcttgtgggggcccatgaaccttactttgggcacacttgggtgttgtaagtcccgacaccaaatggttggttgatgttttcgagtcctctagaagtgccatggggccctttagaaattatataaattattttaatcttaaaagtaacttctcaaaagttcaaaagagagaagctacaaattctagcttcttttaaaagaacttttaaattgaaaaaagaatttcatctaaacactcctaaaatgatttttttttttaatta

SEQ ID NO: 140741 - DNA, 569 bp, Cannabis sativa
gttctttttcatctataaatcacatattgttcaccataaggctatcatgcagatcaaaataccgaatgaattacaatctaacgtaagaattaaagcatgttcaaatcaagaaataatattcatgaattcatggcaaaatcattcaaatcaagtgaaagggatggaatagaaagcttacccagaactagattccgaggaagatggggacggggagcttggatcgttgaaataatgcaaaaatccctaggagattggagcctagaatttaggccacttagagaggaggaggagctttttcaagagttaaattctagtgagagaaagtaaaagtgaaaaatgaaagtaaaagaaagggtttcccccaaagctcacttatgtacatgtggggccccttttttcctcacttactttaccaactcctcataaaggcacataaaagagttatttctctattaaaacatgttatagtgatatttctctcacctagaaactcgagactagacccctacttaaaggacacgtatactcagattttccacagaaagctgagatgtccctgagggactcct

SEQ ID NO: 140742 - DNA, 885 bp, Cannabis sativa
  modified_base (128)..(150): a, c, t, g, unknown or other
  modified_base (589)..(604): a, c, t, g, unknown or other
  modified_base (851)..(851): a, c, t, g, unknown or other
agactcagttaatttattttagttaatcaattataattttaaaattagactatgtctaggttatgaaattttactaagatatggcttgattgttaagatataacattttagggtttatttgttaattnnnnnnnnnnnnnnnnnnnnnnnaataaatattataaatgaaaattttatttaataattaatttaattattaaataaatagttttggcatttataggattgaaatggtaaaagtggtatttgtgaaaaataaataaatggttgagagaaatggcaaaaatataactagtgttgggccatcttcttcatggccgaccattaggtgtgatttttgccattattttattatttttattctaaataattcaatcctaaccctaagtgaattagtataaaaacagaagaaaggtctcattgtccaactaatgcagctaatgactcttaacctagttttaatcttttcagacaactagagagtttgagacttcttcttcttcttttcttcttctaatttttgaaattctatagccttcttcacaaaacaaattcagcctttagtgattgagtgcatgcccacccgtannnnnnnnnnnnnnnntcatagtgtgtaagactgtgaagtatccaaaaaatcaactctacctacgttcttctggggatatgttattcaaatggcaactgacttttaaaatgttgttccatctaaatcagtccctaagacacctttagaattagtgaatggtcgcatacccagtttatgccattacagaatttgggaaagccctgctcatgtcttaagaaagaaagatggaaaactagaaaagcaaactgaggtttgcatgttngttggaaattctaaggagactaggggtggactat

SEQ ID NO: 140743 - DNA, 1054 bp, Cannabis sativa
cattaaatgcgagatgactgctcagaggaagcctgacaccgcccggagatgctttgatgttatcttgatctccgggaacatataaaaccttgcctgccttctctgggaggcatatccaagataatgcctttctttacaaagacttagctattaatttaagtgctaaaccctttgtgtccacgtgtccttgtctgattggtccacatacattgggcaaaatcaggggcaacatgttctagtccctatccctattagggtcttgggccatgtctacgtctaggtctgagttcaggtctagggttgggtttgggtctgggtcgaggtttgggtctcaggttctgatccagtctggtctgggtcccagtcccagtccatgttcggatccgtgtgttttagggtttaggatttagtgtttttttagggtttagagtttagggttaagggatttagagcttagggggtttggggtttacttatcattactaatcattacttatattaacgttattactaatcattatttagtaatgttaagtaatgatttataatgataagtaatgataaagttaatataagtaatgataagtaatatgataagtaattattagtaatgataagcaatggttagtaatgataagtaatgataaagtaattattagcaatgataagtaatgataaagttaatataagtaatgattagtaataagtaatgattagtaataaataatgattagtaataaagttaagtaatgataaagttgatctaagtaatgatatgtaataataagtattgataagtaataataattagatttatttttaattactctattccctaaaccataaaccctagactttaaaccctaaactctataccctaaaaagtatgatgagaacactaagactaaagatacaagtaaagttccagttggcccggtgacaatggcgcacgccaagagaatcaaagaagaactcaacaacttagttaacaaaattttaaaacaagaggagaccgcagtcaacactgaaggagagcaaaaatttgtgtttctca

SEQ ID NO: 140744 - DNA, 1080 bp, Cannabis sativa
tatttagggtacaaaatccaacaaactgacacacctaaatttggaaacgaggtaagattagtataataatatgcatatgtgaatacatgtttagcgtgcatgttttattaatgcttcttagattacattagaatagcggtatcaatatacatacagttatattagataccgatgaatgtatgtttgtcataagtacttattggcgctatcacatcggtacgactagagtaccaagtataagctgatattatggtcaatagtactgttgtacgaacgttctagattaaggttgtggtagaatatgtatctcggtgcttgacttgtcagtagattaaggctgaacactaaagacccgtagggttgttgaagcctttgactcttcctgagtggaaatgggaggatgtcaccatggatttcgtggtggggttacctagaacctctggaatgttcgattccatatgggttattgtggatcgatttaacaagtcagtatattttctacagtgaaaacaacctttacagtggatcaatatgcatacttatatgttaaggaaattgtaaggttacatggggctctgaagtccatcatataagatagagacccaaagtttacttcaaagttctaggaaagtctcttgtgagccatgagtacaaagctgaagtttagtacaattttctatcctcagactgatggacagtctgagaggaaaattcagatacgacaggatatgttgcgggcatgtgtgatggattttgaaggctcttagagtaagtatttaccactaatagagttttcatacaataatagctatcagagtactataggaatggctacttatgaaatgttgtatggcaggaagtgcaaatctccaattcattgggatgaaactagagaaaggatatacttaggttcagaatcagtaaagcgagctaatgaggcgatagagaagatcaaggccagaatgcttgcctctcagagtaggaaaaagagctatgcagatctaaaatacagaaatgtaaagttttaggtaaaattcatgtattcctacaattatctccgatgaaggggattaaacgttt

SEQ ID NO: 140745 - DNA, 806 bp, Cannabis sativa
tttgttgatagtttattttatgaaattgtttctaattttgattatattgtgtaggctttgagtgaagcgcaagtccccagagccaagatgaatctatctcatcatcgtctatctcgtagaggcatgcccaacgtcgaacaagatttggtaagtagtttgtatcacttcttttacaatgttaagttttaatcacgccaacagaatttaatctaatttttatatatagaaaaaagaactcggtgttgacaatgttgagagataccaactctggatgagagcacagacaaagaaaaatactttgatcgcagaatatgacaaggaaattgagcagaaaatagtaagtatgtcaattatggtaagaataaacaataataatatgtaagttactaacttaatcattggtttgtttcatagaattaattaaaagagaaagttagtactggtgaaatcgaagctaagggtcggaatgatatcttaacgcaagctttaggcacacctgagcaccgaggtcgtactagagctgctgggtatgatgtttctttaattgagtcatattacttctttttatatatatttagagtctaactaagttggtacattatgttgcaggtaatttgccaagatttctaccgtgtttaagtctatggaaatatcttcccatttccactccggtgtattcaatggttgcagcagccctgccggcctctgatgttcagcttttacttgctgacaagttaaacacatagcaacatgctcagcaatatcattcttcatgcctggccaccaaaacatggccttgagatctt

SEQ ID NO: 140746 - DNA, 652 bp, Cannabis sativa
gatccaacgatgcaatatactcatgcacagctgagttatataattcagcagaacaaccacatgcaaaactatatggtgccgaggagcatacatgatgagggacaagttcaccaactcaactctctcatcaacagaatgaacatcaggattgatgacccgaattacttggcgccgcctcctcggttctatccatatgatcagccgccgccactcaaccctttctgagagggtctcaggtaagtctcttctctttgcatttcattgtatacattggcgacaatgtcatatttagtttggggggagagatttaattttttttttatttctgcattttaattttctgttttagtttttttattttagttaaggaatgtcaataagctagaagatagttgtatactgctgcttagtgtaatgtgatctgaaattgtaaaataactgtgtacttgattctgttaactctttggattagtttggatgcttagaaacctgtgtataattgcaacttctcaatctgtgaaaattgttataattgttttactatggtttgtgggaacattgacaggatagcttaaaacttgcatgtttattcttttgaggcgaaatccttgatagtgttcaattggaatatgacttaggcatttgttggata

SEQ ID NO: 140747 - DNA, 716 bp, Cannabis sativa
  modified_base (687)..(690): a, c, t, g, unknown or other
acctcaacactggagaactcccaagtaacggaaacgaagctcggaaaatgaggagaaaggctgcacggtacatcatcgtagatggagtcatgaataaaaggggattctccatgtcgttacttatatgtgttacacaagaagaagctacacaacttttgtctgaagtacatgacggattctgtggtaactacgcagccgggcaaagtctatcaaagaaaattctaaggcaaggatatttctagccaaccatgattgaagattcaaaggcctacgtcaagaaatgtgacaaatgccaaagattttcgaagatacctcgtgcaccgcccaatgaactaactaagatgcaaagtccttggccttttgctatttggagaatcgatctaataagacaattgcctaaaggtaaagggggagtacaataagctctggttgcagtggactactttactaaatggacagaagccgagccattggcaacaatcacatctaaaaatgtacttgactttgtggtaaaaaatataatatgtcggttcggattaccgtacaaaatagtctcaaacaatgacacataatttgatagtcaattgttcacttatttctatacaaaccatggaaacataaaaagtttctccgcagtagcacatccctaagcaaactgtaataccctagaattaagaaatggattannnnaaccctaattagataattatgaataa

SEQ ID NO: 140748 - DNA, 783 bp, Cannabis sativa
tttttttttttgttttttaaaaatatatatattttaaaaaagtaatttttaaaagtatgttgtttttactatccaaacatgttttcagtttttgttgtttaaaaattgtttttaaaaaatattagccaagcaccatttagtttttaaaatgataaaaaattgttttttgttctcacttttaaaaattatttttaaaaaactaaaaattgaaaatacagccaaacaacctcttggtctcctcctcctccggactggataaagctgaattgtgatgtaaaagtaggtttagatagcatgtgtactgcaattgttgctagaaatcattttggcagggtgattcgtgttcataggtctcgatcggttggatttttttgatgcattatgtggagaagttgcagcatgctctttggttgtgacattggctttggacattgggtccaagtttgttatgtggagaatgactcgagggtagttatcaatgctctcgatgggaaggactctcattgggcactagagaactatgtctcattttgtattaagtcccctccttcgttttatagttgtaatttttctaatattagtatcttgtaattttattgcccatatgtggctaaatgggctttcgctcaccagatgtttggtcttatcccagtctcttccatactgaaaaactttgtaacgaccgagaggtctaactatatttgccatatatgataagtacacttttattcaaaaaaaaaaaaaaaactttcagttacaaatagatacctaagtttaattttt

SEQ ID NO: 140749 - DNA, 529 bp, Cannabis sativa
atattcatcacttcaatgtatagagaaaagttaccaatggtacattacgtacttgagacataaatcaacatgactatttcatagaatcctcgtagcaataaaatttgttacatgttaaaaagaaaactataaaggctcgtttggtatgtcttataagagttgtattgtattaaataataaataagagtatatgtttgaataaaacaatgtattgaattaattattatggctaaattttttaatacaatataagttatattatttaatatataataaatagtgatctgtatattagattgtattataatatttacaaagtgaagttaaccccatctccgactggacttgggatccagagttgcattgtattatttaataaataagagtatatgtttgaataaaacaatgtattgaaataattattatggctaatttttttaatacgatgtaagttatattatttaatacataacaaatagtgatctgtattagattgtattataatatttacaaagtgaagttaacccca

SEQ ID NO: 140750 - DNA, 560 bp, Cannabis sativa
tcaatgtcctctgaatcagacttcttagaagatgaaccactctcaaatgtttgcttagatgtaccgcggttatcaatagattcatctagaaataaaccctccaattgtagcttctgtctctcctcatcagtaggacaaatgtttttaatctttaattgaaaattataatcaaaacaacaaaacatgaaacaaaaacaattatataccaaatattaataaaacagccccaaaaaaaaacagtaaagaaattgaaaaatcaccttgttcaacggcaaatcaaaaatcttgcccttcaagtctctaagaattggattttcaatcacaatgttattgctccaattcaaaattcttggaatcctggatgaaactcttttgcagaatgtgtttaccatgacaggaaaacattcataaaaccaaacaataaacacccacagatagcccaacactctataccaaccatcatactgacctcccttctcttctttcttattttttattttaatcccatggtgtattctacctttgaatgaatcaatagtcaattcaaaggactccctacc

SEQ ID NO: 140751 - DNA, 675 bp, Cannabis sativa
caaactcagaaatgggaccagggagctcaaccagaacaagatcgagaccagtgaaagtgattaaatcttgactcgcgattcaggtaacgtgccctaaaacaaaccattagtctgtgtctagatttaggactcacactatgaccagaacccagacgaggaaccaagcccgaaccctgacctagacctgggacccaaaattagaacccgaataagaaacgtcgaaccctagaacaagactaagaccgtgaccaggactcgaacccagacctagaaccgaagaaagacctagccacaggcccaaactgagactggaactcgggcacggacacggtcgtgtacccagattggaactaagacgcgaacctggacctaaatctaggacccgatcccaaacatcaacttcgacctagatagggatccggatacaaacctggactcggaccaagagccagactgggatcgaaatgcttgacctagatctggaccgagatcctgacccagacccaaacttggacccacactcgggacccgatcatggacctggacccgaaccaagacccagattggggtccaaccttggagacaaactcgaacacagactcagacccaaactcaaacacccacacttagaataagaaccaaagctagactcagacccggacccaacctcgaacc

SEQ ID NO: 140752 - DNA, 987 bp, Cannabis sativa
ccgggggtttagaatctccatgtttgcgggacatcaggtaagaaagtagttaacacgtagagttatacgcaatggcgcttatactgaatatgacatatatgagtaactggaaaccgggattaggattgttaccttaaaaagagcagtttattggcctagggttattaccctagtgaattattgatgagtattgatatgctatgatatatgtatgtatattaagattatggattatgcatttaaggcataaacaagctagactcggtaaactagtatcttgagtttaattaaatgcggtcgaggattattatcctagaatattatgaaggtaagaaagcgatgatatatggtaatattgtgaatccaatgaaggcatgagttagggctaatactcttaatagttgttatttgagcatattataatgtgtaatatgagtaattgtatgcaagttagggttatcacccaaagattttatatgttatggtatatattgaatgcacgcatgtatgttaacagttatgtgtataagacataactgggttagaccttgtatatatcaccaggataaaccaccgaaagaacgtaatgaatggattatgtagatatatgaatagggttgtgcgagcaaggtataacaaggttatcttggtaactataaccgagataaaccctactaaggccttattgtaaatagacgtgtgagtgtaacacgtaagtctatgccacatagacatacataggcatgcgagcgtaacacgcaggtctatagcaaatagacaaatagtgtggtgcacaattaattatgtgttatatatattttgtttaagggttatgcgtttaaggcataattaggttggactcgatgaccagaatcgagatgaaccgctctaaggccttattgtatatagacgtgtgagagtaacacgtaggtctatgccacatagacataaatagacgtgtccgcatgacctatgccacatagacat

SEQ ID NO: 140753 - DNA, 1093 bp, Cannabis sativa
ttgtatatgcattgtttaggtactatggaaagtttggtggcatttggtggaaaattgagcaagaggtaaaaggtttggggagaactggtgcaaaccggctagccggttttgcgagacctctaaaatcggttagacagttttggcaggattcccaaacacttcattttctcaattttcgtccatttcagtgtcgtggttgggtgtttccctaattcaagagtttaggtaacctctagggagtataaaagaacctagggttatggattcgagtttcccgggtttaaggttttgatcatgtaacttacccagtttcataatgtgattagggcatccatctagcacaggacttttcgttcaggtcgaccagctcacttgaatctcgaaagaaggtaagaactgtatataatatgtgatattaatgtctgaatgtatgtatatgttatgtgtatatgcatgcttatatgttgtgattcataatctaccaacacttgtacggttgcggtacagagtgcattggttaggtgtatgatgtctgaaagttcatcgtggtgtaaccagcacttgtacgggaaggtacaaggtgtctgtggtacaacacttaatagtactcaaggtgcggtccataccctacctacattagtacagaggtatattgagtgcatgtggtacatggtacatggtacatggtcgtatactagttagaacgttcttactcatctgttgagccttgtaaataggtgtatgggcgcctacaagtcggaaattatatgatatgttatatgcttttcttagtgagtttgtcgactcacagttctgcttccatgtgtgagtaaaggaaaggcaaaagctggacaggagtgaacctgagctaggatgggattgtacatgtcgaagcggcgtgacttggagtgttcagtctcgggacatctgggattttattttgtagtcgcagtgcgacctggatataatgtattttgggtatattatgttttaaaaatttaaaaaggggatcccgacacttgtaaatattttgatataatataaagtttaatatttaatataaaagttttaagttgacacgtttttcaagaaa

SEQ ID NO: 140754 - DNA, 503 bp, Cannabis sativa
atccatttataaatataaaaaataaaatttaatgatctagactaattaggctgtcatgtggccattaacttgacacttaatgtccaagtacctaggaaaagttccactattctagcttaggtattattaccgtcaaaaattaaacttaaatatttatctgtaatcggaagttaaacttagatatttataccgcaaattacgtatttattttaatatgagttactttaattatatgcttatttaaatatacgttgatgtatacagagtaatttatattttattatgaattattgtacttattaaattttataaagaaaacaaatctagaaagacataaaatataatctttagaaaataaattttaaaaacagttaatcctcaacaaggttattaaaataaaatttttttgaaagcaacatactaaaaaatatctttagaagaatataaaaaaaataaaaaattactaattaagtgtacttaaaagtaaaatgaaataactatta

SEQ ID NO: 140755 - DNA, 551 bp, Cannabis sativa
ttttttttttttttttgtcttgtatagttgtattgtgttttattgttggtttcacacttcctatcttattagttcttacaactctttttttttcatcaagaaggaatacttcgctaatctgaatcaacaaatacaactaaaacttaagcaaaaagctcaaaacaccaacaaggccaactggccaactggcccacctcacaccacactatctattacataatgtagctagatagtctttctctagtatagtcatctttcttttgtttacaatttgccatctaaaagtagcctttacatcatttacaatatcaacaatagttctagaatagccattaaaaatacatttgttcctgttgatccaaatgttataaacaacagctgctaaaattgagatgttaatcctttgaatccaagagttacctgccatgcaaatccagctaatccaacctttatagtcaatcggccaatcattgtgattcatccaaataaacgttctatcaaggattctcctatacacaaacacacaagaagaaagtatgttcatgagtctc

SEQ ID NO: 140756 - DNA, 845 bp, Cannabis sativa
tttgtttgttcggcgacttctattgatgaagttaaaatgttttctattttattagataattaacaattggagtttagaaggaacacaattgtacaataaattcttcttgtccgacactagtttcagcgagaagataaactatctcagtgcaaactgtaagatatttattaatgtaattgtgtattgcatgtaatttatctttgttttttttatttattattaaaactttatttaaagtttttctttagttttttttagagaggataaattgcaatgcactattattattttattttttttttaaatcattttgagagttattaggagtgtatcatatatttaattagtaacttttttttttctgagaacaagtaacttttcttatattgatatcagtgacatatattgaaaaaaaaaatatctgtatgtagagacgtttttttgactctacttaagctttttccaatactatattatccatacaagtttaatgcaacaataagtttgaaataagtaaaacaacactactaaataataaaatagaacaaaacatcatgaaacaaatacataaaacaagtaaatattacaaatttaacaccaaaaacctaaccgtcagtataaatataattaatatatattttactatataaataaaataaataattttttaatatatattaaatgtaattagattttgagatggacattcaataaccgattcaattcaattagaatttaactttttaccatccaatctaatctaattgtatatttaatttttggtgattagattgttagaaaattaataatatacccaagatctatttgtatataacatagaacac

SEQ ID NO: 140757 - DNA, 1038 bp, Cannabis sativa
ttttcaggtgttcaactatccagaaggtatggaaattaactcaattctcctctttcattttaaaatatatggaactaacttgcagggaaatctacatgctgctgcttcctcattcacggatagagattatcaacttttcctttgtttggtttggaagagttggcattgcaggaatgagtttctccaccaccagaaaagaatcatccctgctcttatgatacaaactacctctgactacttggatttatacaaacaaaacaacacgaagttggctacatcggggtcccatccttcatccttagctgctgcttctcatgaaaatatgcccaccttcaatctaaaactgtcagtagatgcagcccagaacataaattccaatatgacaggttttggtatggctctattcaacaacaaaggcgatatgttgctgtcagttgctacaccatggacaggcactcatttggctcttctaatggaagctcatgctctcacctatgctctgtcgtggtgccaccagcggaacattcaaccagatctcattgtttcagattgcaaagtgcttgtggattacatctgtagtgaggcatcacaccacctgctgctaaacaaatttgccaaagacattacaaacttcctctcttacattcctaatgctaaacttattcacatttccagggagcaaaatgaaatggctcacacacttgcaaagtttgcattaggcctagttcatgaagtttattggaaagaccataattttatttgtaacctgtgatttgtacctcaaactttctattttgaatggaattcaggtttttcaaaaaaaaaaaacataattttttttaattttttttattaacaatctaattatattttttttattcatatatatatattattgggtaattctataacacacccccttaaaagggatgtattgattcacgttttacttgtttcagcatccagaagaattttttagtctaatttttttttcatattcatgtacgttatagctatttaggatatcttacaaaattt

SEQ ID NO: 140758 - DNA, 612 bp, Cannabis sativa
agttaaagttgcgtgttcaaaaagaagaagagactttcaaggtatttgccgcaactgaaattcctacttgttgtcaagtagaagttgtaaaggatggtcgagaagtaactaccaacaagaagaaagggaagtctaaagaacgatttcgaacgtttcaacgccgtatgaaaagactgttgtatgggaattatgaaggtgactctcaatctaaggaaagctttaaaaattgcaacattggaggtcgtttttctttgtttggcacaaaggccctcatggatgcgagaggtggattctacccgccgccaccaccaccgccatactgacatggcgctcaggtaagtttcctttcccttttctttaatgtcacattgaggacaatgtgtcactttagtttggggggtgacttaaatttttatttttagttttttttttttgtttttaagttttatggcttttaatttttaattttttagtttttattgttatgagtcaatttgcttaatgtgagtcaattacaaagtagataggcagcatgatttgaaaagtttatttattttttaaaaaaatctgtgtgcttagtgatattacattcttgaataatttcaattttat

SEQ ID NO: 140759 - DNA, 756 bp, Cannabis sativa
aatgaccacttcagttggtgccttctccttcgacggggtctcactgcctttggatttattggccggaggggataagctgaaacttccccccactctcttcttcagggcctcaatcattttctgtgacatttctgcacgaaataaaaataacatagtcagaaaaaagcataagaaatatgaaggcatgataatcaagaaagttaaatcaagatggagtactctgcacgctagcaggagcattttcctgaacaagcacggacggggcatcgtcatctgattcttcctgctcctccaggacaactttcccctttgcttctacaggggtggatggctgaggtagaccgggctctctgatatggattgtgtgttcgatgggcctttgcccagtcgggagggttttcttccttttgagcggcctctcctggtctgaatattcctgggcctcatcctcctgctcaaaatattattgagcatattgtttggcttcagctcttcctttcaacttaccctcatgcttaagttgaataagctctttctcctgctcagaacattcctcagcatgctgcttggctcttgcatcacccttcaacttagcgtcacactttaattgaatgagctccttctcttgctcagctccctcagcccagtcagcactggacttcttctttctccccttcacaaactgaggtataaagtatcctcgataaagcccgtactccacaaagttagcctctgaggttaatagagtgatattcc

SEQ ID NO: 140760 - DNA, 543 bp, Cannabis sativa
  modified_base (160)..(161): a, c, t, g, unknown or other
  modified_base (301)..(306): a, c, t, g, unknown or other
  modified_base (407)..(415): a, c, t, g, unknown or other
ccgggacgtgcctcccggagaaggaatacggagccccctatactcccagaagcctaagtaacatcaaagcatctccgcgaggcgtcaggcttcccctgagcagtcatttcgcatttaattccgcatgagaggaaatgtgttgggactgctacacgcaatnnagtctgacggcacaacccccaatttgcacctgggaagtattgatcatttaattctattgacggctacactgtgaagagtcacgtcagtcaagaggcaataaggacattccacataaaagccctacaacacctagggattnnnnnntgcattacccatggtatattcatcgggaatacccaactttatggatatttacagagacacatgtacaataatcctaggaatcaccccaccaaaaacactannnnnnnnncctcaaagctcattaaatggggtagagaatttggtattgcataagagcaataagagaaaatactcaccaagaatattctctgtatttaatacactcataaatacactgactcgtggactaaggctcat

SEQ ID NO: 140761 - DNA, 770 bp, Cannabis sativa
aaaatagttttataaaacatgtttttgaaaagtattttcacctttctaattttaaaaatagaaaagagttagaaaaatattaccaaaccacctaataaacaaacgggatggtattctgtttagtgataataaaattataaaattatattaaatttttaattttaataatatttttttaattactagtaaataactcgggcttcgtggcaaatatttaaaaaaaaaaaatatatatgaaaaaaattataacttttatttaatgataattaaataataaactactaattttttatattgttacttagatgtacaaatgggtcgacttgacccgtatttatcgaatctcgcttttataatagaagcttagtacgacccgtataataatatgccaagcttgacccctttttttagagtgagacctaacaaaatcaataaacataaattgttcgtgccgagttcaggcctctgcggactttagcggccaggatagttatcaataattagcgtttagttaaatattattctattttttaaatttaaatgaattatatttaaatcaaatagatatttcttaatttcttatgcataaaatttagattaaaaacataatttttttaaaagatatacataataatataatggagatgaattctaccgaataaccagaccatcttattcatcatatcattgttaattagaagtaaaataaatataatacattttcatatttaatatctaggaagaggtttcaatggttacatttttattgt

SEQ ID NO: 140762 - DNA, 940 bp, Cannabis sativa
tgtgtatttgtgaaataatccccttatttaaaccttttttttttgtctctttcttataatcctcaatcgtttctttttttcttttaattctttttggggttccattttgaaccttgtgttttgtaaaagttaccaatatgaccctctgttctgttaaatgacaaatgaactatgtattttctaaaatggtacaaataggaccctgaattgattttttgtcaaaataaaatttatttataatccgatataaaagtgttatgacaaaattggttacattttctgcatctattcgtattaggaattgtcttcaagtttgttatataaaaaaaaaaagttttcaaaaaataagctcagaatcttatttttaccattttagaaaattgagggtcaattttatcatttaacaaaacacagggttcaattagtaaattttgcaaaacacagaatttaaaatggtatttatcattctttcctataatttctatattttttcttttttgtaattttattctctctctttttgcgtgtaatcatccatttttttttaaaaaaagaatctgtctccttcttgcctcctttgtgcacttcttattcttattttatttattattatttttttaaaatatttatctattatctttaacttcaacacattataacaaaattcactctttctaaaaaaaaaaaaaccttcaaaacattatgaaaagtgaaaataatatacataacaaaaacttaattttcggtacactatgttgtcttttgtttaagatatttttatattatttttttattaataacattttcattatcatcaaaaattattaataaattaaaagtaattatcaaagcttattagaaaaattagtatatataataatttttgttataaatattaataattatatggatgtctaaatcttttatttattaccattaa

SEQ ID NO: 140763 - DNA, 900 bp, Cannabis sativa
gaggataaaagattatatccacatttttatactatatcaaaaatatgtttatatgaaaagtagttaagttaaatttaactttttatacctcatttataatacattcctacaaaatttgaaccgttaggtattcagcctcgcatgtagcttaatgttgtttttatgagttaactctcatttacaactcctactttgattttcctttctggcgagaaaggttctatttttgactttacattgtccatagaaaactttaataaattattaaaattttaaagtggagcgagtttccaatacatcatgtatttctagataaattctagttaatcatacacatatatatatgcccctcctgtaattttaaagaaaaaactttgtaattacttgaataatacttcaactttattgagaataaaaatttcacattacaaagataaaatacaacactaagtttattggtaataaggtcgcaaatgttcaatattcaagtggttctttattagcgagttgttaagccgagccaatatataaaccctagttccaactactggctcgataacataaagaccttcccagtttaggttaaactctcatacagatgcatctcttgtgtttacaaatactcgtcttagcaccaaatctctgacattgaagatccttttcttcactcttttattgaaatatctcgtaattcgatgttgatatgctgcattagtaatttgcgactcagtacgtttttcttccagtagatccaaggacaatttcaagagttctcggttctcttcttgattgtagaaatcttatatgtgtgtcaaaatattgacttgtactggcagcattgcctccaagacaaatgccaacgagaatggagtgtgccctgttgctgttttctcagtcgtt

SEQ ID NO: 140764 - DNA, 919 bp, Cannabis sativa
tttactatatatcaattgctataaattacttatcgcttactaaataagactcactgtcgtttgctaaaagcgaggtcaacaatttgaaaatcgtattactgttattttctcgcttttattgggtcaaaactatcgtatattaaacacgtctttaactgttgaatctggagatgtctcgatagaaacttgattatagtggtcccaatagcgagctggggctattcttccttccgaggtcgacaatgtatgtcttgtgtcgatcgcggttatttacaaagaattattttgactcgctaggattgtaagcctcgctcctgttagctggatgaagctataggaagtcttctcatagcgagatggtcacctcacttatttgttctttgagccgatccatctttttcacttagtttgttcattgcatgctaaggactttcacggttgatacgtgtcactttctccggtacctcgctattcgcaattagcgatatatggtttctcgctaatacactaagtgtcagcttgtacattgattccttgcctaagaccttacagtcaacgagttaaaaatattctgtgactcttatgtaattattgagttattccataagaggaattacattcattcatattcccttcatcctgacatgtgtccttcattggggtggccgccgaatttagggtataacaattttaatccaaaaatattgaagccaaaaaaattatatcgacaaaattgatcaaaaataaataaaaactcttagtttttaaaatccctacattttatacataaaaatatcagatcttcaattaattcaacaaaagtggctttgataccacttgttaggatttataaaacactcaagaaaatatatatcacaaatctaaacatattccaaaaagttctttaatatagaaaacc

SEQ ID NO: 140765 - DNA, 603 bp, Cannabis sativa
atattgtcaacataaaatcaaaatgtaaacataacataatgtattgttccgaaaaaaaaaaacactaaacaaaactacaaacattgtatatgtccaaaaaaacaatacaaatatttaacaagaatctaacttcttcttcttggacttctttccctttggcctatcttcaatagaatatccttcattaatcttcttctgggcatagttatacaatgtcacagcgatgtcatccctatagtgcgtaatcatctcatccatattaggaggaatctcattaatcttgccctagattgatagatcagcatacttaatcacaaatacaccacaatcactgaacacaagacaaaaataattaataaatacgtaaccagttttttaagcaaaaaaataaacaataaaaaatcacagaagtcataagataaaaaataactagttgtttaccttttgctttgagtggggagcttgtccacaaactcatatgaaattggagtatccttcgaaatagcataagggcctgactccaaactaatgtcgttcctaccatcataaaaatttaagaaatcaaggaagtatggtagtaactcacagtacgcaaggagatca

SEQ ID NO: 140766 - DNA, 1313 bp, Cannabis sativa
aaccagcagcagaactcgaattttcagcctccaatcaacaccaaatcatcccaaatcacaaccaaacttccaaaccatcaaatagggttgctagcaaacaatagatgcagggtgaaaaaatttgagagctgagggagcagtgagctcagcctgttccaaaccttaaacctgatcctccgacacctctggtagtgccaccagatgcagggaatcgcttagagtcgttgtatgatcggttcaggaagcggaacctgcaagggtttgagggtcgaggtgatccactcaaagcagagcagtggatgagtatgataacattcatttttgattttatgcgggtcaaagacaatgatcgggtcagatgtgatatttatatgttgcgagaagatgcacgtatctggtgggagatcgtgtctcagggtcatgacctaaataacatgacctgggatgccttccagaccttgtttaatgagaagtattataatgagtctatccgcgcagcaaaggcagaaaagtttacacaattgacttagggtagcatgacagtaacagaatatgccgctaagttcgattgactgacaaaatttgcttcagatgaagtggctactaaaggtgcaagaaaagccaagtttatttaaggattggattaacacattgcacgggatgtgatagttgctgctaaataacctggggttgttcgaacttatgctcagatagatgaattggccctagttgctgagggtgcagaagatcagatacgaaagaaaaatattgcgagaagagattattggaagtagacttctagtgttggttctagtatgggtgttaacccgggtgatcgcaagaaaatacctaatgaatcagtagctataggctcaaacaaaaggttccaaggtagtcagggtttccgtcgtggtgggaacaaaaattggcggacttttcttgaatgtcagaggtgtaagaggcgccaccagggcgagtgttaggccagggcctattttcactatggggtagtgagtcacatgaagaggaattgaccacagctgttgcgaccagaacaaaaaaaggatgatacacctgctcctgcccgggtgtttgctctgactcaggctgaggctgatgctgacccttccactgtgacaggtcagcattctgttgctggtaacttattgactgttctaattgattctggtgcaacacattcttatatttcaagtagaataattgagaagtcgcataggcctagtgatgtactttctagaggcttcagaactttactgcctactggagaactagttatctccagtaggtgggtt

SEQ ID NO: 140767 - DNA, 2218 bp, Cannabis sativa
atggaactgatataatttttttttttgatttatttattttattttatttttttacttttaatcccggttatttcataaaaaccgggataaaaagtcccccttttatcttggtttttatgaaataatcgggataaaaagtctcccttttatcccagttttttaaaaactttttatcccactcgcatatatcccggttttcattttagcgaaaaccgggataaaaggccttaaaaaccgggattaaaagcctttgtttgtagtagtggtggttcataatacagtggtgctgatgacctcaaatcaacaactacaagtgattcttctatcaccaatgacaccactttcttgcttttctcaaatgacctctcaattggttgttcagtttcctcatgaccatccacatccttgactgtgatttgatctttaataatttcatcattgaggatggatgtttcttcattcaccaaattaagaacatcatttgttgagaaagcatccaatgtacccaaatttcaaccacttcaaaggattctttctctttaattctattctcaacctcttctgtgtatgcatctaatggtgcttctacattattcaaacaactctcaaaactttcgttatttgagttattgtctttaaaacactctgaatcgtgcagctttaaattatcacatagagatcttaccatgtttgccaagcggttaattttttctcggagtgataatatattctcctcttcttcaattgattcgggtgagtttggacaataaggagggtattggtgactccaaccttgaagtgatggatcccagtgacaatcgtaatcaaaatctaacatgtcattcaacaaatttatgatttcatggcctctccttaacaaaggctctctagtaacgtatgctctataatcaacccaattttttgtttcatcatcaagtctgttatagaagaacagagtaaaacacccgcttgagaaattggaataacatctctccccaagctccttaaatctcccccaagcagaatagaatgactcattgtgttgttggaaaaaattcacaaggtatagcatttggatttaccttgcaggtcaaatacattcagtaaaacatcaataaaattaactaaaaagaaaccaaattagaatagaattcaactatattgatattaactaaaacagtccatggtaacggtgccaaaaacttgttgtcataaatccaacacgcaagtatacatatcgttttagcaagtaatactcaggtaagtgagatcgttctcatgaggattgtagctaagtaccaatcaattgaattcttgtttctatttggaagaatcgataataaggttgaataattaaataactaaaaattgaaaagcaagaaaataacaataaaagaaatataattaactatggatgaatatttaggaatatgaatcccgttagttcagttttccagttgttaatgttaatgattaattctctcccttttggtgatgatagattattaaattaaccctaactcttctcagatcattaaggtcctaaatcatatattatctacttacatctctaaagtaaactaacatacaacttgcattaaatttagaatctaaaaatcacataagctatgtaaatactttcgttttacatcaaaacttatgtttgtcctattagagcattcctaatattcacttctcagattttatattaggatcataaatcacatttaagatggccagtctaaaatatgtaattaaaacaaataagtacaaatcttacaatatagggaagaaaaactaataactacattaaataaattaaagaaacatcatctgacattcatcatattccaagattgggaattagttagaagaaactcatgttcacatccataaaaattggagaagaaattaacataaaaacataaaaaaggagaagaaagaactagttggtgatcttgccccggatcgccacaatttcttcctttgcctccttcttcggttctagggtttaattttttagtcccttacttctaaaacatgcaacccttatataaaaaatactacagatatctttgaatggtaaaattacaaaattacccaaaaacctcgtttttagcacatagtcacgactacctaaagcctagtcgcgaccataggctaattgttatagtgagatttctctcacttagaaactcgagaccagactcctctttaa

SEQ ID NO: 140768 - DNA, 521 bp, Cannabis sativa
atgaagatcgttaagaaagccatcgatgatgctgtaagtctttctcacttttggttttttcatttattattattattactattattggcaaagcactttaatttttattattactgtttgaattaaaaaaaataagagaattggtaaaaaaagacactagtgttagcatctgatcatcgttatgatattggtattggtgtaattaaatatcagttttcatataatttaagaaaataaattttagttagtattgttaactaattgtaaaatgctacggtgttaggtactaataatactcaataacaatgctcgaaaataaaaattgtaaaaatataataaatttatgtgcgtttaattttcagttatgaataaaaaattaaatttaaatattaatggtaataatatataaattataattttaaaatttctacctagttatttgatcattaaatttttattttttatatatactaataaaaaataacaagttaatattaaaaattaaatttaattatttattg

SEQ ID NO: 140769 - DNA, 525 bp, Cannabis sativa
tttgttgttttaattatatattacatataatattatataatttattttaaaatataagattttattatttttattatgaatgtaagtatttacttaacttttaaaaataaatagtcatttaaactgttattaactcaaaaaaaaaaaaagagttgaaagtatgaaattgtaacaacaaatttataaaataaataatatagtagtacaaaatgataattcaagttgtcaaaactaaataaaaataaagaatttcgtaatacaaatacatgttgaggagttggtattattttgcatattgcaacgaagtcgatgtcttgttatttttttgttgtttgtagttgtcttttggttgttttgtagttatttttatgttattgttaaggtgttctacatttagttttttagcttaattatatttcagttgttgtttttagggtaaatagtggcaaaagtacccaaagttttaggtttgtaagcggcataaacccaattgattttttttagtggcataagtagccaatgttt

SEQ ID NO: 140770 - DNA, 687 bp, Cannabis sativa
  modified_base (632)..(642): a, c, t, g, unknown or other
ttatgtactaatatgatttaatacaaatattaataatttttgtaaaaaaaactaatcaccaaatccaatttatttaagtctcatcaaaatctaatttaattaataatttgattgatttgtttttttaattgaatttttagttctaaaacatgatttcaatattaacttaaagtcttaaacatatacaaaatactacatacaaataaaacattaacaattatttaagtaatagttgtactacataaagttatcaactttttactttaaatgtatataatttttgttttaaaagtagttaataaattaaaaacaataattaaaatgtctttaaatattctacacaaacaactcataagatgcattttttttctaggattttctaattaggcatgaaatggtatagcaaaaagtaataaatagccaataatattagagtagaaataatttatatataaatataattataatttatgtagttaactgaattcgtccttaatcagattttcataacattatttgtcatctaatcatatccaatttatatttgattcactccaattgtaattgaatacactacataaagctactactttagtgataatttttcagtcacagcataatttttttgtgannnnnnnnnnnttttagtcacaacaaaatgttatttgtgactaaaatatagcattt

SEQ ID NO: 140771 - DNA, 610 bp, Cannabis sativa
atactctatagatctttcaaacttaaataagataaatcatatttaaattttgattataaaagataaatttaggtaccttttaaacttaactttatataaaacctttaatttttaattttttatataaaaaaaaggtttaattttaagtttaagaaacagatatttataattttttttgacgaaaaatatttataaatttatttaggttaaaataaaaaacataagatatcttgattcaaaaaaaaaaaaaaaaaacaaacgttggatatctgattttgaatttttttttaaaaaaaatctatccttattttacttttatttatagttgtagattttatacaaacatggcctctctatctctagcctttatggggttttaagcaaaatttaaaaaatgggtattctgtttgagaaataaatgaaatttaaatgagtttctaaactttttttttttttttaaaaaaaaaaaaaattattagatgttagcagtcagcatctatatgtaattagtttaacctaaatataattaatccgttacaattaataataaatttgttcatattctttatttttttattaaaaattattttcaaattttgatatttagaat

SEQ ID NO: 140772 - DNA, 974 bp, Cannabis sativa
  modified_base (105)..(105): a, c, t, g, unknown or other
aaactaagcggtctttacaacaatgaggctgggcaaccagtcgatgctgacggggacgtcctggttgatggcgttacctacgtcagtgaggagcttgctgaggcngttcctcataggaggcagggtgccttaggcgccaggtgggtaagtcctccgtccaagattttggaggcacgcctccgcactctcgaccaggagggatacctaggcgagctggactggtacattcccaccgacgacaatcgtgccacaaactctgataaggggatgtgttcctggttgcggactcatggcccgcaaggggcgctgatgcccttgcataagtacttcagggatgtgacggacttcttcggcctctgcccagcccagattacacccaagggcattaagtatttgtccgctctcttcgtcctctacgcttcccagggatgggatgctccttctccccacgaggtcacttggttctttgacttgaagtctacccccaagcaaggcaggtcggggtatttttacttctctcgaccaggcttcaagtggttgagcgggacggacgacaaggccatcagcaaaatagggcgttttgttgatgattacttcatggtgaaggatccgagcatcacccggactcggtttcagtagatcccgacatatcaccgtcctcccctcactcttgctcttagggatagagctcaaaaacttgcctggttgccgaaggaagacaggaatatcatccagttgacctccaatgggaatttggtgcagtacgggctttacccagaggacttttctcctaagtccgtggtggggaagaaggggaaatctgatgctgcccggcctgaacgaactcatcaagagaatgagttgattcaacttaggcgagaggctaagttgaagggaggtgccagggccaagcagtatgctcaggagcctatgaatcctgaagatgaagtcgaggctgaggctgagcaggtgac

SEQ ID NO: 140773 - DNA, 1586 bp, Cannabis sativa
ttggtggataatggaagttcagtaaatatcctttacaaggatacactgaagaaaatgggactacaaaatgcgaagttaaaaccttgcatggtgaattaatgcgaattcactagggacagtgttgccagtcaaggaattattaagctcccattaactctgggtgagccgcctatatccacaacattgatgcaagattttctagtcgttaacttaccataggcctataatatattgttgggtcgtcctacactaattggactaggggcagttagttcaattaaacacctatctttaaaatttcaaacatcggcaggtataggtgtagtgtgaggtgaccaactactggctcgagaatgctatcgcatagagtcgctgaataaaaatgccggccatcagttaaaggcagtcataatggagaaaggcgagaaataggatgaggatctagatcctcgagttcaagatgaaaagaaccttctaaaaccaatcgaggaattggaagaagttattttagatcctaaaaaaccccacaaagtgcggcccttggattctgaaagacaaggggcactcaaagaggaagtggataagttgttgactaacaactttatacacgaggcattctatccctcgtggatatctaatcatgcccttatcccaaaaccaaatggaacttggagaacttgtattgactttttagatttaaacaaagcgtgtccaaatgactgctttccactacaaggatcgaccagttagtggatgcaactactggacacgagcttatgacattcatggatgcatattctggatagatataaccaaattaagatgcatgtccctgatcaagagtatacaagtttcgtaaccaacatgggactttatttctataaagtcatgccttttagtttgaagaatgctggggcacgtatcaacgactagtgaatgaaatatttgaaaagcaaataggaaggaaacatggaggtctacgtcgatgatatgttggtgaagtcacgaaagacctcacggagtgctttgaggtactgaaaaagtacaatatgaagctcaacccaaagaaatattcctttggagtttcctcaggaaagtttctgggattcatagtcaatgcgaggggcattgaagcaaatccagagaaaattaaggctttgatagaaatctcgtcaccaacaaaaccaaaggaagtctaggccttaacgggaagaatggcagctctcaacagattcatctcgaaatcaacagacaaatgcctaccattcttcaatgtgctgggaggcaacaaaaagtttgaatggacagacgagtgcgaggaagccttcaccaacataatgaaacacttatcaacacctctagtattggccaaaccaataactggagagactttactcctctacttggctatctcggaaaatgcgattagtgcagcattagtgcgagaagaggggaagcaccaacaaccagtttattatgttagtaagaggttaccgggggcagaatcaagatatccacctcttgaaaaacttgccctatgcctaatccacgcatctcgcaagttaaggccttacttccaagcacat

SEQ ID NO: 140774 - DNA, 579 bp, Cannabis sativa
cactattttcttttttgtttggtaattttttttttcaacagcgtgagagtaaaattactatttagctcctattcttagtaaataaatattaataataatttgttgtcatattatctttttagctactaattaggatttttattcttgaaactttaacatgtactaaatcatgtcgtataaatttttttgaccattaaaaattcctcttgaattattaaaatgattagatttaaggacttttgtctaattttagtaagaacaatctaatctaaataaaagttcaagagtatgatttgacacatattaaagttcgatgaatatgatttggtagatattaaaatttgggaaatatgatttagtacacggacaatcaccgaattagtaaaattgaataaaattagttaaaagtctttaaatctaacaatctcaatagtttagagggaatttttaatgacaataaaaatttaggggtatgatcaatgacggacccagaatttttattatgtgggggcttaattgttattaaaaaaaattttaggtctactttatttaatttatttatttttgtggggttttttt

SEQ ID NO: 140775 - DNA, 725 bp, Cannabis sativa
  modified_base (28)..(36): a, c, t, g, unknown or other
  modified_base (315)..(319): a, c, t, g, unknown or other
  modified_base (394)..(394): a, c, t, g, unknown or other
cataattaaacataaacaactgctaatnnnnnnnnnaactaagcgggctttacaaaaaccttacaatgatggtagtggaataatatgaatcctttcgctcaaatctctaaccctttttcatttctgtcgcagagtaataacaagatctgggcctagatctctttctctccttctggttggttaccaccatattccgcagtatgattgagtacttgacttgctatgtgtaggcatggaactcaatcattatgggaaaatttggtgaagaacaattaatgaggctcaaaatacctatagaaggtgtctctcatctannnnntgtctgacagagttagaaactagatttggtaggttgaaaagtgttggatgagaatgagagcatcatgttcctttnatagtatttcaactagggtttaagtttaaattatatgtattaaaaaagacaaaaataatgggaaaaaatccatcactagtggccgaccatacatgggctttactagttacaatttttccgttttatttcaaccacttattcttctttcaataataccatattttccaatttcaatcctataaatttcaaaactatttatttaataattataattaaatatcaaataaaattatactttatattatatattaattagaccagacaaagtctcttaattaacaaataaaccccaaaacctcttttcttaaccattaagcccttgcttagtgaa

SEQ ID NO: 140776 - DNA, 686 bp, Cannabis sativa
  modified_base (644)..(660): a, c, t, g, unknown or other
ttctatatttggaaatgtaaaccttgattttgtaatagatgttttgtaaattaattgtaaaagaactttattagtagggaatccccatattacaatcgtatttataatgaaagtttttagtttaatttaaccaaaagtttaaaatttagccacacctttttcctaaactaatagcttagtgataataagtttgtaaaagcacacacgtggcgttcctgagagtcagggcgttacaggggcaatcgttacacctatattttgagtagcaatatggtgctaacacgtgtaatgaagatgaaatatgaacaaacctgaattatacaataataaatacgttcagaaaacttgtcttggaaaatacagttagtagaaatattcaaactcacccttttaaagataacagcgagccatgaataataactgactgatgagaccagcgagatgaacaaaaaacaaagaaggtccgtctcattatacatagaatacacaacaaaatgactatttgaaaagggtatataatgaattattcaaatagctaacagctcattgacccacatactcgtgaatatgttaaaagactaaagacaacattcccagcatggtttacctcacagttgtcatattgttgttggaaatattttacnnnnnnnnnnnnnnnnnaccaagtatgtttgattaacatccta

SEQ ID NO: 140777 - DNA, 724 bp, Cannabis sativa
agtcatttgaatgtcagcttctgactcgccaagactataagtctcactgaaatatgtcaggagttcattggtgaaagtaacaagaatgcgtgttcctatagcgagataggcgcctcacttattaggtcttgagtccacccgactgttatacttagtttgtacattatacgctaagtgttttcacagtcaatatgcgtcgctttttgtattcctaggtgtaaagaagttgatgtctcgccttatgcattcaatacagtatggtttctcgttaatacccgaggcaacatattgtacatttttacctcgcataagaccctatagtcagcgagttgcaagtatactctgttacttctgcattttaatgagttattccattagaagtgattaccgttccatgcatcgattatattgctcttatcttgacacgtgtcctctactaaaatggtagccaaaattcaggtataacagcgagggatgaaccaatggatagagaaaattcacccaacataggtaatacaagaaatcaagagcatcgacgtgatgctccaggaacttttcatgggtttgctaacaaagggaatgaataaaatgatgtacctaagtcatctcacatgaatgcagaggtgagacaaccgtagctaagaaaccaaaaaatcacttgtaatgatcgaagatatcctagaaaccaacctgtgttcgattgatccccaaggcatccataaag

SEQ ID NO: 140778 - DNA, 859 bp, Cannabis sativa
tctatgtatactgatatcgctatcaatgtaatctaacaggcttaacaagcatgtacgctaaacatgtaaacacatatgcatatcattatcatacctcattttcaggttcaagtgtgtcggtcaacctgagtggaacagctgctcgatgatttatagggccctaattcaaattatttgtaaaactggtgagtgacacgctaaatcacttttaggcgactaaaacttgaaactaaaagtttacctattgatggataacatggcaatactttaaatatcgtaaaaacgggaaaaactagggttccctaaaataccccaaccaaaattttggttctgtggggtttctaggcgaccaacgggtcgatcggttcctacaggtccccctgaaccggtcgaccggctcagtgcaggaaacaccaaaaacttcccaaaccactcaattcgacccaaaagttcattcaaacttgtaaacctgctatttacaccataatgaatataaaccaagcaataaaacacctcaacatatctagaatcataaattaccattagagtgcaaagcttgagttcataaagcaaaaccttgctcaaccaacacaaacagcattaaaaccaactcaaaccaacataaataaccctaatttaacctctgaatgcaaattataacaaccctaaaagctacagaaccataactcacaaaatcaagcaaaaaccttaacttaacacttaagaaaaccaagggaaaaggtgctaaaggggttaccttcaacggattcaccaagaaccaactaaaatccacagaaacaagctgaagaaacaccaattgttgctggttcttcaaggaattcaagagagagagagagag

SEQ ID NO: 140779 - DNA, 752 bp, Cannabis sativa
acaaaaaaaattataaaaatacgacggttgcacgagataaaatatttttacgatttttaagattttattaaggagatacggccttttgatattttattattttatgttatttttttttgttacttttataaagttttcaagttattattattatataaaaccttaaaaatatatatataaaaattatttgaacataagagtttacaaaaaatatttttatattttaattttaaaagtgacgttaattattttctttgcacatttaccttttttgggtaattatatgagtaatttgctatactttactcattagttcctaaaataaataatgaatgcagcataaaaatatcttaaataaaaagatatcatagcataatctataaatttagctattttttaaatataaattaatatgtacatttataaaaatatgtcacgatcaaaattataattgaaattaaaaaaaagggatggatgttatagaatatagcaaaaaagaaaaacaaattaatccaaatcctatgcaagtagggataataatggattgcttgctatacttaataatgggccataatgggccacatttccaattggtgaaaccaaacacttacatttatagtggggtggtccaatatcaaagattcactaatgctttatttgattttgatgacttgattcgtcttaaagaaaaaaaaaacttgatattttataaaaatagataggatttttgatggaaaacttacaaaaatact

SEQ ID NO: 140780 - DNA, 650 bp, Cannabis sativa
  modified_base (372)..(383): a, c, t, g, unknown or other
aagcttaaaaatcagatttaaaactaaatattaaaccttcactaaagacaaaactcaataggcaaaaagaccataatgcccttgcccatactaaagagtcactgaaatcactttttgggttaactctaaattcccgacataccctgacattcccaatgtctaacaataccgtcccgctatactaacatactaagatgtgattctaccgagccatacgccgcgttccatgttgctgggcaccgaaatgcaaaattatgaaatttcactatatgacatataaaatacattctgaattcaaataaatcaacataaataattatttgaatatcaataaataattttcatagttaaaccctaattatctgctaattnnnnnnnnnnnnctaagcggtctttacaactatccccccttgtcttcgaaatctaacttgaacaactctagatactaggctctcatatctgattctaattcttaggtggcttcctccaccttgctctttctccagagtactttgaccaaggctatggtctttttctacaggactttatcctttctatcaaggatctgtactggctgttcctcatatgacatgtctggctgcaactcaaggttctcataactaagtatacgagtagggtctgaaacgtat

SEQ ID NO: 140781 - DNA, 1048 bp, Cannabis sativa
  modified_base (477)..(480): a, c, t, g, unknown or other
ttgccttagaattttcttagataatctttgcccggcggcatgatttccacagaatccgccgtgcacatcagataggagtcgtgcagcttcttctttagtaacacatctgagacatggcattgagaatcctcttctgtacataagtccctctactatgatatattgtgcagccttccttctcattttttgagcttcgttccgattatctaggagtttcccagtctcgaggtaggctgctattggtttcatccagtttggggaagtatcaatcatttcaatttcttctgtgccagtgaagctacgctctttgaggaactggataggaaccaagttcaccttgtcacttacattgttgcttgccttggaatctgtctgggactgtagcttttgaattgtgcaagcagatcatgtatttttcttagatatgctatcatcttttctccctgagccttgtattctctggatacatgatttacnnnnagctgtgaatcactgcagatttcattgtgttcggctttcatctcccgggctagttttaggctagcaattagagcttcatactcgacttcattattagatgctttaaatgcaaacttgactgcagcatgcaggtgttgccccccaggcgcgacaagggcaattcctgcaccagatagctgatctgtcgctgacccgtctccatgtagtttctaggccggcttatcttcactgttacttggctgaggtgtttgtcccggctcggggttgctttctggtatgctttctttctttcctgtgcattctaccacaaagtctgctaaggcttggcctttgattgcagttcagggtgggaaagtaatttcgtattggcccaactccactgctcacttgagtagccgtccagaggcatctggcttttgcaatatttggcgtaatggttggtcagtgtacacctagacaggatgagcttgaagaaaaggtcctaactttcttgttgctagaatatggcagtaagtgagtttctctatcaatgggtagcggctttcggcctcaatgagtcttttactaa

SEQ ID NO: 140782 - DNA, 783 bp, Cannabis sativa
tattaaattaagaaaagttgaacagttattgagaacaagattatgagtattgagaggcaacaatgcttactcgagttttaaaccattcagggaactcagtctcttccactttttcaatattgcctacgccccttgcttgaagcaactccttgtgctcactatataatataatgcacttagtaagttaagaattttttaggtgaagtcaactattgtgagtaactgtttatggaatttatacttacttgatatacggctcaacttctgtgcaattgttcaaatgtaccactccgccttatgcttgatttgcatgggtaaggtgtcgactgtcctcatacctagcggtcggccaacatgcttgaaatagaaaattgtcgagttggcatgttttggacaatgtcattgttccgttcaggatggttgaatcaagtttccacttctcgaaagtacattgagcaaaatgttaatgcctcattaaccacaaaagattcagcaatagagccttccgaacgggcaagattcctgacatattgcttgtaaatagacattgaccgctcaatgggatacatccacctgtactgcactggtccacctagtatggcttctttaggtcaaagaaagtcggtggaaaattgtttctaacttgcacaaaatagttagaacatttgtttgcattttttccaaattcaaaacattaagtgtttttgagcataattgtttgaaatacacacacagctcaatgattgtgtcccggatttcttttcaagaacttacgaatacctg

SEQ ID NO: 140783 - DNA, 1156 bp, Cannabis sativa
tgattttttttcttcctgtaacaaccaaattttcttatccctttttattaaaaggaaaagaatataattgtctaattctcaactcgacacctaataataaatttttaaagtttctatttatttgaacactagataacttagccgcccttcctgcggcgaattaaataaaaaataaaactttaatataataaaaaagaaaagaaagtttcattaatacaaattaacttaaaaataataattttaatttataaaaattttgaaataagattttttttagtacaaaatcaatttatgtaattatacattattattgattattgatttagctcttttcaataaaataaaataaaattatataccaaagaaatagaagaactaataaaatcaattaattagtatcgtactattccgccatattattctatttacataaatatatattcaatagattaatttattgtatatatgattaaataacatttaacatttatatttgaattttataatatattaattattaatatagatatgtcagatatttttgtttaaatttaatttgaaaacctaattataaaacatttattcattgttgctaccacattacattatcatataatgttattattttttttacacaaaatcacaccaaacataatatttatcaaatttttaaaatcctatcataagttaaaaataataaaaattagatatttctatgagattatcatgggataacctacaaaataaggatgaaaaatactaaaaattaaaaaagttataaagaaactcatggaaagagaaatttatagaaaacttaccatggaatgtcggatctgatgaaattcataaaagaaaaaaaataatcactatacaatattagatctataaaagaaaaaaaagatataatataatgattaataaaaattgagaactttgtaatgaattcataaaaagagagttctataaaaatgtataataaaatatgaaaagaaaatatatacccaatagaaaatcgagatcttgatattgtccattgatgtcttttctatgctcattatgatattttaaacaacaaaagaaaaaacattaaaaaaaaaacatataagattagagaatgagaaagatgaagaatgtatgctctaaaagactaaagaaa

SEQ ID NO: 140784 - DNA, 635 bp, Cannabis sativa
aaagtaatcaagattatgtgattaaacattagtcatacgatttatcagtacatagcattttcaatgatatgataatcaataatgtggtttacttatacttaaatagtggtaggtcttttctaaggcattggtaaagtaaccttgtattggatgtattgttatacattagactggactgatattcacataaaaatgatatcataaacttaccgtaatatctttctaagtaaataccacttagttgatcttatatcaatgatctcaatctagagatggttaggttctgggtcaattgtattatttgtgctctttaacttcatcgttaaagttaaccaattggatcttcccaatacttacatcttgggaacatggtagtataattgagtgggagcgctactcatagatacggaatctatagcttttataaatgcatagaattaatataatgatttctttcgagcttgcctaaacgagattaaatggtggtgtactcatttcagtaattatattagtttactaaaatatcatttacaaggagctaagtgttttaagggtaaaatacactgatggctagaatggtaaaattattcctacttgatgtaaatcattaatagaggatcattaattatttggat

SEQ ID NO: 140785 - DNA, 1259 bp, Cannabis sativa
tatcttttcacaatttttgaatccacattgattcatttactttgaatccaaaatcgctcttccaatttatggctcatttcataagtttacatccaattttgatccatttgttcttgctatgacaagacaattcttataaatgtaactttcatagtttacttttcttatctcataaaatgagataattatcactttaaattctcaaagaatgtaacttctcacaagttacaattttttttctctcaaaatcactattgaaaaagaatttcaaattctccatattcataatatatatgataataatctcaacatcaatagtaataaatattattatattactatcaatattattatcatatacattatataatttgtatattaatgtacaaaattaatatataactccaatgcatgagttataactctcaaataataattatatggcaactaatataatatgtatgttgctaatcaacatctcatatgtaaccatacacatgtaatatcaatattaaattcatatgttacatatcttatatacatgtaacatatatatatacatatatatcatgtatcatatatcatatacatataatatatatatattaattacataattatatatattacatacccacacatatataacatttctatacattttaatatacatgcatgacatataatatacattatatatgtctcatataaatacataaaaaataattatttctacatatttaatctcacaatatatgtgtatattatattatatctcatcatatatacaatacacataactcatattcatatgttatatattatatgtctcatatacttatacacatataaacatgttataaatttaaatatcatattgtatatcaatatatataataatatgatataaatccatgattacatatatatgacacatatacatatatataactcacatatatacatcatatatatagggcaagactatggtaggacttagcataagttccctaccgatagaaaaaaaaaatttgaccattaattttagatcatgcggtgaatatgatataaggtgtatactcttacgatagaacaacttatatacaattaaaactttattcatattataataatatttaagaatatatttattttagaaaacaaaataatattaataaattaaaaattttatttatttttaatttaaattattattatttttaaaaagttaatttaaattatttttatataggtattta

SEQ ID NO: 140786 - DNA, 698 bp, Cannabis sativa
  modified_base (594)..(598): a, c, t, g, unknown or other
ttgtaatgtttaaattattacaagtttattttcattccatttgttttttaaagtttaattttcgcgctaattttattagtaatcccgtctaggggattagaatttcttaaaagttcttgagtaatgtgcctaatagttagggcgttacatgatatctgctgtaagaagtttcctcatttagcttgatacgatcctttgtcgagatctggcaaaccattattttcttattcatgcataggaatagaaagggaaaccagtccagtcttctggcaaaacgctacccttccgacctcatgatactggaccttcttccaaacatgagctatcaatggcggaagattctacaatcacagagctggagtacattcttggaaggacctgttcaaatgggcttgacccattttatcttgtttgggggacccactgattggatttgaatgctaatttagattctacgtatccactactaaaaatgtagatataactatatatttaaaattatatatatatatatttactaacatttaatagatgttatttggtaactaacaattaatatatactatttggtaactgttatagtgagatttctcnnnnntagaaactcgagaccagactcctctttaaaggacacgtgtgttcagatttccaatgaaagctgaaatgtccgtgagagacttctcgaagtttaaacctcg

SEQ ID NO: 140787 - DNA, 539 bp, Cannabis sativa
  modified_base (452)..(453): a, c, t, g, unknown or other
  modified_base (490)..(491): a, c, t, g, unknown or other
tgtatttgtgaaataattcttaaaaaaatgccataaaaaagtcaatccttaatattttctttgaggaaattacattgcatatctactttactttatttgttttaatttttatcttcatttttatatcctttaagatatgccaacttttatagatgatgtcccaattacactctttaggttgatgtaaattatatgctagacttaagtagagagtgagggtatattgggcaatctattcaaaaaagtgggtatattttaataaaatataatataagggtatttttgattaatggataaaaaagattttttcaacttatcccattttctttaggaaatttacatggtatactaacttttgccattttttacataaatactatcaggtggtattttttacttttttactgtatttttttataagttttgtgtgcagtatactgtgttaagttttnnctggtgttctactggtgtttttttagttgttctactnntgttttgagttgttctgttttgttgtctactggtgttttataaaaaca

SEQ ID NO: 140788 - DNA, 748 bp, Cannabis sativa
  modified_base (36)..(37): a, c, t, g, unknown or other
  modified_base (337)..(341): a, c, t, g, unknown or other
accacaagagcctgaagtacttctttacacaaaagnnactcaacatgaggcagaggcgatatctagagcttgttaaggactatgattgtgagccaacttggcaatgctagcacaaatggaaaggccattacaacaagaactccaaagaagtggtatagagatcattacttgaaaactagctaaactaaccattgtctcaacgctgctacaagaacttaaagatgcacagattgttgatgagttcttacagaagaagagagcaggcttgccaaagaaggaggcagaggatttctctgaaagtacagacggcatgctaaggtataagggaagagtgtgnnnnnccaacgacatagagcttaaaagaaagatcatgatggaagcacacactacaccctactcaatgcatccagggtcaaccaaaatgtacaatgacttaaaaaaaaaaccttgtattggtggcccgcgatgaagaaggatgtagctgaatttgtagctagatgtctcacatgtcaacaagttaaggctgaacatcagagaccagcaaggatgttgcaacctttggaaatcctataatggaagtaggaagatatagccatggattttatgacaggattatcccgaacaaccaagcaacacgactcagtttggatgattatagaaaaactcacaaagtcaggacactttgttccagtaaagtctacttacaacgcaaatcagcacgctgacttgtacgtacaagagatattga

SEQ ID NO: 140789 - DNA, 1666 bp, Cannabis sativa
  modified_base (1614)..(1619): a, c, t, g, unknown or other
aattttaaataaatatttatcttttaaattaattaattaaccaaaaaaaatctagtggagacaacctatattagtgtctatcactacgttaggacatagtgtaggtgtggcgccacccttgtcttaattaaggcaacggtggtatgttttgtctagacaacttttatcttaaaaataagttatttattacaaaataaataattactattttgacaaatcaaaatagatttttttgaacttccatatacaacttttatcactacccttgatagttttttaaggtggcgatctgaagaccatagacctataactctaacctccaataaactagattatttattgaatctcatcaatcaaatatcatgtttattaatttcatgattactctactataaataaagaattggactcttaataattatagtattatatttactaagttttactgcagtgtctattgatataatcaattccagttattagcccaccttgtgtcagtccataattagttatggtcaaattaccattttacccttctaattatgtaatgaccgtgtacttagaatatggattatagaggcaattagcattaattaattatattttatgattttatgtgattattttatatggtgggtcctttttttttaagaaataggcattaggattatatgattattttatatggtgggtccttttttttaagaaataggcattaggattataatttctcaattttggagattttattaaaccataagtacgtgtatcagattcgaccatgtcttgagttacgaagtcctaaaactccagttaaatatgtcctatgaggaactatcagtttgaatccttgataggaaggaaaatgttctttggagtaagaccataaggctagtcaagatactctggaggaatagtaaggtggaagaagccacctgggagttagattttggcatgagggatcattatatccagagttactgagattagattttgagaataaatcatgttcctagttatccatactattagattcccaaaacagaagttgtaagaatcatcttctctgagaaactttaatgagtgaatcaaagaacctaataacaaggagttcatgattactcaagattcaagtcgatttactattgatcatctttatgatatgaataattaggtctttatagtaaacgacatgtttcataaagacaacttaattacatatcggtctatgtataatctctattatatatagcactttcacttagatgtcatactacatcagtaatccaaaacgagattatttgcattgaataacgggcatcagtgaattgcactatagcaactattaattaaagattcctaaacttttatatgttaatgactgttttattcatgattaagtgctcttaattctctgtacaaaataagtacatcctcatgtatgaataaggaattttttgatatttacatatataaattattcaatattaaattttaataatttaatattcatgtatatatataaatattcaaatcttattttataaacagaaatatctttatcgacctttagtattgagattttatgacttaaataaaactcatttcaatatnnnnnnatttactaattaataaaagattaaaaattattttatgttgcatggtt

SEQ ID NO: 140790 - DNA, 514 bp, Cannabis sativa
aaaataagctgcttcctttcaaatgtccatggactgtttctaatcacccttttgatatcaatttcatgatagaattggaacaaaaaatgattttgatccaactctttcacctacgaccccttccctggcttccatagaaaagccatcatatgttacatggcttgaacatcaataataccagcattcaaaaaacgcccgatgagacaccagcggacatcatattattcttcttcctcttccacatctaacgatagtcctccaaattcttcaaagtctagagtgatttcagcatcaaattcactttgccccttgcttgaacttgaagaagccataccagagatcgtacaaaaacagaccaaatcaaccaaggacaagcacctaagaaagacaaagaaccaagccaaagaaaaattcacaccatgtcataagacaagacgaaaaccctaattaaatctttctccttaggtctttaaagaaatgagatctcaatcatttatctctatccagccaagct

SEQ ID NO: 140791 - DNA, 1782 bp, Cannabis sativa
  modified_base (428)..(428): a, c, t, g, unknown or other
  modified_base (874)..(884): a, c, t, g, unknown or other
aaaacaacaataagttttgctggaaaagtcgtcggcaccggaaaagtcgtcggcgctggaaaagttagtgtcgccgaaaaagttgctcgaataattacagtcaccgaaaaaattaccgtcactaaaaaagttattaaagtcaccagaagtagatgtctcaaatataactaaaaatataatcggttctatgaataaaaactaataactcaaatcggttgtaattgaaatataaccggttatgtaacataataaataaaaataaataacataaaataacttaaacaagttataattaaaatagaaccagttctacaatagtgttataatgaataaaaaccaataacacgaaataattcaaaatcggttataactaaaataaaaccggatatataacataatgaatacaaacaagtaacatacaataattnaaaccgattacaattaaaaaaatagaggagaaatcaattcctaaaatactaaaacataaattaaaaacaaaactagttctacaataaaaaacctcataacacataatacctcataaaatagattataattttaaaaaaaaatggagattaatttcaaaaaatattgaggcataaatatgaaaagaatcaattccataacaaaataaataaacataaataataacacacaataactcaaatgtaatataaagaaaccgattatatttctcaactagttaaaaatttaagataaaaaaataggttccgtaaagcaactatgataaaaactgacacacaaaaactagttaaataaaatagttcaaacaaaaatattcatataacatgcttcaacccacaaaatagttacacacataccatatctacctcaaaaatactcattcattatnnnnnnnnnnnggttctattttagttataattggtttgagttatttcgtgttatttatttttattcattataacattgttatagaatcggttctaatttaattataattagtttgatttattttattttatttatttattattcactatgttacagaaccggttttatttcaattataaccgatttgagttatttggtgttatttattttcattcattatgttatagaactggttctatttttgtttatagttgagacatctacctctggtgactttttcagtggttttttccggcaacggtgacttttccggcgacaatgactttttcgtcgatgttgggattccggtgaggttgacttttctgacgacagtggctttttcggtgacttttccggtaacttttccagtgacactaactattctggtatttttccgacgttagcaaccggcgacttttctggcaaaacttattattgtttacaaatatgggatttccatctttttttataagaacatagcataaaaaaagcccatataaatgtaaaaaaaaaaaaaacaaaaaaaaaaactcataaccccttaacattatttatttaagccataaaaaggtaaactcttataattttctcatgtatagtgtaatttatgtagtacaacttggttaaagattaaaattaatttttaaaaaaaataatttcaataaagataaacacattttaaaatagtgagtgggagaaggatttcatctgttatgaaacccacggtccattattagtccaacaccaagagtatgggaaaggcctcgagacggctttgttttcatcccattaaggaaggtgttgaaccatacattattaaggttggcttcctttatggataggacaaagtgatatattttagtgtgatac

SEQ ID NO: 140792 - DNA, 582 bp, Cannabis sativa
  modified_base (341)..(345): a, c, t, g, unknown or other
tatagctcttactcttctcctctttagtttcttgaaaaatcaagttagaattggttgcatgcttagttttgttgttgtactagttgctgtatgttattgttgatttctgtagtgagagcatgattttaaaatgttgattcaagcatgattgtttggtgattagttggttttatcaatttatggaattttaactcaaagttattgtttttaaagaaataatggaatcgttgctgcacttgttgttgatgcttgttgttgttttcagaagttattttatgcatatctaggtagatttgagcttgtttgaatgcatgtttgttagatttaaccaagtttgagtnnnnnactcaaagcttggagctttaatagtggattttgattttatgcatgaagctttgttttatcacttggaaattatttattagggtctaattagcacgtctggaaagtttggttgagtttggaaacgttttggttggagaatcgatttttgatggtaatctgggtaaaaccggctaaccggttttacactgcttgtaaaaccggttacccggattttgcagtagggtgagaaaccggttt

SEQ ID NO: 140793 - DNA, 944 bp, Cannabis sativa
aacattttggtgttttcattgagaacagaatcaaggatcgctctttatttcaaatttaatcacaagtacgatggtggtacagactcgtaggggcatggttgatccagcgaaaccataggcggttgatcctacactacagaacccaggaaacccaagggttccgacagccttaaatcccagacagtcttcaactgcgggtcacggtgtgacgactcctgtggatgaaatcgcgcctggtgtgcaagagattaggaataccagttctgcccgctaccaattttaaaacaaccattggagctgacactaaaatccagaacctcggtgctgctcttggaatcattcaggatcataccaacaccatacatcatgatccggaagaactccgtgctgcggtaaatctcgcatttgaagagcagaggtgcatgtttgctgaatagagagataaggagatggaaacgttaagggcgaagcaagcagtcattgatgattgcagtcggcaagccactgtgctgatacgaaaagcctatcaaactgccaggcaacagcatgcgaatgtcattcccttggttgaaacagacgaagacccagcgatgactacctcccagacgataaatggtcaaccgtcaaatccccagtcacaggttccacatgtgggccaagtggtaggcgggcagaccttgtctagtaattcatcgagataagttgttaggctaaaattagtctaagtttcgggacgtattttcggtttgttttcactctttgtttctagttttaggactattttacgcttgattcttttgtttcagggccccgggtgtttaaagaatgtatttacaagaattgaggacaagtggtgaaacaattgagaagaaaaaccaaaaaaatatgttgctgccaaatcccgtcgcgacggggattggcagagagaagttcgagacaaagtt

SEQ ID NO: 140794 - DNA, 1103 bp, Cannabis sativa
gcaactcatcttcttgacgaagtacatttcaaggaacatttgctgctagtcggtaggtggattagcattgtcaacccctgtattaatccctaaatttcataaagacacaggcggtgccagtggattggtttggtcattagctctacaagctcaccctatggtctagttgatagattagggtctattttctctcaaatagccctgaaatcaacaatctcggcaagttaggcaccaaaacaactcttacacacttattgccttaaccctaactcacacatactattttttcttttaaattaatcatttatcaatttaattaataatcatacttttcatataatattttattttctacatgctcatatgctgcctataatggaaagtggtaaacagttaatatgaaaagcaattaagcatttactctcaatacttactgtaccataagtcgagcttgtctttgatgataaatgtacatgttcaatcagtttacaggaagtttaaaaactttggtgctctgatactaaatagtaacgccctaacaataggaacatcacgcactgcgactaaatataaactaatcctactaaaccagaatctactagagctaagagcgaaaattaaacttttaaaatgtagaataaaataataacttgtaatttacaaactttacaaacatccagaagtttacgttttatattgggatcccataaatttatttttttcaaaatattacaagttatttatacacgccgacctaagtagcaaaggtggagattataaccttttccctgagtagacccaaacctcgtggtctagcttaacctgaacatgtacaatacactgcaaaagccctcaacctcatggtcgatcaataacaaatttaccctttcctgtacaatagagcatccgtgagccaaggcccagtaaggcaatatagataaccatatgaatattaattataaatcacataaatattgatgccattgcatctattgttaatttgacatagacctacgtgttacgctcacacgtctatttacaataaggtcttagaatagtttatcttggttctgattaccaagtctaatctaattttgccttaa

SEQ ID NO: 140795 - DNA, 652 bp, Cannabis sativa
acttggagtgttcggtctcgggacatctggggttgtattttgtagttgctgagcgaccagattataaatttatttgaattaagtttgtaaagtttaagttcgggatcccgaattttgtaaataaatatataaaagtttataaagttaaactattagatcaaaaaaattaatttgacaagattttcaaggaccctttgattagcaaaggtggcacatttattgaaaaatcactgtagcgcacctaatcatcaaggcgttacaattttggtatcagagctgccatgtctttcccccgtagatcgtcaagacatgtacaaccatcatcagagaaaagcttggctcacggttcagtaagtctttactttttttagtaatgtatgtgataagcaaaccatgttaggaagcatggtagtttataattgtttatgttaacgcattgccttaaaatccataagtgcggtagtaagattgcaaattgggtcgttgcctgactagactgacttacgaattgacaggtttatcctataaaatggacacctggtgcaatatggagagtcagaataatgtgcttagggctagtaacagttggagagaatggaatctaagttgttcccataaccgaggtgaaagccattggagggctattggcggg

SEQ ID NO: 140796 - DNA, 874 bp, Cannabis sativa
attcttgaacagaaagagaaagtactacggaacaaaagactatatcgcttattataatactctgaaggaacaataagattgaaaagcgatttggaagttaatgtcgcagttgtgggagtcatgtcccaagttgtttgaataaatttcgaggacgaaatttctataaggaggggataattgtaatatcccggaaattcaaatattatctaaatggacatatttgattaaatatgtaattattttagtaatgaagtaagattatgatcttacttagggtaattggtgtaaatttattaaatgattaaataaagcgtaatttattaattacggagattatatcaaaatatgtgggtatcatggataccatttttgaaataattatttcttgggcctggcaactatggaactagacggagaggtctaaaatgtcacgacaataaaaggtgaattaaattggaattggattttataccagactagattagaattttaagttgtcggtttggtgggattggttagaaattattaaaatatccctaggatttgatattaagctcaagggttataagaagggtaaaatggtcatttcgtgtggtaagttaatgttatgtcttatttgttttggatggctgaaatgaattgggagggttaagttatttatttaagtgttaactacttattctattaatagaaagcgataagttaaaggaagtcaaaatttaaagaaaagtcaagagcatcacatttctcttcctctctctttcggctccaaggaaaattggcaaggaacttgtgggaatctcagctctcttcatcaaattcttggcaaaaccttctgccctaggagttagtcaagttgaggtgagtttggtac

SEQ ID NO: 140797 - DNA, 965 bp, Cannabis sativa
  modified_base (47)..(59): a, c, t, g, unknown or other
  modified_base (167)..(175): a, c, t, g, unknown or other
  modified_base (916)..(940): a, c, t, g, unknown or other
tgacaacacaataaacaagaatgtaaatgtgataaggatttggatgnnnnnnnnnnnnnaataaacaaataaatgataacatgaaccaaatgaaacacaaacaagtgatgaaaatacatctgcttctttattgatattttaaagataaagattacattgaaatggannnnnnnnnagggcataaaacccaacacaacaatcattcatagttcctattaaaaaatataattttcagtttctaatcaaactattaatcccgcagataacgctgaagcagtcaattatcccaatcttcctattgtatgtaatcaaggcgaagtgctcaataattaactcttttacctgagtaaattcacgaagcatgcaatttatttaattagataaaacattgagttttatggagatagactaatttaggcaacaaatctatgaagcatataatttatttaacctaggttctattcttcatcacaaataaaaattgcaatttatcacaaacacttaaaatcctagactattaggtgaatagtaattctaagatgacggtagattaagtaaaacctaatttagtggccatccaaacaagattaaaacaatattgaaaactagaaattaacattcaataaagaaactaagaattcatgtcttgagttttgaaataacccttaactaaaagaaaattactctgattaagacattataataaaaattatactatttaataatagtagaaggagaagaaaagaactagaataaagaatacttcgaagtcgatctctgtctcttccttgctctgtctctaatttgtagctttttgaattattaaatttgtagtctaagaggtcatatttatagtattaggaaagatagatgaatcctcttaaaattaggattctgttataaaataatataaaannnnnnnnnnnnnnnnnnnnnnnnnaagaagaagatgaagagagaaagag

SEQ ID NO: 140798 - DNA, 666 bp, Cannabis sativa
tataattggatcggatctggatgggcctaaaaatattggatgtgatccaatgaacacccctacaatttagtgtagaattttttactttttggtgcaacatctctaatgattcacactaaatattctacaaaataaatatattttacttaaaagattttacattttatattatttacatcaataacctaaaatagttaatttatgaaataattagtaagaattgtatcatggatactacttgtaagaatttaaaatcttaaaataatttagtaaaataaatatttattaaatcaattaaataccacacatattttttttaacacatatttttttttttttaaaaaaatcttatttaagttattgatcttattatacgcgaccatttttaaaatgagccaaaaagattacacaaaaaagagttcaccaataatattaagcatctcaaaaatattaatattctcaaaatacttaaagtacatatagctaataatttgctattcttcaaggttaagatctatacgtgctcaatttgattattaaattattattttactttatgttattctatttagttttataactttgtgtgatgttgtttttattttattagcattaatatttattttattattttgtatttttaaatatgttagtgttttaaaaaat

SEQ ID NO: 140799 - DNA, 1820 bp, Cannabis sativa
  modified_base (1751)..(1756): a, c, t, g, unknown or other
ccgaataagatatataaaataaactgataaaaagagaagtgtttaagcagctagagtcccaggctcttggttcggttcttctgggccaactggaacatgaggatctgctgtttgaataggaggtgtatcagtagtatgactggaggttgaagtagctgcctcagtttgtccataagccacttgggacgcgcagacttaaggtacatgtccttagcatcgcccaagtagtcaaaattggcctgaggattaaccttccaaaaatcaaagaagagcttgagaccagctgtctccaaggcattgaccttctccttcaacctgtccacctcaactgaaagctcctcctccttgcttccttttcctccttcatccgatgaagaactgctggaagggaagtcctctcgttctgaggactgtttacatcagcagataaggtctcgatggtctcctcaaaatggtcaacaacctcgagatccttagtcagcacagtgattttcttttgagcggcaaacaacttcttgttgtcttcacccaattccaactgaacaactccgactttcaccctggcttcttcagtatccttcctagcaaagtccacctccaccctcagggtgttggacagagccgtgttcttggaagcagcagacttagcctgggagtaagtgtaagccaacttctaaccagcttgcacaaggaaaaaactttagcatttgagctaggtatggaagagtaaagggaagtattaagaaagacttaccctggtgaacacttttaagactccgcccaccagaaattccaaagaagagtcattgtcagcaccagccagttgctcactgacctcaggaaccagtctgttcatataatgggccatcatctccttgcccattttggcctttagaagcaccgacaacggtggagtaagtgcccgcaccctttcaagatcactcctgacaagttgagacccaaccttcgatggtggagactccttagacttgacaactttggggtagaggggtttgcagcagtcagctcctcagaaagattaataacctccccagtaggcctttttcccttagtagaggacccctcaccgcccttagacttcttggctggaggagaggcactagagcttctgcctattctcttcctcagagcgtcgagcatcagccgagacatgtctgtacagaacaaaaacaacatggttagaaaacagacatcagaaacataaggtatgaaggtcaagaagcttagaaacaagatgaagtaacatgcaaggtgactgcccgaacaagactcagaagtccatcatcacttgacatcgatcttatttcagacctaacagctttcccttttccaaacacgggaggggatgaccgaacaggttaaatgggctcccttatgcgaatcgcatgtttagtaggccttggcctgggcggtgccaggagtttcttcttccttttcagtggagtcacctgctcttcttcagcctcatcttcaagattcaagggctcctgagcatactgcttggcccttgcaccacccttcaacttagcctcgccctttagttgaatcaactcatcctccaaatgagcccgttcggtctagccagcaccagatttcctcttcttccccgttacggacttaagagtaaagtccttgggatagagcccatacctcacaagattatcctcggaagtcaactgaataatattttggtcttcccccaggagtcgggcaagtttttgagctctatnnnnnngagcaagagtgaggggagggtggtgatatgtcggaatctgctgaaaccgagtgcgagtgatgcc

SEQ ID NO: 140800 - DNA, 640 bp, Cannabis sativa
aatagtaaataatacatattcataatatatgttttcttcaacttagttcaatgtggcatatttcatttatttcgtttttttgaatagttttttatcttctctttatcatctcaataacggtaatcgtacaatctattccgcactattttgagtgcattcgatttgtactaagtgagaattttatattttggattcaatccaatacacataataactcaaatccaatccgcaatagtgcggattggattggttagtttttaatattgaattacttgagtttgattggtttgagatttgaaaataattttatgtttttgaaaacttaaaaggtgggggtccacataaaagtacttgattggtagagtgttttcaaaaataaaatctgaatataattttgagtttttggctaaaaaatgaaaacaacaattttatattttcaaatcattgaatccaaaaactatttaaatactcacttacttttttattttgagatttccaaccaatcacaaattcaactttttataacttaaaaacactataattacattacaaccaatcacatttttagaaataatttttcacataaaaaattcaaatttttgtttccaaaacactctgtttacccaaattttaacgatga

SEQ ID NO: 140801 - DNA, 599 bp, Cannabis sativa
  modified_base (42)..(45): a, c, t, g, unknown or other
  modified_base (133)..(155): a, c, t, g, unknown or other
aaatgaaaatgaactttacagaacacacttttattttctgtnnnnaaaattaaaaaacaaaagtagttagagaatacatttttattttttacaaataaattttttcaaaataaaaattttactttcattttgnnnnnnnnnnnnnnnnnnnnnnnagtgttaccaaacgacaccatagtcttttaatattgtactcttgttaatttgttattgattttttgttatttgtttattattttttatatagatgttattttcatgttacttttatataattttcttactgttttcgtgttgtttctatgaaaaatcataaaaatatatataaaaaaaaattctttcaacgtaagaatacaatttttttacaaaaaattgtgtcttatgtaattatctcttttttcaatggacgcaccatttcttattcttctaagaattaattgcgacaaaattttaattaattgacccaaataataataaatgttcatttgggatgagtcgctttaggtgatcttagactcttttcattatgaataattagtaattttaccttgaactttcgacaatactaattttgactcttaaaatatacggctttttta

SEQ ID NO: 140802 - DNA, 511 bp, Cannabis sativa
  modified_base (476)..(485): a, c, t, g, unknown or other
gaagcagccgccattgctgggagtattttgaattcttctaaggttatttggtcgaatgaatagtgaacagttatagtgtacagtacagtgaaagtaaatattattattttttaagttttaaattttaataattaatattattattttttaatgtaataaaaaaatttgttcaggttacgggttagaaaccgactaaaaaaatatacatttttaaaacccgaacccgacatctgtgtggggtattttcgggttggacccgacccgaccatacgagtttttaattttttttagtttttttggcagcgagtcggggcaggtggtcgagtttttagggtttgcgggtctaaatatttagccttaacgatttaatagttgtcaaagtttaggggcaaagttgctaatttacaaagatacgttatcattcaaacgaaataatgggacaaaatctaacagaagggctaaatttctgtaaatgnnnnnnnnnngggaattcttaacaagccgtatattt

SEQ ID NO: 140803 - DNA, 1152 bp, Cannabis sativa
ttaaagggtttacgctttataattactggttgaaagaaatgattattttattcacaactgaagttcaaaatatttcatcaacaatgtgacttacaatcattaatttcgtaaaaacttccccagttcaatcgtttatttcatcaatcttccagaagcatctggttttgataaaatgggtttttatgttcagggtcaatccctaacatattcccacaattgcttcaatatccaaggtcaatccttggcatattccggggttccaggtaagctaatcctggttttagttatttgtcttagactgctactggttgacgaccagctttccacgtggcagcttgatatggtgaccatagtgggccgatatctactcacgtagcaattcttttacaaaattactttactggattaactgccccttgtattcttgtgactcgctccctctcaagataaccgaggtgtcccttcctcctacagaggagggttatgatccctggtcgctcgagctattgggaagatcgagctaataatagacatcgtcctgcccctttacatatcgttgaaagtgtcctcgcgctatgagaccttctatctcatttttcagctgacaacattctttcgtggtatgaccaatatcctcatgatattcacaccgtttagttgggtccctcttacgcctcgcatgtttcataggttttggctcgctaaaaatgatttcctgtacatgtgtgaggtagatattttcccgagtttctttgagctcggtatatatagcataaagagggacatacttgttgtgtttcttatccatgggtagcctcttggaatagtcttttctctttgatcttgaggctttcgattcaaattctccaacagaatcataccccggttgttttctgggtttcctgactttgtgctttctgaacttattctccaacttgtccattcgcaaatggagtgaaccttgtgttttggaccgagtcattgacgaagatcaggctttttcaagttcagatgctctcgcaggtcacccctgtcgtgactgccgtcggaccttgctcttcttcttgaggtttgatttaccctgttctccctataagggtttgtgtgagttcctttctggtgaacctgaagagagggttggcgatttccatc

SEQ ID NO: 140804 - DNA, 798 bp, Cannabis sativa
tctccaagttcttctgaaccttctctaaatacttcaccatttttaagcctctggcctggtatttcccaaggacctggtttacaatcagctctgaatcactaaggaaaatgaggtgtttgactttcaaggattcgactacctttaagccagcaatcaaggcttcatactcagcctaattatttaatgcaccaaactgaaatctcaaagcatagtgaaacttaaagttggtgatattaatattacccctacacttgaaccttactcattggatgcgccatctacgtataacttccaagtttctgcttctcacagtacaagcggaatttcttctagagttatagcatctatcaagaaattggccaaggcttggcccttgttagatgttcgagggtggtatgttatgtcgaactgccccagtttgattgaccattttatcaaccttgcagaagcatctagtgttgataaaacttgtctcaagggctgatcagttaacacttttatgggatgtgcctggaagtacaatcgtagcttacgagatgcgtggattaggcacaaggcaagttttttctagaggggatatctggattcttcccctagtaaccctttacttatatagtaaatatgttgctggcgcttaccctcttctcgcactataactgcactaatcgcatcttccgagatagacaaataaagaaatagctgttgggttttgtgccctaaataaaactcatttaaatataataatatttacttattaataaagatcagaaataacattttttatgttgcatggttcac

SEQ ID NO: 140805 - DNA, 1106 bp, Cannabis sativa
ctctctctctctctctctctgaccaagcccagcaaccggccacaccccaactacggcgaaccgagcctagcagcagccacaccccgatcaacagtgcccaggtacgtttgtcactcacatatctttctcttttttaatctcatacactccctctctctcgcactttctctttccctctagtggtctcggctctacatagttcagatctaactttttttcttattgcaaagaatgtgcgcaatggttcagcgacggaactatggtggtgattcaggaaaggagtgtggtgatttggtgttttctttgtgattgatggtattatgttggctgaggaatccatatctaatatatatatggtggtgatggcagtgatggtgcggtggtgcatattttttttaatttttttcagtactattagcagaaaacaactagcgtcagtatagtactatttacttcgattatgaaccgaggcaaaaagtatcactatttgcatctacaagtataatatcagttacaccaactgaagaaaattctttatatgtcacttaaaaactgaagcaaaaggacctttttgtagtagtgtaatcatgttctttcttgctatcagagtgttatcccaatttttgtcctcatgactaggggtgttcattggatcacatctaatagatttggacccaacccatccaatccaattatttaatggatattgaattttttcatctaatccaatccaatcgaattgagtcatccgatccaatggatgtattggattggatcagttccaaccattagatgcattgactagtgttctattggattggattggatccatcaaatctattttagctatcatttaagttaaattcaataaaaagaaaaatatatatataaaaatgatttaaaacttaataatccaacatgcataataaacattagtttagtccaacttaattctcatggtctcataataacaccactaaaaaataaatttattcaaaacacattaataattttattagcgtttaggaagatgagaattaatattttagatttaagattttttttctttaatctcaagtgtgaaatgtatattaaatcaattaata

SEQ ID NO: 140806 - DNA, 512 bp, Cannabis sativa
gatctcctaaaaagatatcccctgagtttgatcgttttttgtttggttttttagagtaaactgagcttagaggtggttgtggcagtcgtagccccgaccgccgcttttggtggagaaatcattgaatctcaatgtctatttaaacaaatctaatctctaataattttattaatgtaaatttctttaattttattttttaaaattttttagggttttcccatattgttaagattgtgttcttgtggttgtgcatggtggccggatttcagtaataaagtaaaaatttaaactttaatagttatgtatgtattttatattttatcgaatgtgtattgtatgtatacatattttgtaattgtatatatattgtatgtatatgtattgtattgtatatatatatgtatgtatacaaatattgtaattatattgtatattttttatgtattaaagtgtatctattgaatatttttaacaaataattttgttaaatattatgaatgagaatgacatat

SEQ ID NO: 140807 - DNA, 1378 bp, Cannabis sativa
aaaatatatagaaagagcatgactaagtctatacatatatttagtatataatagcatacatagtagtatagatggatgaagaacaataatagcatatataacgcatgtggaggctggcagagagagaagctgctagcgggtcccacgcgtgtggaaagtagacggcttggcaggagagggacagagaccacgcgcccttgtctggagtgggaagcacgcgcccgtctgggccgtaagatcaacacacggacgacccagattgaggagcttgctgacgcgcgagtgggcttctatcaggatccgaaatttgatctttttgttaaaaaaaaatatatattatttttttcactccaattattcactttgaaaatacaataataatattaattcctacaaaagaaaaagataataaattaaatttaaattaaatattttcaaaataaaaatatatctcgtaaatttcatatgaaaatattaatttattttaaactttaagcttattaagtatattttttcccattaatcacaaccccaactagcttattgctagtccctagcaattcaagcggagaaaaataataatcgacttgtttaaacaagtcaaacaaagcaaaactatccaagcattttcaaaatattggtagggagtcaaaaatttctatcaatgttattttagttgtaattccacagttgtgtgtgtgtgtgcaccaaacttttatcaatttttttaagtgttaacacaaatagtattgaaaaatctcaaaagtgtaaaggtctcaactccaatttcgtcaccggtattgaaagtatttatcgggagggtgacactcttttggagttggaaatgtaataatgaacgcacaaatgagagaggataaattttttaggacaaacaatttgaataagaattgattacaagatagacacatcaaaccattagaattcaaatgacaaacaacctttgagatttctgtgaaacacttacaaaataagagataaagagccaacaaattaaaaaaaaaatacaacgataattatatgtgcataaatatatgtatatatatatatattttaaaagagaaatatgatgtttctctcttttttttttttgattaaaatactgaattgaaacactttttttttagagagagagtaagataatgttactctagttctctctctctttttttttttattattatatatatttttttatgtagaaaagatggagactacttgaaaattgaaataaaatgatattgcacttgttctatctatatatatatatttttaatgatttttatttttttttcttttttttttttgattgatttttatttttttgacaagagacaacatatacgaaggaataaaaata

SEQ ID NO: 140808 - DNA, 1124 bp, Cannabis sativa
aagtagaaaagaaaataagaaatgtaaataaatacttcttgtgtctatggttatgcgatgattgacggtcaaaccttgctcactggaatgaggaaaagtacgttagatcatagagaaatgataagtttagtcgaaaaactataaaaagagggtgaatattcgtatatccttcgatcccccctcagtcccagtgtgggcctatttattatcttaggaaaacggctacctcttgaaacgtggtccatccctagagaaacggtcttcctccacttctcgaaggatgagcgtcatcttttaggttcgttcctggatgagcgtcctcacatccacgcatcacttggagggttgatattctcgctccgctatgctagggaggatcgctatggttgtgggttagttgggaaacttaacgttcttcttcctccacatatcaaccctaatattacactttaagatccagctttattgtgggttggacattcgaatatgggtatggcccaaaaggattagattgggcgtggcccatgtgagccattgggcttatgggttccttgtttctgacttataagtgggctttgtaagtacttcgttcgttgggcttagagtagtttttggccactacaacaattatgattagtgttgatacataaatctagtcaactcgctcgtatttatagatgagatgaaagttagaagtaattaagtaaaatagaaagtacacacaagaatttatagtagtttactcctgtgtcgcgatagtaatggagttacgtctacttcaagtttttattctcatgataatgattacaagaaaaatagctacgtcaccttgtgagacttttttgaatataaaaaatgaaatagaggagctatcattttataaggaaggatatcctattaaaatatatatataaaaaatacatttaggatatttttaaccgttgatgatgatctaactctaaaattgactctgaaagtcagctgtcaatttatgaagcttgagtcgcgcctgcaggacccattttaggtaagttgtagttgaaattcgtaactcccttgaggacaaaatttggacttgataacttcagaattgtgattggagtgtgagacatgactttatagag

SEQ ID NO: 140809 - DNA, 1257 bp, Cannabis sativa
  modified_base (138)..(139): a, c, t, g, unknown or other
  modified_base (253)..(254): a, c, t, g, unknown or other
ataaaagaagacaatataaaaaaggtatagagtctaatttcctctaaaaacatgcattaaacatgctccaacccaccaaataatcacactcataccatatctaccccaaaaatattcattcattatgttatataaccnnttctattttagttataacctgtttaagttatttcgtattatttgtttttattcattatagcattgttttagaactggctctattttaattataactagtttgagttattttgtnntatttgtttttattcattatgttaaagaacctgttatatttcaattataatcgctttgagttattttgtattatttatttttattcattatattatagaatttgttctatttttgtttatatctgagacatctacttctggtgacttttccagtaatttttcagtgaacttttcagcgacattaactttttcggtgacttttcagatgactttttcggcacttacttttccgacgactttttcggcgaaacttattattgctttaaaaatataggatttctatcgttctttacaaaaatatggcataaaaaatcacatataaatgtaaaaaattaaaaaacctcataactttatgtaaattatgtaatttttactcacatataatctatatctataacatatatataaagatgggtgaaggtttttttggtttggtgaagttattttgtcaatttatgaaatttagatgtgagtttttttagtttacttaatttattttgtcattttagtttagtcaatttattttgtaattttgtgaaatttagatgtgagttttcttagtttagtcaatttattttgtcattttgtagctattctattattttgttcattatctcataaataattcattatttttaaatgttttcttttaaaatttattatagtcatttcaatttatttttgatatacctattttttcccaactaatttattgttgttaattttttttttattattttcaatatgcctttgtcctaactaatttatatatagttgtcaattattttattattaattttaatatgccattgtcatttttttttcactcaatattttaaacatttcttattattttcactttttttatttttaatatacctacttttattgttttgattttttttaaattttaatattcctctctcatatttttttttcacatttgctaatactctcgatttattttcaaaaaaaaaaaaatatatttatcatacgtatatta

SEQ ID NO: 140810 - DNA, 664 bp, Cannabis sativa
  modified_base (605)..(636): a, c, t, g, unknown or other
gttgattagcaacgagctgcactacatgtttaaaaatcacgtaatacgcctatgttagttagggtggtacacaacgaaactaacgaagcaaaataagtaaaaaagtttgcatagggttcgattcggaggtgggagggaaagagagggaaagagagggaaagggagagacttacggaggtgggagaggagatttacgccggtggagaagaccttcagaccttcagagcaaaatcgcgagcatatagggttcgaatttggtctgtctaagaaatttgggagtaagtgaaaaatagaagaatttgcgtcgttttaaaaacgccacgcaatctctttaccgtcggtttaaaaatgtcacacaaagtattcgtgagctttgtaaaacgacgctaatattgtatgtattttttttttggcttttaccgtcggttgtgttattagtgagggatatagaaccgacacaaattatttattatttgcgtcattttacaaacgacgaatatatttaatatggtactattcacgtcggtcaacgcgaagaacagtggcgttgaccgacgtgaatagtgaattttgtaatagtgattttgggaacacggtaatgcaannnnnnnnnnnnnnnnnnnnnnnnnnnnnnnntatagcttctatttggcaaatagaagta

SEQ ID NO: 140811 - DNA, 951 bp, Cannabis sativa
  modified_base (576)..(596): a, c, t, g, unknown or other
atgatttactttaatgaaatatgaatttaaaacgatgaatattgtttttgtgttgatttggatgtgttcatgttagtttatgtgttatttgatgattgtatttgatttatgaaattttttatttggattccttatgaaaaattaagtaattttgatttttacaaaactcgattctgatgaaaaatgagaaagttatggtggttttaaaattagatgtccatggagtcgaagcttggtgcacccatgccccaagagcttcgaacaagaagcccgtgcgcgcgcatgcctagacgagtcgtgtctgaagacatggcattgcacctattcaaacacgcacaaggctgttatccggcaatgtggaaccctgcacacgccgtgaaatgccgcacaagataccccacaatctcctcccagcacgcgcgaacaaggctgcttgcagcctatctgggctgcacgtgcagcctgtctcgtggacagccctaaaaatcagttttttatgggatttttccacaaatttcgaatttttgtaattttcaaacccttatttcaaaattaaatattatttttaatatattnnnnnnnnnnnnnnnnnnnnnaattaataatatttaatttttaattgactattattaatttatgatattttgaggtttgaatttaaaaattgattattttatttttaaattatggtcagatttaaaaaatttgttaatttcgttaatatttatatatttttaattataatatcatatattttaatattagtcatattttaaattaaaatgtaactttatccttttaatttgaaatattatattaaaattaacttataagatgaattaaataattaataaattagaaatctagatattttttttataaatattctaaccataatattttctaattcaaaaataagtgattttgtgaaatatttaattgtttataaat

SEQ ID NO: 140812 - DNA, 1131 bp, Cannabis sativa
aaacaactgaaggagtgtcgggcttagatcttgattatactctgctacaaaaaggatccaatggttagagatctgagcggaaagagttgtttaattatgctgcaacctatgtaaggtttatcataccttttatgtgtttaattttatcgttttagaaggtcatatttaggatgttaaaaacatacttcttagtaaatctatgtcctagtaaaatatattctaacaactggcctcagagctatggtaattatttactatcaggaaatatagattaaaacaatgtatatgtgttttggatgtgattcatgttgatctatgtgtttattgatgattgaatgatgtttgcaaattttttacgtaaaataattataatttcgttgtggaattatttttcttgaatagtatggaaaaaattaagcaatttacttttttacagaacttgatttcgattttatttgaattagttatgattttttgaaaaatcaaaaaaattagggaatggtcacctacacacgcgcacggacaccgagtgtcactcggtcagcacgcgtgttcggacaattcttgtccgagaaaacacgctcaaggctgtctgaacaaccccattccgcgcgcgcataccctgttggcagcctccttgtgcggcaaaactcggccagcctccctgttgcatgtgtgtgaatggtatgcaatacataccatccacaccaaatgcaattttttttttttcattttttcattttttcatgcttatggagttaatttcaaattttttgtgttattttgtatctaaatttttatttttcaaatctcaaatctaattattagaatagaattaattaattttattttaattaattaattttagatattagtagattttgaacctgaaaatggataaaatctaattttttgcttagttggtgactttattttttaaaatttgattattttatcttatttttaaatataaggtcagatattttatattttgcattatttaattaattttataaaatgaccttatttgatattaaagttaaaatatttttaattaaaataatctagaaaattttaaaaatctaactagatattttgtcaactttcaaatttttgttattttatttaaat

SEQ ID NO: 140813 - DNA, 786 bp, Cannabis sativa
ttctatgttccagtagttctttattagcaagccatcaagtcgagccaattcatagacttcgactccaactactgctttgataacatatggaccctcttagttcgggttaaacactcttgttgatgcgtctctcgtatttggaaagacttgtcttagcaccaagtctccaacattgaatagtcttttcttgacttttttgttgaagtatcttgtaacttggtgttggtatgcggcgttggtgatttacgactcagttcgtttttttctcaagtagatccaaggagaattttaaaagttcttggttttcttcttgagtataaaactctcttctatgagtcaatatattcacttcaataggcatcatttctttcgagccaaatgcaagcgaggaaggagtgtcccccgtggctatttttctcggtagttctgtgggcccagaccacctgagatagctcgtcaacccatctgcctttggcaacgtctaacttcttcttgatagtatcctttagggttttattaatggcttacacttgttcattttcctgaggcctggatactgacgagaagcttttgataattttattcatctcgcagaattcggtgaacaagtcaccatcaaattgggttccattatcggatactatcttcatgggaattctaaacctacatataatgttcttgaggacagagtcaaggactttcttgcaggttatggagacgagaggctcggcctccgtccatttagtgaagaagtcgactgctaccactgcatacttagctcctcct

SEQ ID NO: 140814 - DNA, 593 bp, Cannabis sativa
gggcattttcaaggtcagtcttgagggtcttctgttgttcctcagcttcctttttaaccctggagaccctaaactgcgagttagtccattgtgaaattaatattgatattttgtgtatgttatatttgatagtatagtaacatacatgtaatattaattaacataaaattatttgaaagataatttaatgggagttatatattaattttgtgtattaatatatatttataaattatcatattaatatatgtactatatgatatgataattgagatgatgataagaaaaatgtgttcattctattattattactatgagactatactgattaaagataattacttggaaatgaaattctattttggtaataatcatctcattttatgagataaaaaaggtgaactatgagagttacactttttgtattttttcttgccatagcaagaacaaagtgatcaaagtggatctaaattgtgaaataagcttataaaattggaagaaaaattataaactcaaagaaagtggatcattgtggattcaaataatgagataaaagattataaaattggagaagtaattttgaatcttaaaaa

SEQ ID NO: 140815 - DNA, 819 bp, Cannabis sativa
  modified_base (495)..(496): a, c, t, g, unknown or other
caaataaaattactatttaaatatatttattaattagaccttccaaggtctcttaattaataaataaaccttgaattctcttttcttctcaattgtgccattccttgataaaacttacaattaagatatagtctttatttagaatcctagttgattaaataaatcaattaattgagactacaaaataatattaccccaattagtgcggggaccagggactatgtaactaagctcccaataagtagttctagaatttaccaggtagattctctatcttattaattcttctcgattccactttagattcagaattgcactcgtgattacatagaactctctattaaccaagaatagatacactataaatttatcattatttcaatctaaataatcaaagatcctctatagatgatttacagacaactttaccgttctaccctttcatgtatttcatccttaaaacacttagcttcttataaatgatatttcagtaanntaatataattactaaaataagagatcttccatttaagtatgctaagccaagctctaagaaaattatcgtttcacttctaaatagttatagaagctataaatttcatatttatgattatcgctctcactcaattgtactactatattcccaaaatgtaagtattgggactatccatttagtttgttttgacgaacaagtcaaagaacacatgcaatacatttaagtcagagctgaatcatctcaggataaagatctttgatctaagatcaactaagtgacaatgacttagaaaagaaattacagtaagtttataatatcttttc

SEQ ID NO: 140816 - DNA, 1566 bp, Cannabis sativa
caagtttgataaagccttcaacacggtccagaaaatcactcattgagtctaccagaccgttcttccttatgtccttccagagctcaccaaggacttcaatgccccccaaaatcgcgggcaacttttcttcttcggttattcgtgaaaccttagtcgcctccaacatgaatctactgatgtaggctcggagagcctcgcatggtctttgctttacttcgaccaggtctcccaggtgcaacggaagttggcgagaggaggaaaattgcgcatggaactccgaggaggaagctttccatgaggtgaaatttccaagtgccagctttaaatagcattgatgggcagcttccgagagagtggtaggaaaaattctgcaacttatgtctcctcgtactccttgcagatccatttacatctcgaaatacttcagatgggaaagaggatcttcttttccagtgtacatcttgcaggttggcattttaaacttgtggggcaactccaggagactgatctcaggggagaaaggggttccacgtgctcggtgcaactcgagatcattgtttctctgactggccattccttagaacatactcttaatttcgtcccactgtgcctgcacaactggactaacctgttcggcattttagctgatctgagtcacattttgggctgcacgatcggtgtgtcaagttgatcatccactctgctcctcctattcagatcgtttatgagatcatgagtagtccccaatctatcaaatacagaaacacctggctgtctcagcgactaattggtttggctaatgtgctgatcggcaccattaacctggttggaatttttgggtatgacttctccagatgaattactagacaaagtctgcccgcctaccagtgggcccacaggtggaacctatgaccggggatttgacggctgaccatttatagtctaagaagtattcatcgctggatcttcgtccgtttcacccaaggggatgacattcgggggttgctgcccgacagattgataggcttttcgtatcagcacagtggcttgccgactatgattgtcaatgactgcatgatgagcccttaacgcttccatctctttgtccctccattcggtaaacatgcacctctactcttaaaacgcgagatttaccgcagcacagagttcctcctgatcatgatgtagggtgttggtatgaccctgcatgagcccaagagcagcacggaggttctagatctcagtgtcatctccaatggtcgtttgaacattggtattgggcggaacggctgtgctatgaatgccctggtcggctgctgaactggtattcccagtctcttgcacaccaggcgcaatctcatccacgggagtcgtcacaccgtgacccgcagtcgatggctgtccgggacttacggctggcagaacccttgtgtttcctggactctatagtgtaggatccaccacctatggatttgctggatcaaccacgcccctacaagtctgtaccaccatcgtacttgtgattaaatttgcaataaagagcgatccttgagttcaactctcaat

SEQ ID NO: 140817 - DNA, 704 bp, Cannabis sativa
  modified_base (56)..(62): a, c, t, g, unknown or other
  modified_base (459)..(464): a, c, t, g, unknown or other
ccataaccctcgttgattagcaacgagctgtacagtatgtttgaaaatcacgtaannnnnnnaagttagttagggtgttacagccttagctctctctttgttgagtaaccttcttttctgttgaactggcttgaagttttcgacgttgatgtttaatgcgtgacttatcacggtggggcttattccttccatgtcttcgtgcgaccatgcgaagacatcttggttttcccttaagaactggatcaaaacggatcttatgtccttaggaagctcttttccgattttgactaatttggatggttgttcggggtctaatgacacttcttctaattctacaattggaccaacccctgtatcaatatccccaaaatggggatcaatgtcttcgaccccgttttgggcgagtcctcattggtgagaactacttgttgtagctttgagggatttggctgctttctnnnnnnttgtgatggataggttgtaacactctcgtgctactatttgattgcccttcaagaatccagttccacccttggtagaaaactggacgaggaggtgaaaggtagaagtgaccgctttcaagtcatacagggttgggcggccaattaaggtgttgtagggagatactacatccaataccacaaataatgccatgatagtgacactcttgggggctgttcccactgtcaatggtaacttaataa

SEQ ID NO: 140818 - DNA, 672 bp, Cannabis sativa
gacgctcttccgatctatataagtcgatggatctcattataatcatgagttattgtgagttgtttattgttgaaaagtcctccccattaggtgggactatatatatagttataacgaaacgtgttaatttatggttcattatggggttcacatcgatcccatgatctctcactccagtagtattacatagtctttgatatgcttacttagaatattatatatgcgtgatgttattattatttgtatatgtgtattgaaggtgaaattaagttcaagttattccgaaaggtatagtaattgatttaattatgaatcatgatgaattaaagctataaagataaatcaatgaatacaaatttactagttactctacattagaatcacattctaatttgagtaatgcttaggtcctcaagaaccaaataaagtaatctccactatattattaatcagaatataatgttacatttaccagcacagtttactactgtgttggtaaaagtaacttttaccagcgcatttcgcaaactgcgttggtaaagaggtcaaagttttaccaacgtacatttgcagtggctaaaatctagtcattcttgccagcgcttttcattttatgctaggaaaagttctaataccaacattgatttgccaaccccttttgccaacacatga

SEQ ID NO: 140819 - DNA, 1032 bp, Cannabis sativa
  modified_base (43)..(54): a, c, t, g, unknown or other
taattattaattgctaaaagaggtcttgttaaatattcaattnnnnnnnnnnnnaaaataattaattataattaattgattctaataaatgaagttttgagtaagaaaaatataactatgatggttacaaaatgtaacaattgagtagtcactcaagatcatctctaatggttacaccaatttggtatagaatctacactaatttagtatagaatcttatttttggtacaacaactccaatgattgacaccaaatattacacaaaatatctcactaaataaatatattttacttaaaagatctcacattttatattatttacattaataacccaaaatagctaatttttgatataattggctattagtaaaaatttaaaatcttaaataacttagtaaaataaaatatttattaaattaattaaatattacacatatttttcttataaaaaaacttaaataaaatcacacttaatctttattaaattattattttacttgatgtttacttttattgtgctgttgtttttagtttcataacttagtgttatgttatttttattttatttgatattagtatttttattactgctttattgtatttttcaattagttagtattttaaatcaattattacttttgtaataaattttaatttgaggactaaaatataagattaatttttaaaataaattaaaataagagctagaatgtaaaaaaatatttaacaccaaattggtgtagactcaaaatccaatattattaatggtgtagaatttggagtacactaatttagtgtataatttagtgtgtcgttaaaataaaatgagatgaaaaagcctaatttgaacaagtatgctcaaagaattcatgcacacacagtctaaattggagagtttttcggcaagcctgaggcaatgatatagacaataaactagaggacaagatattaccgaaggagaagactattgtattgatcttcttgattgatgccaaagttttctcattcccacatcaatgtcttcttctgtga

SEQ ID NO: 140820 - DNA, 555 bp, Cannabis sativa
tcaaaccagccataacagcatcattatcctcaacaggaatatggctataacctttgaaaaaatcagaatcaacattttcttttttctcatcgttaaaaccatcttttggtacgtcaccagcattaccacatctcctttaccattaccatcactaacatcatcacgatcattaatgacaccttcattatcattcttttcaccttgagaaacatcctcatccacaccctcttccttctcttcattctcatcctttccattatcaccctcttcattttgtagaaatcatgtggatgagggtgataatggaaaggatgagaatgaagagaatgaagagggtgtggatgaggatgtttgtcaaggcaaaaagaatgataatgaatgtgtcattaatgatcgtgatgatgttagtgatagtaatggtaaaagagattgtggtaatgctggtgacgtaccaaaagatggttttaacgatgagaaaaaagaaaatgttgattctgatttttcaaaggttatagccagcttcctgttgaggatgatgctgttatggctggtttg

SEQ ID NO: 140821 - DNA, 1360 bp, Cannabis sativa
  modified_base (628)..(645): a, c, t, g, unknown or other
  modified_base (759)..(768): a, c, t, g, unknown or other
tgcttaacttggggtaatttcaggatgggtgacctcctggaaagttttctcaaaaagtgtgtgagtgaacaaaacacgctgaaaatactcgtgctggcttataaggtcagtcatcattccatgacgtagctagagtgacgtactcgtgtataagagtccaatggaagattaaagtgcaaacattacgaatgtatcagagccttgaaccagccgaaagtgtggtcgataaggacgtcaaaccccgtgagggggatgattgtgacaatcagtagtcccgtgatccgtaagggaaaatatcgaataagttatgcaatcccacatcacctagggaaggtcaagtgtgatgattctaagactgtataggtatggaactacacagttaaaaatggcttaaatggattaattggtagtgcctatatcaacaaggtgcatcttattttttggtagcccatcacgaaagaacttcatggttaagtgtgcttgacttgaggtaatttcaggatgggtgacctcttgggaagttttcctaagaagtgtgtaagtgaggacaaagcatgctacaaacactcgtgttagtttgtatggtcagtcatcattccatgaaacagccagagtgacgtactcgtgnnnnnnnnnnnnnnnnnngtgggtgtaagggcccaatgaaagcttaaagtggggacgttacaactcgcactacagaaaaatagctacatttactaacaacttgctagtcaacataaattttttgtgattaannnnnnnnnntagtcacaacaaaaagttacttgtgactaaaatatcgtatttagatacaagttgtcactaatttagttttaatcataatacgtattatgaataaaaacacatttagccgcaataaattgtgatttttgtgactaatacctttagcaacataccttttagtcacagaattatgatttataagtagtcacaaattttgttgtaactaaaagtaagatttttttgtagtgttggtgtattattttaaaaaaatacaaagtctgaattgtcattttctaaattgaaaggtccaattgatgatttttgtaaaacacaagtgttaccaaatgattttttcacctatataacaagtgcaatctcatatataattgacatatggactcatacccatgaagagtaaggatgacgtgtcaaggatataaaccccgataaatgaaatatcttcgcatgatagtagaatgcaagaaggctagtggctgagacaatttctaatcgcacattatgcatcacataacaataatataaaaggaggaactttacttgtatctttagccttagtgttccagttggcccggtgacaagggcgcaagccaag

SEQ ID NO: 140822 - DNA, 562 bp, Cannabis sativa
tttgattagcaaagattgcacaattattgaaaaagcactgtagtgtgccttagcattagggcgttacatgataggctccccgtatcagtacggtggcctatcttgtatggtcattgatggttgtctactgagccttcaatgtttccatctctctatccctccactcaatgaactgatgtctccgctcttcgaacgcaaggttcattgcagcatggagatcctcctgatcatgatgcaaggtgttagtgtgacttgcatgagtccaagggcattacaaaggttctgaatctcagtgtcatcctctaccattgtctgagcattggttgtggatgggattccagtgctaggagtgctttgatcggctgtcgaactggtattcccagtctcttgcacacctggtgtgatctcagccagatgggatgtcacaccttggcccacagtaggtgtctaaatgtttggctgcctaggattggttcttggtgggacccttgtattcccaagagttttcaaggcaggtctgtcagcaatgggtcactctggtcaaccacgcctctgcgagttt

SEQ ID NO: 140823 - DNA, 627 bp, Cannabis sativa
  modified_base (300)..(305): a, c, t, g, unknown or other
  modified_base (483)..(491): a, c, t, g, unknown or other
ttacagaactcaatttcgattttagttgaattagttatgaatttttgaaaatcggaaaatatcagggtcgcatcacgcacccttacgcacgcggatgccctgtttcctcggacgcgtgaggctttggacagctgccccatgcgcgcgtggaatggctgcttgcagcctctagcgccgagaaatctcggccagatgcctcccaatgtgcgtgcggatggtatgcactgcatactgtccataccacatgcaatttttttccaatttttcatttttttcatgtttttcatggaattaacttcnnnnnntttgtgtagttttgtatttagatatttactattcctatttcaaatctaattatcagaattaaattaattagattttttaaaattaatttatgatattagtgtaatttaaacttgaaaataggtaaatatctattttttttttcttaattttttaatcttatttttaaaatttgattannnnnnnnnatttttaaatttaaggtcatatatattttttttaatcattcttttttctaaattattagaccttatttaaatttaaaatacaattactataatcatgatattttgaatagacataagatattttgctaacttttaa

SEQ ID NO: 140824 - DNA, 528 bp, Cannabis sativa
cctaacagccaccaaaacaaaaaaaatcacatacacaaccaaccataaaattcaataaataaggaaggatgttactagggcttaccttagcttcaagaacccttgaatctctactgaatttccagaaaaaaaaaaacaaggaatcagctggtccctccctggtttggtgcagctcgaagggaaagggagaaagagaaagagtttctcttgacttttcttaatttctctgtatttccctaaaataaaattaaggttaaatgaattaaccttgttgaacaatacttgctaggtgtcccataactaggcaaccacctaaccctccaataaacaaaaagacaaaatgccccttagcttacaacttaagcaattttaagactaggggtaaaatggtcaaattccataaccctgcttaaccccgatattttattttctctaaaatattcccactaagaaataaggttctaaacttacccatgtgatcaaaataaccatccatctcatttgtcgttgtcgtcgagcaaaaattac

SEQ ID NO: 140825 - DNA, 1255 bp, Cannabis sativa
tggtaaaatatatccaacagttgtgtctggtgagtgggtaaagccacgagccttttacttgtaattttaatcttcttgtaaaactgtaaaacaagtggtccaagggagatctaattttaacaatttccaccttagatttctcctgggacacttgttcttatagtgcatcattcttcaagggtcttagctcatagtggtaatggtcatccaccattaccaacccctaataagtccatgcagtgcttgaacttggttaggggtagcaccttagtaccgatatcagatgggttctcttcagttgggaccttctctatctgtacagctccttgtgtcactttatctcgtataaagtgatacttaatttccacatgtttggttctgtcatgaaagacaagattcttacataagtggatacaacttttgctatctgagtagacaataggttcttcattaagtagctttagttcatctagtactcctttaagccaaatagcttccttaatagcatcagtaacagctacatactcagattctgttgtagataatgctaccacaggctgcagttgtaccttccaactgatgcaatttccccatagtgtaaagaaataggcagaggtagatttcctactatctctgtctcctgcatagtctgcatcactgtacccagtgatcattctgctcttgtcccttttcttgtagttaatccaacttcaatagatcccactaagtatctgaacaaccatttcattgcttcccagtgttgtttacctgggtttgtcatgtacttactaagtacactaatggcataggctaagtcaggtttagtactgaccattagatacaccacagatcccacagcactagaatagggcacttcactcatagcttccttttctgctactgttttaggacattggtctttgcttaggtagtaatgattagtcataggttgtttagtttcctttgcatttttcatagaaaaattttctatgactttctttatgtagttcttctgatgtagccttagagttccattctccctgtctcttgtgatgttaatccctatgatcttagctgccttgcctaagtccttcatttcaaactcttctcttagcaaacccttcataaggtcaattctagacctttctttgcaaacaatgagcatgtcatctacatacagaagtaagtagatgacttcttcaattttagtgcccttgtagtatagacaggtatcatagtagcttctagtgaaccc

SEQ ID NO: 140826 - DNA, 870 bp, Cannabis sativa
  modified_base (821)..(829): a, c, t, g, unknown or other
tatttcaatgttgaggaaatatgtatcagactcgacccatgtcttgagttacaaagtcctagaactatagctagatttgtcatatgaggaatagccagttcgaatctttgataggaaagaaaatgttcttcgaaacaagaccataggattggtcaaagtactttggaagaatagtaaggtggaggaagccacctaggagctagagtcttgcatgagagctcaatatccagagttgttcaggttagattttgtgggcgaaatccttttaacgggagaataattgtaatgaccgcataattaaaatatggattagtagggtaattaagattaattatctttattttataattatatatgaatatttatgttgtgggtcccatttttcaaaaataggcattagagttataatttttcaattcaagaattttattaaactctaagtgtaattattactacacatgaaatttataatttttatgatttttacttggtaacaatcgaaaatgtgatggatggccattagagtcatatgggtgagttgagaacctatttcttagtgggataaatataagtgatatttgaaatattgaggttaggcgaggttatggttttggaccattttacccctagacgtataggttactttagtgtgaggcaatggcaaaattataatttttccatataggaaggatttgtcttttagtggatttaattagaattttaattcaaattgtttattgtaaaattatcctaggttatattcattagttagttaaattaagaagaaaagttagaaatcaagtctctctctctctctctcnnnnnnnnnctctctctctctctctctatatttggctgaccactccctct

SEQ ID NO: 140827 - DNA, 557 bp, Cannabis sativa
  modified_base (498)..(508): a, c, t, g, unknown or other
ttatggttctaatatgattttatttttcctctatttctatgtattctatttcattcgtacttaattacttttaattgtttgatcaccaattaactgtctatgattttgaagcgatatctgagatagtgagtgtcaattatgctatatgaaatagaattgaattttgatataggacgagagtatctgtatggtttacataacttatagggtttatatgtttaatgcctgttgcatgtttaatttatcacgatagtagaaaatttgcatgtaattgaggtttatatatttgagaagactataaattaccatagtaaacctgctattgcatagaaattggttatagaaagataatcatattaggccataatcagtagatgcaattgaagtcgaaaccctagctttaatcatcgttaatttcttgttgatttatttgcttcttaattttattgtttatttagtgtttctaattttacttttctcttaattttgacataaccnnnnnnnnnnnaagatttaattttaaagtacttaaatacaatccttgtggaatcgacctc

SEQ ID NO: 140828 - DNA, 749 bp, Cannabis sativa
atgttgggttattgcatggttgcatgatggtttcccaagaagcatatattttgagttgaaggtgtgtgtaagtggtatttgtgtaatttttttttatttgagctgtatatttgtttatttggctaactgaaagtatttttgtaagattgttactttttttggttaaaactggaaaaagccctatctaataaattgtttgagaaaaaatgagtagaatgtaattgttttttaaaaaatgagtagaatataattggaggggaatttttgcaacaatttatatagtttgagaaaaaatttcaaccaaaaaaaaaacggaagcaacactccacaagcatcataattcagggaacaaaaatggttgcgaaaactaaaaaatttatagaaagaaataaaagaaacttaaacaatttataaacaaaaaatttcaaaaactggactatacaaatagttcatataaaattaaacaattagaaaaattaaacttaagcacactgatccccaataacgatgctgatatataatatattgataatcacattttaattaatcccaattgattaatgaaaagaaaagaaaaaatcacaaaacaaaacaaaaatcaaaattttaaattaagggtaaataccattttggatattgtgttttgcataagttagcaattggaccctctgttttattaaatgataaaatagactctatattctaaaatagtaaaaataggatcatgagctcgattttcaataatttta

SEQ ID NO: 140829 - DNA, 651 bp, Cannabis sativa
actcttcttttaatttttttttatatatttgagggccccaaaatttaatttgtcttgggcccatgtattttcagggccggccctgattataacactatatatcagtttctttttatattacacattatatatataaaaaaaaaatcaaaaagatgaaaaaaattattaaaatattatttgaaaaataaataatatttctctatatatagagaagtactatttataatataaatttttaaactattttagtttactaaattgaatcctgttttaataataattctttatactttatcttttacactatttttaagacattgttacgagtgctctcatttttattttttttaaaagaaaaataaaaaaattaattaaaaggtagaattattttagaacattttaaaaaaaaatacgttacatttcaatgcttatatataaatggtgcagaaaatttggatccactgtgactatgatgaagatgtggtcccaatcaaattcacatgtgacctatattaatttatttattaatttgccaagtctcaactaccactccaattatagtatgaagtgtgtgaggattttctcttctcctctcttatatttagttatgttgtattattatattatattgaattggattatatatcatat

SEQ ID NO: 140830 - DNA, 869 bp, Cannabis sativa
aacattaagatacgaacacaaaggttttacgtggttttacagttaaaattctgcatagtctacgagtccatcttattagatttctgatacaattctcaagccctttttttacatgattttttcgtccttttttcagtgtaacttgcctctatttataattacatagtaaggcagttaattacatagttgactgatatcttacaataattatctcctgaaatcgtgaggtttgattacataccacgtaaaatagatgtagttaatatttaaaaatcacacaactgtgataggtccgcttttaccgggtcaaagtaaacgtgtattgaatatgttgtaaaccataacgttctgggatatctcggtgggaacacggtaacaataaccttggtagcgagctggaacttttcccatatctttccagagttaatgatgtaagcctcgtcgttcctgcgcttgaagacatagtgctctatctaaaaatagcagttcttggccacaaggtggacttcagcagtcaacatcatttgtatgtcaacttctatctgaaagagctgactcgacggaggtgtgatccccatttaaaggtgtctggagctgattaatgaaggtaccatgagtgtgccttcctatagggagatgggtgcctcgctattagttgtttggatttacccgactattatacttagtttgaataaggtgtattatacactaagtgtcttaccagtcaccatgtctcgtctcctaatgcatagtgagatttatcccttgctttgtacatctgaatttgtatggtttctcgttaatgtacgaatcgacagttggcatatctttatcttgcataagatcttccagtcagcaagttgtaaata

SEQ ID NO: 140831 - DNA, 1187 bp, Cannabis sativa
  modified_base (1035)..(1039): a, c, t, g, unknown or other
taagtccttgtgactcacgggtaccatgtggtgcaggtaaagacaaaaaaaaaaagctagatcaaccatgaggtgacagtcttctcctacaattgacatattgacctcgccgacctgcgtgctgggtttccaggagttgttttttgttgtatctattgtgtattttagttttatgttttagagatatcgtggtacatagttcttttgtaaaactttttataataggaattcttgaaacacgctttttatgtcgttataatgtccgtttttagtgttttactttggtcaagtttttaatattatcacagtttttagtaattagttcatctattagtattaaactagtttataaaatcacccatgtggcatccctatagatttgggtgttataacttggtatcagagcagccatggttttaaagatcctgaagagtggtcgaatatgtacatttgctgctaagaaaggtcgactcatggtatagtaagtatttatattatttgctattagattacctgcataggctattataaattatattggggaaagtagcataatgataattttaataagaatatgtgtatggtatatgcatatttatattgatatccgtctgagttttaaatggttagaagatgtggactaaatgtgtgataaattatgcagtaagggaaattgaatagtctgattagtgagctatctaggctcggggaaaatgataagaaagagaattctttattgccataatgtctggatcatgtaaattctgctatgcatgatatgattaaataatgagggaaaactgatccgagatctaaaagaataataggctcatcttttttatgttcttgtattatcgacactgtttgttgtactactagatgtggtggaatatatgaagccaacttactagtatatcaagaagcgaaaaccaaatgaaccacctgttgggttttgtgccctaaataaaacccattacaatctgatttgttatcaatatagaattttgaagtgatttatgtttacatgtatgttannnnnttatggtttaatatacatatttgatatatgaacaaaagcagttaaatccaaaacatatattcattcacaattacagtattgtcaatgcagtggaatgtgattgtgattatatgattcaaaagacttagtccctattcatcagtgtttt

SEQ ID NO: 140832 - DNA, 911 bp, Cannabis sativa
cggaattcttgttctgggaaaaatgcctagaagccaaccggaattccggttcctacagacctctctgaaccaaaattccggttcagtgtaggaatcactaaaaatttcataacttcactaaatcaaccccaaaccatatcaaaccttccagacctgctaaatagaccccaatgaacatttttaaagcaataaaacaacaacccaagtacagaatccaaatctaccattaaagctccaagttttgagctcaaaactcaaacttggttaaatctaactaacaaacagtaaaacctgcttgaatccacaaaactaaacatatttaagcctaagataacattactaaacattaacaataactacaacaagcaaatcctcaaaacatgcaattttcacttacttacaattcaagtaactcaagaaaacatggtcaaaaacttacataaaacttaagcactccaactccttgatgaatcttgcttgaaatgcagacaaaacccccaaatgctagctattctaagggtggtcaaaagagagagaaaatacaattctcttgaattttctaagtttaacattttgaacaaatgagcaaaataacatattattaacttatttcagctaacataaattaaaataaatcaaataatcacataacactaagtccactaaaggacaaaagcttatggggcaaaatgacctttttgccccttccacactgaaaggattaaaaggcacttaagggtatttttggaaaattctaaaatctcgactaatccagacattttcaatgtctaacaataccgccgtgctacactaaaataccaagatatgattctactgagccatacaccgcgttccaatgttgccgggcactgaacatgcaaaaatattaaatttctatatatgacatataa

SEQ ID NO: 140833 - DNA, 582 bp, Cannabis sativa
tctcgaattctccatggtaagtttcgcaaatcgagtttcttccatctcattttaaagtggcatttcaattattatctcagtttcttgccatggaacgaaataactttgtatgcatctttagatgatttattgtttctcttatgtggttttgcgttaccacatagttttgttatttgcaatccactcacacgacaatggattaagctgtcaaagcttatattgaattcaatagaattagattttctaccatcaagaggaatgggcagattggtttgttacccaaataataacaataataataatagttatgtgaaaaaaaaaatgtataaagcaatagtactattttattattaggcgtcaggttcgttaaattattgtgttgaagtcttttgttttgagactaaaaaatagagtagatcgtatatttttctaaaaaggagaaaattggatgaaaatacggtttcatgtaatgaaatgcaacatttgcttgtgagtaatttgaccactaaatgtgttgagggaattattccgtttgatccattttcccataccaaaaacaatcgttacattaactttcctcct

SEQ ID NO: 140834 - DNA, 693 bp, Cannabis sativa
tttgttataatctggtttcctatggtacaatgtctttaagggtgttttgttgtgcaatacaggtgtagggagtctgtttattagataaacacaagtttggaaagcatcaacccagaatttgagaggcatactagcttgagctagcaaggtaagaccccatctcaactaatggtgacgattgctttctttcagctcttccattttgagctgaagtgtggggacaagagtgctgaaaatggataccattggttcttaccaagatttcaaaagcctgatactctccaccccaatcacacttaatgcttttgattttagtttcaaattggttttcagcaaaagctttgaaatctatgaatgcattaagagcatcagatttttgcttcaatggatacaaccatgtgtacctactaaaatcatcaacaaagtgtatgtagtatttaaaatttgtgtttgaagcaattggggtaggtccccacagatatgtatgaattaattcaagcaccttagaagctctaaaagaagacaatttaaagggtaaggcatgtgatttgccaaattgacaagcttcacaaaaactttctatttcatctttagaaatttttacattgttagagtcacaaacaagcttaagaactctattggatggatggcctagtctcctatgtcaaacatccttcttagaaaactgaaaaa

SEQ ID NO: 140835 - DNA, 579 bp, Cannabis sativa
tctcctctttcaaaagatctttcgttgaaaagttgatttccatgaatttcccatgtaggtggcactttggccgcctcgtggttgtgttctgagtgaatgttactggttcttgccttaatagacactaccgtgctcctttatccctccatctctttagcattggatgtgtttcgaatcctcttgctccttttttttcaaagtgtatctacattttattttattttttaaaaaaaccaacaaagtataaggtttaaaccagattcaaacttatgaagaataggaagatgttgttaaacaatcattccacttaaatttaatctagtcatttattgtttaagattttattaaacgtataactaagcccatcttaaaattaaattctagaataacactaatataattttacattgtatatatttttatttataataaattataataaaatagacaataaatattaattatttaataataaaaatatttagtatatttattttttttaaaaaaatgttttaactatttaactaattttatgaaatcgtttattttttatttttctaataaacatgtaatattgta

SEQ ID NO: 140836 - DNA, 509 bp, Cannabis sativa
tttattatttttagttaattataagtttgtagaaaggtttaaaatttaacattcaagcttaaaaaaaaaataaaataagaaggtttcggcattaagtgattatcataattgtttttagatcttaagtttccaatttttggagatgcatcgaaatgattgtatatgtgagatcaagtgtattggatttcttttatatataaacataaagtatatattggaattatttaaagaaaatgataaaaattaagatttacaatattttttttaatcttttccggaaagaaataaaatttagaaaaatgactacttatattataaaaaaaaattaacatattaaattaaaatttgatatgattttattatttaattattatcaaacaagaatgttaatttttcataatataaattagaaaaatctatgtatatttataattctgttgttggaataggtgacgtggcgctctagcttttcaagaaactaattttttttttattatattaaaatttat

SEQ ID NO: 140837 - DNA, 657 bp, Cannabis sativa
  modified_base (285)..(296): a, c, t, g, unknown or other
  modified_base (433)..(447): a, c, t, g, unknown or other
aaagttgtcgaagtgccttcatacgactgttggtttgcttgacgttgctcaaacccagacattcgaatctttgagtaagtttctgatctcctttatgcttttctttacacgtttacactttggatgcaactatgctgtagaaaaaaaaatgcttaggaaactttagggtttagaaacttctgcaactcttctttatcatgtcttcatgcgggtttacagccatagagcttgtctgtgaaccgcattgcgtctgtcttaattcttgcttattctaagcttcatgannnnnnnnnnnntaactcaagaaaactttctgacttcttgagttttgacttttctttagacatagctgttatttaatctgttgagtactcctggtcggcatatttgcttgtttatcgttcgatattccgtccaacactcatcttgtgtnnnnnnnnnnnnnnntgaactcaggtgagtcttgggaacccaggcatcaaatcgactaggatctgcttcaacttttgcacgaggatcatcctcgtctttgttctagtcctccttctagcgaaggacacgcttctgactttatacccaaccataggatgatggctcatacaaagaaaacaacgcgcctggtcgacgcttctgatcctcaagtggctcggcttgcca

SEQ ID NO: 140838 - DNA, 789 bp, Cannabis sativa
  modified_base (153)..(154): a, c, t, g, unknown or other
  modified_base (236)..(247): a, c, t, g, unknown or other
tatcgtggtacatatagagctttctatataattaagagtgatattcaattctaaatctattgtggcataaggtagtgttaataagttaggaaatttacttggtaaactctggatctacttattgaaagctccgttatataggcccatggtccnntcactagttgagataatactgttgcaggctcagtcaattgattttaattaaccaattacattctaaaattagactatgtctnnnnnnnnnnnnttcactaagcaaggacttaattgtgaagaaaagaagttttagcgttaattaattaattaagagactttgtatggtctaattcataaataatataaatgataattttatttgataattaattataattaataaataaatagttttggcatttataggattgaattgaaaaaatatggtattattgaaagaagaataactggttaaaaaaatggtaaaattgtaactagagaatggtccactctatggttggccttagtgtgttatttttgatcaatattttattcttttttcagtccatataattcagccataagccctaattgaaacaatataaaaagaacatgatgctctcatctcatccaactctttcaacctgccaaaatctagcttctaactctatctgacaactagcagatgagagacacctgcaatagtgattccaagcctccttcattgttcttcattctcgacccttagtgataatgttccatgctcagacatagcaagtcatgtacccaatcatagtgagtaagacggtggta

SEQ ID NO: 140839 - DNA, 590 bp, Cannabis sativa
attaatattatgtgtatgttatgtatgagatgatagtaacatacataatatactaattagcataaaatttaggagataattttatgcatgagagttgtgtatattatttgtatataataatatatgtataactaatcatatttagtatatatgataataataatagtgattatgatgaaaaagatgccttcatcatttttttgagaatgaagagttaattctggaattaattttctattagtagtttttatctcattttatgagatgaggacgtaaattgtgagagttactcttttttgggattatcttgccaaagaataaatagatcaaagtggatctaaacttgtaaaatgagtcataattggaagagcaattttagactcaaatcaaagtggattcaaaaattgtgaaaatataacaaaattggagaagcaattttgaatcttaaataaccaaagtggtgaataaaaatgatgagaattttgttaactttggtgtaatatttgggttaatctcaatgaggagataaccttaaaattatgggtaaaaataatcacattattttttaagtggtgatgtgtgagtttgat

SEQ ID NO: 140840 - DNA, 506 bp, Cannabis sativa
tttgaaaaatgtaacattttttaatttgctcacttgtatgggattagaccaattttttactttttttattgtatttttatgcgatatttttgttatatttttcttcaaatactatatttgattgtttctattaaacaattctgaaactcatgaatcttgatttttcatcaaaaaacttgtttctttattagaaaattaattttttcatcaagaaactatgttgagtagtgggttgatggtcgagtcttggagcttctgagaagtttgtaattaggtttagttttagtattgtgttggatttgttcaatattctatacagtaaactagaatacaaagcatgtgaaatttatatgagtttgttatttataaactggtttcttaatgattatatggaagtaacttgtgacagtcagtagtcttatgatccgtaaagggaaataccaggtaagctgtgcaatcccacatcgcctcaggaaggtcatgtatgatgattctgagactgtgta

SEQ ID NO: 140841 - DNA, 578 bp, Cannabis sativa
agagtaagcaaagtttctcgaatgtgaaaagaaaaggtattgctttcaatgcttctgaaaatattgttttcgatgatgaaaatgatgatgaaatggtcttgttggctaaaaattttcaaagatacatgaaatctgttggaaatagaaacaacttttcaaagaactgaaatggtaacatttcaggtagcaatccctctaaacctttttcatctagcattaaaaaaggtattcaatgcaaagagtgtgaaggttttagtcatacccaatccgaatgtgccaatactttaaagaaaaataaaaagggattaaatgttacttggagttatgattctaaaaatagtgaacatgaaaaagaaaaggctgctctaacaagtgttttgtcaagaaatttgcaggaaaaaggaaaaaccatttccatgaataatatcttgatcaatcacaacaaggaagaagctagatttgaatcagatgagttagaaattgatgagaactctatggctgaatcttacaaggtaatgtctggtaagtggttggaaatatgtgctgaaaattgttcactggttaaagataataaagtc

SEQ ID NO: 140842 - DNA, 500 bp, Cannabis sativa
taagtttatactctcttgtgtgcaatctttcttctttcttttgatgccacttgctgaaatccaatcacacttaaataatacaacacgatttgctgaacaataatctaattctataatatctgttaatatcccataaaatgtaacatctccaaaaataggatttggatccctactacttgaaaaactttgagttttggccatcataataaccccactattttgagttgttaacttctttttgactttctttgtatgaaacttaaaaccatttattaaatattttttatatcgaaagaaagtattgttcggtcctttagccaaataacgcaaatcttcagaaactcgattatcaccattatcatataattcttctacctaatttgacaaaaaataaataaaaatataataaatgactacattcaatgtgcttgtgaactcattaagttaatgcaaaattatgaatttaaaataaacttaccttttcagcaaaccaggaagga

SEQ ID NO: 140843 - DNA, 1366 bp, Cannabis sativa
attcaaacaataatctccaccacaacaccctaaattacaaatttcatgcacttatttaacttaagcttcaaagaatcaaaaggtttgaagctaggaaatactaccttgaatcaaagctcttccaacactgctagaaaccccagaattcagcaagtaaaaatccaaccctaggttgggttcttgatgcttcgaacaagagaaagagagagtgaactaagtgaattttctaagttatcctcctatatcacccatccaacactaaccccttttctataataaacttaatacagatagtaaaatatgataaattaaatcatataagacaaggtaggtgtttctagggtaatgactaagttgccctcaacaaagacaacaacttacccacaaagaaaagggtaacttggtaatttctatattccgacatttctgaagcctaactatgacaccccgcaaaaatattctaaaacatacaaaatgagactctctagaggctcaaccttgctttccaacgctttcgaacacaatcacataatacaaggaatttacatatagcataataaacatatactaacttaaataaattttcacaatatgcattttataaataataattaaatctcatgcataaaccctaattatttaataatccaaagtgttaatcttaggcggtctttacaattatccccccgtaaaaaggatttcgtcctcgaaatctaacctgaataactttggatattgagttctcatgtcagactccaattcccaagtggcttcttccactttatgattcctccagagcactttaaacaatgctatgattttgcttcgaaggaccttttccttcctatccagaatttgcactggccattcgtcataagacaggcccagttgtaactccaatgcctcaaaactcagaatatgcattggatcagacacgtacttcctcagcatcgaaacgtgaaatacattatgtacagctgacaatgatggaggtaaagctaactggtgagcaacttgtccaaccttctcaagtatttcaaaaggtcctataaatctaggacttagtttgcctttctttccaaagtgcctgatctctttcattggtgaaacacgcaggaaaacatgatcacctggctgaaatgtaatatcccgacgcttgtgatctgcataactcttctgcctgctctgcgaagcaagcattcgtgttttgatcttatctattgcctcatttgtcctttggactaactcagggcctagatatttccattctcctgtttcatcccaatgaaccggggatcgacattttctaccatagagcagctcataaggagccattcctatggtactctggtagctattattatag

SEQ ID NO: 140844 - DNA, 544 bp, Cannabis sativa
aaaatcaccaagaaagtggtttcttgatgaaaaatcacaagaaaaatcaccaaaaaactggtttctttattcttcatcaagaaactggtttcctcttggtgatttttccaggtttttaccggtgacaataccaattctgatgacttttctgaagtttgctgtcggtgccgaaaaaatcgctggagtagctgctagcgtcagaattgacattttcaacagaaaaatcacgaagaaagtggtttcttcatcaagaaaccagtttcttcttcgaaaccgatttcttggtgattttcttagtgattttttcggcgacaatgccaattccgacgaattttccagcgctggtagcaactctgacgactttttcgataccgaccgctactccagcgacttttccgtcgtcgaccactactttggcgatttttccaacaccgacaataactctcgtaacttttccgacattagtgacaaataaaacttcctaaacaaataaaaacattaaatataggatttgaaaacttaattacatatatatatatgacat

SEQ ID NO: 140845 - DNA, 670 bp, Cannabis sativa
  modified_base (608)..(610): a, c, t, g, unknown or other
actattaaccaagcaagcacccacatttattttctttcttttcttctttcatatatcccaaagacaatagtaagagattgcatatttttccaatgtgcgtacctcatatttttttcatatttattttttttttcaaggagacattatcgcatattttttttttcttcctctattttttcactagaggcacaacacacaatactttcttttttttcaatcccttactaatacactttatttccccacttacaacaatttatccccctaaacttgcttaaaggctcatggcataataaggtatgtttagagtgaaaagagttaaggataatgagtttagcttagttaagtggtgagaaatttttttagaataggttaaggctcaactttgggtatattatggtaaaatgttcgggtaggctcaaaaggctcaatcgctccaaagaaaacttgcctaaatcattttccaaacaaaaatcatcaaggatttcgcttcaagaaagtatatcaaacaaattctattccatgtacagtcaatcattccacaaaccaaatagaacagacgtgatatgcatcaaaaactaatgttttatatctacatgaacaacctnnnaacacacatccaccttaattcaaacagttgcaaatcaagcacacagttatgttttaatcc

SEQ ID NO: 140846 - DNA, 1160 bp, Cannabis sativa
  modified_base (263)..(264): a, c, t, g, unknown or other
  modified_base (352)..(358): a, c, t, g, unknown or other
gatcttatattaaatattaaactttataactttataaaatcattttcaagtactgggatcccatttttaaacttttatacaaaatattcaaaatgcaatattcaggtcgcacaagaactataaaataacaaccccggatgtcccaagatcgaacactccaggtcgcgctgccatgacatttacaacctcatcccagctcagactcactcctgttcagcttttccctttcttttacctaaacatggaagcagaactgtgagtcnncagactcaataagaaaagcatataacatatcatataataccgacttgtaactaggcgcccatacacctatttacaaggcttaacagannnnnnngaacgttccatactagggtacaacctctataccacatacactacgtacctcactatatgggtgttggtagggtttgtttcgtaccctaagtaccactgagtgatataccacacaaaccctgtacttttccatacttatgctggtatcaccgtaatgtactccttaacaatatacactataccaatgtactctgtaccataaccgtataagtgttggtagtgtaattaacatataagcatgcatatacacttaacatatacatacactcgcatattcatattacacattatacacagttcttacattctttctaaattcaagtgagttggccgacctgaacggaaagtctcatgttgcatggatgccttaatcacatattaaaactgggtaaataacatgtctaaaaccctgatttgcgaaactcgaatttataactcaaggctctgttataatcactagggactacactatcttaggaaacagggaaacgcccaactaaggcactaaaatggacccgaattgagaaataggttgttcggagaacttgccaaaaccagttaactgcttttaccaacggtttataccagtcttccccaaaaaaacctccaatttgctcaaaacttgtccaattgcgaccaaactttccatcccaacccataaatctcaaaaaaaaaaaaaaaaacacactgaatcaaaacatgccattaaagatcaaagctcgggtttcaaagctcaaacttatgaaatctcaacacaatacactcaaatcagcaaccaacacctagaatcaacttaaattgaa

SEQ ID NO: 140847 - DNA, 2060 bp, Cannabis sativa
  modified_base (32)..(33): a, c, t, g, unknown or other
  modified_base (1997)..(2011): a, c, t, g, unknown or other
gtaaatttgattatattgaaataggttttatnnagggcacaaaacccaacaagtaaaccgtactcgcaaccattaattaaaaattccataactttaatatattgttaactgttttatccatagctaatttgtcttagttctctgtacaactataatccacaatctcatatatgaataagaaattttctgatatttaatataaatcattcaataataaatgttcataattttacagtcacacatatatcaaaatgtttaactctttatttaataattagaaatatctcttcaggctttttagggcataaaccctaacatgttgtgccataaaaaatatgggtcgtgtcatgctgtgcaataattttataaggtaggtccgacacaacctgtaagtccgctaatttcgtgctatgctcggatttgtgttgtgctttattcgggtcgtcccatgtttcttaaatagactaacctgttttctatacaggctaacctatttttttttaaatggaccaacctgatttcttatatggactcaaattcgtgtttcatatttttgtattttgtttacaattgaagagctaaatactaaaatatatatgtattttatagttttaattacttttatatttttttcaataatagttaaatacaatcatgtaaaaaataattataatttaaatattactatcattttaagtgataaataaatatttattattgttattaatatcaaattattgaactttttaatgtgtcatgttttcaaactaatctatttgtgcttatattttgtgattttaagcttgtcatgttatgtctaagtacatattttttttgtattaagtcatgcttgtgccttttggacacatcaaaaagtccggtcatatgtacataactagtaaccagacatgagaaactagagagattaaacatcgtggcgacgtgataatatgttggtcctaaatggttcctcttgctccattcatgtaaggttgggcctttacatatttgcggcattgggggcacccacaatattcgaacctatgatttaggttcacatatagccatttgtgtgatagcacttcaaaatgtcgcaaataggggtgttcatccaatctatttcgtactattttgtttaaagtgcatccgattcgcactaagtgtggatttcatattttgaatccaacccaatccgcataatagcttaaatccaatccaatccaatccacaaaagtgcggatcagatcaattattttaaattagttactttttaatattaaattatttaatatttatgaaaaaaaaaatatttttttcacatacctaacaacaacataaaacaaattattgttattttatgtctgcaacaacaaattaaaataaatcaaataacaaatttaaaggaagaaaaaaattatatgtacaaagatatatttaattttgtttgaattgtatgtagaaaaaaattatttataagaatgaaatataaatttaatctattattaaaccatctattttatgaacaccctagccgcgaagttagggcaatagatacttgagcagtctacatgcaatttaaaaattaatgcatattttgaacatagaaacaatccaatccgtaggaaatatagcttcaattttatttagaagcccttcatataatttgtttgcatttaattcataaaccatcattgaattatcatacttataacgaacatttactattaaaaaaagaaaactcaatctttgaataaatctaatctcattttactcatatacagctagtttgtctaacaacgaaaattctatagtgtgttccttttgtttagctttttgtgatttaagtattcgctattctaataaatactggcgtagtttttgtttagtgttccatattatatttgaacactgttttaagtgctgttaaaattcttcaaagaagagtttttatttttattttctttgggctcgtttggaacgccgtattaagtcgtatnnnnnnnnnnnnnnntatattgaattggattatatatcatatttttatataatactatgttaaa

SEQ ID NO: 140848 - DNA, 855 bp, Cannabis sativa
  modified_base (696)..(700): a, c, t, g, unknown or other
gggcactctgggtaagtgtatcaggtttcggtgccactctggcgattgcttcaaccctggttcccccgaaacctcttaatctgacccgagccgttggttgcagtggatgcctttcttttctgttccatggccgaaccactacctcccctgctaaaacctaatgcagggggggtaggtgccccgccaacagctggagtcccaccatattctatcatgcatcccactacgccctcagctcgcagtgccttatccaccatttcagcataggtggttctgtcgtcagtagtaatcatcaaatcatgtcgaatcttcgcatttaacccatcgaggtatttttccattttactaaaatcagttggcacaattttcgaggccaacctcgccaagcgatcaaactgagtcgtatactcagtaatactcatgttttccttctgggtcaagtgggtgaattcttttctcttggcacttctaactgcctcattataatacttggcattaaacagttcctggaacttctcccaggtcattgtagtaacgtcatgtatcatggacaccatgtcccaccaaactaaagcatcttcttgaaattgaaaagtggcacagaccactctatcatttccagtgacgcccatgaaattcaatatcctggtgatcacagttagccattgcttggctttcataacatctggacctccnnnnnaaactggaggtgcctgcttgcggaacctttcgtacaggggttccattcgattcgttgcaaccactggttccgcttgcacagcaggggcaggtgccactggtatttctagaacaagcactgtaggagcaccctgctgtcttaactgtcgaatcact

SEQ ID NO: 140849 - DNA, 547 bp, Cannabis sativa
aataaaaacatcaataattggagtgggaacctctatttttctttcattttattgattaataaattttatgagtttctagattagcatctttttaatcatcgccggagtagctatcggtgtcggaaaagtcgtcaaagctgctgttggcaccgaaaaaatcgtcagaattagtattgtcgccagaaaactcatcgaaaaaatcaccaagacttagtgattttttcggtgattttttctttgtgatttttctagtgattttttcagcgacaatgccgatttcgacaacttttttggcgctgacagcaatttcgataacttttccgataccgacagctgctctgacgatttttttggtgccgacagtaaacttcaataacttttccggcaccaatacaaaatagaactacctaaacaaataaaaatattaaatataggccttgaaaacctaatttatatttatatgacatatcaaatatcataaaaatacctaaaaatagaaaaatgttatataaattggtcaaacttaaaagtgtcatatttaagtaaa

SEQ ID NO: 140850 - DNA, 560 bp, Cannabis sativa
tatataatgataattttgtctttaaaatttatcttacaaaataactatcatataatatagtttaactcaaaaggactatttagtcaatttaagcattccaattacgttttctaacaaagtaaacaagataaatcacaactattccatttccaaaaaaaatttagtaaacaacatattacaaatattgatttggattatttttcatttattgtattacatttctccattaatttatttcgattttacatactgtatatgaaacgtgccattagggtttatgggaatgggaatgggccaaggaatgggaataggtatgggaatgggtcgggaaatgggaatgggaatgggaatgggaattgaaatgggctagggaatggtaatgggaatgcaaaagcgaatgggaattggccagggaatgggaatgggaatgggcccggaaatgggaatgggaataggaatacaaatgcaaatgggaatgggccagggaacaacaattggatgaggaatggacggggaatgaaaattggaataggaatgggaatggggatgggaatgggaat

SEQ ID NO: 140851 - DNA, 578 bp, Cannabis sativa
ataaaaatatttaaaattaatacaaaactaaataaataaaataccatcatttaagagtgaggactttatgttttcaaaaaaataaaaattgggaaccaatttattaaaaactataatttgaggatcaacttgccaaaatttatataatttagggattaatttatcaaaaaaatagcttttgcaaaatacaagacttaaaatggtatttaccttatcttaaaaaaatttgaaagtgatttatttttaaaagtttatcattttaaaaattaaagtatcaaacatttttattgttaaaatattttcacttttctaattaacaaacaaaatatttaaagtatgaatttatctcctaaaaaatataaataaaaattatataatcataacttaaactgctttattttttaataagttataataacaactgtgcgagacacggttacattaattataaaataaaaactgattttagaaaaactcagacacattaattttgtttaaatttcgaaagttataacccattttacaatcaaacccctaaataaagtgggttaaactttaaattaagttgaaaattgtaa

SEQ ID NO: 140852 - DNA, 500 bp, Cannabis sativa
gaggctatttcgaccaagaaacagtctctgacattcttaaaggaggccacccttctggaactggttcggatagatgggtttggacgctagaaagtaccgggcgtttcttgtctaaatctgcgtatctggctcaggccttggaaagagctcctctctgtgaggttgctccgaaactctgaaataatttatggaatagcaaaattttggaacgtcacaaagttctgtggtggtgtatcctttctaatgccctcccggttagagcggtgattggaaaaaagattccatatagaggacactagctgccccttatgtggattgggggaggaatcttttgaacatcttttcctgtcctgtgatgtggcgtttcatttttggcgctcctctccctggggcatctttctagtgtgtgacattggcatccgagtttgggattgggtcaagtttatctgggatctaaacaacagaggggttcgagttgatgatgtgtttttatatgcctc

SEQ ID NO: 140853 - DNA, 1766 bp, Cannabis sativa
agtctaagaagaatttattgtttccagattaagataaaatatcacaacaagatgtccctaagtaccaatagtaagaggttaaatgcacacttgtgtatgtattaaaggagactcctactgttagtgggagccatcaaagatgtaatccaaaaaggaacatagggagacaatcaagaaaaacttttggaaagtgacctttatgtcagataataagggtatatttagaatcatcaaaatttaatatcagagatggtaattactcttggggtggaggaattattttagaagggtacaaaactcatctataataatttagttccaccagtgaagctaaatcacttaatttcttttaaaggcactaaaaagttcttgactgttatatctctattttattttggatagaattaaagttgtgtcttctgtacatttagaagaatttgttaagcagtgaagaattcagcatccctagaagagtaatacatatagaaaaatgatgttccataatattttataagcacaaaaagaagtaataatagagaaagctattgcttgctacaaccttatagttcctattatttgggtatagtcaaatacactacctttgatatggattgttgaccgaggttttcggcaactaattaaatgatataataaagagagctttggaataattaatgcaggtggttttaacgtggttcgcgcattaataagttgtagtccatgagtctttgttattaaggagaattcttatacagagaatgttcttggtgaattctctctctcttctttattcttttcgatcgattgatcccctccccttttttattttgttcagggatatttatagagttttacaaggatcactaaaaagagatcacttgtctttgagtgccagccatctgggcacacaagttcctaagagatataaaataagacatacatgacctatgtcgtaggtatcatagggattaggtgagagtaatctttatcttccattgattgatgtgattcttcataatggagtcgtcactagaatctttaattatcgtgtaatcactgtaaatgaggcttacgccatctgtcatatccttttatgaatgttctaatacgttttccctcatgccgcattaaatgtgaaatgactgtttgaacaggttctccttctctcagagatgctttgttgtatctctagctcccggagagtagagacatggtttatgctcctctccgggggctcactccctgaagtgtacttgcttgtctatatataacttagttaattttgtgggtgaggtgtccttgaaatccatgtgccacatgcaaccgttgccacgtattttgggaaaaatccaaggcaacatggatattaagacaatggattgattaaaatgcacttctagttttatgttagtgcaagtgagagtttgttgggattttacgccctaaataaaacccatttcaatataatcttatttgcaatcaataaaagattagaaatcatttaagttttcatattattttcatgattatggtttgatatacaatttcaaataaattcagaacatattgtcattcaaaattacagtgatgtcatcaaagtggaaagtaattgtgatttaatgcttcaaagtttagtcccatgatttatcagtgcactgaatttacactcacgtgataattaacaataaagtttacttacacttagataagtggtatgtcctttccagggcattggtaaagtgtgctagtattggatgtatggagta

SEQ ID NO: 140854 - DNA, 1148 bp, Cannabis sativa
tttagtagcttattttaatagtatgatttaagaatagcatgttaggaagcatgttagtagcgtgatagtagaatagatggttgtttttaatttccaaataagccgcaattagaaagttttacttgatcacgatctgaccagactagctcttggttacgcatgctgttctaatagtatggacgcaaggcgaaacactagaagccaaggcaacccagttggctccagtggtggtcagggagttcagattctcctaaatattcgtggctgaggtagaggtcctagaggcagggcacgcgggcggggtgatgctaacacgccacaggctgcccaagattgggaaaataggtttgtagaaatgcaagccaggattaatgaacaagatgaagagatccgacgtttgagacagcatggtgctcctacaatccctgcttcagaaataccagtagctcctgccctactgtgtaggtaggacctgtagctgcagtgaagcgaacggaacccctgtatgaaaggttccataagcaggcacctccaactttctttggaggtctcgatgttatgaaagtcgagcagtggctaacagtcattaccagaattctgaactttatgaatgtcaccggcaatgatagagtggcctgtgccacattccaattccaggaagacactttggtatggtgggacttggtgtccctgactcatgatgttactacaatgacctgggaaaaattccaagaactgttcaatgcaaagtattacaacaaggcagtcagaagcgcaaaaagaaaagaattcactcagctgactcaaaatgaaaacatgagtgttactgaatacacaactcagtttgaccacttggaaagattggcctcgggaatcatgccaaccaatttgagcaagaaagagaaatacctagacgggttgaatgcgaagataagacacgacttaatgatcactactgataacaataccacctatgctgatatggtgggtaaggcactgcgagctgagggcgcagtggagtgcaccttagagtctcgagggactccagttgttggtggggctcctactcctcctacataaagctttagtaggggaggtagtgttgggttttataccctaaataaaactctatttcaatgtaatccaga

SEQ ID NO: 140855 - DNA, 637 bp, Cannabis sativa
  modified_base (60)..(79): a, c, t, g, unknown or other
gtacaatacaagtcacaacttcatgtatgaataaggaattttttttgatatttatatatnnnnnnnnnnnnnnnnnnnnttaataatttaacattcaagcatacatgaaaatgtcactacttcaaaaagtacatttcttgtcagtttttaactgacattaaaagttttgtcgtgagtttccccaactgatgtgtatactgtaaatgcaaaaaatgtctgtatttgcgtcgtttaccaatcgacattccaaattatttctgtcgattttcaacactcacaaataattataaaaaataatttttacgcttatctcgtctgtttataacagacacactaaatagacacacacaaaaaaaaaaacttagatcaatctgagcccatacaaaccaaatttaagcacaataaaaaataaaaataaacacaaatcaaaacccagacctaaaatattacacaacatataaaaattatcagatgtatattgtgtaatgcacaaatcaaatgtttgtagagaagctgccagcaaccatcgttgcttagaccgcgagccaccaaccacttgcaaaaattgagaggcactaagagagtgctagcaacggagataaggggagagagagagagagagaagatcggaagagcg

SEQ ID NO: 140856 - DNA, 1104 bp, Cannabis sativa
accatcgtgtgatgccacatcagagtgcaaaaattgggataacatacttaaaaaataaaaattatgtagatattttatataaaaaaaattaattttataatgtatatataatcataaaaatacatctatatataaaatatatatatttaaatttcacgataaatcttttgttttaaaaataattaatgatattgttcaaaaaaaattgattaatgatatatatatatgtttctaataatttgtccattttattataaccacactctcctaactacaaattatatgaatgcatactatcattatttttttaaaatatatgtttggacataaaacataaaatgtattagtaaagtaattaattctctaatcaaacttaaattttgttaaaatattttccaatatattctacatatataaagatcaatataaaatacgtataacaataaagtttattattttattgtacatataaaatatgtatgtatataatcacatctaaagagcacactaatgtagccgcaatagctaaaaaaattattaaatattaaaatctcaaattctattttaaaaattaaaaaataaaatacattacctaattaaaaaaattgaacatacatgtattgcagtttacatcatttaattaaacctaattaaaaaaaataaaaataaaaactaattgtacgtgcattgcacgtaacttcaacctagtttatatatagaataattctacagtagccacatctgttttgttcatatagtataaggacagttttttgaccactgacatatatgacttctgattgtgcatattattagatatatagttgtgcgtacctaattaaaaggatcgattttttttttttctaaaaacaaaagaaaaaaaagttagacagtccaatgctctctcacttcagaacgttgttttatttctctttctttctctctttaaaactcatcattctctctcttctgattgcacagccttttcctaatagctgtactttgagaaaaaaaggaccattgttataaaatcaaaatcagaataatatttttgtgaaaatatagatctattccatttttatcctttagattagatctattcca

SEQ ID NO: 140857 - DNA, 628 bp, Cannabis sativa
caacatcatttgaatgtcagcttcaatctgagagagttgactcgacggagcagtaaatctcattgaaagatgtctaaagctgattagtgaaggtaccaagagtatgtcttcctataacaagatggaggccttgctattcgtcgttcaagttcactcaattgttatgcttagtttgtataatatacattatacgctaagtgttctaacagttaacatgtctcccttatttttcttcataagtagcaaggttggtaccttgctttgtattaatgatatcgtccttgcgaccatatcttcatatacgaaatggttttctcgtcaatgcgtgaatcaatagtttgcacagctgtgtctcgcccaagactttacagtcaacgagttatagatatactgtactagttctacagttaatgagttattccattttaatatcacttaatataattactattatattttttgatacatattcttccaagttgacacgtgtccttctctaaattgccagccgaattttgggtataacaattatttattcattaattggtcattgtggctatccaacttacataaatttaatttacaaacttgaattacacaaatttagcttctagatgtcaagtggcta

SEQ ID NO: 140858 - DNA, 718 bp, Cannabis sativa
ttagatctcaacagataagtatttttaaatgcaacatctagttgtacatccaaagatgacaacttagagtagtgtttacaatatgaaacaataaaaaaattataaaatacaaataatttttactctcgcctaaatggcacgtcgttggattcttatttttaatcgaaattatcctttagtttttcttcttagctttctcatagagaaattgcttataaaatatatcattggatagaaggattataaatcatatgcttatgatatcattctattttcttttatgaaattgaatgacatagatgactatgttcccgacattccatcccaaaatgatataaatcatcgatcttagaaaatctcctacttgtatatgcttacttaagaaaatttagacttagaactaaattagtagtggtggtccaagctagaataattactcagaaatatttggtataaatttaagtctatgacattaaattggacaatacagtatgactttcacaagttgttaatctccattttctgtccatggattcgaactgtatgttaatgtatggaatatgagttttgtattctgtgaccaggatccacttggattattctaagaactctttattgtaactagacctaaatcatcaaaataccacaaccacataaattatctatggcatttacatcttgttcatagtgattttgacaagatcattctctgcaaaga

SEQ ID NO: 140859 - DNA, 659 bp, Cannabis sativa
aatgcacatgtattatttgtataaacttttgagtttatttacaaaatagaaaaatcttattttaattatttaccatcattatggattttgtgataatgatgagtatgatgtaaaatagtagaagtgacatatttagtagataaaatgatgttaatttgaaacaaaataaaaatatacagatttgcatgaggatagtaaacatcatatattccctatatatgttatatgtatgtatgcatttgaagcacacataatctatttatttaaaagaattcactgttttgttattaatttaaggtgtgtaaaagggtacttagagtgcattgagtatgagagaataccttccaagattcttacgtaccaagctgcaaaggactcactgtacaagggctaccaatcagtggtacaatcttcaagccaagaggaaactctggtacatgacttcacaacacaacaacactactatctcccaaataatttctcatcatctctttctgatctacatattcatgatttgacagaataaagaaggaagaaagtgatataaaattactatattaattaatgagtttaattaaattcttttatttcgggaaatttcatttttaatgcttaaaaaaacactctctaataaaatttagactcctaattaatttata

SEQ ID NO: 140860 - DNA, 506 bp, Cannabis sativa
ttaaaagtgcctaaagtaacaaacaaaacaaatataacaatacagaacaaacaaaataacataaataatataaaatttatccatcaattcgaccgcagtacatgtattcgcagattctactttactacgaatgaatatttaagatatccaaactccactaagcatgcattgatatttaattataataacaaaaagttagtaaatgtatatacctatagcacaataaaatccgattaataccaaaaatatgtcgaacctcaaaaattagttcacaacctacaatataatgcaatatacaaccaaattagaattttaattatttaattacttactagttattaaaaaatgtaacaagttactagttactaaattctataattaattttttaagaaaataacatatacatatataatcaattatatattacactaacataaggttaaaaactttatttctaaactaattaaatccctactacctcattctcattcacaacaaatatata

SEQ ID NO: 140861 - DNA, 699 bp, Cannabis sativa
aactcttattaacaacaatcagagcttaatacatcaataagaaaagagggaaaatcctcaatccaagccaattcaccatccaccctaagtgcatgcacagctaattcatgaccagcgttgttggctgtacgtcgaacatgaattagggatgcctcaggaaaactggaaagcaaactagcaatatcatccaataaggaaccaagttcattacaaagggaaaaacgctttggcagagccaaaaccaaggctaagcaatctgactccaccacatgaagaggaagaccaagagtgagatgactgtaaaattccttacaaaaatcaacaaacagagaataagttcaaaaaaataaattacaaggagagaaaataaatggtcaatcctaataaatgaaaacaacaacaaaagaagcaaaattacaaatctggtaaacaaaaaccatacaccggagggaaaagtctccctctggtccaaccataatcccaacacaactactccacgccctcctatctaatgaatatcataatcttttaaagtcataaactataccaaataaggatctacatagacatcccagcatattcccagtaatatctcgaactattgccccaattcctatagtattagaattaacatccagcgacgcatcaacatttagtttatacgctcccaaaggcggcttaacccatcgttctggagat

SEQ ID NO: 140862 - DNA, 878 bp, Cannabis sativa
cgatgtgcagccacttccctaaatcatctagcttttgctgatgacgtattactgttttgcaatggggatctcaagagtgtttattatttgctacaaggcctcaagttattccatgaaacatctggattgaatctaaatgcgaaaaaatcggctatgtacacttgtaatatgtctgaagatcaagttaggagaattaaggcaatatctggtttccaggaccaatccttacccttcacttatttgggagtccccattggtgcaaagagaatatctaggaaagattgcgagaacctagctgagaaaatgacagcaagaatcaaagtgtggagttctagaaatatctcctttccagggagagtggttctcatcaattctgtcttaatggccattcactcttattggtgtcaggtaatgattttacctaagaaagtggtgtccaatattgaagctatatgcagaaactttctatggaatgccaaagctgtgtaccatgggccgggtgcaattgcttgggattttatctgccaaccaaaagcatttgggggaattggtttcaaggatgtaggctcttggaataaagctgcaatggggaattacatttgggctattgctaacaaagaagatagtttgtggatgaggtggattaatagtgtctatcttcatgatggtgattggtgcgcctatgaaacatcaagccaaaccagctggtattggagatgtttagtgaggctcaaggatcaatttaaaatgagtaaccagtccatgataattcagcagtataccatctcggcagggtacaagctgctggtgcaaaatccaccaaaacttcagtggacaaggcaggtttggagccattttaatgctccaaaacactgctt

SEQ ID NO: 140863 - DNA, 1197 bp, Cannabis sativa
gtctcggtctcggtctgggtacacgaccgtgtctgggctcgagttccggtctcggtttgggtttggggctatgtctgagttcatttctaggaatgggtcttggtcctcgtcacggtcctagtcttgttcgaggatcctggtcttgcggttctttttcaggttcaggtttcgggtctcaggtttaaatgagggtccgggttttggtcctggtctgggttcgggtcctggactgagtcccagatcgggatccctgtcacttgtcccggtctggttccggttcaggtcatgggacccttttctgagtttggcttcaggaccgagactgggctacggttctaggtcccgaccccaattctgtgtcccgagtcaggttccatgtttgggtcttaattcgggttgaggttcggcatcgagtcgaggtatgggttgggatccgggttcgggcctaggtctgggttggagtccgggtcctggtccagttacggttttaggtctaggtctatgtttggttacggttcgaggaccaagtccaggtccaagtacttgtttcggtcttgttcccggctctcgatctacttgtggtttcagttctaattttgggtcacagggtacgggttcgggtccatggttgtgtctaggactgggtttgggtccgagtctgagtttggttcctgctctgggttcgggtccggggttgggtcctagatccaaacaccgactacgggttcggtccaagccccgtgtccagatctagatcccgatcttggttctttatctggttccatttcgggtgccgggtcacgagctgggtcctatgttcaagtccgggtctggggtcggctcttgggtctcggtcctagttccgttgcctaggtctctatcccgattctgggtccacgtctcggttctgatcgtggtttgggtcccaatctaggtttgggtctgggtactaattatggtttgggttttggtctcgttatgtgtatttttttgggtttaggttcgggtttgggtgctggtccgtgtcctggtcctagtcctagttcggttcaaattccaattgtgattccaagttcaagtttgggttcgagttcgggttagggttcgagttctggtcggggttcgagtccaggtccgagttggggttcgggttcggatctcggtctaggtcctgatcgggctccgggtgtgggttag

SEQ ID NO: 140864 - DNA, 767 bp, Cannabis sativa
gagtagcattacccgacacacaatttagaatttgctactttgtgtttgccttgaaaatttggcgacattatttgtctcaagtacttctttactcaaaaatgcttgaatatgagacacagatggtggttagaattagtcaagggtttgactgtgagattttgtatcaccttaggaaagccaatgtagtgttgggtgctttgagcataaaaggtctcgggtaggtttttagtaccataataatctctccttagttagcttttgatatggttagggatggtatagaatttgtagttggaaaacttcataacctaacgcttcagtctgatttttagaaagaatcagagaggtacaattggaagatcttgagttagttaagattcaagaggaggtattagcggtggctaaggacttctcaatctcaaacaatggaatgttactctataaggcttgagtttgtattctgggcagtaatgagctcaggaaggaaatgctggatgaggctcatactagacctttttcattgcacccaggtaccaccaaaatgtaccaagatctgaaaccctattattggtggtgtagaatgaagagagatgtagtggaatatgtatctaagtgtttaatatctcagcaaattaaggcagaatatcataaactggtaaggatactgcaaccattaacacttcccgagtggaagtgggagaatgttacaatggactttgtgattgatttgcctagaaccacatgaatgtatgatttagtatgggtca

SEQ ID NO: 140865 - DNA, 1115 bp, Cannabis sativa
aaaattctgttaagatgatccttggttaaatgttggttgttaattgcttccgaacatatgaaccgatgtttagggatgttcattttatgccaaacttaggagcatagttaattttccttggagagataagagagatataaaaaaaccttagctttaaattaaaattcccattcctaccacctctcatcaaagcatgtttgtcaattgaatctcttaaacaggagttgagaggcctaaggcaaaatttaaaacgagctttttaaaaaaaaaaaattaagatagtatttaaaaataatttttctcgccacataagttaatttagagtaatacttgattataatagcatctttattgaagtgctatatattttagcacttttgtaaatgaaaaaaattgtcaattttttctaactatgttatcaattgtataaatttaaaaagacatgtaataattaataaatataattttttatttaagttataatattgttattatttattataaggttgtcattaactttttaagttataatattctcgttaggtttttttttaaatatttaatttatttattattatcgtgatagttttttaagagtttgcacttaaaaatactactacacattatgtatattagagtattttttaaaaaaaaaaatgtactaaatataatatttactccatatttaatatatatacaatataatatttttttaggtaattcatttttatttttattttaaaaaaaatttaacacctctatagagcaaaaaataaaacatataaatattatattatatagataaaagatattttaaaatattatataaaatgaaccctaataacctttagaaatttaaatcaatcactaattacatacacaattatatatatggttatttattaaaatatatgattatgtaaaggaactaaaaaaaaaaaaaaacccaagacctcatatatatataaaatgaaccctaataacctttagaaatttaaatcaatcactagaagcgtcgtttgtaagatttaaacccaagacctcatatatatatatatatacatatagaataattatatggtacatacccttattttgttctcatagtatatgaa

SEQ ID NO: 140866 - DNA, 560 bp, Cannabis sativa
atatatatatatgtagcgttttttcttttaaaatgcctataatgtcgctatataaaaaaaaatgtttctttcttggatgtagatataaggcttgaagaataatgaagccgataaggagaaaaaataatgtctcaagagaaatcagtatttcttgtacaaagaaaattcagaaacaaagcaagagtgacccaaaatttacagatgatgagactagtcttccaataaattcaacaaagactattgattggcttcccaatgatttaattgtggatatactagctcatgttgctaccatatcaatttctgattttttcaatgctaaattaaggtaattattacatgtttattttattcccttaattaataaacacgtatccctttcccataatatttgaaccttatattttgtaaatatatatattttaatataagcaatataagacttggagtttatcaactttttcttaaaaaaattttatattcaaaaatatttaatttgatcaaaattgagcctaagtaactatttttaatcttctataaaacacaaggtccaaatatta

SEQ ID NO: 140867 - DNA, 645 bp, Cannabis sativa
atcacttagcctttgcacattttcattttcgttatcaccaatgatccattcatcatcagatggcaactcatcaagcaacaaagcatcatcttcatttgaaagtggagatgccaacctcaaatatctgtctttcaatcttttgttgaacattgtatataccaaagaatgcattctttgggtagtcaatcaatttcatttttttgtatgaacttgattgaaagtgctccaatttcgctcacatcctgatgctgagcaagtaagacccaatactttgatggcaaatttttgtaactttagcgtgccatctccatattgagtccaccaatccactaaaattggacatcaaaagaataaatattttagattaacatgctaagaaattttccaaaagcattagtaaaagatttagacatttaattacctggtaatcttttttcaaatatctgcttagcttgggtaaatccaaagaagccttccttgttgtgaaaaatgctacattgaaggtcaagtttttctctttctttggtatctgggatacgtgttaggctaaaattagtctaagattcgggtcatatttcggttagttttcactctttgtttctagttttagggctatattacgcttgatttttttgtttcaggtcc

SEQ ID NO: 140868 - DNA, 534 bp, Cannabis sativa
tgtttatggatgaagcttttttttaatcattaatggagtttttttggtgaaaaatagttttcgatttgtgatttattattttacaagaagtaaatttataaattttcattttagttggtgtttcatgtactgatgcaacgtcttgctattgtaattattggagaagatagtatgttcttggtgcgaagtggctgatttgtatttttgattacggtaagtaatatttttttatatacggtatatatttcttacgtgtcacgttatataattctatttaattgatggaagttatttatgttattaaaatatatattacgtatatatataaaaatttccccttattttatcccatgtcataaaactgatgatgcttctaatgttgcagatttgttttttagggagattgtgagattacatggtatgcctagaaccattgtatctgatagggatgctaagttcttaagttactttgggaaaatattatggggaaaacttgggacaaaacatttgttttctactacttgtcatcctcaa

SEQ ID NO: 140869 - DNA, 624 bp, Cannabis sativa
atataaaataatgtaagaaaaaaaaattttaaaaatattaaaaataattttttaaatattatttaagcttatattttttttaataatggagtgtatttatcatgtatgtaaatagaacttcctttataaatttataatataaactaactagataattttttacaagtaatttatggtattaatacctaagtttaatttttagtataaataaatatttaagtttaattttgacggtaataatacataagttatattaatttctaaacgctgttaagtgttaagtaaattgccacgtagcaatctctaattagtctacgtcattaattatttatttttttaaaaaaaaagtttaaatatactaataaaaaaaagagtaattgacggctaaatcctcccaactcacatttcacttgcattcaacccttaaaactcaaattttggtaagaaaacctaccaaactcatgttctgtttacatttttaagtttgattttgtgattagaggtgtagtggtggtggcaatagtggtgggtggtggcaagaatggtggtattgtggtggtggtgggtatatagtggtctaatagtgtcaacagaatacgaagagagaagagagagagagagaga

SEQ ID NO: 140870 - DNA, 1179 bp, Cannabis sativa
atcctttataaggaaacactgaggaagatggggctcaaaaagccaaattgaggccttgtatggtaaatctttgcggcttcactagtgacagcatttccattctgggcataatcgagcacccattaaccttgggcaaggcacccctatttgtcacggttatgcaagacttcctagttgttaacctgccatcagcttacaacatattgttgggtcgtccagcattgatcgaactaggggcagttagttcgatcaagcacctatccttgaagttccaaacaccagaaggtgtgggagtggtacggggtgaccagatgctggctcgcgattgctatcgcatagagttgcagcataagaaagacggtcatcagttaatggcgatcttggcagaagaaagtgaaaagaaggacaaggatcttgacctttgggttcaagatgaaagaaacttattaaaacaaattgaagaattggaagaagttattctcgacccaagaaatcccacaaagtgtcttacattgggaagaacctagaagagtagctaaaatagcagctaataagtttcttaaaggcgaaccaggatcaattcgcctagagccatggagatatgataaggatcgaccctaacattatctaccatcatttaaatcttgatccaaactacccagcgaagaggcagaaaaggagacctttgggttccgagagacaaggggcgctaaaacaggaagtggacaagttattagtcaataactttatacgcgaggtgttttatccctcgtggatagccaatcctgaataaggcgtgctcaaaagattatttccactacccaggatcgaccagttgatagatacaactgctgggcacgggcttatgtcatttatggatgcttattctggatataaccagataaaaatgcatgtcccaaattaggaacatacgagcttcgtaaccaacataggactctactgctacaaagtcatgtcgtctgggctgaagaatgttggggcaacatatcagcgatttatggttgcacttaaaagattcatttcgaagtcaattgataaatgtttgttgttcttcagtgtattgcgaggcaacaagaaattcgagttgacaaaagagtgcgaagaggccttttagaatataaaaaggcatctagtgacgcctccaattttggcaaaacc

SEQ ID NO: 140871 - DNA, 571 bp, Cannabis sativa
gaatgataaagtgacttcctctttgagaaagaagaattacatgacagagggtggaatgaagtatagatgtgttgagtgcggtaagaaaatcatctttaattttataattgctattagattttaattttttttagaaaaaaaaaattaaatcacttgaactaattttggacttgcacacttattcaacacttaaagtattgataataagattgagtgtagaatattaaataagttattcttactgttttttattaattaaggttatgtcatatgtgtataatatttttaaattataagtggttttattataaatattttaataatttaagtccaaaaaaattcatttttaaaagattattatttagtaacaaactgtaaaaaattaattaatgattattagtaatttaattttaaatatataattttaattaagattttataaggaaataaattttcaggttaccatcaggttacaagttattcatttaagggatattggcggctaaaccacctgaactttacgttttgtaacacttaaccacaaaaactgaatttttggcggctaaactac

SEQ ID NO: 140872 - DNA, 523 bp, Cannabis sativa
atggtagagtttgatattgcagtttgcttagcgcttctccaaacaactgctccacgccaagagtaaaaaccatcccagatgtagactttttatgatcaagacaagcctgaaaatctgagtcggtatagcctaccggatttaaagcaccacccttatagactaacacataatgcctagtacttttcaaatatttcagaatatgcttaactacagtccaatgttcctctcctgggtttgtctgatacatgctcacgattactactgcatagcatatgtcaggtctagtcaataacattgcatacattagactcccaagttttgaagcataaggaacccttctcatgtcctctacctcttgaggatcagtgggatactgttccttagatagaaggatacaaaatcgatatggcatttgtgcctctttggcattagtcattgagaatctatccaaaaccttatcaatgtaagttgtttgacagagagcaagggatctgttcttctggtttttgatgatctgaatacc

SEQ ID NO: 140873 - DNA, 571 bp, Cannabis sativa
gggcaaaaatcataattaaccttaatataatagacttaaacttaaaggtttgtagagacaataatttttatatatatatttatatcaatgttagtgttttttttatatattgaattaagaaataactcgagcgtggttatatttactaatttttttatttaaaaatataaaaataaaataaaaatcatcatataactttttatttgataaataaaagaataaagatatatcttcaaatattatattgaaaaacaaaattgtagaacccttacacaaaattgagtcctaaaaaaagtaatcaaaaaatctatagaaaaatgatcataaatataatctcaaataattgtatcattgtcttgtagtcgtcgggactacgttaattcaacaccgttgtcatcaccgtatctcacttatagttatatttaaaatcattattatcatcatcgtatatcactacactatttataaataaggttacatgggtcatatttgaattttattttttgacacaatactaaacgaattgtgttcagtatatacttgtaatacatgtgttgacacggacattgtt

SEQ ID NO: 140874 - DNA, 684 bp, Cannabis sativa
ttttttaaaatctcaattttttttcctttttcccaaaattttttactctatttttcgtttttaaaatattttttatatttttttttatcattttgttctcctgtttgttttttcaattttattacttcttttttgtattcttctttttatttatttattagtaaatatacaacagtgtagaagagtatgcgaacatacaaatgatattaatcattttttatgctgttatttttattttttttcatagatttttgttaattattattttatttttcttctaaactttgcttattactatataataatagaacaaatcatatacacttacatttagacaggacgattaatgatctaattagtttcaaaaagaacctacaccacactatgttgtttaaacataactttatttttaacaattgtttaaatgtaattaatcaaagtaagatatatataattatatcatacagatttaaatggggttacgtgcctatggcacgttctcgatgcctagtatatatataaaaaacaaaacttcattcgctttgtttaaaatatatagagatatattaagctttaagttaacagtagagaagaacgaaggaaggatggaacgaaccctcgttctccttccttcgataaaactttcttctcttatatctattttctttgattttcaatctaaaa

SEQ ID NO: 140875 - DNA, 727 bp, Cannabis sativa
tttaaaaaaaaattggtagcagatctgatccaatgggtccgatggatggtccgatggatggctcgatgggtggtccaatgggtggtccgatggtgtaaatgggggtgatgtaaatgggggtattttaggaatatcttgaaaattgtcatatccaacaaatattagttattatttgtttagaattttttttttaaacaaatgtaaggataaaaaatcaaatttccctttgcgattttatgcgacattgtacgatgttttgtgcgatgtcatgagaaatctgaggttagggatgacatgctaaatttttggcgacattgtacgattgttgtgcgatagtgatgtttggcgatttgtgtgcgacatttgtgcatcgttatgccattttgttatgtatgttttattgtgcgaccttatgcgatatttttcctttgttgtgcgattattgtgcgacatgatacttgtttatattattgttgtataaggcgatattgtgcgacattcgtagtagcttgtgcgatttagtgtgtgatatagtatgctaattttttctgtttatttgtttgtatttctttgggacagattcaactatatttgtgcctgtactgtatgatggcgtttcgactgtaaagggtttcaactgggtatttgattcctcaaaaagtaagacattgatgttggacattgactttacactaaaaaaggtgcgtgaagttttgcatgaggagtt

SEQ ID NO: 140876 - DNA, 678 bp, Cannabis sativa
  modified_base (407)..(408): a, c, t, g, unknown or other
cagcaccatcctgatcatttttttagcaggatcatgagaaagtttttcatgggcagcaacctttgatttcttcttaggaggagctcgctcacgtttcgacaactgaggagcaaaatcggaatcaccgttctcaacaacaggacatttgcccttattcctattagctacagttttcaaccccattttagaacttttctttggtacatgggaaggagtggatggagaacgagtaatagccatattttataaatggattaagagaaaaataaaaagaggaaaaacggctatgtgaatcggttaatgtgagttaaaaaaatagaagaacaaaaagaagatggaaaacgggttgggatcgtggagggagaagacttcagctatggaggctttgatttttttttttaaaaaannaaaaaaaactgaaaagaaatagaaaataataagaaaacaaagagaaaaatggagggaatgatgtaatgtatgattgatatagacatcaatcaaatgacgtgtacgactgcatgtagtgtgtgcatgtggtaaaaatataataaaataaagttgatgagtatgaatgttgctttaaccgtgtgtaggtatatatgtaataaagtgcgtattttgtatttttggtgtaaatttttttttttaacaaatataattattaataataatatgaaa

SEQ ID NO: 140877 - DNA, 1643 bp, Cannabis sativa
  modified_base (62)..(68): a, c, t, g, unknown or other
taaatcacgtgaaccatgcaacattaaagcgatttttaatcttatattaattagtaaatctnnnnnnnttgaaataagttttatttagggtacaaaacccaacagatattgtgtcaacagaataataaggtggcattgaaaatatggtctgagtttgtgtcctattgtgataagtgctagtgcagtttctcaagttggatgtatcttgtttctgcatctagaagagtctttgaaatatagtagatgggtcgttgccttccttcatcttctctgattagaacaacgctgactgttgtttcagagactactatgtaaagtgcttttccatccttaggttttgctaagagtggaggtgaggcaagatattctttaagttgtctaagtgcatattcacattcctttgtccactcaaagtccttcatttttctcagtgttgagaaaaactagtgacaactttcaaaagattttgaaataaaacggttgagtgctgctatcctcctagtaatgagttgaacgtccttgattgattttggtgattaaatgttttgtatggagcgtatttgatctgggtttgctttgactcctcgctttgtcaccaaataccctagaaattcacctgaggaaacaccaaaagaacacttggcagggttgagtttcatactatattttaagtacctagaatgactgttcgagatgattaaggtggtctgttgctgttagtgatatgacgagcatgtcatcaatatatacttccattgacttccctagcatgtcagcaaacatctaatttaccaatctctgatatgttgcaccgacgttctttagtccaaatgacatgaccttgaacaaaaggtccctcattctatgatgaatgatgtcttctcttgatcatctgggtgcacaaggatctggttgtacccagaaaatgcatccatgaagctaagaagctcgtgcccatctgtagcatcaacaagcatgccgatgtgagggaacgagaatgaatcttggggcacgccttgttgaggtttatgaaatcgatacaaatcctccactttccattcttttttcggacgacaactatgttggccacccattcttcatagttgacctgtctgactgatccaatgtcgatgagcttttgaatttcttcattgatcactttattacgttcgaatgcaaacttgtttcttttctgctttactggaaggaaattggggtctacctgcaacttatgcataacaatgttaggatttatacctatcatatctttgtgagaccaagcaaaactgtcatgatgcctaatgagaaattcgatcaactttgctcgaagttccggtgtgagcttggctccaatttgtactttgtgctatgggaattccttgctaatgctcactttgtctagttcctccatcttaagcacatctggatcaatcattgcatttgactgctgtagttgctataaggttgattatttttcttttagggtgctctgataacactctcgcactgctctttgtgcccttgttgtatgctttattccccatggtgtaggaaatttgataaattggtggtatgtggatgggacaactttcatcttatagatccatgtgttgggttttgtgccctaaataaaaccctttaca

SEQ ID NO: 140878 - DNA, 741 bp, Cannabis sativa
aattgggggttagttgcaaaaactccctactttagggggttttgccgcaaataacccttttgaaaaacttttgagtgttaattttttattttatgtccaatttctttagatttttgattctatgtttgttggttttgtacatagttttcttttatgtccttattttttatggtgtattcttagttgttaatttaaattagtgtttgtgtttatttgagattttgttttatttttgaatggctaatacatttgtgtgtttgctaatatgtttgtaatgcatttcttttaatggagaccaagagattaggacacagattttttttttagtcatgtcactactggacatagtctttttttattgcttttggttgtaaggttcatatgaagcatttcttgtttcagctttgtatttgtacggaacaagaagggaaaaacaaacataaaaataggaggccttaaaccaaaatgcattactgcaggaaaactgaggtgaaccaataattgcatttcattaatgttttaattttaccattccctcatttgtgtcaactaaaaatttgatggagttttgtcaactgcaggcgctaaattgcgcctgcgaaagtgctaatccttgtagtgcgaatcagctgagctctgcctcagtatcgacgacagctcgaaatctggtcttaccaaagacgacgccatgaaaaagattaaggctgaaggaattgttgtgtcgaaagttataaagctttt

SEQ ID NO: 140879 - DNA, 821 bp, Cannabis sativa
aatacagaataagcccataccacatacaaggccaagcgagcaaccatgtcccaatgggcttatcaagccgagcaagtcgaacgtagggacgaatctgtctgggcaagtacaagtcaatccaagatacatcagctacctgggcatcgcgggtccgattctcgtcgcttttaccggcggtagaaatgtggctgacgaaaccgagtctgacttcagagacagagacccattcccggccatggctttgattaggaacagtaaagaggcgagggatagggctacggttagaggtgactatatagttatgagaatgagagacagaaaagagagtgagtgaggaagagggtttgaggaacctcctagtggtactacgtgagatgcgagggagccacaacgcaatagccatgattgggagagctgaaatgcatattcatgtgaggtgcttcaatggagtctggagtagtattgcagaaaccttttgatagaaaatgcacctcagttacccatctaaaaagactgagaaatttgaatttatttgcattaggactcaccattgatcggtttggtcggtttttttctatataaaaatctaaatttcggttttcgatctggattggtgaaattcgaaaaccgaccgaccattccagaacttatattaaaactgacagttttgaacctcgtttagtcagtttaaactccctaaaccgaactttttctttaaacaagtatatgatctaatttattctataaacacattattctacattttataatttcaaacatacaaattaattattcaaaaactaattctcttattcttttaa

SEQ ID NO: 140880 - DNA, 526 bp, Cannabis sativa
  modified_base (255)..(255): a, c, t, g, unknown or other
tataatatataactagtagtaaattcttattttaaataaaatctaactaaataacataagtgtatttagaaaagccaatagtagatgtacaaagcaaaaatccaattgtatttttttagatttaatgagattttttatttattttattgtataaaaataaaaagtgacccatgaatttcttataaactattttatttttattaataaaccattttctttttaatataaacaaaaagtcacccatgaatttctcanaaactaagaattctgttatatagatgtgctatataacagaatttttagagaatttttagtttatgagaaattattgggtgattttttttaaataaaaaaaaaataaattataagaaattatataacagaaactgagaaattaaataataaattatgagaaattatataacagaaactggacatttatatgctagacgaccaaatttgcaggttatttttacttttacatgtattttcgaaatgatcgattatcattcaatccaattggatg

SEQ ID NO: 140881 - DNA, 542 bp, Cannabis sativa
caacacaaaaattttgggaacccagctgctgatccggttaacctattttacaaggcctgtaaaaccggttaactggttttacaccaggtaacccaaacaattcaaaaccccatccaaattgaatccaaacctcaccaaaccttccaggcttgcttaaaataccccaataaacataacccaagcaacagaacaccataacacgctcaaaataaaaattcaccattaaagagccaagcttgagttctaaaactcaaagcttgctcaaaccttacaacagccatcaaaactagcttaattcaacaaaatacaccataaataaactccaaaaaacaatatcatacaccaacagcaactacaaaaccctatcacaagaaaacatgcttgaactcagttaaaagcttaaaatgaacataaaggagagtctaaggaagttataccttggattggatcactagaaccttgctagaaacctctgaattaagcagaaaaaagcactaaccttagctgggttctatggtattcgaaagagagagagagagaga

SEQ ID NO: 140882 - DNA, 879 bp, Cannabis sativa
aataataataataaaaacaaatatgcggtggtttccatgtgggttgctatgtggattttggttacgatttaggttgttccgttagttactataggggtttctgtgtggagtttcgtaaaaatgtaaaaaaaattcttttaaagtgtaaaaataaaaaaactcttaataaataattaagaaaaaataaactatctattttataattaataattaaaaaacatctaatcatacataataaagcaaagtcaaattatctatttataatgtttaaatttatgataattaattaataattcaaaaaataaaatttataaatatctattctctccttaattatcttatttttctaatttttttgttatactttaaattctctctttagttctctcgtttttctatttttttttattatgctttatttaattagagatcactaatcaattaaaaataaaaaaaaataactatatatttgtatataataactaataaagagggtcgtctcaaatattttggaggccctgttctaattttaaaaagtaggcccctaacaataaaaaattataaattgtaaatattatcacattacgatagtataattacataattaacacctaaaaactcaaacaattttattaatattgctattaattccaatacaacttcaagccaatatcaacattctatttaaaaagggccatccttcgaacgctttttgaagcaaattgatcaaccaactttttcgtattctatcttctccaaaacctcattttcaattgctatcgatgctaatccattaagcctttcttgtaacatggtagaccgcaagtaggacttcaacaactttaactttgaaaaacttctttctgcagaagcaactgt

SEQ ID NO: 140883 - DNA, 603 bp, Cannabis sativa
caagagggacacacatggagaccacgggggaagaggccgcaattgtcaaaggatgattgtacttggaagtgttcgcatgtgaattttatttgatccatatggaagccccgagacaattgggtggaatgtgttggcttgttaaagcgccagaggacgtaagtcagataaaggcatcaacaaggatgcccaattgtagaatgaaggcatcgaagaagccagtagggctgagaagatggagcacaagcattgatatggcgctagagtttgagtagaagccatagggctgtgctagggagacttagtagtcatgtgagcttgcgaaggtcaagaagggtgctagagtttgaatgattgcgagagggttgtcattagaacttagtacatcgtggaagccagaagggcgttatacaagtgtgaatcagttggatgattgagcgaacattgcatgaaatcgacaggggtgctatatgagatagttgaatcgagagtcacatcctgcgggatgcacttatagatggcatggtgtgcataaagagttgggcagtcaggcattcgcgtgtgggcatgttgtcgaggacaccaacagatgaagtgggggagaga

SEQ ID NO: 140884 - DNA, 1100 bp, Cannabis sativa
  modified_base (90)..(123): a, c, t, g, unknown or other
  modified_base (178)..(181): a, c, t, g, unknown or other
  modified_base (310)..(314): a, c, t, g, unknown or other
  modified_base (863)..(871): a, c, t, g, unknown or other
tgaacggaaggagtcattatatagttcgctgcaatcaatgtaaggttctcttaaacccttatgtggttatttcattgttttagagaattnnnnnnnnnnnnnnnnnnnnnnnnnnnnnnnnnntaaatctagatcctggtaacatatgcccaacagaactatgtagaaccaacaatgnnnntcgaatgtctcttgattaaagctccttatttaaaatgtattttttatttaatcacttattttagtctatattttttaataataaaaattacttaatttaagtttatccaaaattaattaaaaattaatnnnnnactttaatttaattttcgaaaatcctttgtaaaatatacaagatttcgaaaattattaaaaaatataataaaataaatacttgaaaaaaatatctaatttaagttgttctaaaataacaaaaaaattcaacttaaattatttttcaaaaatttcattagataacaaattaagtatgttgaactaatcatcttaatttgaaaaatattccattttaagttgatccaaaattaacaaattttcaacttaaaaaatatttaaagaatatctaaataactaattttctagaaaaatctacttaattattaattttaaaatattcaaatttaagttagtccaaaattagttacaataactaattttcaacttaaatatatttttatgaaacattaaataattaagtgtcttgaagaatctaattagttataacttttttatttaattaaatacagaaaaatacatataatttatcttgaaaattttcattaaactaagtgtgtttttcttaaataatttcaaaataatctaatgaaaaattaatttcatatatnnnnnnnnnaattatgttgctaattaattttataagattaaactgtttaattaacctattacagttatttaaataaggcaaatggctcttcataattgacgttgttcatgtgaggaaggactgagttcagtatgtcgtacccactacttaggcctcctaactctcacacaaggcccaaaagagaagaatttaactttaaatgaacaactattattaattgaatagacccaaatactaa

SEQ ID NO: 140885 - DNA, 864 bp, Cannabis sativa
  modified_base (809)..(830): a, c, t, g, unknown or other
tttttcttttatcttcttcttcttgttgttgatgcccagaaaccaccccaagaagccaaactaaaacccaacaccaactctgatccttggcaagctcgaaacccaggtgctccgtccacccttttagtccatcttctccattcacgacacaagctaacaaaagttaaaaaaattctacaaaccaatcttagtagcagatttggtagctaacaaaaatcacaataccataaagtttatggtgtcgctgaaactgttagctaagaaaaaataatcatcacccatcattgagagaaggaggcccaaaaagaccatacaaaccctacacaacaccaaactctaatataaaaggtaagatatcaattaaccctaattttttcttcaatatacggcaacctcacttctctctctctctctctctctctctcaagaaattcaaaatttctcaaaaatacttcttctcttctaatagttgcaccaaaaactaggactagggttctatgggttttctattttcttcttcctcttggtgctgaaaacaaggctaaggttctaatgggtttcaaattctcttcttcttcttctctttgtcacagttatgattacagttcttagattctaggttttcttcttcttctaacctaaaataaaatccaaaaaaaacaaccagtatagagatcaaatcaataaaaacacaaaactcatcaatgggcgaaggagacaagacgtccacagtattgactttgtcttgagtgaattgattaacgatgaaactatagtcgacgttcaagctgttggaaatattttaccannnnnnnnnnnnnnnnnnnnnnatgttgaattaacatcctaaatacaaattctcta

SEQ ID NO: 140886 - DNA, 832 bp, Cannabis sativa
  modified_base (562)..(568): a, c, t, g, unknown or other
attgatggaagattttctctattgtaaagatttgtacaaacctattaaaggtaatgagaagtcgtctaagttagatgatgaggaatgggaagttcaacataaaaaagccattgcttatattagatgatggatggttataaatcttcatgagcatatctctaagatttgatgtcgtttggaaaaaggtagaaaatctctttgcgaagagaacgactagcaataagatttctctactttgaagacttgtaaatttgaagtacaaggatggtggtagtatggttgagcatacaagtaaattcagagtcttgcaaacaagttagttgccatgaagatgaatatggatgatgagatgcaagcatcattactcctcagttctttacttgacagttgggaaacgttagtgataacggtttctaatttcacgccaaaagggactttgtctacggaaagatagtttgcttaatgaagaggccagaaggaaagcacaaggtgaatcttcttcttcttcttctggggttcttgttattgaaaagcatgacaggcggggacgaagtcagactannnnnnngcatggctctagaagaagatccaagtctcgaaaagatatcaagtgttatcattataacaagcaggtcacttaataagagattgcagaatattgaaaaaaagagcagaatcatggaaaggaaaatgagaaagagactgatacagtttgcactgaaggtgatgttgtcattatatgtgatgatgtgtgtgttagtcttgctacccaagattgtagttgggtgattgattctggcgcttcattccatgttactgctcgtagtgattt

SEQ ID NO: 140887 - DNA, 656 bp, Cannabis sativa
atccaggctacatgtgtgtttgttgtggaatacagtgacctcaaacttgtcacaacgtgccctcttcctccccctcactctccatttgtagtttgaatccctgcaagttgcattaaaaatattggtcccagacttcttcaccatgaactcaaaattcattttcaatgcaaacctttccactacattttttaattcagtcttatttgtgtacaacttgccaacgtatatttcccttgaatatgtacctgtaagagaagttgtataaacattatttttctctatctcttcccttgtccacacaatagatttgaattttgtacaaacttcaaaattagatggcacagtactaccaggaggacctggccgacaactactggtgcctgatgtttggtgatttttaatatgaggggttcttctttcttgctcttttcctctggtcccttagaggtggtagaggtggtggaggtagttctaacctcaaagcaggtacctctagagctttatcaacttgcaactccgcatcacattcctcgttcaaatctaccacaagatcattgttgtaaaaaggaccatcaaactcatcaaacttgttaaatacattatcaaccctatcctcatctatattagtaggggcctgctcattcaaacctaccgct

SEQ ID NO: 140888 - DNA, 600 bp, Cannabis sativa
atcaaatttactaattaataaaagatcaaaaatcattttatgttgcatgggtcacatgttttctttcatgattgtaagtttaatgtataaattctattaaatcctaaacatatagttattctgttagaatatattttaccagtatctagatttactaataagtatatttattaacaccctaaatatagtttttctaaaacaatataaataaacgcatataaagttcaagtaaccttgcattgattgtagcggaatatatgtctcatcccactcaaatctctaactcttgttcctttctatcgcagagtattatcaagatctaagcacgattctccttcaggttgtgggattcttcacagtcttacacactatgattgagtaatagacttgctatgggtggacatgcactcattcactataggctcaaaattattgaataataatcaaggatatttcgaaatataagaaggaagaaggaggtctcaaaaattctagttgactgacagaatgtaaactaggttataagggattggattagaatgagaccatcctattccttttatactatttcacctagggttaggatttaaattatatgga

SEQ ID NO: 140889 - DNA, 558 bp, Cannabis sativa
taatataacattattaatatatttagaattaataaaaaaacataggtcatatagcgtcacttttctagtaacactatacatataaaataaaaaagaaaatgatatagtgacattctttttgagagtgttaatagtatttttcctgacacccacattaatgacacacattgaagtgccactggaagtatttagagtcattcattgtgtatcactaaaagtcatttttgtagtagtgttatttgcccaaaggtaataaattcttaattgatatgtattttttctttattgttaactttatgaaggtagatcatgtgtgtgttatattctcacttaaagggaagtttataatgatcagttgactctatagtattttctaattgcttagctcatatagcttgatcaagtttcattttttcttgggttttcgatttcctttctatgaataacaataaatatttttatccaaatttggaatgttccaactttaaggcatggaaacgagatgtgaaaattactttagacataatacatttgaacttatgccttcgagaagaaaaa

SEQ ID NO: 140890 - DNA, 754 bp, Cannabis sativa
  modified_base (80)..(80): a, c, t, g, unknown or other
gaagaaaaacgaaccgcatcaaacctgaaattagtagtccatcaacaaaaggtagctcgatacttcaacaagcaagtganagcatggaaattctttgtgggagacatggtcctcaagggtattcttaaacaccaaagatagcacaacaggcgtgctcagactgaattgggaaggaccatatcaagtgattgaagttctggaatcaggagcatacaaattgggtaagtacgacgaaaaaatgcaactcgttctagtaccacggtattggaacggggaacacttaagaaaatactaccagtgacagtaccaggtcggacgaccatcttaagtacaaaataaaagaacatttactcttaagtgaatggccttatgggcagaccacgcccaaaggtttagatgaaatgacaaagtactcaggtcgggtgaccacttatgaaagtacaatttttattttatgcaatttgttttgttaagctaaagattagactagatcaatataatagcttctatgtaagttactacggtaacaaacgtgttcccgaccaataaatgaataaagatgtttatttacattcaaattgagtcaagtttattagcaagttataaatttaccattaaatgcgtataaaaggtctgctcgtatccatagacctgaacagacaaaaagaatacttgtgaaaaataagtgaccaagagtcaaaagtctgctcggtcacttggggggcacctatacatgtacaaagcatttggtaaa

SEQ ID NO: 140891 - DNA, 932 bp, Cannabis sativa
  modified_base (484)..(489): a, c, t, g, unknown or other
tcatccccgccttgggaagttccctacttggaaatgttttttcctcttgtctgtgctctggctgtaggatacttcctgcttagccttggccactgcaaggttatagcattcccaagcaggttgctggtttcctcttagacaccctaccccattctttgttgggaacttcaggcaggagtgaaatattgatgtgatagcctttaagtcatacaaggccggtcagcctagcattacgttaaaagctgaaggaacatctaatatcatcaggaggaactatgccattattaagtcatgctcgtcagagcttgtccaacagtacgcggtagacgaatttgtcctagaggtgcgactcctttaacggagaaaccatagacaggctggaggcatggggttagatccttgagttgaagtcccatcttttcataagcagttttgaaaaagatgttggaagagcctccattatcgatcatggttctggccaccnnnnnnttggctatctggacttccacgactagggggtcattgtgcagaaatctaattttgaaagtgtcttcatcgtttaaggttatggtcggctctcctgctcgtggaactttgagcttcctttcttccacggccaggataatctcttcttgctcgtgctgcactgtttgagcatacgattcccgagctttgcctaaatctccagcaatgtgtgggcctccaacaataacttgcagatgcccatctatcggtagaggcagcaaatcttggttattgtcgtctctctgaccttgattggtctcaacatacttttgtaggtgcatattgtttttccttattaggaattcaatatcccacttcaagttgtaacattcgttagtgtcgtggcaatagtctctgtggaaccgaaaaaacgttgtcatgtccctcttgctggcatctttcttcat

SEQ ID NO: 140892 - DNA, 1248 bp, Cannabis sativa
tcgagttatggccgcggccatggttaggctcaccgcggccaaaagtgcaccgagcatcaattttgcatttttcttggctccacttgtgttttattgcacttttgtaacccgagacttccataacttcgagaaacctgaaaacatagaaaaccagcgtaattctgtcctaaaacgtcgaaaagcaaacataattgtgatccagaacataggctaaaattagcctaaaaaattccctcaaaccgaatctttactcgccctcgaataaagctaaaactaaaactaaaatagaaataaaatgatgcattagataactgaaactttcaatggttgaactaccactaccacctccacaacttcaagcaattgaataaccagaatttcaactcaataaccctaagaattaacttggatgcacaagttagaagtaattatcacaaccattctacactttccgacattcccccaacccatgttcaatacgcttgaatgacatacctctctccactaatgttaacaattcttgctcggaatcaaaaggtctttttcggttacaatatcatggtttaggtaaaacaggtagatgagcagtcatttaggctacattataccataagcaaaatatagcgaacaagcacccacaattatccatacttttatcccaaagaaactgtaagattatattttcctctttatgtgcctacctcattgttcatatttttttcaagaagaattatcacatttcttactttatgtttctctttttttttctttcttctttcttcttttagatagtaaagacacttcacataacaattttttcaatctcttactttcaaaatatttcccacttaaaacacttcattcccccccaaacttgattaaaagctaattgcataataaggtacattgagaatgaaagtagttaaagataaaaaattatgctcaattaagtggtgagaattttgaaataggctaaggctcaactttgggtaaactaaggacaaaacttttcaggtaagctcgaaaggctcaatcggaccaaagaaaatttacctagatcatttccaagcaaaaatcatcaaggatttcgcttcaagagagtatgtcacacaagttctattccatgtcaagcaaaaattctacaacccaagtagaataaaagtgatactattcaaaaatcaatgctttacatctaaatgaacaaactttttacaagacatccaattcaattcaaagagttcatgactc

SEQ ID NO: 140893 - DNA, 721 bp, Cannabis sativa
gaggtccaccatgcttccattcttgatgaatctgattgtgctgattcttccctcatagccactgccgtcttatatttgctttgcatcgtatactcactatttttgctaaagtgccacagtatttatctttagaatggtggaacaaaaggcccataaatatcaatattgataagctctaatatatttgtgcatttgtctgacttactctttctaactttggcaatcaacttccctttatacaataaacacaggtaatgaaatcagagaaatcaagatcctaaagtacaccatatttcaccaatctctccattctatctctagaagtatagcctaaatgtttatgctaaagcgtagaagatttcaaatctaatcttgcacgtttagaaccaacaacaactttaagagacgaagaaggacaaaaggaagaagtagcaggtacaacatcatgtaaatcaagtttatataagtttccacataaagctccatttccatccaacatagagtcacgatacaaagtcaattttccagatccaaaataaagactataacctagtctatccaaaatagatatagagatcaaattcctcctaatagagggtaaataagcagcatcatgaaactccaaaaatgcatagtattcagtttcagtctaataatccccaaaaattcaactcttactttagtatcgtctcccatgtatacatactcctccaacctactc

SEQ ID NO: 140894 - DNA, 850 bp, Cannabis sativa
gtaacctgctattacaggtaaaagaaaattgtaattacaataaaaatgtaaccattgaatagtcaccctttacctattatatttgctcatatacatatagacaatatataaatgttaattttttttttctggatatattaacgttagtttgatatattatttttaatataatgaaaatataatatgaaaatatttttattaaaatattaaccaatattaaagataataaataatataattattttttttaaaaaaaatataattattcattattaaaaacaaactgctactaaatattcatttcctaacaattttatttttggaggtaaactccaaatttcaatttcctaccttgagccttctattgcacagttgccactctctcttgtcttcttccccaaattaaactgtctcagctttctctcacaacctcatcagctcagctcaccgactccacctatcctcaccccgacagactcaacccacccaaccataacctctgccttacccacaacggcgacattttgagtaaacgacaggaaaaggttgaaggcttctcttattacaattaccaagcaagcacctcagaagtagcagacgagagagagagagagagtgagtggagtgtcgaggtagaagatgttgttccaggtaggaggacaagggagtcgtcccacctttttcgagatggcgccggctaaacagcttccggccagtcttcgcagtgctcttacctattccatcggtgtaagcaaaacctctgtccctacacccaccgccaattctcttttacctaatgctattaatctttcttatacatgtctatactcatactatagctatgcttctt

SEQ ID NO: 140895 - DNA, 989 bp, Cannabis sativa
  modified_base (43)..(75): a, c, t, g, unknown or other
  modified_base (436)..(446): a, c, t, g, unknown or other
accatattcccaaaatgtacgtatcaccctgacaaaaaagtannnnnnnnnnnnnnnnnnnnnnnnnnnnnnnnnactcttgagatcgaacctaaccgtgtcaagattaagatcaaatgatctaggatcaagtaggtgatattgaattgaacagatattacggtaagtttaacatatctgattcaatgttcaatatctatcccttctaatgcatactccatccatccaacacaagctttactttaaccaatgatttggaaaggacatagcacttatccaaggtgcaagtaaagtatgttgtagattatcgtatcagttaaacattgtgtactgataaatctaggaatatatatttaatcaaacaatcttgattactttgcactgtcttgatgacacaataaacaagaactttaatgtgataaggatttggatgaannnnnnnnnnnaataaacaaataaatgataacatgaaccaaatgacacaataagtgatgaaagtacttctgtttctttattgatatttgaataataaagattacattgaaatgaagttttatttggggcataaaacccaacaaactccctattgcactaatataaaacaatcagtaaatttcaatcaatcataaattttgacggtgcttttcaaatgcagttcctgccaaaactttggtgaatggatcagctaggttgtcctgtgtgtccactttctccaccagtacatcccctcttgacacatactctttgataatgttatatttcctttctatatgcttgcttctcttgtggcttcaaggctctttactgttggctatggctctagtgttatcacaaagcaaaacaagtggtttttccattttgggaacaacaccgagtcctgtgaagaactttttaagcaagacaagttcttttacagcctctgcagcagctatgtattctgcctccatggtagagtcgtaaattgcagtttgtttagcacttctccaaac

SEQ ID NO: 140896 - DNA, 1425 bp, Cannabis sativa
aaccttcaagacttccagaaaagggtccaaaaatacatcaacctagaagaggcccgaatagtggcctatgggggatactacccgaccgggatagcagggtatgtaccaggaacccaactcccgagaactttaccaatagctactccaccgatgagcgacatacaattttccgctaccccaggatataatcagggtcaggccttagcccctacatcttctcattatgggaatccttctgggataagtggacaagtcccgtctcactccgctcctactgcaagctaagcaggtccttctcaaggctctcggagcaggaggtcctcaaaaggtagcaaccggacgcaggacaagcgacagaaaagggggtacactccccaatacaatcagtatacgggactgacggactcccaggaacgtgtgtatttcgctaccaggcaaaatacacactaccggagaccgcctcctctatacagagatagatcccgaagggatcccaacaaaaggtgcgagtatcataacgacatcggacacagcaccaatgaatgcaaaaacctcaaagatgagatcaaaaagttaatatgattgggccatctttacgaatggattaagaaccggttgccccatctcaacccggttcaggaaacaggacctttgccccaaggagcatcggggggtgcacccggagcattagcaccaggcgctcccccaggggaacctcagcaaatttttggcctgccaccaagacccaacggaagagtagctatgattctggaggaccccatatcggaggaactactcgaaaggaaattgaagcattatgccggagccataaaacagagcgaggtttgggaagttactcagctccagctcaaaggccccaactaatggatcaacccatcacgttcacagaagaagatgtaaagactgtgcattttcctcatcatgaccctctggtcatagagactcccatcgccaacaagattgtggccagaatcctaatcgacaatgagagttctatgaatttattattcaaaaaagccttcacggaaataagcctcacggaccgggatctttcaccaagtggttcccaactcacgggatttaatgggacaacacttgtcccaatgcgaaaagtgaggctcctagtcaccttgtgcccagacacaccccaaagcaccttcaaacactggacgtttgtagtggtggactgcccaacagcttacaatgcaatcctcggctgaccggccctggtggatttcggctcagtcacatcgattaggcacttgtgtctgaagttccctactcaggaggctaggataggaaccgtgagaagaaaccagggggaggccaggcagtgttacaatgttgctgcccacctacccattctgatggtccgcgaagttattgagccaggaatggcggaag

SEQ ID NO: 140897 - DNA, 1001 bp, Cannabis sativa
  modified_base (634)..(635): a, c, t, g, unknown or other
  modified_base (956)..(972): a, c, t, g, unknown or other
atggaatgggagttcagtaggtttggtcgccaaaattttagtttttgtggttaagtgttacaaaacgtaaagttcaggtggtttagccgccaatatcccttttaataataaaaattacttaatttaagtcaatctaaaattaattaaaaaaattaattttcaactttaatttaattttaaaaattaatttttaaaaaaccattataaataattaaaaaatttgaaaaatttattaaaatataataaaataaatgcttgaaaaatatcttatttatgttgttctaaaataacaaaatgtttcaacttaaataatttttcaaaatttaattaaataaaaaaaattaagtatcttgaactaatcaccttaatttgaaaaatatccctattttagttgatctaaaattaacaaattttcaacttaatttttttttaaaaaaaagatatctgtataactaattttctagaaaattttacttaattattaatttctaaatattctaatttaagttgatccaaaattagttagaataactgattttcaacttaaatatattttctatgaaaattcaaataattaagttatctaaaaaatctaattagttataacttcttaatttaattaaatacagaaaannacatatagtttatcttgaatatattgcatcaaactaagtgtgtttttcttaaattaatttcaaaataatctaatttcaaaattaatttcatatatttcaaaattaattatgttggtaatcaattttattaggttatactagtgtgattaacctactacagttattcaaacaaggcaaatgggccttcacaattggggttgtttatgtgagggagggaaggattcagtatggcgtacccactattaaaggccctttaactctcatacaagccccaaagaagaggaatttaacattaattaaacaactgttattcattgaatnnnnnnnnnnnnnnnnnggcctaaataaaatctatcaataatgatc

SEQ ID NO: 140898 - DNA, 811 bp, Cannabis sativa
  modified_base (94)..(95): a, c, t, g, unknown or other
  modified_base (313)..(330): a, c, t, g, unknown or other
  modified_base (761)..(766): a, c, t, g, unknown or other
ggtagagttagagactccaaataggttttagagactccaaataggtttttacacttctccaaaatcactgctccaccccagagtaatcaccatnncatcagtagactttctagcatcaaacaagtctagaattttaatttggtgtagtttaagagtattaaaacatcacccttatcaactaacatatagttcatcttcttgatcttaagattttcttgattgtcttctaatgtttctttcctaaattaatctgatacctactcattactcccactcaatagctggtgtctggtctaatgcatactaaagcatnnnnnnnnnnnnnnnnnnttgatcctaaggaattctttctttagcctttatcttttctgaaatagttgaaactttttcttagataaataaaatatatgtctagaagtcgaaaagcttctatagatgtagctattagaaaaatactacaacatcttactaaagtacgtcgcttgcactagagtaagtaaattaccaagcataccataagccataggtttagataaactcaaacttataatgctaggaacatcaaattttgttaactccattgaatagacttattttcaaaatttcgtatcttgtccttgtaatagaaaacctttggctattccatatgaatagtcttaaccatactcttattcaataattaattatattttttttaatatgtccgaaagtatgtattttttttcttgactaattgattaaagggtaaataccattttggnnnnnntgttttgcaaaagttataaattagaccttgtgttttgttaaatga

SEQ ID NO: 140899 - DNA, 1363 bp, Cannabis sativa
  modified_base (45)..(77): a, c, t, g, unknown or other
aactttatatgtgtttaattatcgatttagaaagttcatatttannnnnnnnnnnnnnnnnnnnnnnnnnnnnnnnnagatcctggtaaaataaaatccaacatcatagtcactacagtgaataccagtcaacctgtggtattagcgcctgagagtgcaagattgatatgcgtgttccttgacctctttccagaggacttaccgggatttccacctacttgggagatttaatttgttattgagttggttctgggtgtggatccagtatctaaagcgtcgtatcgaatggctccagcggaattgaaagaattgaagatacaattgcaagagttgttgaatctgggattcaatagaccgagctactcaccttggggtgctccggtattgtttgtgaagaagaaagatgggaccctgcgaatgtgtattgattaccgagagttgaataagcttaccatgaagacagtattgatgatctgtttgatcaactgaaagggaatacggtattttccaagatcaatctttcttcagcagagaattcgagaggaagatatcccaaaaactacgttccgtacttggtatggacattatgaattctttgtgatgtcctttgcactcgccaatgcctcggcggcatttatggatcttatgaatagggtgtttaaggattacttggatagatgtgtaattgtgtttattgatgacattttggtgtactcttagtcggaagaagagcatgagttgcatctcagagcagttttccaatgattacgggatcataagctttacactaagtttgaaaagtgtgaattttggttatctcgtgtctcatttctagggcacatagtggataaagattggatcatggaggatctggcaaaaattgaaggtgttagggattagccaataccaaagtcagctactgaggtcagaagctttctgggattagctgggtattatcgtcagtttgttgagggtttttcaaagattgttgtacccttaacggagctgactcgaaagaacttgaagtttgtttggactgatcgatttgagaaaagtttcctggagttaaagcagcgcttgattaccgctccagtactaactcttccttcagataaggaaaagtttttggtttattgtgatgcctcgagacagggtctcggctatgtgcttatgcaagctggaaagataatagcctatgcttctcgacagttgaaggaatacgaacagaggtaccctactcacgatctagaactcccagcaatggactttgcactaaagatttggcggcattacctatatggcgagaaatgtgagatatacactgatcacaagagtctgcaatacttctttacccaaaaggact

SEQ ID NO: 140900 - DNA, 814 bp, Cannabis sativa
  modified_base (782)..(788): a, c, t, g, unknown or other
aatggaggcaatgggatatgccaaatggcttgactcctatgggccattgaaagtactatgaagagttgggggttgttccaaagaagtctgtgccatctacacaaaaaccaccagaactagaactgaaggtgcttcctgatcatttacggtatgagtttttgggggaagacaagaagcttctagtcatagtgtcagcttcactttctgatgtggagactgataagctgctaagagtactccgcgcacacaataaagccattgggtggacattagctgatattaagagaatcagtccctatacagttatgcataaaattctaatggaggagggcgctaaactgactattgatgcacaacaaagacttaatccaccaatgaatgaggttctcaaaaaggaagtggtcaagtgattaaatgctggggtggcttacccaatttcagacagtaagtgggtttgcccagtgcaagtagtgccaaagaaaggagggatcacagtgataaaaaaatgaaaaaaaaaatgagttgatccctacaagaatgattactggttggcaaatctgcattgactacaggaagcttaataaggcaactagaaagatcattttcctttgccattcattgagcagatgctagatcggttagctggacatgagcactagtgtttcctagatggctactctggttaccatcaaatagccatagcattggaagatcaagagaagacaacaattacatgtccatatggaactttcgctttcaggagaatgccatttggactatgnnnnnnnccagcaacatttcagaggtgtatgat

SEQ ID NO: 140901 - DNA, 1040 bp, Cannabis sativa
  modified_base (851)..(852): a, c, t, g, unknown or other
agatacaagtggggtgtagaaggtataataaaaaatgaacagagtaaggtctgtttggcatgttttgccaattatgtatatggtatccttacctcggaaacttgactgattaaatatttatgagagtagatgattaacctattgctaagagtcaatgataaataaatagttgggctacctagcccatgttagggttgaattcgttttaaagggttactagtgcacttacgatattttagcacatgcatggtatgatcttacttaactaaaagaagatggtatgtactagaacgtaagttggttttagattttggagatctttaaagtacaattaagaagttaggatttattttgtgagttaaagaggtctaccatatgcaagataaatatggcaaaaaaaaaagaaaagaagaatatgttgtattttaaatatgaagtgatgtgatacctagagggttagtatagtaaaagaagcaatcattgaacatatatgtcagcattatagatttaaacttcaccactatatcgatgtaataccaaagtagacaaaagttagtatggaaaactagctaacctcataatcaagtcaatttgattgagaggagtaatagaagaccaagcaccatatgagattagcaaagaaaatacaatagagtgatacaataaagagactacaaaagaaaatcaacagcggttacctaggaaaataggaaggcgtgacaagtgcaatgaatacatgaataaaggatatcaagaagtgaatgttagacaaaaaggtggtcgaaatagaaacatatttatatatagaagaccttctaaagagcttacatgtttatttccaagtgtcatgnnacaagtgtctatcgatgagtgagtaacaactatgaaactgcaagaatgacaccgtagctttacggtggaaaaagaaaagagagtaagattttagtctgtaatatcattcaacgaaagaatgagaataattaaagagaagtttgcataaggtcttctaccctactctttgtgtttgttatttttgtatt

SEQ ID NO: 140902 - DNA, 641 bp, Cannabis sativa
aaaaaaaaaaaaacccccccccccccccctctcccacgtgtaaacaaccataatgaggaaaataagatcaaaacataaatccaggggaaaaatccttacaaacctttaaacaacaaacgggacaaataaataaaaagattgttccttaaatttgtccttgaataaaaacgatatttaaaaaaaaaaagaaaaaaaaaagaaaaagaaaaaacaacataataataataaggaaattgtccataaaatttgtcatacacacataaaaaaagggagcattaaggaagttattgaaatatgagtaaggaaaatcccctcccatctctttaggctccgtcgtcattctcgcccccgctgccttcgtcggactccgagcaagaatccaccaaatcttcatctttcttaaacttggagtatttcgcaaagaactcgtccagattccaggcattggatttgccctccttaaactcggagtacagtttaaaagacgactgataactcccactaaggaacgcctttttgacttggcccgtcaggattttaatctccttggccaaggattctttctcagcaaccagaaccttttgggcctcagccgacgccttctctacttcggacaattttccactcaaggaagagagttt

SEQ ID NO: 140903 - DNA, 778 bp, Cannabis sativa
ggtgcaggtaaaggcaaagaaaaactagatcaaccatgaggtgacagtcttctccagcaatgtacatattgacctcaccgacctgcgtgctgggttgccaagaattattttgggctatatctactgtgtattttgattttaagcttttaaggcgtcgtcgtatttagttcttttgtaaaaaaaattataacatggatccttggaacacgctttttatgtctttataatgtccatttttagtgttttgttttagttaagtttttaatattatcatgatttttaataattaatctatcagtattaaactagtttataaaattacacatgtggcatccctatagattagggcgttacacttgattacatagaacgctatataccaattatagatacactatgaattacctattgttacaacctagacaatcaaggatcatctatatactttacatcaagtatggacatatttattgtttatcctttgatgtattttattcttaaaacactttgctacttgtaaatgatattttaataaactaatataattattaaaatgagcgctctatgtatcatttatcgcatttagctaaactttaaggaaaccatcgtttcacttccaaatagttatagaagttataaattcaatatctataattaaagctcccaattaattacactttcgaattttctgttgaaaattattttaccaggatcttagatctactcacaagcatgttgatttacaccctaaatatgaactttctaaagcgatgaaata

SEQ ID NO: 140904 - DNA, 530 bp, Cannabis sativa
ttaaaagcttaaaattgaatatatgtatatatatatagtcatgtaggtgaatataaaaggtttttttttttaaaaaaaagaattaaatggtattaattaatttagcaccgttagtttctaaaaattaggaaatctaattgaccaggaaaagtttgtttataaaagaaaaatctatatttgaaaatattcaaaaacaaaattaaaagaacttttttttttattttgctgaccgaagtaagcttaaaaaaccaaaatatattggccttaaaactaatataccttttttttgggaagagtcttgctgaccgaagtcagcttaaaaaaaaaaaggagagattagagaaaattgggcccttttgttgtgtgggccctgtgcaataaatctggttgcacagttaaagggccgggcctgtatatatacatacaagtaagaggatgatttcttaaaacaatgacatgactaatataaactaaaaacatgatgatcaatactaaacttctataaatacactcgatacacacacatattt

SEQ ID NO: 140905 - DNA, 546 bp, Cannabis sativa
ctcttaattccttatagctctttatattattattattatattggttgtcgaaaaacctcagtcaacaataataaaacaaaatatgaaaataaagtcttaaatatatgaataattatttattgaaacaaatttatcttaaaaatataatattgaaacaaaaaaacttgattttaaaaaattccaatatttgatagagaacatacgagaatattttgtcatcttttttctttttctaattttttttttaaaaaagttttttttacctaaaatgtcattaattcaatatgatgtggcaccatggtggacaacttttaaagttgtcaaccattggagaattttttttaagaaaaaataacaaatcttatatatgcattgatgagagagaaaataaaaaataaaatattttagtgtgatatgtgtcttttggtaattataaatgttactcccattagagatactgtagaagattgtaatagaaggtcagccgtaacacttctttaataataaaaaaaacaaaatatgaaaacaaagtcttaaatatatgaa

SEQ ID NO: 140906 - DNA, 663 bp, Cannabis sativa
cagaaagaatgtcaaggacaagaaggaaaagcttgagcttttaaaaaggcaaaaatggtggaaagatggattcgttgccgttttatacttcaaacttagttatcgtcagataaaaatgtagaagatccaacagataaaaattggagagtagtggaaactgccaaaattaaaggcaagcatattttcaaattggattatgaccgaaatacccacggtaatcatttaaaatacactttttattaaaaaaatgacttttaaaggagcaattgttatacccaagatttagttgtacttcaaaaggtgatacgtgtccgtctcagagaatatgaatcaacaaatataatggtaattatatcattaaatataaaatagaataactcattaaatgcataatttatagagtatatttataactccctgactacacagtcttaagcgagatcagaatgtacaaactattgattcacgtattgacgagaaatcatttcgtatcagaaggcataatcttgagggagacataaaaaatgtatagcgaagcatctacctcattgtatgtaaagaggtattgacgagataaactggttattagaacacttagcgtattatatacgttataataagtaagtgtaatgacttcatggacatgattgtccagtctacaag

SEQ ID NO: 140907 - DNA, 1171 bp, Cannabis sativa
aaaatacaagaagtcagtgtaatatggttgggaccggaggcggtcagggaaatcaaattccctagaatccctgtggtcgcggtcgtggccatggtagagttcagggtggacgtcctataaatccaccactagctcctcccgattgggagcagaggtttgcaaaaatgcaagatcgaattcgccaacaggaagaagaaattctaagattaaggccgcagggtcttcctgccgtgcccctacaataagctcgggtcgttgtagctctagtaatgccagcagaacaacttattgttggcaaccgtataagccgttatacaaaaggttccataagcaagcacatccagtgtttctgggaggtcctgatgtgatgaaggcccagcagtggcccactgtgatcgagcaaatttttaatttcatgggtgtggttggtaaggatcgagttacctgcgctacatttcagttctaggaagacgccctggtgtggtgggaattggtgtccctcactcgggatgttactgttatgacctgggaagaattatgagagttattcaatgccaagtattataatgaagccgtctgcagtgctaagcggaaagagtttactagttagtgcagactgagggaatgtcagtcattgagtataccacaaagttcaatcgtttggccaaactcatcgtgggtattgtggcaacagattttagtaagaaagaaaagtacctggttgggttgaatgtgaagattagacatgatctggtgatcactaccaatgaagcaacaacttatgcgaaaatgattgagaaagctctaagagccgagggtgcggttaaattcctttaggagccccaaatgactctgaatgttggttgaacccccacttttcctactcctgcttatggtagggatggtggtgattccaccattgatcagaagaggaaagttactcctgcatctggtggctcggggcagagtaagcagttccgtgggaaccaaggcagaggtggactacagggttactcttaccctgagtgcccatgttgtaagaaacatcatccggacggaagacatgctttttgtgtggcatggttgggcatatcaagaaagattgcccttaggcatagaaagaagagccgaagtcagaggcaaaacttgtacctgctcgggtgtttgccat

SEQ ID NO: 140908 - DNA, 854 bp, Cannabis sativa
acggaataaacttacaaaattactgaataaccgccgacgacataaatttacaaaattcacataatgcaatcccaaaacatagaaaggtgctgacataagcctacaaggaaaataaaaaagaagcgaaggaaaggagaccccctacacggagaaactctccctctgctgaaacgttctccgcatcgcaagccacccccgacaattggaaaaagaaggggggcgtattatctcggatgccacccgaggtaactcttgagggaaagaagaagcatatatacaaaaattcgagggagagatatccgttgggacaggtacttcttcgaagttctcggattgggcagtagactcaatctcggggtaataagccgccgtcgtctgagtcaaacttcccgccgatacttcaagctcctccttagccgtcttaaccggtgtcaatatgggaggaaaaatagtgaaaggacacacagccagaggtggtgcaacctcgacacgagaagtagcataagttctaaggcccaatgcagcttgttcaaaacaaggacagctgcagacctctgaaaaatgcagtggaggaagtgtagtaggctcgaaatcacgaaagcttgaaaaaaggttcaaggaaagaaatgcaggatccaatggctgtaatcctgagaaaatgttagaagaagaaggcccttttgagtagggtatctggtttttgggtagagaagacataatgtaggaaggacaaacaaagaacacaatcaaaaaactaacccagaaaactaaaagagagttgaaaaatattctgagatagaaaaggaactcaacgagaagcctatttataaaaaattacatgcaaaataataacc

SEQ ID NO: 140909 - DNA, 1171 bp, Cannabis sativa
ttttaatatataatatatatataaatttttaatattattaattaattaataataattttttttaaaaaaaaaaaaaatctacctaattacttgcctcgtatattgcatttaaaaaaattattttaaaaaatatttgtgagatattctaaaaatatctatcactctaaaattttgccaaagcctcttatttatattccaaaaatatctattattcttaaaattttgtaagataattatattttgtacggtcatcattttttatcaatgaataaatatgtcattagagttttttggaaacaacgagtcttcttctttcattgctaataatggttttcatcagaatattttatgcgtgatctattataattgagatgatgtagtgataatagagttgaagtaatggtctatatgtttctcttatttttttcttatgtggcaaagtatacattcttgtattttgtagggtcatcattttttatcaatgaataaatatgtgattagagttttttggaaacgagtcttcttcttccgttgctaataatagttttcatcagaatattttatgtgtaatctattataaatgagatgatgtagagttgaagtaatgtgctatatgtttctcttatttttttttcttatgtgtcaaagtatatattcttatacattagtgtatcttcagtaaagttgctctttagaatattattataattaatatattatttatctcaaattaatgtttaggtagaacaatataactatatatttttagaaatattttaaatttgtatattatatgatcataaactctttttttttttaaataaataaataaaactcttttaatcatgaatagtgtttgtgttctaaattgtcaaattttcattgtaaggatttatcaaataatttattaaagtaaattataaaattgtcttacacatatataatttttcgtatctcttattctttttgtcatttttaacttaattttattaatttttatgttatctatcaaattgtcactttgaatgtagtgacgactacaaatgagatacagtgatgaaagtagttttgttatcatatgattatatctctttcaatttcaatttttaatcttttatttactataatatttgaagataacttttttattaaatgattataaaaaattaaa

SEQ ID NO: 140910 - DNA, 1099 bp, Cannabis sativa
  modified_base (938)..(970): a, c, t, g, unknown or other
  modified_base (1067)..(1074): a, c, t, g, unknown or other
atttcagacaaaaaaacaccagttccaacaaatacgacacatataacgaaagcaaactacataaagtctaacaagatgcttaaaacaaaacttacccattgtaatggtgtaagattcttgagtgatattttggtgtgctccggttttccaccaacgcccaccgagaaacaaccattcaacagggaagagagagagggacgagagagtgggacgagaaagagggaagtttttgggaagttttttcaatttttctagagagagagagtggtgcacgagagagagagaaagaggcaatttcagtttttaacaattttatttattttttttaaaaaaaaaggtaaaatgggaagttcatgtaatcaatggaattaatttgtacaaattaatggagggtataaatttttatatggggtattttattaggggcaaatagtgaaattttccttttaatatcagccatattttaaattaaaagataactttatcattttaatttaaaatattataataaaattatcttataagataaataaaataattaataaatttgaaattaacctagatatttttatagatattctaaccataatatttttcaaattcaatattagttattttgttaaataattaattgtttataaattataagttagaaaaatgatatttttatatcattttacatattacaaatttataaatagtattttaaatatttaaatagcctagatatttttgtagaaatttgaaaattgcttaatttgagatattttgatatttaattaggataatattatttgttttttattttattcttaaaataataattacctaaccatatctactttaaaattggtttatttaattattttaattttaataaattataagattagaaaatgatattgaaaatattgatttggttattttcaaatcatttnnnnnnnnnnnnnnnnnnnnnnnnnnnnnnnnntaattcaaataaacctagatattttagaattaatttaaactttaaattttgaagagatatttaagattatttttaacaaccctaaattttcaagatnnnnnnnnagttaaaataataatttaattatat

SEQ ID NO: 140911 - DNA, 646 bp, Cannabis sativa
  modified_base (354)..(356): a, c, t, g, unknown or other
  modified_base (404)..(412): a, c, t, g, unknown or other
ttttatctggagtttacaacatatgcttcaaggttttagaaatgcgaagtggaagcaatccatatgcggagttaggagaatattaaattttaaacagacttgttatattagcaacaattgaaacagattcttgaactaaaagagaaagtactacggaacaaaagactatatcacttattataatactgtgaaggaacaataagattgaaaagcgatttagaagttaaagtcgcagttgcgggaattatgtcctaagttgtttgaataaatttcgaggacgaaatttctataaagaggggataattgtaatatcccggaaattaatatattatttaattggacatattttattannnatgtaattattttggtaatgaagtaagtaagattatgatcttacttannnnnnnnngtgtaaatttattaaatgattaaataaagcgtaatttattaattacggagattatatcaaaatatgtgggtatcatggataccatttttgaaataattatttcttgggtctagcaactgtggaactagacggagatgtcagaaatgtcacgacaataaaaggtgaattaaattggaattggatttataccagactagattagaaatttaagttgtcggttaggcgggattggtt

SEQ ID NO: 140912 - DNA, 790 bp, Cannabis sativa
gtatttttgtaattttttcaatgtgggctgtataaatgttgattgggctggcccataataatattgtaatattttaccctttttggaatttttctatttttcccttctttatttccatatatttatatttaattgattgatttatataaggtatgaaaagttattagcttttctttgaaaaaaaatatcataaagagtaagttttgtaaataaattaatttctacatttctagccgtgtaaatcagatcatagatgagtttcctattatgtttgatcagattttttgtgaagaaaatcttctatgattcaataggtgtagaaacaaaaattcatgtactgattgaagatctattctaggaaagtatctagtgagttatggtcttgtttagacagtgtatgaattgtcaataaggtgtattaatacaccttatagtaactaggtttagtatctgtatttcattcatatcttgtaagaaagagtgtctttgtatttgtagagaagagtgtgctcgtctctttctctatgtttacgtattttgtattgtcttgagcctgtaatcaagtttataaaagaagaagaacaacagtgataccttcaggagaaggttttataagctttcgggagatagcttttcaagtcttgcctcaggagaaaggaagtactctttaaggagatctaagggagtttgagcacttgagatttcaacaagattcgattagtagacagaatatatcaagcttgcgacatataataaaagggagtctatttatgcataagtcaattacttt

SEQ ID NO: 140913 - DNA, 735 bp, Cannabis sativa
ttgtttgaccactagtgagaatatgtcattcaaatctacaccttctttctgtgtaaaaccctttgcaaccaaccttgctttgaatctaatgagttcaatgccaagaattctttcgttgtgcttgaaaatccacttgcagcctattaatttttcagccctctggatcttttgaccattatcaaggccttgttcttcactagagagaccttttcctcatctatagccggtaaccaagttgttccatctttcccattaactgcttcttgatagctggttggttcagagatatccattttctttgctacaatcaatatataagcaataaaatcagcataactaagcctgtttggtggctagctctcttctttctttgtctattactagtcagtagctgcttagatcaccttgaccactctcattctcaattatgtcttctaactgtgaagagttatcatgtgattggtccacctcaatcttcattccttcctgcaatgttgtttgaacaattttaggaaagaccttgcaaagtctcttatttaacaaaaaaacactaaatcctcttttcttctcaaataagccattgcttagtgaaaaattttcaaataagacatagtcttatttagaattcttattgatcgattaaaactaattaattgagactatacaacaatattatcccagttagtttgggggccatgaccctatgtaattaagcttccaataagtagatccaaa

SEQ ID NO: 140914 - DNA, 588 bp, Cannabis sativa
ttatttttggaggtaaaaataccccatgttacaattcttttacacccgttactaccacttctgttaaactcataaatatggacacgcggagggtccagatgcattacatgtatttttttattttaaacttaatattcttaatatcaaaaactaaatgctacttatttaaaaaaaaaaatcagttctcataataattttcacatatactacactgatgcacttatttatggtaatttaattttgcatctcttttttttttttcatacaatttttctttccataccaaacataagaatctttctttacttttcactttttttcccctacattccttacctttttctttcccctacattccttacttttttctttccccaccaaaatccaacttccaaactttgtgtaatcatagagtaaatatcaaaggctctctctcactgctgactgttttgagtctttttgctcatatggatacacataggaatacaatgtacaccggcaggaactagcaaacattcacatggtatcacttttattcaagagatgaaaattgtatatattaattaaaaatgatatcaacatctacaa

SEQ ID NO: 140915 - DNA, 1235 bp, Cannabis sativa
aaactattataccaataatagaaaatatattcatttaataatataaattatatattttacctcataaagtaaccatctttattacatcgcattgcctaatcaggcaagtcagtgccttaatctagtaatcgtatactgcattgcataatcaggcaagcccgtgccatagcctatcacccatatgtcgcataactgcatcacctaattaggtgagcccgtggcgaaacctggcacccatgtattgcatcgcctaatcagaagagctcgtgccttatactgggaccaacatatcgcatcacctactcaggtgagtccatgcccaaatttggaacttacatgtcactgtcgcccgtgccgaatcaggcatcaccgacaggaagaaacctaacaacagtttcagtctatgccataacccgacattcatatgtcattgccgcccgcacctaatcaggtgtcaccgacaagtatatcgcatcacttaatcaggtgagcccgtatatcacattcacggtatcatcaaattatcattgcctaatcagacaatcttttcattacagaacaataataaccgtatcttaatcccaatattaatcaattctcaacaatattaattagattgcaatataacttgctatgcagtacaatatatttttcttacctcaagttttagttcaggtatgtttgttgacctgcttggagaatgattgacgatcctggttcctatgtcataacaataataaactaataagtgtctatctcaaaacaccgcttaatgttcacataagacaatctaaggtttctaccaaaccccgtggtataaatacactaaaataaaacttatattttgtctcttaaacatacactatattttagagcttattgtaagcttcaaaacggtatatagaacgtcaaaaacggacacccgagtgaaaagttatgataaaaatacgatttttaatctccttggaagttttagaaatgataggccgttttggtaaaaacggccaatcattttttagcacgaaaatctcaaattttgcactcactgaaatacccctgatacctaaccaaatcattccaaacttcatagggcacatatataccatatatacagcaatccttacgtaacaaaaattaaaaatgaaaatcgagctcttaaacagaaaacaccattaaagctcggacttaagctttaaaaagttccaaactcgatttctaactaaaaatcacctcaa

SEQ ID NO: 140916 - DNA, 599 bp, Cannabis sativa
  modified_base (49)..(54): a, c, t, g, unknown or other
  modified_base (99)..(110): a, c, t, g, unknown or other
  modified_base (436)..(449): a, c, t, g, unknown or other
ccccatactagatgagaccatacttcttgtaagactcagataattgatnnnnnntaatcaattataattctaagattaaactatgtctagtttatgaannnnnnnnnnnnaagggcttaattgtgaaaaaaaaatagattttaggtattatttactagttaagagactttattaagtctaattaataaatatattaaagggcaaatttatttgataattaattttaattattaaatatttagtttttccatttatttggttagaattggaaaaaatagcatttttgagaaaataaggaaaaattgtcaaaattgggaaaaagcccaagtggggcccactaactatggtcggccacttgtaagggtttttccacttaatatttccatttttttaatgtctaataattcctaacataaacctaggtggttgcctatannnnnnnnnnnnnngctcacacttaaagatgatgaaaaattcaccttcagtaaaaaaaaattcttgagccttttattctattgaattcgaactagcccctctcttcttctcttcataatttcctaccttgagtgataaagtgagtgcccacacacataaagtgg

SEQ ID NO: 140917 - DNA, 1171 bp, Cannabis sativa
tcttaggttcctctttcttggcctgaggacaatctctgataaagtggcccaccatgccacactggaaacatgtcttggcctgacattcaccctgatggtgcttcttatattttggacattcgggataagatcggaagatagaccttcagccgtaacggccccctctgtttccctaaaactttaccccctaatgctccgaagcctcagccttccgtttatgattagggttgccactgtcggtccctttactgacattaccactagcaggagggttcgatgccatgaaaacatcctttgcagtctactcttttgctacatgctgctcatcctcctcagctatcaacgctagctctaccactttcttgtacaaagtgtcatgtgaagtggtaattttcaagtccctactgatcatggcattcagtcctctcacatatttatgtttcctggtgaaatgtgtgggcaccatatcaccagcaaacttggacagccgatcaaactccagagtgtattcggccactgacattttcccctgagtaagcttcacgaaatcctccatgtgtgaagttgtcacaggaatattgtagaacttttcttcaaagatatttttaaattcttcccaggtcattacattgacagcccgagtctgacccacaatgtcccaccagacgtgggcatgatcttgtagcataaaagcagaacaattcactattgcagttcccgtcacccccacattattgaggatatgggtaatagtactcatccactgctcgacctttattatgtcagtacctcccaaaaaagtcaaaggttgcagcttcacaaaccgctcaaatacaaaatccctatgcggcgttataaacccctagttacccaccactggcacaggtgctggtggtatcacttgttctacaggggcagtcggttgccttaatcgacacaactcttcttcttgacgaagtatgatacctcgcgtttcttggaacttctgttgccagttatcaagaggattagccttgtctacccccgcattatcccctggattttgcggaggtggtggcagtgttagtggatcggtttgggcaaccccaggctccacttgctcgccctgtggtctagatgattgtagagggtccattactagtacccttgtaatcaacaatcccagcgagtt

SEQ ID NO: 140918 - DNA, 533 bp, Cannabis sativa
  modified_base (428)..(465): a, c, t, g, unknown or other
tgataacaaatcagattagattgtaatggattttatttagtgcataaaatcccaacagataattgaaatgacggtattttataatatggattagtaaagacaattagcaataattattggtattttcatagttatttatgaatttatttaattgtgggtcccattattaaaagtgggcattaagatatgaattctcgattctggagattttattaaactctaagggtgttatttgagttatatatgaattatgttatttttacaatttttgttcgacaacaatggaaaatgcgatggatggccatttgaatcacatgggtatttttagaacctttttcttagggggattaatattggagataaatagaatactgagtttgaggggggttatgatttttgaccatttgaccaggatccacttgcactannnnnnnnnnnnnnnnnnnnnnnnnnnnnnnnnnnnnnaatagacactaccacattttttttcatctatggcatttgtatcttgttcatagtggatttgacaagat

SEQ ID NO: 140919 - DNA, 890 bp, Cannabis sativa
gcactggactttgtgtataaaagggcgacttaagcttgccatatatcacaaacttcaagttttttggtgagatccatgttgagaatggattgtctctttcttgctaaaatgtcccatctgagttcagaggttcaccccccgaatttataacatcaggatgcaccacacattttttttctccatttgttcccaaggacttcaaacctcaattggaactggaaacgacggattccaaggccgaggagcttccgaccaatccaaaccaagggaaccccgttgattgttattggtgatcttcacaagtgattctttagggtaagtattgtcccttgtgaatggtggtttgagtcggatcatacatattattattttttgtagctccattgacccctatttctttttatgtctccacaggaatagacgtagatcttgtgagcgatcttagaggtcctcctcaggctgacaaggaatctcagagagtagttggcatggttttggataaatttgggagggaagttggcatggtttttatcagagaatccaaccaaccaaagacctaaacctgcactagaagacctttataccaacctttctctggtgtcgaggaatttgctgtggttgggaataaggtctcggctgcaggaaataggatcttctgatgaggggaatgaggtatatgtagaggttgagaccttctacatgtaggcggtctttctcgagcagcgtgtagccggtctttctctaagctatgtgtagacggtctttctcgagtttaccgaccctccccttacattttttttttggaagataacttaatggtttgcccctagtggcatttttgtaaagacaagtttataacccaacttgggttttttcttatcttaaatgcc

SEQ ID NO: 140920 - DNA, 521 bp, Cannabis sativa
tgtaatcaatggactaaatttgtagaaattaagggagagtataaattttgatatggggtatattattaagggcaaaaagtgaaattttccattaaatattacattcattgaaataaattgacatatatcacaaaagttagtgatttgctacttcgatttcttaaatgatattttttttaataaattagagagaggacttgaattgtttctttctattaaaaaattgagtctaaatagtctttcaaaaaactacaatttagaaactatcaattattcatttattttcttataaaaacacatgaatttttttttttgttaattctatttctaatatttattacaaaatcgtcgtctttctctatattttaaaaattgaaaatttatttctaattttaatactattactttgtttaaaatattatatcttagattacatgagtataaaatatatatgtacggaaaagattataaaatttagacaataccgcacgacttaattttttttttttgaacaaaagatg

SEQ ID NO: 140921 - DNA, 535 bp, Cannabis sativa
ccttctatttatagtggtagctttattttttcatttttttaaaaaaatagtaataaattatgtgatagttagaggatcatacctaatgctttcatacatatattttttttaaaaaaaaaaaaatgaaagaagagatatttccatagaaatgggaatctggtaattaaagccggccaccatttcattgcatagccaaagtagtagacataataattgttaggaaaattctacactccacttatttaaaagtaatgcaagtaatattttttttcataataatttaaatatcaaaataaacaaatatatattttaaataataatataaattatgtgcaatgaacacttaaaaaaatacaaagtgtgtatgtatataattttttaaattattttattattgtttctcataagtatttatcatccaagcataactttcaaaatcaaaatattttttctactttttttaattataaaaaaaccgttgccaaaaatatttttggtaccaatattgataattaatttcttttttttttttaaa

SEQ ID NO: 140922 - DNA, 529 bp, Cannabis sativa
cacaactctaagctatatatagcccttcattactgctatgttggacagagttgagagagagatttttagaggtttcatgagctagttcagtgtggaagaaagaaagaaagagagtttattgtgttggcctatgctaagattaatcatagtgtcgctagtgaggttgattgtagttgaagctatgcttcttgagtgattgtgtcaagtacacatttgtgatcaacatttgtaattttttcttctagctccataaagattggagccattgggactgttctgactgaggagtaggcaagtgattcatcatcactttgttcgaaccttgtaatctcttgtgtttaattccctttaatttcttgtctaaattgttcttgttcattagttttacttctgattttcttactggtttgctactggtttgatcacctggttttttgcattcttgatattgtattgttcttgatcaattgtttgtgtttgtttatgtatgaggtacatgatcaagcattgatcacatcaaatggtatca

SEQ ID NO: 140923 - DNA, 806 bp, Cannabis sativa
taagtaaatgatctgtatcagttgaaataattatatcaataaatatttactaaataaaagtaatattacatactttttttgaaatttttacatcaaaaataccaaatagtttttttattatacatatacctgtgcacactcaacctgagttactcttttacactttaagttcttttacactgtcacactctcatgcaagtagacatgaaaattgggcggttaatgtatggggaatacaattcccgcccccatccccgtcccatccccgtctaataaccaacggattcggggtaggggaatacccatcggttatggagaacccatcgggtatccagtaaggtaaaatgaaaaaaaaaataattgaaaaaaaattaaattaaaccaatattctcacaaatctatttttttttttttgggtataaacttatatatattcatggctatttactcgatcatcattgtccccttctccattgccaaaaaaaaaattaaaataagtgttaaatctatagcaaataagttcagaggaaaatacccagttgtagaagatgatgactccgactttattgcgccagtattgaaataacgagatcatggacctgcgaagaagaaatctaaagtgtctattcatcaaaaaatttccccaacttctgagaataggaaagggaaggttgaagttgatgatgggttggaggtttgtttttagttttgttttaatttttccccaactttgattttttttttttcatttaattttattttttggtttgtgtatattgttttgatttctttttagggtttatatt

SEQ ID NO: 140924 - DNA, 662 bp, Cannabis sativa
ggttccataaagcttcattcctggccttccatatgtgatacacaaggctggcaatgattgtgctcaccatgcttttccttgctgcattaaatctctttgaatgatggcaggcatgcagcaatttgacaatgtcctctgctgttgtttttcattgcaggaattctttagtttgctatagacaacttgagttatagttgcatttaaaaaataaatgctcactggtctcatcttcattgccacacaggacacaagtggtgtcaatactttgatatctacttactctctcctttgtgtttagccttttccaaaacactagccatactataaatctatttttgggaataatgagcctgtcccaaactagattacaccatggaagtttaggatgttcaggaaataagtcatgatagccgtgttttacccgatacccctgttttaggaagctatccatgtccattttctgctgaaatctgtcttttactgccactattttcttccaagaccagatgcaatcttgtggagtagtgtagctccaccagttttgatccttcagataaaccatgtgtatccattttacaaaaaggcaatcctttttgcttggtatgtcccacacatatctccccaaagctgccacattccattgttgtatgttgcgaagcccc

SEQ ID NO: 140925 - DNA, 503 bp, Cannabis sativa
  modified_base (50)..(58): a, c, t, g, unknown or other
ttttattgttttagagaattcgtacttaggatattaatcaacatacttgnnnnnnnnnctagatcctggtaaaatattccccacactatcataatctaggccactgttttatttgctatctgcacttccacgactaagggatcattgtgcgggaagcgaacgtggatagcatcttcttcaatgaaggttatagtgggtttccctacctgtggcatttttggcttcctttcttctacgggtaaaactacttccttttgttcgtactgtaaagtttgggcataactctcccgagctttgcctgaatctccagcaatgtgtgagcccctaatgatgacttgtaaatgctcatccattggtggaggcattagtaggtcttggttattgtttgcttgggcggcccgttgattttgatcagccttgacgtacttttgcatttgcgggttgctttttcttattaagaattcaatttcccgcttcaggttgttgcactcatttgtgtcatg

SEQ ID NO: 140926 - DNA, 699 bp, Cannabis sativa
ggattagggtttcataagtatcttgggtagtgtgcctaattatttagggcgttacagctcttatgccattttttggtatttatttcaccaggatttaaatttactaacatgtatattgattatagaactataatctaacattccaaatatgaagttcctaaaataatgaaataaacacatataaagttactttataaaactttatattgctggcagaaaaatataatgactcattccattcagatctctaaactttactcctttctattgtagagtattactaagataagaacttggatcttcttagatgatggaattcttcacaatcttctccactatgattgagtattgacttaaaatgtgtgggcaagtactcactcactataggacactcaaaattatgaagaagaaggaaaggaggatttcaaaatatgagaggctctctttattttactcagttgtctgacaaagtgaaaaactagtctagaaaataagagccatctctttctttatataggatttcatttagggttaggatttatttatatataattttaaaaaaaaaagataaaataaatgctccaatttgaaccctatggtcgaactttttagtgggccctataggtttcaattttgtcatttatttaagaacttatcttttctttcacaaatgccatattttaattctaatcctataaa

SEQ ID NO: 140927 - DNA, 714 bp, Cannabis sativa
tcttgatcttcagatcaagcgtagtatatttgactcaacccaaatctctagaactgtaagtctgtggtaagctactgctttctccaccattacttcctttgcgttcataaaacattgtgcaacattatttactatatgcattactcatttaggaatactgaattctttactgcttataaagtacatctaaataaacagaagatgtccctctaattctttccagaatggaatagagattacacaatgtagaatttcttcagttaaataactttccagtgttttcaaaattacaaatttatgtatctttactgatggagcttaaattattatagatggacttttacattctactagaataattcctccacctccagagtaaccaccatctcagattctttatgaggttgtgtagatgtaaggacctattatctaacatataggtcactttcagaaatctttcttgactgtcttttaatgttccttgtttgattacatcttagatggatcctactcaacagtaggagtctggctaaattcatacataaaagtacatttaacctcttactattgtttttgagagatatcttgttgtgacatattatcttgatctgaaactgtaaattccttctagactaagtcatcaacatagcaatctagtatttaacattaatgttcaatacttgcttaagattaagtaatcactagagataccat

SEQ ID NO: 140928 - DNA, 1042 bp, Cannabis sativa
catgtcccaagaaactcacctgagacaaccaaaattcacatttcttgaacttggcatacaacttatgctccctgagacgttgtaacaccatccgaaggtgcctttcgtgagtctcttctgagtctgaataaattagaatatcatcaataaaaacaataacaaagtcatccaggaagtctttgaacactcggttcatcaggtccataaatgttgctggggcatttgttaatccgaaggacattaccagaaattcatagtgtccataccgggtccggaaagctgtcttgggaatatcctcttcccgaatcctcaactggtgataaccagatcgaagatcgatcatggaaaagacggtctttccctgtagctgatcaaataagtcatttatccttggcagtggatacttgttcttcactgtcaacttgtttaactcccgataatcaatgcacattcgtaaagttccatccttctttttcacgaacaaagctggtgcaccccaaggtgaggtacttggtcttgtaaattttaaatccatcatcccctgtaattgaacttttaactttttcagctccgcaggtgccatgttgtagggagctcttgatacaggctctgcccatggtattagctcaatctcaaaatcaatttcacgtttcggtggtaacctcagtaactcctctggaaaaacatccaaaaattctcgaaccactaggacatgctctggtcccgctggtggttccctggtaacatccacatcgtttgctaagaaaccgatgcacccctcacacaacaaatctcttgccttaaatgctgaaattaagggaattcaggatccctgcatcttacctacaaatacaaaggggtcctcgccctcaggctgaaaagttaccatctttcttttgcaatcaatagtggcgttgtattttgcaagccaatccatacccaaaatagcatcaaagtcctccaaattcacttctatcagatcaactgataactcccttccttccacaattactggaagggatcgaacccacctgctggagat

SEQ ID NO: 140929 - DNA, 1514 bp, Cannabis sativa
  modified_base (533)..(537): a, c, t, g, unknown or other
  modified_base (1366)..(1374): a, c, t, g, unknown or other
accaacaacttgagatcactaaatctttgttaaaaccagcttgaattaccaaggaaaataccaaatctttgctgctataagagtggccgaaagagagagagtttgagagaaaaatgggtgattttgaaatatttcctttttctttaaattttggtaaaatgaataacatagtctttatttaatttcctcagccacaaatcaataataaaagttgaataaaaatattactaagtccactaaaggacaaaatacaaatggggcaaaatgaccattttgcccctccacacaaaaataacataaagggtagtaaggggttatttgggaaattctaaattcctcaccaatcccgacattcccaatgtataacaatactgccccgctaaactagaaatactaagttgtgattctacagagccatacaccgcgttccatgttgctgggcaccgaaaatgcaaaattatgaaatttcactacatgacataaaaatgcattcagaattcaaatataacacataaataattatttaaatatcnnnnnataattttcataattaaaccttaaatatctgctaatttccaaattaaattaagcggtctttacatggagcagaactggtttctaaagccccttatagaattgctccagctgagattaaagaattgaaaattcaactccaggcgttgcttgacatagggtttactcggcctagtgtgtcaccctggggagctccggtattatttttcaagaagaaagatgggtctctacgattgtggatcgactatggggagttgaataaactaacaatcaagaataaatatcccttaccgagaatcgatgatctatttgatcaacttcaagggaagacggtcttttcaaagattgatctctgatcgggctatcatcagttgagaatccaagaggaggacattccaaagacgactttccgtactaggtatagacattatgaattcctggttatgtcgtttggactaaccaatgctcccgcagctttcatggacctgatgaatagggtgttcagggatttcctcgatatctttgttattgtgtttatcgacgacatcctagtgtactctcaatcagaagaggagcatgaattacatctccgaatggttctgcaacgacttcgagaacacaagctttatgataaattcaagaagtgtgaattttggttatctcaggtgtcctttttagggcacattgttagcaaggatgggaacaaggtggatccaggaaagatagaatccgtcagagatcggcctacgccaaaaacagtgacagaagttagaagtttcttgggtcaagccggttattatcgtcggtttgtagaagggttttctaaaatctnnnnnnnnntaaccgagcttacaaaaaagaatcagcattttttattttcagacaagtgtgaaattagttttcaagagctgaaacagaggttgattacagcaccggtgttagctttgccttctgacaaagaaaagtttgttgtttattgt

SEQ ID NO: 140930 - DNA, 604 bp, Cannabis sativa
tcttgggctttttgaagcttttccaatcttgttaacacaacatcatctgtgtttgtcagattggtactattattatcatttcgcaaggtttctgatctgatcgattgtcttgctctcgggtatcagagatagacatttggattaaataacaacaaacttgagcgttttcctttatgtatttataggaatcagtatatatatattttaaggaaaacactccccagtagagtcgccaaaatgttcaggggttctagccaaacatttaataatataaatatatattactttaaatatacacatatatcatatatatactgttttaaataaaaaataagacacaaatttacgtagtttagcaaattgtatttgcctacgtctacggtagcaaacagtcagctgttcatctttattaatatgaaatattacaaggatcaagagcaaatgatgtctatattcttacaaaaaaatgatcaatcttgggcatatatggcgacctagattaacgtatttcgtagataagggaggtgtatcagaccatataactgcgtttgtaagaagaaagaaatgattgtgaatataagaactgtttggttttatgccctaa

SEQ ID NO: 140931 - DNA, 778 bp, Cannabis sativa
aaattgtgttatattttatacaaatatttagtttgtgatatatttatattaatttttagtattgtactcaaatacacaattataaaattcgattcatgaaaatttatgttcaattaatacttctattgaaataccaaaaaaaaaaaaaaaacatttatcactaattttattattatcttataatcatctaaaataatataaaaaatgtaaatagtttaatattaatataacgttatggtctatagctatatatgttaataaaatattaaaaaaaaaatactgtatgtatagtgatataaattttagattatgctatattgtattttaaatttagtatgatttctgtaatgtatcaattttggcacaacttttaaaatagtgttggagcaagttttttgcaagataagttatacgcataatctatttgatgcatcaccattagagatacacttatgcaactctttaatggatgattgatgtatgatcattatcatgtgagtgccacactaataaccatatgataattaaattttgttttgaatatgttaagtgaagtttattttactattaagtatattatatgatatactgaattaaaactcaatcatggcagaaagtggagttggagtcagattgcttaatagcagtacaagttatttgaaattcattacctatattttattcttttgaggttattatagaagattatcgtaaaattcttccatttttatgttggaaattattttaccaggatcttagatctgctcacaagtatgtt

SEQ ID NO: 140932 - DNA, 772 bp, Cannabis sativa
tgaaattatttattatttgtgtgagtggctttttgttgggatgataatgacgttttattaattatcagtctccgttttcattgattttctctgatagaagaaacgaaatttttgtaagattctatttctatttcttaaatttaccctttattttattattattattaatttataggtttcttttgaatattaaaagaaatgtaaattattccaaagttcaccattattaagatttcctgagatatgctcaaatcagatatattagatagttttatatatgtgtatgttaaaaattatatataaagagacagataaaatctgaactgtataaaaataatatatatataattgaggtaattaagttaacccctactaaacaagatattatgaacttaactcttggcatcatagtgttactcatatctatataataaccagttaattatagtactgttactatatttttagagtactaacaaaaaaagctatgcaagaacaaatatatgtatatatatatattatatatataaatatcagaaaatcagtatttacattactttggtctctctttaaaattcttatttatgataaaaaatttaggtacccaaataaaataggataatgatgaggctttcatgataattattatgtgtttttcgtgttggattactctttagctttatgactcattattttactttttacttcaaaaaacttattattttaatttaattagatggagaaagaaaaaaatatttgtactaaaagtgat

SEQ ID NO: 140933 - DNA, 833 bp, Cannabis sativa
  modified_base (464)..(473): a, c, t, g, unknown or other
gtttatctatgtaatctgttatatatataggattattctttatatcaatatcaaagtttgatcaaattacggcaacacattaggattaatatggagtaatatacaagaatttgaattactctacttattacttattattaaaatcgagccatatacaacaatttgttatggtatttgagccaaatcaaacaatgtcaaaagcttgtgacacctaagaaatataagagtgtttgcagtacgggtagtataatttttaactatttgttcaaactaactcgtatatgcagtttttttaatttcccaaactacacttacattgcgaaattaaaaaaccacaaaaattgcactgcgaaaaatagtgcagtgcggtgcgatttatacggtttagactatcactaaataattaaactatcacaaatacaacaaagcttgagcaacccttatcaaaaataccataaggcttnnnnnnnnnnatgaaaaaaaaaaaaaaatcaacaatacaataattagtgagcttgagttggactttcacatattgaacttaaataaatataaacattgatatttttataatatgcggtgcaatgcggtttaaatcgcatattaacaattcaaactgcaaactgcactgcactgaaatttcaaaccacattttttttttggatgtagacggtttggacggtgtggtgaacacccctcctaaaaaagaagttcttggttgacgagtataggcccccacttaatagaccactcaatgaggctcataattttttaagggctatttacaaaaatatgggaaaataaaaataagttttgatatatatggcataaaa

SEQ ID NO: 140934 - DNA, 666 bp, Cannabis sativa
ctggttgccttttcaaataataaatttaggttttgttgtctaaaatatttacttgatagacggttgtctcatctttaaaagtaaaatttacattcaaatgtgttatcttataatgtgacgccttaataatttacttgatagacggttgcctcttctttaaaggttacataattatgattatgcattgaaatttacatgtgacgccataaaaatttacttgatagacggttgcctcgtctttaaaggttacataattacgattatgtattgtaatctacatgtaatgccttaataggttttttgataaacggttgcctcttctttaaaggttacataattatgattatgaaattagctactggttgccttttcaaataataaaattagcttttgttgtctaaaatatttactagatagatggttgcctcatctttaaaagtgaaatttatattcaaatttgttatcttaataatgtgacgccttaataatttacttgatagacggttgcctcttctttaaaggttacataattacgattatgtattgtaatttacatgtgatgtcataaaagtttacttgatagatggttgcctcgtctttaaaggttacataattacgattatgtattgaaatttacatgtgacgccttaaaaggttttttgatag

SEQ ID NO: 140935 - DNA, 672 bp, Cannabis sativa
aatacaacaaatgagttccctcattcaacctgccatcttgacacaatcctttcattaaaatcctataactttccctatccggacaacaaccctgataatccatctctaggaagatttttaaagcaacatccgaacgacccttttcgcaaagcgtactcatgaacaaattcaaagaccgaattcgagagctcacttcccatttacaacaattctctaagaaaaggcatctagcatcatcaaacctcaactcattcaccattatctgcaagatggtattgaaagacatggtccaattcacacagttgaattctggaatattcttaaacagagaaaaagcttcatccatcaatccagctctagcatatgtcttcattgcagctacaaaaactgaatctttgcactcacatgagtcatttttcatctgattaattacctccttcatctcactgattctacctgagtttccaaggattccaaccatggtttgatagactggaccattatgacggtaacttgggtacatagatttagcttcattaaagatttggagagctgttaatgggtttttctgcttccttataatttgggagaggtctgtaggtgtcaaaatcctcggccaccttatacacatggcgtttcaacaagacaaaataatgccaataccaaatctca

SEQ ID NO: 140936 - DNA, 507 bp, Cannabis sativa
  modified_base (101)..(105): a, c, t, g, unknown or other
gaactatccaatcaacccaagttttaataaaaccaataaaacttaatgtaagcccaaataaaaagtctaacaatagcacctttagatcgaattattattannnnntattttgataaaaaattagttcaaagtcccatttgtaccattttggaaaatacattatctattttggcatttaacaaaacagagggtccaattagtaacttttacaaaacacatggtccaaaatggtatttattttattttatatattcttcttattatgctaacaaaaattattatgtctattggttctgtctccacattttttttttttatataataaaccatttatttcttaaaaattcgtagtttatattaattacagtaaaaattgataacaaagatggtaagtaatttttttttaaataaatactaatataacaacaattcaaattattttttttttaaaaaataataataattaaattaaaaattaataatatttttaattattaatattatttt

SEQ ID NO: 140937 - DNA, 780 bp, Cannabis sativa
agacacttagcgtataatgtacagtatacaaactaagtataacagatgggtgaagcaaagcgagaaatagcgaggcgtccacctcgctataggaaggcatgcatgcgaaaaaagatcatctcgccaccaaaaactatggttgtcagattttaagtaaaaacgacgaaatttgcattatcaaccatgaaaagacatatgatgagctctaactcgctatcaggattaattctactctattcccatcgagacattccaatacgatatggcttacaacatatttaatacacgttcattttgacccagcaaaagcgggatattcacagctgtgtgaaatttaaataaaaactgcatttacttaacatgatatgtaatcagatcccatatttcaggggataatcattgtaaaaagattacagttaactttgtaattaactgcgtactatgtgattataaatagtggaaagtaagatcaaaaaggagacgaaaaatcatacaaaaaaggccctgaaaaactatcagaaatctaataagattgactcgtggactacgcagaattttaattgcaaaaccaccgtaaaaaatcttttgtgttcatagtttttactttacagcttttatttttctgtgtgagattgtcactattaggctcaaattttggttaacgaaaatctgcgttaacatagtccaagtgggagaatgttatactttttatttgggcttacattaactttattggttttattaaaacatgagttgattggatagttctttgttgtgtta

SEQ ID NO: 140938 - DNA, 714 bp, Cannabis sativa
gagtatcaccatgaatagtgtgggctgatactcaaacacctttgaacaatatttgaaagagtttttcttagtgaattttgaaatatagaagaaacaagagaagaaagttgtctaacattgaattaggttaaaattagatctatcttctcatcacttttttatataggcattcacttagggttaggttatataaaatgggctgaaatagaagacttgggctttaatcaactatagggcctaaatatacaatgggccttagagttagatttttgccactttatttcatttaaatgaaaataatgtgtcttttcctattttaccacttatctcatcttattatttaaatatcaacttaattttaataattattaaataaaatataatttaaatatatttattagttagacccacaaagtttactaattaacaaataaactcctacttatattttctactcaaaattgcccaaaacttggtgataattctcaaacaagacatagtctatttttaatttcgaattgatttattaaatcaattaattgagtctacaagatgatattattccaaataacgtggggatcgtggatctatgtaaccaagctcctaataagtagatccaaaatttatcgagtaaatttcttattttattaatttctcctgtctccactatagattcagaattgcgctcctgatttcatagaatgctatatatat

SEQ ID NO: 140939 - DNA, 603 bp, Cannabis sativa
tggtctttgtctatagactttaaagaaccagtgtccttcaatgttttacgaattcaggagccaattcaaatggggcagcggattgtcgagtttcaccttgagatattcgatgctgatgaggtgtggaagaaggtagcaaatggcaccacagtgggatatcagaggctgttgcaatttcctactgtaaaatctcagcatttgagatttgtcattgacaagtccagagaagatccactgatttcgtacttgggaatttatatggatcggtattcatacccgagcaaccatgtattcaatccacaaggaagacactacaagaacaccactgcatttattcaacccattgttgtcaacgcttctcatgccacaatgtaaatttttatagatacgttgttaatgtccattaacttttcttaaaagtatatttttaaatgttatgtttgttcacattcttaatattatctttggtggtgataagtaatgatagttatgaaaattcttctgagttgtattgttagtaatgttgtgtttcatgttatgttactgtatgttttgtttatgtttagtgactatattattcaattattcaagtagaacaatcca

SEQ ID NO: 140940 - DNA, 664 bp, Cannabis sativa
atattttaggggtatttttaactacacttataaattaaggggcatcatagtatagtgtcataagtacagggactaaaaaagctaattattcatttatttattcgcctctcataaatgtaaaatgatataatttttgtataaatatatatatatgtatattattatgatcaatttacaaatgcacatatatagtgtatttcttttctcctttatatatgtatttatataattatatatatttacctgactttgttatcaccggtgttgacagggatgatcagagcttttgtttcattgttgattgaaatttgtgtatagagcttgatcggtgcttcaagattatgtttgtattgctgctagaagtggggcttctgtttttttcggtgccaatcttcttttattgctactgtcattgccggaattggtggattgtatactgctggagttttttagatcgtcgaatgttgaataaaagaaagaattgcagtagatagagagaatcgtaatctttcggagaaagagagagagagagaatcgtatatattctgttgagaacgagaaaaatgatgaatcttaaattcagattatgtttttaatgttttatattgttttttttttcttaaaaccatatttttagtttgattggttagataatgccatattt

SEQ ID NO: 140941 - DNA, 898 bp, Cannabis sativa
ttgtatcactttcaaataacatagaaaaaaattagtataaaatttagtatacgtgcctcgcacgtaatttttttgctagtatatatataaacctgaaatatgaggcggtattgtgacagtctaaaattacttcaaatatcccaatctactttctttttaattatctcactttctattttttatattaataaaaaaatataccataaatattttattgtagctctcaattttttttctagctaatcttttgtttttttttttcaaaagaataataatatatatatatatttataatacaatttaacaaaaatgtaatataaattttaaatcaatatataaaggagaaatacaatgtggtaacataacactctatgatctctctatttagcattatttgtcctttctttaattttctcatttttttttatttttattaacttcataaatattaattcatataaaatatatatttttattttttttctataattttctcatttttttttattttttttttaaataactctttattttttttttcatcacgttttttcttcttttttttttttaattaaaagatctaaaaaatgatacatttttttttagactttttagctataacatttttttatttgattttttttttttttgaaatctatatatcaatctaacaaaaaacataattatctacatttattctttttcaatcactttctttttattttctctgaaggcaaatattataatgggtcattcaaaaaaaaaaaaatataataaggtatacttagcattttttcgttaacagtaattaacaactattcagttttttttttttttttgatgaatcaggaaattatattgcacaaaacactttacatcctaagagcactccaaaaaa

SEQ ID NO: 140942 - DNA, 538 bp, Cannabis sativa
gaggaaggcgaggaccaatacgcgcctcaagcatggcatcaagtttcttcttcttctcccgaaatttagtaataacctcctcacgcttgggattgaagtcgagcttgatactttggccatttgtcgaccaggccatgtagatgccgtcgtcgaaatgcttgacgcagcgcttgcaggagacaggggacaggagctcatctcttttagccttcttcaaggcctggtctctaaagtcctttcgctccttcatctctacggccaagttagccttggactggaagttcgcctggtgcaactcctctaaggacctcaccttggcggccatttcgtccatggcctccttagcctcctgaagctcgggcctggccctggcgacggcctcaccttccgccttcagcgcctcccgatgcctcgcctccagctcagcctccctccgttgaacttcctctcggagcctcgcctccgcctgggcttccctttgtttggcctcctcctcgagcttcgccatagcaagggcctcccttcgctcggcctcctc

SEQ ID NO: 140943 - DNA, 688 bp, Cannabis sativa
agagctgcacctcttactgaagtactgtatgtgaaagggctcaaggaaaacttgataagcatcagtcaactttgtgatgcaaattacacttaagtttttctaaaactcgctatttagtttcatctaatggacactcagtcttataacaaggaagagatttggacaatgttgtcctatgtaatagtgcatcactggataaatcagatattgggagttttactactattctaaaaaatttaaccaaaagaaatagcaatattaaatcatcaccttgtctttcaagagcttattcattattattagtgttatggtatggtcttctaaaccttttattgttaaatcttggatttaaataaagaaaggacaatgtttttgtcctagtgtttgctaggtttgatcatgttgtacattgtactgccttattctaaatgaaatatgatatatgatatgttgtctagtgttcctcattgcttgtttatgtatcatcacttgtgataataaaagtacaataaatattcctcaaaattcatgttgactcataatatatagataataatatatagataatagatataattttttctagaattggttgagtaaaaatacattggataattacgtatcattcttgatgctctcttagatatttgtttactaaagccttgaattctcgtattaatgtgtgcaa

SEQ ID NO: 140944 - DNA, 574 bp, Cannabis sativa
gttgggaacttgatgcacgaatggaatattgatgcaacaacttataggtcatataaggctggtccgcctaacataacattaaaagctgatggaacatcaattattagaaattgtgccatcacagttatgctctttggagcttatccaacagtgaggggtagacaaatttgcccttaaggtgtaacactctggccgattaaaccatacaccgattgggtacaggggatcaaatatttgagttggagccccatcttttcatatggtatcttgaacataatgtttgccgaggctccattgtcaatcatagtccgggccactgttttatttgctatctgtacttccacgactaatggatcattctatgggaagcgaacatggataacatattcttcagtgaaggttatattgggctcccctacccgtggaatttttggcttcctttcctcaatggccaaaactacttccttatattcgtgttacaaggttcgagcatacctctcccaagctttacccgaatctccagcaatatgtgggcccccaatgatgactagtaaatgcctgtccattggtggag

SEQ ID NO: 140945 - DNA, 744 bp, Cannabis sativa
  modified_base (35)..(35): a, c, t, g, unknown or other
  modified_base (715)..(719): a, c, t, g, unknown or other
cgctcttccgatctttgtgagtagatctaagatcntggtaaaataatttcctacatatagtgcatctcgcatccttcctttaagtgaagtataggcgagatggttacttcaatgcgttaagagcgagatgaagaatgttgaagttgttgtccttattcttcgaacatactcatgagtatattggtcaatgagctgcaaactcattatctacccgttccaaacagtactattacgtactctgtttatcccgagatggacttattcatctcgctggtctcatcagtcgatagttattactcatatctcgctattgtctatgtgacagcgagtttgagtatttctactaattatatttcctaaggcaagtcatttaagtgcatttattaatatgtaatttgagctgattcttggatgttcgttatgttccttccattgaccaaactacatatatacttacaaaggccttgtaccaaactacatatatacttacaaaggccttgtccaaggatcaattcaagtatttcaaattcatctgtgtgtgtaacataccctttcgtttgaggggggataataatgttagtaactgtcaaaatgttagttagttagcttttattctttaactatttttagttgtagcagttaactatttttgttaactaactttgtactgctgggttttatgccctaaatcaaactctttacaatctgattagtnnnnnatataagaaatttgaagtgatttat

SEQ ID NO: 140946 - DNA, 598 bp, Cannabis sativa
ttattattattttaaaaaccaataatgaaataataataaatttatttattactctttttttttatcgttcaacaaagtcgatgtgatatataatcaaagaggaaaggaaaaaagacaaacattcttatgttgtcaattttatcattgattttttatatttctcttcgattcactagacttcaaaaaataagtcagtatgtgttatacaatcaaagagaataatataaatcttcatggtgttatgctgccaaaatttttacaatatgggaattttaataaaattttcaatcaaataacatacataaaaaaaagctgtgagccgaaaagatttatctaaaactatctcagttgattgatctattcaatcgcatgaatctctctgctaaagtcagatgtaaaattatacatacactatatatgtatgctcatgataaaaaaaaatgaatgaattaatctgatgaaagaattgaagtcaagaagttggattcatgcgtgtccaatcgtgtgcctttgtttgaagaatgagcatgtattatatacattatggagttacaaaatttgtgtagaatgatctcaaaataggagttgcaaatccttt

SEQ ID NO: 140947 - DNA, 629 bp, Cannabis sativa
  modified_base (350)..(359): a, c, t, g, unknown or other
attcaaaagtctggccaaactaatcatgctggtctaggttatgtttctactcaatttgatttcaatacaacatttgttaaatctgatatttttgcttctgaaagagctgtttctacctcacttgattctgtcacttcagaaaaacggtctgttgttacagaaaagagacagcaatgtaagtttgacaattccaaagggaatagaagatgtttcattcctatttgctatttttgtgggataaaaggtcacattcgacctaaatgcatcactatgcaaaacatgtttaaatctaattatcttgaaaataaacatgttttacaaaaacaaaaatgggttgtcaaaaataaatnnnnnnnnnnttcttcttgttttaaaattattgctactaacatgtggtactttgatagtgcgtgttctagacacatgacaggtgaaaaagaatatcttgagaacattagacccatgcaatgtggagaagttacttttggtaacagtcttgttggaaaagtcatagggataggagcactcaattttgaagggcttcctagactgaagaatgtcatgttggttgatggactaaaagctaatcttcttagcattagtcaaatttgtgatcagggttatactgt

SEQ ID NO: 140948 - DNA, 796 bp, Cannabis sativa
ctgaaatttatttggaatttgagtattgaatgactatagtattgaatgactattttacccttgtgagggtgtatgtgagtattttagccctagggaggaaaatggtctttgaccatatttgatttacatgaaattaaatggatttttgaaggaaaaaggattaattttctggttgtttcttcctctcaccctctccctctccctctcttaccctcttatttttcaagcttgatttgtgaagaatttggtgtgattggaagcttaatttttgggagaaaatctttgttcttgctttgttgtgattttgaggtaatatcctatgatcttgaccttatttttagttgctgaattctgtgattggaagtatgaatttggtgataaagatgataggttgcatgctcagtgaattggatgtttaagcttgttaatctcttatgttgtgttggtttgagcttagagtataactcaaggttgtttttcatgcttaatccaattgttgcttatggtttttactgctggaaaaaggtttggttggtgttgatgaagctcttgttcaagagcttagtgtagccatgattgagcatgattttgaggtgtctttgctacattaattcttgagggtttgttgctggattttaatgctttatgctatgttttaaatccctagtgattactagtaactttgaattatgatttggaagttttggttatggatttatgtgagtttggttgggtttggaagctgaaattcgagtagaagcttgctggtttctgggttctgcacccagagcatgcc

SEQ ID NO: 140949 - DNA, 730 bp, Cannabis sativa
  modified_base (44)..(83): a, c, t, g, unknown or other
atttttgtttttcaaaaacaaattttttaaaaacaaaaattttnnnnnnnnnnnnnnnnnnnnnnnnnnnnnnnnnnnnnnnntaccaaacgacaccttaattaattcgctttaatatagattggcgttttttttcatcacgaaggtaccaagtgtgtaaaattaagttacatcagtatatgtgtacatatatatatatcgtatcctctgatacgttgcttgttctctctatttgtgagaggttgaggttttttgtttgatcggtttgtgctttgtttggtttgtggtttgttattatggtgtcttgtaacaatcgattggtgagttggagaatcaatggaattacgctttttccattgaagatgaagatcgatgatgaaaaaaaatttattgagtattctattttattgattggtaggaaagtttctatttggaaaggtctctggtttcaatatatattctaaaatcaaatgtcgttcttattatgaaaattaagcatgggaatgtatattattaaaaaattggaagataatttatttctgctccaattctatcatgaagttgatattcgagtgataaaaggtagcctgtaaacttattgtaggacaagctggcagttccaagaatgcccctacacacaacaccaacgttcaaaaaacaaagggcaattctgactttttctctttgtgcggatccaaagagaatattctctctattatccgaatatgcc

SEQ ID NO: 140950 - DNA, 577 bp, Cannabis sativa
tttttctttcttatttcttttcctattcttatcatttgttttcacttattaattaattaagcatacaaaaaaaaatggtatatttaaaaactaattattcggcccaaaatgtaaaatcagcacaggaaaaaagaagccctaattggcaaaccctaagtaattttccatttaattttaaattacttttggcagccattgtttgtctaaaaaattccaatttattaactcttcttctcctttcttcttacggcagaaaaaattttttgttatggttgagtaattctattggatgtctctcacgttttgtaagttttttttcttcttcttcagataacgggtagggttatggttgtaatgagtttttgaagtctattatttggaatcaaataattgaagaaggctacaaatttgggactatgtgggaaagcaatggagtgattttgaatgagaaggtttcggcaatgacaggtatttaatttttatgtttgtatgattttgaacatatgttcttttgttccatgaaaatcaggttagggttatattcttaggaaagaatttaataattttttttcctaat

SEQ ID NO: 140951 - DNA, 838 bp, Cannabis sativa
  modified_base (189)..(201): a, c, t, g, unknown or other
  modified_base (701)..(708): a, c, t, g, unknown or other
ggacccggactccaaatctgaccttgacccgaattgggagccaaacgcggatcccaacccaaacttggactcgggacccgaaccgaaacctgaactcaggataaaacatggaaccacactacggactcagaaccagggtcgagacctagaaccgtactccagtctcaatcccgaacccaaactcagaannnnnnnnnnnnncctgaactagaaccagaccgagtgtcgtaagagtgatccagatcttgacttgggattcgcgtaacggggcttggaacagaccagtaatttgtttctagatctgggacatagactaggaccaaaacccaaacgaagaaccaaacccgaacctagacctagacctggtacccaaaattagaacctgaacaagaattgccgaactaggacccaagaacaagacaaggaccgtgagaaggacgcggacccaaacttagaaccgaacacagacctagcctcaaatccaaactgagactggaactcgggcccggacacggtcgtacccagaccggaacttagacacagacctggacctaaatctgggacccgatcccaaacaaagacttggacctagatagggatctggatacaaacctggactcggtcgaagacccagactgggatcgaaatgcaggacctagatgtggaccgagatcctgacctggacacaaacccggacacannnnnnnncccgaactcaaacacccacacctagaagcagacacaaagctagactcggactgagaccataactggaacccagaccttgatcaaaactaaggacttagacccagaacttaatccagactcagattgggat

SEQ ID NO: 140952 - DNA, 705 bp, Cannabis sativa
tcaaagcatattgacataaagttcctagttgtgaaagaaagagtgtagagtggacaaatatccatagaacacattgggacaaactccatgacaacggatccgctcataaaaggattaccacccaaggtctttcatgggcacaatgctcatatgagtgtagtattgcttgaggatatcataatttagtgatatagtttgtattttgtttgctttatgtttatttaagacatttatgtatttagttattttttgatcaaaaataaagttttcagtttattcactctcttttatcatgtttaagtctgacctcactttagtttaaggaggaaataattagaaatatgcatgttcagttcacattgcatgtaatttccatgctacacatctatgattgatctatgtcatttggctatatttgtatatgtgacaattgatgggtttagtcatgattgatatgacgaagctttgatcctatatgagtacagttgatggacgagattgttgtgaatacctttacataatagtaaattttgagctcataaggttatacatttataaggtaacatatattgcccaagtgggagattgttggattaaaaatcttatggtgaacatatatgtataatgtatatgctattataaagtgtgatacaaaattaagtgaccaattatgttatgggtatcaaaagggtattaaattgtcat

SEQ ID NO: 140953 - DNA, 1129 bp, Cannabis sativa
  modified_base (39)..(41): a, c, t, g, unknown or other
  modified_base (206)..(206): a, c, t, g, unknown or other
  modified_base (313)..(315): a, c, t, g, unknown or other
  modified_base (388)..(389): a, c, t, g, unknown or other
  modified_base (415)..(415): a, c, t, g, unknown or other
  modified_base (739)..(739): a, c, t, g, unknown or other
  modified_base (1054)..(1062): a, c, t, g, unknown or other
aaaacctatctaaagtctctaactctactagtgagactnnntgttaaagttgcaggaaggatactaatttagcctttggaaagttctatatatttatttggcgttgttccaataatgaattaactactagtgttacttcctgactaacacagaagtagtttccaaaaagtaaagaatccaatatccttagaggagtagacatatanagaggaatttcacaatatctaggattttgtgattaaggatatgtaatggtggagaaagtttgtattgaatataacttgtcaaatcctgttacagagagaatactacnnnctacacttgatctagatatcaatgtgttgagattaattgaaatgcacttctagttttatattagtgcaagtgnnagtttgttgggttttctgccctaaanaaaacccatttcaatataataagatttactaattaataaaaaatcagaaatcatttacgttgcaaggttcgcatgttttatttcatgattatgtatttaatgtataaattatattaagttcagaatatatacatttgttcatgattatagtgtcgtcaacatagtggaatataatcataattatatgtttaaaagtttaagtcccattatttgtaagtacattggatttagattgacatgataatcgacaataaagtatacttacaccttggataagtgttatgtcctttgcaggacattggcaaagtttatcagtatcggatntatggagtatacattagattggactgatattgttcttagataagatatcataaatttactgttatatctttataagtcaatatcagtggttgatcttaggtctgtggatcttattcctgatatggtcaagttcagctcaactttattgtttatattcttcaagttgtttgtgaatgctaaccaatggttctggtggatactaacatcttggaaatatggtaattcaattgagtgggagcactaatcatagatatgaaatctatagcttctacaattatttaaaggtgaaacaataatttccttcgagcttggctnnnnnnnnntaaatgattgagatctcatttcattaattatatcagtttattgaatattatttataggtagataagt

SEQ ID NO: 140954 - DNA, 696 bp, Cannabis sativa
aaatcctaattagcctattttttatttctaaataatacttttttttaaaaaaaatagataaatgcattttaaagattagaataataaaattaatactctttaaagagcgtttggtacaaggtttgacttaatgggaatagatttaacatttcttaaaaactgaaaataaaaatattaaagtataggaatgtaagattacttttgtttggttatgcataaaaaaactacattactaaaatttaatatttttacaaaaaattatttgttattatataatcataaaaaatttcgtatatatatatgagtggaagaattttttcattcgaaaaaaaaaaattatatatatgagtataattataatgcttttcgtatattttttattccatacgttttgtttttaaatgtcattcacttgtattcaaatgtcatatatgggtgtactcttaatgggtattactcataaataggtaatattagaaaattttaagtttttatgattaatttgtttatttaattagaaaaaattctcatttttacattatatgggctaaaattggtccatcagctgaaaaaaaaaaaaatttaaaaaaaatcggcaaaaaagagttaatttgacttaaatattttttttatataaaaatattttcgatagtgtaaaaaaatgtatttttcgatatatttttttaattaagtagc

SEQ ID NO: 140955 - DNA, 778 bp, Cannabis sativa
  modified_base (484)..(507): a, c, t, g, unknown or other
  modified_base (554)..(560): a, c, t, g, unknown or other
ttttttccttttttgtatttttctttttttcccattaatttattttttaatttaaatttctaattgattgttaaaatattctgacaattaattgtgttaggtactttgatggaatgtctcacctatataaatatagggtctcattccccgagctcactactcattctgtaaaacacagtaaatccatctaaagagagtagagagaacttgaaagccgaattacccacaccaataagttttttttttttttttacttttgcagatccaaagctagtgtgggattgaaactcaaagaatcaatgactggatgtattttgatcttattattatattgtgtatatctttatttaattctgcatttcatatacacatatattttagtttatttacataaatttctaatagttggtatcataacaattttatctctgccttaatttatattttgagttttttatgtatgtatatctattctatataaagnnnnnnnnnnnnnnnnnnnnnnnngtttatgagaaattcaagggtgacttttatttatatttaataaaatnnnnnnntgttatttatatataataaaataataaaataaaaatagaacaaattccccattaatatattgggtgactttttttaaaaaaaatatatatattcaaaaataagagagaataactctcacgattaacttcaaacaaattgaaattaagccctttaatcaatccgaataattgatatagttaatagtaattatattgagaattttttttgcgtacaaatc

SEQ ID NO: 140956 - DNA, 691 bp, Cannabis sativa
accaatgtcgagagatcaattcgcaaggaacttcaaccgtgaggaaccaccggaagaagatctagagcgacgtaaccctcgtagtagaccccaaccaagaaacgaggagaattacgctgtgtccggctcttcgtcttcacaaagtcgcactcctagcaggtacaccaggtcaggttcggtggaaacaccgcaaggaggaagataccaagtccacaggggcgatcttcgtgatgaccttaatgcagtttttagggtgcgttcctagacgcctcgaaacaatgaagaaccttgtgatccccgtttgggcgatcagggcataaacaaccgcaccaaccctcctaacgcaccagctgcgactactggagtcgttatccctgcaaatatagctgttgtagcaactgcacatgcgacgacttagggcaatgccgccctaacaggaggtatcgatcagggtatacttttgcaagctctgaagataatcgagcaacagagaaagcccatatacaagctgcatgggatttctccttttaccgcggaagtgcgacaagcacgattgcctaagggatttcgtttgtccaagtctttgaaatataaaggtactactaaccctatagactatctaaaaaaaattaatactataatggaagtggaccaggtaccccaacttgcaaaatgtcgcattcttgcggca

SEQ ID NO: 140957 - DNA, 1297 bp, Cannabis sativa
  modified_base (202)..(203): a, c, t, g, unknown or other
aggttttatttaattaaattatcagcttaaaacatagataaaaatcagataattttagttaattaaccttcactaaaagacaaaacacaaataggcaaaatgaccattttgccctccacttagccaaaagtcataaaattacttaggggtattttggtaagttctaaaatcccgactattcttgacattcccaatgtctaannatattgccccgctatactaaaaatcctaagatgtaattctaatagccaaacaccgcattccaatgttgtcgaacacaaaacatgcaaaaatatgaaattctatatatgacatataaaatgtattctgaattcaaataaatctccgtaaaatgataattcataactaacatgcaagtttcatacttaaatcctaattatctactaatttccaaattaaagctaagggatctttacagtcatggtcccgacactaactgggataatattgtgttgtagtctcaattaatttgttttaattaatcaattagaattgtaaataatgctatgtcttatttgtgaattttcaccaaggaaggacttaattaatattgagaagaaaagagaattcaaagtttatttattaattaaaagaccttggagggtctaattaatgaatatatttaaatagatggaattagtatttaaataactagagcaaaaaaatagtattattgaagaaagacaagtttgtttcattaaggaaacaaaataatggcaaaattctaactcatgggcttcactaagaagatcagccatgagatgaattataagccattggatctttctaatcagcccattaagctctaatcctaaacctaatgaatccctataaatagaaaagtatagatcttattttcataagacttcaatctcttttgtcaggcaactagaaaatagaaagagagcttcttcttccaatttttgaaattattcttcttctctactgaataatttgaagtccacgttgattgagagtatgcccactcatgtcaaagcaatacctagtatagtgtggaagactgtgtctaaccaaactaaaggagagaagatccaggttcaaatcttgataatgcactgctacagaaaggaatcaagtgctagagatctaaatggaaggagtcattattattatgctgccatcaatgtaaagatttcttaatctatcatgtgtttatttcattattttaagaaattcaagtttagaatgctagattatagaattataattaacatacatattagtaaatctagatcctggtaaaataacttccaac

SEQ ID NO: 140958 - DNA, 505 bp, Cannabis sativa
  modified_base (45)..(72): a, c, t, g, unknown or other
tatgagattagttattaagtaaatatgttataataataataatannnnnnnnnnnnnnnnnnnnnnnnnnnntaataataataataatagtgaaagttataaaaaatgaaaagccaccattaataatgaatgataattaattaaaaaatattaatacaaatattaaattttaaatattaatttgtcattaattaattatctttcattaataataacataaaaaaataagaaaattaaataaattcaaaataataagaaaatagagaacatagaatataatgcatagagaatgccacatgacatatgttgtactttcctttatatatatagaagatagaagatagatagatattgattctttcatttaataataatacaaagaaaactatttgtattctttaaaagttataaattaatgtaataaattttaaaactatttcatagatttaaatggtactaattataaaataaatgaaaaaattagactaaatatataattaaatct

SEQ ID NO: 140959 - DNA, 648 bp, Cannabis sativa
ctcaactctctatcctctattttgatcgacatagacgtaattcaccttttggagataacgaactctccgccaggcagtagggttccaaaccctgtttcataaccatcatgtggtctatccaatttactaaaaattcttgctgccacaaacgaatgagtggcccaagagtcaaacaacatagagaaataagagttgttgaccgagagctgacctgttaccactgaagggctagcttctacatcagcctcagttattgcgaacaccctagctcgagtgggtttctctgcaatcttcgatgcttcaattctgagctgggggaaatccctcttgtaatgccctggcatgccacactggaagcaccgctgccctcactactacaaatatcagaattcgcgacggtcctaaaaatgatttttttggggatcgtcgctaaaaaaattaagtaactatataaaaccgtcgagaaaaaattagtattcccgacggtttaaaattgtagtaaacaaaataggcgacatttttttttaataaaaggcaattttttaatggacctttataggcgacggttttaaaccgtcgcatatactataggcgactgtttaaaatcgtcgcctataagggtcaattgaaaaatcatcacctacttct

SEQ ID NO: 140960 - DNA, 747 bp, Cannabis sativa
tagaatcacatcttggtattttagtatagcggggcggtattgtcagacattgggaaggtcgagattagtcgggaatttagaatttcctaaattaccactcagtgccctttttgacttttagtatgggaggggcaaaatggtcattttgccccattagcctattgtcattttgtggctttagttaaattaagtaatctgattttaaatgaatttaattaattatggaatagtgtatttactcatgtttttcaagaaagaaatcaaagtaaggaaaatactcattttacaccctctcattctctctctctttcgaagtaacctagaggcagttagggttgattaattcttcatcatttcaagtaattctcagcaaagttagtcatttccagctgtaggtaagcttccaacaactctttctttagttttttttaaaatttatgaaagtggaattctgcatggatgtgttttgagttatgtagctgcggttagggtttaatgttgttttttggatgttaaatatgttgtttaagactgatatttaggcatgtagtagtggctgattgttgagttaaccaagctttgagttttgaaactcaaacttggagctttaatggtggattttgattctgtgggtttagggttattttattgccttggaaaagttctctaggttgtatagaacaagtctgaaaagtttggattggattggggttgaattggtcgagttatgaaaattttggtcattcc

SEQ ID NO: 140961 - DNA, 515 bp, Cannabis sativa
atatttttgtaaatagcccatataaaaattattatattaaactataaatataatttaatatttaatttgatcaatatcaatatataagataatactaaatgctagtactttttaacttttctaatcttatagatggagggtaaggcaggcactaccattggtgtgaatatataaatatgttgaaacttctagctagttcatttagtttggaaaacgacaaggttaatcacttaaatacctcttctccaaggtttgattatgacaagtgatctcaactaaaatgctaccatttcctctttatatgtcaataatttcaactttgttaactgaaaatacaggatatatatatatataattgagtgttactcaaatagtatttggaaaatttgaatttatatatttaattttacattacatcaaatatatatatatatatatgttaaactcaattttttttatatgtttaagattttttttaattatataaaaaaactaaacataaaagcttaaatttt

SEQ ID NO: 140962 - DNA, 551 bp, Cannabis sativa
aaaatattgaaaaaaaaaataaaaattccatgagtccctataatgacccatataaaaataaattggttagacccacttaaaaaaacaattaaaccatttaacaaaaatttatcggccgctaaaacattgcacatgagcgagcctaacattaacaattcatatttatggttcatgcagggcttgaccctcaaaatatgggtcaagtcttgcatattgttatatggacaatgtcacgtttccgttataaaaaagtgattttgtaaatactgatccggtaaggctatttgtacacttaacttttcattctttcaagaaaagatatatgaaaaattagtaaggttaaaattttatataattttatgacttaattattattaaataaaagatataagttatttcatacgtataatttaattttatttttaaacaattgccgcgaagcgcggaaatcaccaaagagtttaagtggcattccctacattttttattctatttttcttaatttttaagagcttgacattttctccaacaaaataaaataaaagcatatg

SEQ ID NO: 140963 - DNA, 727 bp, Cannabis sativa
gtgatgcgtctgattgaggtgatggacggtgatttcgggttggtgtttctggtgcacaaaagtagtgatttgagtgttaggttatgcgatgagacggatgtgggttggtagttcgggttgtggtcggaggttgctggtgcaatttagaggttgagtttcgtggggagagatggtgaaggtggggacgtggcttctgctggtggtaggctgattggtgatggaggatgtgcggctagggttggctcagacggtaaatggggaagacaatggctgattcttggggttttgtttttttctttttcttttttttttgaataaaaataaaaatacaagaaaattaaaagaaattaaaaaagaaaaaataaaaaaatatatttattatttatttattaatatatataatatattatattgttttttttttctgatatctatatatatattatatgtataaacatatatttttaaaaatccctaaatcactgaaatgaatcttcactcccattttaaaaaaaaaaaactaaaactccccgttgttgcagcattgcttcagcaattaaatatgttatgcatccctacttcaaaatgcggagccaatgctctaactcctaggacctgctgctccacacaatgaattctgcttttcagcatattgcacaactccattttctgcctttcacctgtaataacattcaccataccgttacaaatttattacaaaccgaag

SEQ ID NO: 140964 - DNA, 692 bp, Cannabis sativa
agtatacgtgcaatgcacgtaactccaacctagtatatatatatagccaacctcaccatttcttgtctcttgtttttttttttttttggacgcagtgaacagagtcacacatgattaacaatgcagcaaaccacaatcggcagtggagcctcctcgaaccaggatagctcatcgtctaactgaaggcatattttgtcaaaccatgagctgcagaaaacttattgcgagtcacataggtcaaaactgcccccgaaaatttagacaataaagctataacgttttcaaacaactccccgttacattaaaaaataccttcccataatgataattgtcgtcagaggtagccaacattagcctcaaattatgagctattattttttttatatatataaatacattaattaaatttatcttcaaataaaatttaattcaaatatatctcttttatgaatattgtgtccaaattatcctcacatcttcacattatcaaaacacaatttcaaacataatagaatgtattttttagagatgaacatgtaaatttgtgggaaagttggggcaaaattttagctaaagaagaataaagactatcgtaaaatgatagggataaaattagtagaatgattaaaaaaagaaataaatataataaattttaaaagagaagaggagccgtttggttgggaggaatgaaa

SEQ ID NO: 140965 - DNA, 557 bp, Cannabis sativa
ggaaacatagcttcattcataataaccatacataggccatagcgaatggtgtttgtcgagtttctattttttcaattttgcggtacgaccacaatacttcaggtagttcctttggccagttccctttagcttcttcgattcatttttttatggtgtctttaagtgtcttattaactacttcgagctaaccatttgattgacggtgtgccacaacggagaaactttttatgattccatgagtcatacaaaaatatgtagacaattggttgtcaaatagtttgccattctctgagatgatttggtgtgggagtttgaacccacatattatatattttcaccacaaagtccaatacttttttagatgtaattgttgccaaaggctcgacttccgtccactttgtaaagtaatcaaccgcgatcactgcatattgtactccaccttacctttcggcaatagtccgatcaggtctattccctaaatagccaaaggccaaggactttgcatctcagttagctcattgggcggtgcacaaggtatttttaaaaatctctggcat

SEQ ID NO: 140966 - DNA, 816 bp, Cannabis sativa
  modified_base (27)..(30): a, c, t, g, unknown or other
attaattatattttaaaattaaattannnntaattattaattaattttttgtaatttattacttttaacattttttttttgcacttaaattatttaaaatttttgtagcaaaactttataatttaaaattatacacaaataatttcataatttaaattttattatacttgtaatcttaatttaaaattatttaattatttaattttttatttaaatatttaaaaaataaaaagtgaaataagttaaagaattttctagaaaataatggctacactcgttgaagaattaaatatttaaaatagctcgcgatttctttccttttctcaaaatctacaaaagcgcctatagtgtgcataagacgatgtgtcattatcaggtacataacaattctattttggagttgttttgcaacttattgcttgttctaattggtcgtatagtttttttatttgtgttcataaacatccaataaaatattttgtgatagccatggagttggtggataattgaaatattcaaaaaagtatttgaactttataaaaagtggtcactttctttttagagtgttctcatagtgttgtagagaaaataatttgttgttgggcaaagtcctttgagacttgtctgacccttgagttgtccaacaaattcctttgagaattgaagcctacttggaaaaagtcaactacagcttcacaaaagttttacctcagaatgtaagtagtatttaaaaaaataacaaacaaacttttttggcaaggtacaaatcttgaatcaaatcaagtacactatatatattgagaaaatgtctttata

SEQ ID NO: 140967 - DNA, 1621 bp, Cannabis sativa
  modified_base (380)..(381): a, c, t, g, unknown or other
tatgtgtttaattttataatcgttttagaagttcatgtttaggatgttaatcaacatacttgtgagtggatcaaagatgctcgtaaaataatttccaacaaattgaaattaaaaaaaatattcatttataaaaaaaaatcatgatattttaaatagaaataggtaattattctaatcttttaaattttgttatttttatttaaattaaattgtaaaatcagaaaaaatgatattaaattatcattttattttattgaatatttaaatttttttaaaataacatgaaatttgaaaagttgttagcttttttttttaaaaaaaaaattcttaggttagttaaaaccttatttttcagatttataggtttaattttaattttnnttaatttatttatttatttttattgtggaagatttttttatttttttttttgaaactattgaattaaattaaattaatttaaaattaaataaaccctatatccaactgtccaacttgttgcaggtggatgtattttatattgtttgattgtaaaaacaaattttataaaacctattattgcttgatctaaattgccatgattaacttgttgacagatctattgatctgattttaacccgtggttcaattgtcaataggtcaaaccaataatttataacaggtaaattttacattcttctttcatctgtgcttggaaaacgataaataatcttgggtcctatgtcataacaataataaatcaataagtgtttatcccaaaacactacttatcactcgcctaagacaatctaggattatctaccaaactctgtggtataaatacactaaataaaacttatattttggctctaaactatacaccatattgtagagctcgtttcaagcttcgaaacaatttatacaatttgtgatctcctatgaaacacgaaaaatctcaatttttgcactcacaaaacactaccaaaacttattcaaatcactccaaacttcacagggcacatatataccatgaatactaccattcttacattaccgaaattaaaatcgaccccttaaatgtaaaacgccactaattctcagactaagctttaaaaagtgttaaactcgatttctaacccaaattctcctcaatttcagcaagaaaacaacaaaactagtcccatgactacccaagaacaatcctataaggtcagaaccttcatacctattctaattcacaaaacccctatatgaaactaattaaattattattttaaacttacttaaattaaaacaacgaaattaaaccttaccttaagcttccctgctttgagaattcgctatcctgctactaccggagcttagatcgctaagttttggattgaaaatcaaagaaaatgaatatagggggagaaagttttgtcgaaaggggagaaacgagggttcgttcgtttttactattctgatataatttatataactaacttaatatatatatataaactcaacgtgttttactttttaagttaacattataataatattaataaaaacttcattattaataattatcatttcttagctactaagaaacttcttcttctagggcgctacattaaatcctacatactcctaattaccc

SEQ ID NO: 140968 - DNA, 522 bp, Cannabis sativa
taattgaatcaattgtccaagttcaaatatcgtgtttaaaactattattaatgagcttatttctcttttagctgtagttggtggtggttcttgttgtgccatttcgcatttttcaaatggtgtagccacacactagctaagtctgttactagttcgattggagtccatgtgtggacaaatgcgtgtcctagattctcaagtgcttttgaaacatctgatttgatttaacatattattgtttttcctcaaaaaaaaaaaaaaaatcctaattcatgagagtaaaagtagtgctctcacctgagaagaattaagaacatctccaatggagagttataaatgcggtgtattgccattttttagaatattttcaaaaaaaaaaaaaactctaatggtgatgtaaaatgtttaccaaaaatgagtctagctaaaaattgtgtcaaatttgacacaaaagataagattgtcaaattttagcccacaataaatactacttttttgattatatatttgccactcattaat

SEQ ID NO: 140969 - DNA, 1667 bp, Cannabis sativa
aagaaccccaaagttttctttgcttctcaatggatccttgtgtggattttttagtgctaaaagaggcttaaggaaaggagatcccatgtctcctttgccttttgtcctaggcatggaatatttgtctagaatccttaagaaggtgggagaatggccaggttttaagttccatgataggtgctcaagtctgaaactcaatcacctctgttttgctgatgaccttttaatattcagcaatggagattatgtctccattatgttgatgctacagggcctgaaattgtttccagcaagttctggccttcttcctaatgagcagaaaactgctatctattgttcgggtatggcagaaggagaggtgaacaggattcttgatgcatcaaaatttaaaagaagtactcttcctttcaggtacttgggagttcccatatgttcgaagaggattagtaaagctgaatctcaggaacttcttgagaaaatggtgagtaaaatccggtcttggagttcaagaaacttatcgtacatgggaagagtgactttgatcaattctgtgttgatttccatccacacatattggtctcaaataatgatcttgcctaagaagctacttaaagatatagaagccatttgccgttccttcttatggaaaggcattcaaggaggagtgggacctggtttgatagcatgggagagtgtatgtaattcaaagaaatcggggggattaggcttcagaaatattcagaactggaatactgctgcacttggtaggtacgttttggatatagcaagcaaaaaagattgcttatttgtgagatggatacatgctgtctatttgaaggatcaacaattgtagctggtattggaagaaaattgttggagtcaaaaatcgcttgaaagagaaaactgatgctgctggttttttactgcagaagtacaaaattcaggagggatacaacttgttattctccaacaatgaggaagtttcttggcatagagatgtatgggatagacttattattccaaagcataaattcattatttggttagtcatgtggggaagattaaacacaaaagaaaggctagccaagtatgatgtgagtatatatgagacttgtctctcatgtgggaaggagaaggaatcaattaagcacctattttttgcttgtgactacagcaggaactgcctccaggaagtcaaaaattggctgcattggagattaaatgatgaatcggtgcaaggcataatgaagaatataaaaaataacaagagcagttcagcaacgagaagaagcatgccgaaggttgtaatagctgggctgatttaccacatttgggaggctaggaacgatgttctatggaaccacaaaagatgaggcacatacacaggcgcagtagtgaagcacattcaaagggagagtaagctcaggatcatagaaattatgcccaagaaaaccaaagatgtagagagagaatggattgtgaatatctaattcattgatagatagtgtgattgattcggtgtaattgtttgcatagatagtctggggatagattgaggagttttgatcattgtaagtagtcaaaagttgtaagttgtcaaaattgtaaatattgtttgagcaatacaagtaccttattcatcaaaaaaaaaaattacaaaattaaaa

SEQ ID NO: 140970 - DNA, 519 bp, Cannabis sativa
tttatcctattagcccacactaatccttgtgtgtggtgtagatctagaaaatcatagtgtgagtttgtcatcaccatcttaaggatacaacttacaaaaagattcgatgataccttgattcgcatcaagaggtaaatatatatttttatcttttagtttatatttaatatatgttcatgtagagatcctagggtatggtacgataataatcgttataaatgcttccgccgcatatctaatttagtactacaaaactaataaatagtactatagctgattccattatatatattaaatattgtgtgagttttatgaatatatatatatatgagatatttatgtaaatggatagttatgatattgtgaatgtatgtgagtcgttgaatcgttaattatatggtaatattggtgtaagaattgttagggtttatgccctgaaaagcctgtaaagacattttttgattattaaataaagagttgaatatttgatatatgtatgaatattaagttattaatatt

SEQ ID NO: 140971 - DNA, 521 bp, Cannabis sativa
tcaaccgttaattggacccaaatgcaaaaaaaaaaaaaaaaacactttaaaacacaaagtccaatggatagaaaaggaggaaaaaagaaccaaaaaatagaaattaaattaaataataataataatgcataaaccaataaataaataaataaataaacctttcaaccgagataaatctttaatattgcattatacaatttaatattaatataacgataatataataatttaaataaaataaattaatttctaaaaataatttctcaaaatcatcattctctataattaaaaaaggaaatataatttttttttttttaaaaaaaaaaacttgttggtaacttactctagcaagtcactaaattgtcacatcatcaattttttttaatacgcattcattggtattaccaaatcatccatatatctattctatataaagtgtgcctatataactaaatttcttggtttatgagaaattcatggtgactttttatttatattcaataaaataataaaatattatt

SEQ ID NO: 140972 - DNA, 803 bp, Cannabis sativa
ttgaaagagtttggatgaatttttaagtatgttttgtagctctttatatattggaagtaaattttttatgataggttctctatgaattaggtcttttgaaatattatgagatggttttttataggttttaattgaaattttaatatgtgctcatcttaaactaaacaaaagttcacttaaatttccttcaaaagtttacaagtagatctttacattttgcctttttttagtgatatgttgaggaatattattttttttgtattcgtaaattaaaaataatctcatattatattttattaaaatgcatcaacttttgtaaataggttgttcaatatatttttaccatttacttaagtttagcacataatttttattaacttaagaggtataatggagacatcatttataaaagtgtgtatatcttaaaaaatataaaaataaaagtaaaaattaaaatatgtaaagtaaagtgagtatacaatgtaatttttttttcttttatgtaagtttggcacgattgtttaacaatgagttatggtagccgtgatccatatatcaaaggttaggttcaacctgacctataaacacgaattatccgtgcccgtgccagactcatagtttataatatgggcccgaccgtatttataaaagattatttataccacatactgaaatttttaacttttttactataggggaatctttttcaaaaatattgtgtaagttttatactgtgtactgtgttaagcttttactgttattttttaattgttccacggttttttttagttgttctgttttgt

SEQ ID NO: 140973 - DNA, 1835 bp, Cannabis sativa
  modified_base (1803)..(1808): a, c, t, g, unknown or other
tgcggcaaaactcggccagcctccttcatgcacgcgcgtgaatggtattcgcaccaaatacaaaaaatttcaatttgttcattttttttcatattttttcatggagtttaatttcaattttttatgtagatttttatttttcaaatttcaaatctaattatgagtttattaattaattttagatattattagattttgaatctaaaaagtgataattctacattttttggtttgattttgacatttgattattttatcttaatttttaatttaaggttagatattttctattttgattatttaaataatttttataaaatgaccttatttgaaatataaaaaaatatgataatttttaataaaataatctagataattttgaaaaataacaacatattttatcaactttcaaaagtttgttattttatttaaattaactcataaaattagataaataatatttatttatcattttattttattaggtatttaattttatcttttttaaaataacataaatttgaaaaattagttgatatttttttaaaagatatttaggtttgttataaatcgaattttcaaataatatgtttaattttaaattaataatttaatttatttttgaaaaaaaaaattaattatttaagattttgaaatttaattaattaattatttaatttaaattaaataaatcctataaccaactatccaatgttgttacatgtatgttttatttattgtttattcaaacttattttataaaactgattatagtttgatctaaattgatatggttaacttgttgacagatccaatgatctgattttaaccatagtccaattgtcaatagatcaaataaataatttgtaataggtaaattttgtaatcttcttttatttgtgtataaacctagtaatatgataggatccattcaaatcattgtgtgtacctgtgcctatatgtttaatttgggcctagatgcatataaggagcccatttaattttgataattaaaatggactaggttgctaaaataaaaatatcacttttatagtttttatttaggtccaattagtattgggcttattcaatgaataacaattgttaaattaaggttaaatttctctctttttggccttttgtgagagttagggggccattagtaatgggtacgacatactgaacccaaccctccctcacatgaacacgcccaactgtgaaggctcatttaccttatttgaataattgtaataggttaattatactagtttaacctaattcaaatggattagaaacataattaattttcaaaatacatgaaatttatttttcatcagattattttgaaaataatttaagaaaaatacagtttaataaaattaattcaagataaactatatatattttttctatatttaattaaataaagaagttataactaattagatttttctgaatacttaattatttgaatttttatagaaaatatatctaagttaaaaattaatttattaaattaatttttgatcaacttagattagaatattttgaaaataataattaagtagatttttcaagaaaattagttattcaaatattctttaaaaataagttgaaaatttgttaattttagatcaacttaaattgagattttttttcaaattaaggtgattagttcaagatacttaatttgtaatttaattatgttgtccgatgttttcggcaactagtttaataatatatatatatatataagaaagctgtaggaagtttaatgcatgagatttttacgtggttggggcnnnnnngagccttagtccacgagtctttcttat

SEQ ID NO: 140974 - DNA, 712 bp, Cannabis sativa
cttccaaagaatctgtctcacttattccttaaaaatactttgtgttcttgtcaatatccgacctctgaccatagaagttcacatgagatagcaaaatgaacagaataatagcaaaagtttttcacaaaattagtgttcccactttggcaaaaatattattattagggaaaaaatcatcttaccctaaacacgattctcaggtttattaaaatattactcccacttctgtaaaaacataaagaacaacacaacaatataaaatattataaactatcttgtatacatattcaacaaatacattactatacctcaatctatctaagtatacatcgtaaatcgaattctacaatatacattatctaatacgatttacacaaaaaattaaatcggtataaacaatataccttagtgtatactatatatatacacaaaattcgagtcagtctcataatacaaacaaacactcaaaaaactaacctaataaataacaaaccagataacacttccaatacacatatattctaaactattatgtatacaatttaacaatcatacactcctagatctaatctaagtatacaccccaaatcagaaaacataatgtacattaatttatataatatacacacattcagtatataaaaatatgcacaatatacactaatttatacaacacacatataaacataaatccttatagacaacacacctt

SEQ ID NO: 140975 - DNA, 625 bp, Cannabis sativa
  modified_base (43)..(43): a, c, t, g, unknown or other
tgcatcaagatcatatatatatataaaatatcctgacccaaanggcaggtccaaaagaaaaaaaaaacatgcatataaaatattctggccctaagggcaggtcaaaaaaatatatataatacaaagggcccggggacaggccataagtaattgtctccccttagaaaataaaatagctacctagttaagattgtcttaaagaaaagaaaaatagctgtaaataaaaaaaaaagagataatcttgatgaaatgggctgaactcggcgacctagtcaatacgaggaagaaggcgagggccccgacgcgactcgagcatggcatcaagtttcttcttcttctcccaaaatttggcaaaagccttctcaggcttaggatataagtcgagcttgatgctttggccatttgactgccaggccatgtagacgccgtcgtcgaagcgcttgacacaatgcttacaggagacgggggataggagctcatcttttttagccttcttcaatgcctagtctctaaagtccttcagttccttcaactcctcggccaagttggccttggactgcaagtccgcctggtgcaactcctctagcgacttcaccttggcagccatttcgtccatggcctcctt

SEQ ID NO: 140976 - DNA, 849 bp, Cannabis sativa
agagagagagagagaatgaatgaggagaagaggatagggtttcatggatgggggttttattaatggtcggctatccccgacagtttaaaatagtcaagtatactatagctgacaatttaaaaatgtgggctatagtataccggattattttaaaccatcaagtatagccctatttaaaaatcactataaacccataaaaatattgcagattaccctcccaagtgttctaaactgttgggagtacctaatttttcctgacgattgaaaacactcattttaatttattagcgacagtctccaaaaaatatattttgaggaccgacgagaatgcccagttttgtagtagtataaatataaaagtgagataaaatgtctcaatatatcatttattccggtttttatttttgttaaacttgaaaagtaggataaaaagtcccctttcttgtagtgaatgtataataaatcgtacttagtagttctatactaaagatttctttagtttaatacactaccgactagttttattcatactgtataatcttattaactctcatgtacatccttacaagattatacaaactccatatgaataaagaattttcagatacttttataattaatgtattcatttatcttataattgtatttcagatattccataatatattatctattaattacttacttttagagaataaatcccaacatgccactgatgtcaggaatgcaagtgcccgttgtaaagcactgaccaaatgtatgtgttaggttatatttagcctatgtttcgggtttgaaaagtaagcattttctcgtctattggtgtcttttggagcagttttacgcttg

SEQ ID NO: 140977 - DNA, 1294 bp, Cannabis sativa
ttaagtttaattttaatttctaactttctaactttttttttttttaaataattttatatttttattgaattttaatcatttttctttatttgttaagataggagttttttttttttttttggaaaagtttaaactatcattataaatcaatagtcatttacaacaatagcataaagaggatgaggaatttgtcctatccaagacatgtcttgatccaactctaaagcatgttttgccaaattatgagtaatatggttaacatttctcataatatgagagatgacaacttcggaaaaaaaaaaaagataaaagacaacaaacatctaagattaaatcatagaaactagataaatctttcggtgtagagtttaaagcatcagcaacacgtaatgcatcagtttcaatatgtgtaatttgcacttgcatctgtattacccagttaagatatgagtttataaatataaataaattttatttttcttaaaaaaatcttaatttatttaaattatttattagattctcaataattttagtttaattttttaatatacatgtttataaataaaataaagtttaaaaatattttttagaataatttaagtttttttttttaagtaaaattaatattttttttaactaatttaatatatttatcagttttttttatttttttcagaatcaatagaatattatatttaataaagtaagggcaaaattttacatttgtccaaattcagaggataaaaatattaacttttaacggtaaaaaaaatggaacttaacaaggggtataattatgtaaacctaacagaaatgacataattatgtaactgttatattttaatttttttttaaccaaccatatattttaagaaacaaatggctcgtttggtacactgtattgtattgtattgtattgtattatgtttgattgtgttgtattgtattagtattatttaatacaatattatgtttagtattgacttgtattaatagattgtgtaaagttataatatattttcaatacactcgactccaacaccaactacgggtctgagtcccgagtttgggttcgggtctgggtcccaagtccgagttcgggtccgggtcccgagttcggatctgggtctcgggttcgggtccaggtcctagtccgggtcccaggttcgggttcgtgttcaggttggagatttggtattgaccctgaatcctttgtaaatattataatacactaatactgactatttgttatgtattaaataatacaacatatattgtattaaaaattttggtc

SEQ ID NO: 140978 - DNA, 1010 bp, Cannabis sativa
attgtcaaattaacacgcttaatctcaaaatgacacgattataacaagtataagaatatatatatattataaattttataaaatgtaaaataaaataaaatctctaaaaaattctcataaaaatactttttttttcataaaaaatattaataaattaaaattatgaattttatgagtaatatttgtgtttatatatataattatgttaattgtattatcatgtaataacatgtttaattgtgtgttaaacaagtcagtttcaaatttgtgatatgacacgtttattaaataagttattttgtagtgtagtgtgacctactaagaattcatatcgtgtttgtatgggaaatttgatttttttttttatgcatatactacccaaaaattaatttcataaacctatatgtattaatattggccatatatgtcaacgttcctattttccccataatacccctccttataccctcccgattttctcttttttctttatcaaagtcacactaaaatgacccattttacttacattttgcctcatcaaggtttgaaactccattcaaccaacactgaagcaatacattcttgagccaccgaagaaatttggtaacaatcatgggtaagtattttttttattaatagttcttatatttaggttagaatatgattttcatgattgatctatgggtttttgttgttattttgctgttttgtgtgttgaaacagttgttgcgcgtgaatactgagtttttttctaatttcaagatttttatcgtatagtccgatagggcccgatgctagtccaattgggttgtttgatctgaggacagagatgaaggcctgatgggcccgatgtatagttcgatggtgtttttgggtttgggacattgatgatggaccgatgagtggccgatattgtaacgccctaaataattaggcacgctacccaaaaagattatgaaaccctaatcccctaaacgggattactaattaaaaatagcgcagaatttaaa

SEQ ID NO: 140979 - DNA, 858 bp, Cannabis sativa
atacacttgtgagtggagatcagatcctcgtaaaataatatccaacaatgtcctcctctcggattctcaactaatgatagcccgatgggagatcaatctttgaaaatactattttcccctgaagttgatcgaaaagatcgtagatcctaggtaaaggatatttattcttgatggtcagtttatttaatttctagtagtcaatgcacattcgcaaagacccatctttcattttaacaaatagtacaggagctccccagggtgacacagtcggccgtgaaaaccctatgtcaagcaacccctgaagttgaattttcaattctttaagttttgctagagccattttgtaaagggccttagaaattggttctgctcaaggtaccaaattaataataaagtcaatttccctttacggtggcaaacccagaagttcatcaggaaaaacatttaagaatttccgaaccaccttgatgtcctctggccgaacagactcaaaccaagtggtatctaataccacggccagaaaccctagacatccatctcgtaacaattccctggctgttagtagtgaaattactgggatccgagatccctaaaccgatccaacaaatacaaacggttcttcaccttctggttagaagattaccatcttcctcttacaatcaatacactacaagaaaatgactttttgccggcgcatttcgtgacatgcgccggcaaaagttgtcgacacaaacaaatgtgtgtactgccaaatttattttgggtttacttttgtcggcgcatatttgcgccggcaaaacatagctataccggcgatgtcaaattaaatgcgctggtaaaacataaaaccattaggcg

SEQ ID NO: 140980 - DNA, 587 bp, Cannabis sativa
gtaaaaaataccgcctgacagtatctttgtaaaaaaataacaaaagttaatataccatgtaaatttcccttgaaaaataatgcttcatttcaaatatttctttaaattggacccacaagcccaccacctaaatgcctaaaaggctgataatgacccctttcattttaaacaattttagacattttaacgatttttttgattttatttatagaaaatacagtcttttttatgttgtactcttgttaatgtattattgattttttgttatctgtgtgttattttgatgttatttaaattttattttcattttacttttatgtaattttctttatgtttctatataaaatcataaaaaaatatataaaaaaaattaaaagtaaaaatacaattttttttacaaaaaaataaaaataaataataccttatataattattccttcaaaaaaagcgtcggtatctcaaaatcaaacagaatccataaaaaatcttctcttgtccaaaaagtactttttgttatttaaagaattatacaagggtagttatatttgcaccccataaaattataaatacaccccattattaaaaaa

SEQ ID NO: 140981 - DNA, 774 bp, Cannabis sativa
cattgtgagaagggtttcatccctattttgtaacctctgtttaaatcaataaaagctcatctccatagccaatttaaggttgctttctcccgtgaattaagctcgtgatcaccttgattgtgtagcccaaccacaaaagtttttgttgtttgttatttattttttatgcttgctttcattagttgttgttattgctggtttatactcgtgtttatgttgctggttttatgtccaaatatgtgctcttgatcattgttcattgttcttagtgttgtgttggttcttgtttggagtttaagactccacaaattggtatcagagctgaggtttctcttagctgttcaagaatcgaaattgttcttcaagaaactcaccaagaagatcaagaatgtccagctcgaagtttgagattgacaaattcaatggtgccaatgattttggcctatggagaataaaaatgaaagcgttactggttcatcaaggtgtttcagatgccttggatacagaagctctagcatccattgatgacaagaaaaagaagattgaaatcgaaaccaaagcacacattgcaatcttgctgagtttgggagatgatgaagtattgagagaagtttcaagtgaggagaaagcattgggactatggaataaactctctgtgatttacatgaagaagtcactaaccaacaaattatacctcaagaagaaactctacactttgagaatggatgagtccaaagatttgagaagacatcttgatgactacaacaagattat

SEQ ID NO: 140982 - DNA, 834 bp, Cannabis sativa
  modified_base (180)..(183): a, c, t, g, unknown or other
  modified_base (452)..(452): a, c, t, g, unknown or other
tttgggactgggttcaggtctgggtgtgggttcgggtccttttgagggtttgggtccacggctttgtcccaaatcaagacactgactacgggatttgtcctagccctgggtccagatccggatcccaatctcaacactaagtctcgtgatatttctgttgccgggtcacgagctgggtcnnnngttcaagttcgggtctgggtcgggaactaggtcgcggtcctagttctgtttccaaggtccctatacttattctgggtccaggtccgggttattgtgtgggtttggatcgcggtctaggttcgggttcgagtcctagtctcggttcaggtttaggtctctgtttgggtttggatatgggttcaggtttttgattaggtcttgctactggtcctggtcctagttcggttatagtttcatttgcgattctgtgttcgagtttgggtttgagntcgggtcggagttcgagtcatgttctgagtttgggttcgggtccggatttcagtctaggtccagatccggctctgggtttgggtttgcgtcctgggtcttggtctaggtggggtctgagtcccaagttctaatgccgatcttagtgtggattcagttctcggtctaagtccttggttctgatcctggtctgggttcgagtttggattctgtccaggtctagctttgggtctgattctaggtgtcggtttgagttcgagtctaagtcagtgtctgggtttgtgtaacgccctaaataattaggcacgctacccaaaatgtttatggaatcctaatcccctaattcgggattactaatcataaatagcgcagaatttaaacttt

SEQ ID NO: 140983 - DNA, 567 bp, Cannabis sativa
tttggcttcctttcttctatggctaggatcacttcttcttgctcgtgctgtgctgttcgggcatacctctcccgagctttgccgaatctccagctaagtgcgggcctccaataatgacttgcaaatgtccatccaccggtggaggcagcaagtcttggttgttatcacccttttgattctgatcggccttgacatacttttgtatatgcaggttatttttccttatcaggatttcaatttcctgctttagattgttgcattcattggtgtcgtgaccgtagtcaccatgaaattgacaaaacttggtcatgtctctctttctgacatcttttttcatgagggcgagcttcttgtacagggatagtgactgagtggccatgtaaacactttctatatcctcagtcaagatggtaaatgcagtatacttggcttgattctcccagggtgcttgtttgattttgctggtgaactttccctttttcccattcgcttgcctattattgttgctggaacgtttaccgtttaagcttgaatttcttgggtaatgggggagctgggcgaatgtcc

SEQ ID NO: 140984 - DNA, 531 bp, Cannabis sativa
  modified_base (490)..(491): a, c, t, g, unknown or other
caatctggccgttggatcttgggaattcaaatcgtgcgcctccccagccgttcgattggtaggtgattgcgcctgttccacatgcagcgtggcctataaaagccccacctttccttcatttggttactttcatcctttcaccaaatttcttcgagttttctagagagaaagagaaccctcaaaccagaggaccttcaaacactataggtttcttactaaccctcattcgttactatcagtcaacatttcttcgtcgatcaacaacaactcccagttctaacactttatataagttcttcgcatccctcactttattgtttatgttcatggcatgctttactattcatctatttttctgggtttactatttgaagtttctggcattttttgccttgagtatttgcgtaacatgtttagatttctcttctcgggtgtttgggttactcttattttacacattatttcttgtaaaggcccatttgctccttanntgatggccttcaagggtacagagaagactttgtctttctc

SEQ ID NO: 140985 - DNA, 638 bp, Cannabis sativa
gctttataacacttttttcttaattataataataccatattgttgttatctcatatatggtttcattacatatgtgaatatgtatagttttccaatcgaagtactgcgcatgtaatggatatttttctattaaaacctaattagttgccatttaaatttgatattgatacatagcactatgaagcaataactagattaatggggaaattaatatatatatatatatatataaatacttctgagttttatagttgacaggttgcttaaatttgaagactgtaggagtttcaatttttagtggaatataacttgagttaagagttgagactaaaatgaagatgttatgtcaacaacaatataagaagattttgttgtttcttaatgcatgctttctttggcaggtgctacatttgcttcgaagatacctgggcgaatatgtccatggactctcagcagaagctttaagaatcagtgtctggcaaggtttgctttttatgagcttgtttcacgcgttttgccttttcttttttcttatagttctagatactatatttgtttaatatcattgccggttgagacaatctacttactggacgtgtgaaacatcgctgtaaccttttgcgttgttacaaactaaa

SEQ ID NO: 140986 - DNA, 657 bp, Cannabis sativa
  modified_base (326)..(331): a, c, t, g, unknown or other
gttgccaaatcattccatgtggctatagaattcggtagcaaggagatcaaccaactcttggctcactctctcagcgagaatggaaagtgtctcaaacgaatggcattatcactaaccccattaactttgaaagtatgacatagctccatgaagacaagtgcagattggggtcttcataggggagtctaccaaattggactgaggactgcaccatttggagtattgcaggcttaatttcgaagttgttggcatctacgacgggcggcatgatgcaaaactgaaccccagtaagagttgggagaatgtaatctctcaagctgcggccnnnnnnttgatcttcaacggcacctctattattaccgttgttgcctccattattagcagcattagcattatcaaccatgatttctggtgtttcagcagttgctgaaactctttcttgcttgccttttgtttgttccttccttcttctgtctgtttcttctacaagtcttctcgatttcaggatcaacgggtaatatggctccttgtccttgacagtgcatacacctgaaattcttgaaatagatagagacaatgttgcaagagacagattagtaattagcaagaaaaataaaccaaagtagaatttagtataattttatgtaatatcaatct

SEQ ID NO: 140987 - DNA, 1071 bp, Cannabis sativa
ttttatagatgatgtctccattatacctcttaagttaatataaattatgtgttagatttaaatagaaagtgagagtgtgttggccaacccacccacaaaagtagatacattttaatgaaatataattttgtaagtatttttgattaataaatataaaaaataagtattcctcaacttattctatttttttaagggctaaattcttagaattagaaaaagacctgcaaaatgttttaaacgtctctattttcaatgtttttgaaaaatctctattttaaaagagttattaagagtggtattgacaatgacaacaaagcaaatccctttcggaaaggtgaaaatataaaactaattccttataattacgtatcatagattgattccaattaatgcttcattcacaagttattaatttgaaattttacatacatattaataatactttgttccatatatcgaattaagcttttttatggggctttttctctttccatctagtatgataagtttaagtataaccttttaataataaatggataattcaaataataataaaaataatgggtaaatagtttcatttatgaatcatgatcttacagaagtagaagtgtgcataaatcgatctaatctaatgacaattcatcgatctcattacaatcgatcgttaaatattggatatttaattgtgatcggatcatattatatattattttaaaatatccaatcggatcgaattggatgttagatggggtgtccaaaaatttaatatatccaatattcaatcgaactaagtaatatttttatatattttaaatgaataattagattttatattattatacgtagtaaaatatatgaatatatgaaacttaatattaatttttttttttttttgattggatagatccaattcaattcaatagatattagatcaaaaatatgggatggatccgatccaattcaataaatattaaatctaaaatcactacaacaattttggttattaggggcggacctattaccggcggggaaggtccgcccctaataataaggttattaccggcggatgtg

SEQ ID NO: 140988 - DNA, 689 bp, Cannabis sativa
tactagattactggtttctgtgtttaattgttggtatgttgttttacgtaattgaggtttaagtttcattatttcttttattattttaggaaaatggttttactgtatcagatttatgtaatttgcttattttatgtaactggtatttttgtgtcactttttaattagttgtttaatataacttgttaattctatttttggcatctttaatgtgacaaaaatattatataatttataatttaatttcaactgtggtaattaaattggtttccatattttgtgtatttgacttttatatcaatctatttattttttgaagaaaaattgtctagcttttctatttatggaaaataaggtaaaacggataagtttggtttctcattctctttctatctttctaactgtgttaatatgatattgtgtgagtcttctattatgtttgattagattttttgaggataaaatcaaagctaaactttccttttctataaaaggaaagtcgcacttacttctcacgattctgtaggtacagaaatagaaattcctgggctgattgaagatctattttagagaattgtctactgagttttggtcttgttcagaccgtgtgtgagctatcaataatgtgtatattgattataaatacaccttatagcagctaggtcatgtatctctttcatacactttga

SEQ ID NO: 140989 - DNA, 513 bp, Cannabis sativa
ggtatttcgatccttattcatagtatatatatgtttgatttaattccgcattttatacataaacatatatgtttcagtttatacatataaatgtctaacagtggctccctttgctagattactctaatcattaattacaccatagacttaagaaagtggtaatagctctttcaattatattttctaaacatactccttagctaaaatagagagtaaatttcaaaaaaataaacttcaaccatacaaaaaaaagtgattctgtatataataaggaataaataggagctctctaaacattgagaaagggaggcaaataatcccacatgtctcctaaactttttgttcatataaatttttgattattttatattttacccggtctataaaaataattttttttatctgtccttacatatttttatatatgttctcaaaaaatttatattttttatttttatcccatatatctttatttgtattgttgctcccgaattcgcccaaaatacgtggacc

SEQ ID NO: 140990 - DNA, 593 bp, Cannabis sativa
  modified_base (95)..(99): a, c, t, g, unknown or other
ataatcaatttttaaatttaaacctcaaaatatcaaagattaattataatctattaaaaaatagatattattaataatttaaaattgatatttannnnnaaatatattaaaaataatattttactttaattttagggtttgaaaaatgcaaaaattcgaaattgggaaagaaatcccatgaaaatcgcattttggagttggctgcacaggaggctgcacgtgcagcccagataggctgcaaatagccttgggcgcgcgtggacgggagcagttgcagcatcccttgtgcatgaaacgtgggtggatgcagggtcctctcagcgtgaatgcagcctcaagcgtgtctaaaggcgtgcattccgtgtcttcagacacgatgcatcccagacatgcgcgtgtgtaggtgtcttgtccgaagctcctggtgcgtgtgtgcaccaagcttcgacacccatggcacccaaattttcaaacttccataacattctcaatttttatcaaaattgagttccgtaaaaaccaaaattacttaatttttcaaaaggaatctaaatataatattttcatggaaaatttcgtagaacacatacatt

SEQ ID NO: 140991 - DNA, 1665 bp, Cannabis sativa
  modified_base (1584)..(1633): a, c, t, g, unknown or other
atctttacaaaacttgtatgttcttgatcaggcacatgcattttgatctggttatatctagaatgtgcgtccatgaatgtcatcaactcatgccccgcagttgcatccaccaactggctaatcctcggtagtggaaagcaatcttttggacatgccttgtttaagtctgaaaactcaatacaagttctctaagttgtctctcagaatctaagggtcgtcttttctgtcatttttctgggtaattaaggtcgatattcaaatgatgacaaatcactttagggtcaatccctatcatatctgaatggctccaagcaaattgaccctggtttaccttcagaaagtttgttaactgctattttagtttttcatccagatttttcccaataaacacacatttagtgggattgtctagatctaaaacaacttcttctagttcttcaattgactttaactggtttttcttgtcttgaattctagggtctagattctcttctttcttcttgccttcttctgttatgaccaccattaattgatggttggctctcctattttggagctctacacgatagcattcgtgagccaacaactgggcacctcacactacacctactcctgctggtatttggaatttcaaagacaggtgtttgattgaactgactacccctagtccaatcaatgcagggcgatccatcaatatgttataaactaatgttagatcaactactaagaaatcttgcgttaatgttgtagataatggtggctcgcctatagttaatgggagttcaatgatgccttgactgtcgacactatctccggtaaatccacataagctcaccatgcaaggttttaactttgcattttgtagccccattttcttcagcatatccctgtaaaggatgtttactgagcttccattatccaccaacactctttttatcctcttgttggcgagttgaactgtaatcacaagaggatcgacgtgtggatacctcacgtgttttgtatcttcttccaagaacacaattggaggttcttctattttagcattctttagtggttccggaacaaacaccgattgatcatttttaacttcattgacatatcgcttctgggcgttactactctctctagcgagatgcagacctcctgagataaccaatatatcctcgccctcaatagggggatgttgcattctttcgttatctgggttgttgggctgaacaggtgggttttgttcatttccttggcacttcacatattgtccaaaatatccatgagaaattaagctttctatctcgtcctttagttgacgacactcttcaattgtatgccctatgtctttatgaaatcgataaaatctattcggattgcgtttgtgtcttgcatgccttattggctcaagtttgtggaatgcaaccctatgctcatttgcgagaaagatgtttctcgagtttcattaagctcagtgtaaatggtgtaaattggcacatatttatcgtgctttttctgtttcttcttatttttagatgattctctccagtcatcttttctttcggtgttcgtattggaaattattttaccagnnnnnnnnnnnnnnnnnnnnnnnnnnnnnnnnnnnnnnnnnnnnnnnnnnttctaaaacgatgaaataaatacatataaagt

SEQ ID NO: 140992 - DNA, 525 bp, Cannabis sativa
  modified_base (492)..(492): a, c, t, g, unknown or other
acctagaccttagctccgacttggacccagtgccaggctcaggaccccagatcagactcggacctagacattggctccagcttggaccttggactgtggaccctggctctcgacccgcacctagacttgaaccccagtccacggcccatacccaatgtcagacacctaacacaaggccttggccgaagtcaacacaccgaccttgccagtctccgcataccgaccaaggcaccaccccgaacccagaatccaagatcctggaccgtggccctagcacagtttcagcccctatctcattttttctcacctctctttctgagtccttattatatttttgttaaaaaaaaaattaaaataaaatttacaaaatttattttcatttttgaaagcataaaaactaaaatggatatgtgttgcccctgattttgcccaatatacgtggaccaaccagataaggacacgtggaacaagcaattcacaatatttgctaantctttatgccataaggtagcgtccaggacatag

SEQ ID NO: 140993 - DNA, 708 bp, Cannabis sativa
acaacaaaaaaaaaatattagcactagagtcgtactcagcagcggtgctctgtcatttttattttttttttatttttaattttattagatactttattgttaaattatattaaaaacggaaaatggatcataataacaagcaacactaatttttatttgcattgtagatgacttaagaatatttattgacatctaatattttttaaatttatttaaattctatctaattatatattaaatatcaatttttatcattcaatctgattcaattaattttaatcatttaatggatctaatatttaataaattggattgattttatccatttgatataaatttattgatttaatttgagtttatctaatattttaaatttaatatttatttgattatatcagatccattccatattttaattatagtatccattggattgaattggatccattcaatgtaaaaaaaaagtaaaattttaatattaaaattcatatatatattttgttacatataagaatataaaatctaattactcatttaaactaaataaaaatattaattagttcaattaaatgttagatgtattgaattttcgaacacttcattcaacatccgattcgatctaattgaatattcaaaaatatcatctaatctgatctgatcataattagaaatctgatcagttattattgaattagatcgattaattca

SEQ ID NO: 140994 - DNA, 642 bp, Cannabis sativa
tccgagtctataggtctgggtttgggggtccagttccagatcctggtctgggttagggttcaggttcggtccgagttcaggtcctcggtgcgggtctaggtctgggtctgggtaagggtctcggtctgaatctaggtctcaagtttcaaactcggtctaggtctagtttgggtttgactccaagttcgtatgcggatccctatctaggtccgagtctgggtctgggatcgggtcccaaatctagctccatctctgggttcgggtccaggtctcggtcacggtctgggtatacgaacgtgtttgggcctgagttttggtttcggtttgggtctggggctaggtccgagttcggttctcggttttggtccgggtcctgttctggcagttcttgttcagtttcaagttttgggtcccgaatttgggtcagggtctcagtttgggtccttgtctgggttcggatcctggtttgagtcccagatttggatccctttcacgtgtctcagtctagtgttaacgtctcatgtccctggtctgagttgggttcgtgaccgagactagggtgcggttttgggtcccggccccagttctgtgtctcgagtctggttccatttttgggtgtgagttcgggtctatgtttgggtc

SEQ ID NO: 140995 - DNA, 934 bp, Cannabis sativa
aacctctcaatatagtatatatatatgtatttttatattttattgtatatgtctgtctataatgtgtgtatatattgtgtatatattattcatgtaaatacaatttgtaattataatttatatattctaagtaatatatatctatatatatataattattgtgaatgggaatgagattggagggatttaattagtttagaaataaaattcttaaaattgaattagtgtggggtataattgattatatatatatgtatatataatttagtaactagtaacttgttactattttttataactagtaagtaatgaaataattaattttgcaattttattgtatttctttatattgtagtttcggcataattttgtgttgatcgcatttgaggttgctatagatatatactttcactaacttttgcttattattaattaattatcaatgcatgttagttgagtttaaatatcttaaatattcatccgtagtgaagtaggttatgcgaatacatgtactgcggtcggatgggtggataaattttgtattgtttatgttattttgtttgttctgtattgtttatttgttttgtttgttattttaagcacttaaattttttggaaaagtccaattacatccgttatgttgccgaaacttcggtagaattaagataaattttactaaaaaaacataaatataggcataacacaaataactagttaattacaacatagttataagaagttaagtaacataacacaaataattacatgctcggttctgatttcggaaatgctgcaacaggatgctgaaatcccaatctcaatggaagggtgcaggtatgttagggaagtaacaaacatgttccttggcctaaacacctaattgtaacacccgaggtaacttctcttataaattaattattaatgattagtggag

SEQ ID NO: 140996 - DNA, 621 bp, Cannabis sativa
aaactccttggacgaagaaaaccagtagaatgctgatttagaggagaagatcccactgggatccggaatccacaaacggctatcatcaaggatgttgagtactctaacatgttccaacttctgtaaaagttgtgtcatttcgggatttccctgtccataaagtttcttctgaatttaaagtcccagcttgccacgcaatttcccacctcgccctcatcgacaatcatctcctgtatacttacattcttagccttagagatcactgcaacgtctgggaattgctccttcagagaggatccttcaatccatacgtcctcccagaaacgtatacttgctccgtttcctactttgaacttcaccaattggccatattcgtcgtaatgatctgaaatatccttccacggccctcttggagataatcgagccccctcttttgtatcctagaagttatctgctatgccatagcgacttttgattactttgtgccacagggagtttggctctaaaggaaatctctataaccatttcattagcaaccctttgttcctcaactctatccttccaattgctaaaccaccctcacttcttggtttgcatacctcatcccaagccactaaatgg

SEQ ID NO: 140997 - DNA, 958 bp, Cannabis sativa
  modified_base (248)..(263): a, c, t, g, unknown or other
aaattaaaatttatatttagagctatctaaattagtaaatttaattaaataaatatattaatatcaaaataaatagattaaaatatatattaaatgaaaatacaactctttaaaataatagcttttagttataaggatattcggtctccattgttagttctacatagttcttattttagtgagattcatccctaatagatgttcgttcattagcaatttaacgtcatagaatctcgaaagataagtannnnnnnnnnnnnnnnattcttagtaacgtccaccccaatagtggctggtaagagtagggcttacaaagtatgaaacaatggtagaagctcataaggtagaatgaccttgactctcacctaaacgggacaacacgggattcttatcttgaaagaataaaaggttggtagaacggtatctatttttaatgagttgactattctattcaatgtttagaaaccttagaaattatttaagaacatgtctttattacatgataaatgtatgataattttcaaatgtgtatgaatttatattgaactatattattttctattattaaagttgtagtataaattttgatcttcattgttggtctaacttagtttgttgttttaatgggacaaatctcaaaggattgctatccatttgacaaacataatagaattagatatcgacagataagtatttataaatgcaacatctaattgtacatctgaagatgacaacttagactagtgtttacaacatgaaacaatcaaaaaaatcataaaataagaatcactttgactcccgcataaacaggacatcattggattcttattctaatcaaaattatcctttattctcctattagctttttcattaagaaattgcttagatagtatgtcattggatagaaggattatacattatttgcttatgatgtcattctattttcttctatgaaatt

SEQ ID NO: 140998 - DNA, 777 bp, Cannabis sativa
  modified_base (499)..(501): a, c, t, g, unknown or other
aattttgatcttcattgttggtctaacttagtttgttgttttaatgggacaaatctcaaaggattgctatccatttgacaaacatactagaattagatatcgacaaataagtatttataaatgcaacatctaattgtacatctgaagatgacaacttagactagtgtttacaacatgaaacaataaaaaaaaaatcataaaataagaatcactttgactcccacataaacaggacatcattggattcttattctaatcaaattatcctttattctcctcttagctttttcattaagaaattgcttagatagtatgtcattggatatgtcattggatagatcattggatagaaggattataagaaggattataaattattttataaattatttgataaattatttgcttatgatgtcattctattttcttctatgaaattgaatggcgcagatgactatattctagatattctatgccaaaatgatataaatcctcgatnnnagaaatctcctacttgtatatgctaagttaaggcaatctaaacttaaagttagattagtagtgatggttcaagaaagaatggaaactcgagaaacatttggtattaatttaagtctttgactttattttagattccaaatagaaattttaaatttcagtttccaaaatacattggacaaaacaatatgactttcacaagttgttaatatccatcttctgtcaatggatttgaactatatgttaatgtatggattatgagttttgtattctatgacc

SEQ ID NO: 140999 - DNA, 608 bp, Cannabis sativa
ccatttagtgcatgaatatatgtttaaataaatgacaaaattaccaacttttataatttatttctcaagaaaatactaaatatattgaaagtatttctaataaattgtgaacaaattttttgatgctataaatttatattgatcaagagaataagaacactcaaataaaaaaaaattaaaaaaaagatacaacgtgtagttgtcctctagtaactaaaagaatgacaaactataaagaaagaagttcttagtctaattgatttgattttttatgaatatatatttcacattagaattctctacataaacataacttgaattttcttggctgcacgaggagagaactttgtatacttttcatgggggtattttttatctacatctatctcaatgacgtatttatcgaatcgtggcaatgtaataacaaaaaaaaaaaaaaatacaatcaatcaatgacaataattactttaataatttaaacattcatatatattatttcataacccaaatacttatattattatgttattgattgtgcatcgttaattaaaaacctgtaaagagctaactatacctcttatatcgaaactgaaaactcgtggagaaca

SEQ ID NO: 141000 - DNA, 609 bp, Cannabis sativa
gcattaatagctaatgttttaaatttatgcacttaaatattttatttttatttttggagacaaaaatactcaatattacaatttccttataccgttactactacttctgttaacttatgaatatggacacatggagagttcagatgtattacatttatttattttagggatatttgtggcataaatatcaaatattttcaattttatacacttaaataccacatcttttatttcaacggattaaatacccaaagtttagttttactcactaccgttactacttttttgttaaatataattgagaatatttctatgccacgtattacttaggtattggtccactacataatttctttgaaaaataaaaaactaaataatattaaaagttctctctcctcctttttttcttcttctgataactgttgtatgtcttcttttttttttttccgcatactgtaattgtattaatagggatgttcattcaatctaatccgcacttttttggtcaaacaacatctaatccgcactaagtgtagattgttagtttttatgtcataaataaaactctatttcaatgtaatctctatcatttaaatatcaataaagaaa

SEQ ID NO: 141001 - DNA, 664 bp, Cannabis sativa
cctccagtattgaattcgacttccaaaatttgtactcattgattcctgtgatttccttctgaattgctttctaattaagagtttctgagttttttagctctgaaaacatcctaaaaatactaataataatatgtttatataggctaacaaggttacctaaaagatactaaaaatatttaaagtttaaacttaaacaagataaaaatcgcaactctatcctttttttttcactatctttttatcttttttttttagaaatttcctactacgacgattgatagtattttggtcataactctctcgatattgcttggaactggacgattcaagatgttccaaaaacctgaaagagtgatctagaacttttatgctttgactctttccaaaatttgaacagatcatagtcgaatttcggtttgaagtttcagctttattttcttgtacaattttctctattttatatcatctttttctgagatttcaccaatttatacattttaagtatcaaaacctgaaattaaagaaaacaagcataattatatttcaaaaagtgacaatgaagaagaaaattaactttaaaaataacatatataataggcagggccggccctgaaatgtagtgggctatagggtaaaaattattttttgggcccttatttagaaa

SEQ ID NO: 141002 - DNA, 519 bp, Cannabis sativa
atcttctggaaagacctctggaaattcacagactatgtgcacattctccacatttagttgcgtctctattgctcgatccactgcgctgaccaagagtgccacaacacccccgcctttcatttagctgactagcttttagggaagagatgaatggagtccttagggccagcttgtcgcccttgaaaataaaccgatccccagcctttgtttcaaaaacaaccagtttctttcggcaattgattgtcgcaccgtgactagatagccaatccatatcaagtgcagcgtcatgatccttcatatccagttctatcaagtaattcgtcagttgtcttttattgagtttcgtatatcccaatatgggtgctacaatccttcgtcgttccttcccctctaatggattagagcctccttcaaatgtcggtgttttttttattctttcatatgatggctcaaagcggtgtgttggctgttgaactgaattcctcgtgctttactgcttattgcaatgcaacttttcat

SEQ ID NO: 141003 - DNA, 542 bp, Cannabis sativa
atcaaatttactaattaataaaagatcagaaattattttacattgcatggttcacatgatttattttatgattatatgcttaatgtataaattctattaagttccaatcatatatatatattcatgattatagtgtcgtcaacatagtggaatataatcatgattatatgttcaaaagtataagtcccatgatttgtcagtatactggatttagaatgacatgataatcaccgataaggtatacttacaccatggataagtgctatgtctttttcagagcattgacaaagtatgccagtatcagatgtataaagtatacatcgaattagaccggtattgaacttagataaggtatcataaacttaccattatatctttcgaagtcaatatcactggttgatcttaggtctatagatcttaatcctgagatggttaggtttgatctcaattgtattatttaagttcttaaagttgttcgttaaagtctggatggctaaacacttacatcttgggaacatgatagtgtagttgagtgggagcgc

SEQ ID NO: 141004 - DNA, 593 bp, Cannabis sativa
aaaaaaaaaaaaatgaatgataattcataattttataactgaacaaaaaaatatttattattaatattaaacaaaaaagaaaaaaagaactatccataaaagataataaaatgaattagaaaaatgtgaactaataatatttaacaaaaaaatatagcattgatcgtataaaaatattatagagatagttttataatactaatttaaaaattgctagacaaattattttgtatatattgaaaaagtaaaaattaaagatataaagattaacaatttttttattaaattgtacatataatgataatattcttattaatgcatttattaagttttcttttgtgttatgttttattgaaaaagaaaaagaatggtctacacaaaaaaatcaaattacaaaaataaaacactaataataataaagtgcaagataaaacaaggaaaaatgagactctattaaaattagtgtggcatgtattacatatcatatttgttaaaaaaaagaatagtggtatagaaaataagaaaaaattgataatatcactaaataaataaaattttaaatctaatattcatatatatgtatatatatatta

SEQ ID NO: 141005 - DNA, 756 bp, Cannabis sativa
cagatatggcgtttctaagtgggtctctcccttttatgcaaagttttaaataaatacttaatattggtactactaataacctagaaataaacaccccccacccccactaactatacaaacaatatttggtatatgccttttttcttttcaatttgcttttcattttcactagtgtaattaaggcatgtatatatctaaattaccccctttaatttcaatttattatatccaacttatattttaatttaatgactaatattaaaaaaaataattacgaattaaatatttaaatgtaatttctaattataaatatatttaaatttaagttttagttataaataaatatctattcttttaagataatgacacataaattatattttttaaatttttgtaggtaactcaacgataagtatcaagtcaatagctatatgacaatttctaattgatctatgtaattaaatttttatttttatttaaaaatttaattaaatataccaataaaaatataacacgtggatattgacttgacacttaacactcaagtacttacaaaaatttaataaaataacttaaatatattacgataaaatattaaacttaaatatttatctattaaattgtcgccatttaaaaaaaaaattgatgattggaacttcaaattagcaagcttattatttgtaatattattcctgtattagaatactatgttgtgtacacttaatataaaaaaaaaaaaatgataattatgtagtg

SEQ ID NO: 141006 - DNA, 870 bp, Cannabis sativa
aaaactaatataaatatatcatgacttttaagtaatttgcttctaattttaaaaaaatatgaaaaaaaaattattgattttttttatatggcaaaagacaatatatataattaatagtgtaaaaaaatcatttctctacaaattttaaaatgatgacatttacttacaaagttccaagctaataatcttataagaaagagtaatttgcggtataaatacctaagtttaattattaattgtaaataaatacttaagtttaatttttgacgataataataactaagttatatttctagattttgtaggtagctgctgttgaatgtgaagtattattcacgtgttatttttcttattagtatatttatattattttttattaaaaaaaataaaatttcatgatctggaccaatgagggattgttgtcacgtgataatttacttaacacttaacagttaggtacctatagaagttccagaattataacttatgtattattaccgctaaaaattaaacttgagcatttatttacaacaaaaaattatatttaagtatttatactgtaaattaaaaaaaaaatatataacttttgggttttgtgaatgggataaaccaacctatcttggatggatccgtttcggccatatgctgtcttttttcttaggatagtccgactaagatccataggccaaacccatacctacgaaaagaggcccatcacaaaagtttgtcaaggccagaggccacctcattggcatgtgaaggatacccaatagttggacgggaaatttacatggtatacttatttttgctattttttttttacaaaaatactgccaggcggtattctttacttttttactgtattttttt

SEQ ID NO: 141007 - DNA, 594 bp, Cannabis sativa
tgagcctcaacccaccgaaaaccccaatttttgcccacggtgacggcgcacggagttaaggccttcgacccacccaatcgacgacaagcccatggtgacggcgcacggagttcacaccaaaccatgtctaaatcgaaggtatgttttgattatttttttttattatgttttttttaagaaatcagttaagattattgtttggaattgttttgattattgtgtttggaattgtttgtgtttaagattattgtttggaattgtttgtgtttggaattgggatttgggtgtttcggatctgtgaaaggagaagggattggggtgttcgggtgtggagaagaagaaggtccgatggtcatttgtttgggtccgatggtccgatgtggggaataggggtcggactgtgttcgagtccgatggtccgatgtgggtagcaggggtcagactgccttgagttcgatggtccgattgtttggggatttcatggggtccgattgtccgattattgggtgggtccgatggtgccacaaattggttgtgtttgggtccgattgctaccaatcggaccttcacaattggtccgattggtagccatcg

SEQ ID NO: 141008 - DNA, 844 bp, Cannabis sativa
tcttagtcttttattcatcttattttattcttccattgtaatctctctattatttctaacaaggaatagtgtgggctattaagataaagtgtataacctcgttcttgttgaatactcaatacatgagaaagaacaattgagagagaaaacaattttctttttaatctctatatttcaaaatattagagtaaaagtaatgtcaaagcctaagtctaatttctcaaatcatgctcctatttatagtagttaaatacctttaataaaataattatttaattgtttaaataaataaatatctataatcgaatttggagagtgatatatatgagggaatctctcaaccacttgagaaaatatctcaacaaccttgaaatacctataaccactttttaaattagatattttcctaattgaatcaatatcaatatcatcaatcaatatatatatatataaaggaaagtttttagagagttgatgtggcatgtttaagcttcatattatctctaatactcatttttcccttttcttaatttttttaatttttctttccaaattgtttaatgttgtaagttatgattttaattaatatttcagtttacgttttgtaattaattgtagtttctcaatgtgtctcttcatgtgaagattatatcacatataaagtgtattgatgattaattcaaaatcaattataatctttaattatgtggagaaagatcaaaagacaaaaaatgcatatatatatagtgtatagttttttttacctacaattgcacatatctaacacgttctttccaccatcactctttgcaatctcaattttatttttaacatttaaagcaaa

SEQ ID NO: 141009 - DNA, 590 bp, Cannabis sativa
  modified_base (367)..(372): a, c, t, g, unknown or other
atccattagggatgattactcacgaaaacaagaactatgtagaaccaacaatggagattgaatatctctttcattaaagttcattatttaaaaaatgtatttttttctaatcacttattttagtcaacatattttagtaatgaaaattacttaatttaagttgatccaaaatcaattaaaaaattaattttcaactttaattttattttcaaaaatccatttataaatgaatataaaatttgaaattatatattaaaatatagtaaaataaatatctaaaaaaatatctaatttaagttgttctaaaataacataattttcaacttaaataattttttcaaaatttaattaaataataaattaagtnnnnnnaactaatcaccttaatttgaaaatatccctatttaagtttatctaaaattaacaaattttcaacttaaaaatatttttaaagaatatttgaataactaattttctagaataactaacaagtatattttaacctcctaaatatgaacttctaaaacgatataaaattaaacacataaaaggtatgaaaaaccttatattggttgcagcagaattaaatg

SEQ ID NO: 141010 - DNA, 815 bp, Cannabis sativa
gatttgtttggatgaaaactaaaagttaaactcaagaaaaagggaaaaaaaaaacaaaacaaagccaaacttggccaaaaaaaaaatcttctgcttgttctgtaggcgcccatgtgtgcgtagggtcgtggcatccaccgagtccacatgcaacgaaaaattaggacttgcatggccacataggaattgtttggatgaaaaacaaaagttaaactataagaaatcaacacaaaacaaagccaaacttggtcaaaaagatattttgcatggacgcaggcgcccatgtgttcataaggtcgtggtatccaccgagtccacaagcaacggaaaaccgtggcttgcatggccacatagaatttgtttggatgaaaaccaaaaggtaaactcaataaaacaagaaaacaaaacaaaacaaagccaaacttagtaaaaagaaatcttctgcatggtctgtaggcgcccatgtatgtatagggtcgtgacatccaccgagtctacaggtaacagaaaatggtggcttgtatggccacataagatttgtttagatgcatactaaaagttaaactcaagaaaacaagaaaacaaaataaagccaaatttggtcgaaaaaaatcttttgcatggtctgtaggcgcccatgtgtccatagggtggtcacatccaccgagtccacaagtaacgaaaaattgaggcttgcatggctatataggattttttttattagataaaaattagaaattaaactcaagaaaataacaataaaaaaagtaaaacaaagccaaacataataataaaaaaaagggaaatttgaattt

SEQ ID NO: 141011 - DNA, 568 bp, Cannabis sativa
tagggcataaaacccaataggatgtttgtcaaccaaaatcagctgggggtttaggcattaaaagcttgaagagtggaacaaggctgccatgtgtaaatacatgtgggccattacaaataggcaagaaagtttatggatgagattggtccatagtgtgtacattaagagagatgattggtggagctattcggcttctgtccacaccagttggtattggaagaggctggtagctttaaaagatcatattaaatcactcactgatccagcaagattccaggcacagaagtataacattgcaatagggtacaaaatgatttgtcctcctcaaaacagattgaaatggagtcagtaggttgggttaagattgaacattccaaaggacagtgtgatagtatggttggcaatgttgaataggttaataaggatcgactcgttaagtttggtatgcaattgactgaaaattgcagcctttgtactatgcacaagaagaatggccatcatttattctttgaatgtagttttgcttttcaatgtctccaagagattaagaagtggttgtcttggaatg

SEQ ID NO: 141012 - DNA, 1137 bp, Cannabis sativa
  modified_base (482)..(496): a, c, t, g, unknown or other
gcataaaacccaacaatttttaccctattttatcattttttttattcctaatatttcaaccctagccctattgaagatagtataaaaggaagggtatggtcttgttatccaactaatgccttcaaagctaaaaacctagttttctctctaggtttgatgagacctcgttcttcttgtttctcttcaattttccaaacactactatagcctctcttcgtaaacaatttcaagccttagtgattgagtgcatgaccacacatatcaagtaagtcctcaatcatagtgtgtaagactatgaagaatccaaattcaagagaaggagaatcgggctcatatctttgtgatagtctgctacagaaaggataaaagggttagagatctaagcggaatgagtcatttaattctgctacaaccactgtaaggtttctcaatctttatatgtgcttaaattacattatttttagaaattcatatttaggatnnnnnnnnnnnnnnntggtagtaaatctagattctagtaaaacaatatccaacaatatctacaactgaatccaacaaactcggatccaacaaatctatccaaaaataaaagagctttattaaatcatcattgtatcctagaaaatagggatatttatcatttgttcactccttttacggatgcatatgtaacaactctccccctataaataatgaaggcattcacaaggggatgggaccgaaaaattgagagttatactcaaacttacacatctaagagcattttgctgaaagatatctataaacactttgagagtcaaaagctaggaatcactttgtcctccttagtgatttgtttcgtattatctcacaagtaatacaactaaaggggatcattacccatatataaggaggtagaacctctataaattttgtgtgttctttatttatttattattctaacctccttactagtaattaatcagcatttattaaactctgagtcagttgactattttccactcaacatttccaatgaagaatatacagagataatagtgagaacaaaaaaatgtttaagggattattttacaaatatacaaaaataacaaaaaaaaatgacaaagaaattttaaatacgatcttttaatgtatttt

SEQ ID NO: 141013 - DNA, 511 bp, Cannabis sativa
ttcctagtcatgcataatttattattttgtctcaaatcacaaaattaaaattagtcaagaatgcatcaccaagcacacaaatttttcgaaaaataaataaaattttcaaactatgctatctacctactttcaaattgactcataataagcaaattgagtcaaaacaataaaaactaaaaactaaaaaaaaattaaaaaatttgaacgacttaaaaaaaaattaaaaatttaagttcacccccaaactaaagtgacacattgtccccaatgtgacattaaagagagagaaaatggaacttacctgagcgctacatcaacaagcggttgacgcccataataagcgttatgcaggacaacatgaaagttattgttgtaattaccttcaagcttggcatgcgatgagtttgaaccaaaatcagcgccaacaacacacgactttggatgatgagcttgggagaagcctttcgtagctggtagaggatataatatggtggggatggtgttgataaaa

SEQ ID NO: 141014 - DNA, 657 bp, Cannabis sativa
  modified_base (168)..(190): a, c, t, g, unknown or other
tatcgctattggtgcaattaagtacgctattggtgcaattaagtatcggctattggtgcaattaagtatcgggtttggtgcaattaagtatcgggtccatcgggtcccatatagtttaatataataatttttatagagtatcgctagccaattgcaagtcgacacatnnnnnnnnnnnnnnnnnnnnnnngtgcccaatagcaatgctctattggtatgtccaataacaatactcttcccatcaatatttatttatttttattttttataatttaaaaaatagaaagaaattggaggagtgttataatttgaaagaagagttattaattaattaattaaagattagagtaggacaaagaaataatagtttagaatatatgtgtggttgggttggtcagtcttacaaaatatcttctttacttgtttttctaccaactctataaagactaccaagatgaaatgaaaccacacccacaaccccatcacattccacacgtgcctccatttcctatcatttctctctccttcaaaactcttttttcttctttccaattctaccctcctcaattacaagctcaacattattaattttgagtctactcactcacaaactaacacgtcactcattcttattttttttattgactaattaaaatt

SEQ ID NO: 141015 - DNA, 1141 bp, Cannabis sativa
cttagtttgattaataaatattatctttcttgacaaaaaaatgaataaagcaaattaatttaaaagataattatgatagaattatgtatctaaataaattcatagcgaattaagtaattaagtatgttatagttaattattagtataaaaatattagcaaaatttgtaagtaaaatgattttttttataaataaatacctatataaaaataatttaaattaacttttttaaaaaataataatagttcaaataaaaaattaataaaaatttaattattaattattattttattttttaaaataaatatataattaaatattattataatatgtataaagttttaatcgtatacaagtaatcctattgtaagagtatacaccttacatcataataactacatgatctaaaatcaatggtaaaaaaaagttccctaccggtaaggaactttcgttaggtcctaccatagtcttgccctatatatatattttccactatactggtgctatattaatttttcattataatatttatgcttatgattgcagaatataatttttatatgctattgtatatcgtggaaaaaaaatcatttaatagtagattagtttagttttatggtatatttatattagtctaaggtatatcgtttgtatgtgatatgatatatcgtgaaggatagaaaaaaaaaactatttaatattgtattttttttctttattttatacggtatgtatttattatgtgctatgatatattaataaataaatagagtggtatattatttttatttgctatggtatatcatgaaagaaagagaaaaaaaaccttgtggaagtttatttaattttttttatatatttatttgattatagaattgttgtggtatatttatattactctaaggtataatatttgtatgttatattatatatcatgaaggaaagaaataaaaataaaattaaaagaatacttattagtaaaagtaaaaaaggacataatactcatattactctaaggtatattatttgtatgttatatttatagggacacgattttgtcccgtgatgtactttcacggaatatattccgtggtacattagatgggtctcggggtacattaaatgagtgttaaggtacgttt

SEQ ID NO: 141016 - DNA, 644 bp, Cannabis sativa
aatagaagcactttcctttttgctttgcatttggatgagcagcctttttcttattaaccgttttaacagatttaagaggcttcttgctattattccaattcttcttgttgttgggtctcaaagtagagaaaatttttgccttagccttggctgtaccattagcagtgccagaactaggagctttagctcctcctttctgtggtcctccaatcaaattttcaaatgtttgaaggttgtttattaactcgtgaaagtcaagctccaacttgttcatgacataatttgatgtaaatggcagaaaagatggagtcaaactattcaagatcaaacttacttgagttgtttgatctataacaactccatgattctcagcctcttagaaataactagtcatttggaacaggtgatcacacacgttatgatgaagtttcatccgtggattgatgaaatttttggtcgcctcaaagcgagcatgaattgatgccatcccaaacagttcagctaactagttcatgatttctgcagccatgagagtattaactaaccttgttttcaaggtgtcgaccatgcttgacagcataaagtatggagcttttttgttagcattctgccaacgctcaaacttttccttggctgccttggtc

SEQ ID NO: 141017 - DNA, 1159 bp, Cannabis sativa
  modified_base (831)..(837): a, c, t, g, unknown or other
ctaagttcctggtaaaataaattccaacaatatcttgtaactcggtgttgatatgttgcattagtgacatgcgacttagttcatttttcatcaagtagatccagggataactttagaagttcctagttttcttcgtgattacaaaactctcgtctgtgagtcaatatgctcacttcaacaagtaacattgcttccgagccaaatgctagcgaaaagggagtgtgtcccgttgccgtcttctcggtagttctgtgagcccagagtacttgaggtagctcgtcgacttacctgcctctggcagcgtctaacttcttcttaatagtatcttttaaggttttattaacaacttccacttatccattcgcctgaggcctggatactgacaggaagctcttacttattttgtttctctcgcagatttcagtgaacaggtcgccatcaaattgggttccattatcagatactatcttcataagaattccaaacctacagacaatgttcttgacgacaaaattgaggaccttcttgcaggctatggaaacaagaggctcgacctcagtctatttagtgaagaagtcaaccgctactatcgcgtatttggctcctcctcgctcaatgggtaattccccaattagatcaatccctcatatagcaaatgggtacgacgaggtcatcatccttagttctgttggtggcacgcgaggtatatgtgaaaacctctgacacttatcacatttcttgacaaactcatgggtgtccttattgatcgttggccactaatatccttgtccaatgatctttttagataggctttgccaacctgcatgatcnnnnnnnaagccttcatgaatttctctgatgatttcattaacttctgtggggagaacagaccgaagtagaggcatcgaataacctcttctacatagtttgtcttcaattattgtgtagcgaggcactgcgtataagagttttcgctcctcgtttttgtcagttggaagtcgtccgtcgagtagatagttgactataggggtctacattggtcgatttagtcaggttatagtatatattcaacccaatataaatatcgagttgcaaatatttaattgtaacctgtccaattaaaaagtagaaaaagttcaacccgtccaatgattttgtc

SEQ ID NO: 141018 - DNA, 716 bp, Cannabis sativa
acttcatggtgaaggatcagagcatcacccggactcggtttcagcagatcccgacatatcactgtcctcccctcacactttctcttagggatagagctcagaagcttgccttgctgctgggtgctacccggaatatcactctattgacctttgaggacgaactttgtggagtacgggctttaaccgaaggatttcattcctaagcctatgaaggagaggaagaggaaatttggtgtcggcctggctgaggaagctcataaggagaatgaactcatcaaacttaagcgtgaagctaagttgaagggaggtgcaagggccaaacagtatgctcatgagcctttgaatcctgaagatgaggttgaggaagagtaggtgactccgctcaaaaggaggaagtaactttcgggccatcccaggcccgttgaacatgccattcgaagtacagagcccagctcacctactcggccaccttctcgcgtactaggaaaagggaagggcgtcatggcagagataaaagatttgtcaggtgatgatggactttcgagtcttgctcggacaaacgcttctcatgaagcgcaggatatttcgtcttgtttttaaactttttgatgccttttttcttctaaccatgtggcttttattccttgcagacatgtctcagaagatgcctgatgccctaaaataccgggctactttttgttgatgggctatcaact

SEQ ID NO: 141019 - DNA, 721 bp, Cannabis sativa
gggttcccaagtccacggcaattctaacttatgatattcataatgattggtgggcctggaaaccagggcccaccgaactcccattttttgaaaggccaatactatctttaacaagaacattattgggctcatcatcatggtccactcccttagattttgacacatcagcagtgttgtataaatcactttccattcttttcctttttaattccaccaaatccatgtccacgtcagaagtgtacatagcatcattctcaatcacattaacagttgggatcatgaatggcattatcaatcctttgaccaacctccctagaatcatgggatggtgatatgatattgccttgactaccgtgggtgttattgtgcagctggtgagatcccaccaaatcagcctgtgttgatggtatcggagtaatgattctcggagcaccattgtcgtcgtcggttcctggtggttgttcggcagaactggaacgcaaccatggagaagctgtgaggaagttttgctttctcgatggggctcgcatggctatgccataaggtttttcgatttcctccaacggagtgtcatatagcttgtgatagaagcgctccgaatggcccattataccacaaataaaacaaaaggtcggtaggtattcatacttgaagttagcataaaatgactcaccacctttctttctgaatttcatgagcctcttgagtggaacatcaacat

SEQ ID NO: 141020 - DNA, 708 bp, Cannabis sativa
aagcaccaagatgatgacgggcttggcctgatcaatttggcctcccaagtaaatctttagtcattgaccattgaccttgaaggtctctggtttctctcttttaagttccaccgctccatatgggaatacttgaaccactgtgaatggtccagaccatcgtgatatcaattttccaggaaaaagcttcaaccttgaattaaaaagtagaacttgctgtccgggttgaaacttttttctgaccaagcttctgtcatgccacttcttggtcctttctttgtagatcttggcattttcatacgcctcgttttgaaatttatccatttcattgagttgccataaccacttttctcctgctgctgccaagtccatatttaaactcttcatggctcaaaatgccttgtgctctaattccactggaagatgacaagcctttccatataccaacctatatggtgacataccaataggtgtttcaaatgttgtcctattggcccacagtgcatcatccagcttctttgcccaatcttttcgtgagcgttgaactgtattttccagaattaatttaatttcttgattggaaacttcaacttggccattgctttgaggatgataagctattatagtcctgtgaagaaccccataccttacaagtaaggcttcaatctgtctgttgcaaaagtggctcccttcttcattaatgatttctct

SEQ ID NO: 141021 - DNA, 506 bp, Cannabis sativa
tggtcctcataatttgacaaaatcagatcttattcacattaaccttctctgagtttgaatcatccactactcctatagttccttctcctcttcattacactcgtatgcatcgtgttgaaaggtctcaataattagatactggtactttgtcgttgctcatcctcaaacgaatgggtaggtagaagttgtgaacaagaccctcaaagacacttcgaaaaagtgtctagaagatgcaaaatgcaattggccagaattgctcccagaggtactctagtcacacaggaccaccgagaagacgaccaccgagcaaactccattcgctttagcttatggctatgaatcaatgttgcctgtagagctggtgccaccgtctcacaagagaatgacctatgaccaagaagtaaacagcgccttgatggcggaatcccttgatgaaatagaatagagaagagaccaagccaacctaaagctacaggcctaccagcaaaaggttgcaaggcacttca

SEQ ID NO: 141022 - DNA, 782 bp, Cannabis sativa
aaaaaatgtagctatttttttaagatttaaaagagataaagatcttttaaaatggatcaaaattgagagagatattaaatttttactaaagacactttttctgaaataaaacttaaaacgagatatcttaaccgagtgaagatactgacttttgataagtaacaactccgaattagggaaaggtttcttcaaagaaaatatgtattgttgaattatctttctaagggtactagaatcgctggaaaagaatacatatcgagagagatattgtacttaggcaatataggaaagaaatttgaaaaactgtaattcgatagccagcatgaaaacatgaattttttgacatcgaaataatcagaatcaggaaagagattcttcatgaaaaatatagatcattaaattatctttaaaatggtacctaaatcactaaaaacagacgtatagagagggagatatggtagttttatgaaagcctatttctctaaaaacgaaaataaaacacaactatgaattttagtttatattatatttaatacctaaataatttaccttgtttcgaagacacggaacgatgattagataagagtggttgattgctgacccccaaagctcttaaaattagaacaattgatttggtgaaatagagaggataataattttgagagatgatgagaataagatagatatatggctgctaggtttctaaaactattcatatgagtatatacgtatatggaacactttttaatgggtattatccatgaatggttactaaacaaatt

SEQ ID NO: 141023 - DNA, 622 bp, Cannabis sativa
ctggaacgaattacagcaagaaggagcctccaaccttcaagacttccagaagagagtccaaaagtacatcaacttagaagaggcccaaatagtggcttatgggggatactattcgaccggaatagtagggtatgcgcccggagtccagctcccgggaaccctaccaacggctactccaccaatgagcggcatacaattctccgctaccctaggatataatcagagccaggcattggctcctgcatcttctcattatgggaatccttctgggataaatggacaagtcccgtctcactccgctcctgctgcaagcctagcgggaccttctcaaggctctcggagcaagaggtcctcaaaaggtagcaacccgacggaggacaagcgacagaaaagggggtacactccccaatacacccagtacacggaactgacggactcccaggaacgcgtgtatttcaccaccaggcaaaatacgcactaccggagaccgcctcttctatacagagctttctcccaaaggaatcccaacaaaagatgcaaataccataatgacattggacacaacaccaatgaatgcaaaaaccttaaagatgagatcaaaaacttgattcgattgggtcat

SEQ ID NO: 141024 - DNA, 587 bp, Cannabis sativa
  modified_base (281)..(281): a, c, t, g, unknown or other
  modified_base (373)..(377): a, c, t, g, unknown or other
aatatcatgtcactttgcataggctcactctctaagtattctcatttcatgcatttcatatatatatttttaaacaatgagggcattgtctgattttagttgggggtggtgagcatattcaagcatgcttattaatttttgtcatattaatattttcatggtcaaatttttcaaaaattactcatttattcttgtaaagccaatatttgttatctttgttacttggaatttttctacagttataaaatgtacatgccaaactttgtggtaagatggttgtnagcacatatttgcttagaaaagctaccaagtttaagtgtttatgtttttgtgagtggcgatctttgagaaaacaacttttgaatttttattnnnnnttagaaatggttataattattttggacatggcactagggtttgattggatgttgctttaagggacaatttttatagataaatcttattagggagcttttttgtaattattttcttgttgaaaaaaaagagagaaaaaagaaggaaaatacaagagcaacatttcatcatcatatccaacatgttgcctcttattcaaaaaaaaaaaaaaa

SEQ ID NO: 141025 - DNA, 900 bp, Cannabis sativa
  modified_base (762)..(772): a, c, t, g, unknown or other
atacaaaataggaaatacatgacctataccgtaggtatcttaggggttaggtggatataatcttttatcctctcttgactgatgtgattcctcataatgcagccatcactagactcatcgattgttgtgtaatcgccgtaaaaagggcttacgccatctgtcgcatcttttatggaggtttcaatacgtcttcccccatgcggcattaaatgcaaagtgattgttcaagtaatctcattacctcctggaaatgccttagcatggctatagcctcccgaagagtaaagatgtgtcttatgctttccttcgggaggcccactccctgtggtgttctttcttttgtccaagacttagttaattttcgtgagtcgatattctttaagatccatgtgtcacccttatccgtgtccacttattttaggaaaaaccaaaggcaacatttacgccccaagcctcgtttagtgaagggtaaatgaggcttgttcgatgcctccggttagcttgttgatataatggcacgtgccttaagcgcgtgggctgcatttatgatggtcatcattaatatttatttttttttgcaagcaacgattcgcttcccatccattgagaaacctacgcatttaatccgagtgtcagaaaagtactcaaacgttttcaaccgccctgacacccatttatctcacccgttggattcgtagaatgcgaatcgattacgattcccactgtattgttggaattaaatttaccaggatcttagatctnnnnnnnnnnntgttgatttaacaacctaaatataaaatgataaacaaaaacatataaaagttaagaaaccttacagtgatggcagcggaattaaatgtcttcttccactcagatttctaacccttgattcctgtctgt

SEQ ID NO: 141026 - DNA, 1290 bp, Cannabis sativa
tatttctatttatgctataaactcatgtgttttagagaattattatccccttgggttattaattctagatctaataaccatgattattttcttcttatttcagctgcagctacttaaacttggattgatatcctagtgagttgagtcggatggttggacagaagggtggatattgtccaagtgaagatgaagctcaaatcttctttaatttttgaataaattgtttcagtttatgaacaatttggtttcaattattggtttgtgattttattccctctttcatatttatgcagacaattcattatgacaattttgagattattaataaaattttctctttaagatattttgttatgaattgcatttatgaattgagcttcatgttttctttatcttgtgtatgccaataccatattatatttatatgtttatcatatttgtatgtgtttgtgttttattattgatacaaaatctatggtatattcatctcttcaaagagttaataccacataaacacttagaatttaaaattcaatgtttatgaattattgttaattcttaagtaattattaagattttgtttaataaaaagatcttttgatctgataggggtagaagaagttaagaagtaatttatgcagttcaaagatcttttacatctattgaactctagattatattcataactccgcaagatctccataacacttaggggcggatgaagctattgacatatgtagttcattttgaactctagacgatactcaatacaccacagtatctctataacacacatattttgaataaacatgcatatagtatgatgaacaaattagcaaattactagaacttattcttgatcttgtattttgttccaattaatatgttactctcgtaatagaaattgataccaataaagttcttggacatagtatcacagtaccttatttgagtgggaaaattttaaaattctatacccatctttatttggatgataacacttgtgatagattactatgttatgctcatgatatgaactttaactgagaaagtaaatctaaccattcatatagatagaaataacttatcagaattttgaggataagatagtagaattttgcatagtctattcgaatgacttaggcaaaatacctaattctcaataaattttttttacggttgatgattactaattcttaagcaagtactttacattgaagttaatactagattgctatgttgataacttagtctagaaggaacttctggtttcagactaagataatatgt

SEQ ID NO: 141027 - DNA, 762 bp, Cannabis sativa
caaagaatttacatctaataattcgaaaagagaagaagaaaaccaagagagcatttttaattccagatccaaaattgaaggatttgacatttagtgaagaaaaaaactttggactattgagaatgagttggcttctaatatagtaattttattatgtataaaaatccaaaactacactattgaggaaatgagagcatctcttgtgggataagttaaaaattacttatttttattacacattaactaaatataattctaaaataatttttattgataaatactcttttttataatcaaagtactaaatataatctcacataacttatcaaaattagagcttttactgcacataatgaaaatataacctataaaactgagtataaattaaagaataataaaataaaggtaaaaattaaaataaaaaatgacaaatagatataaagtgtaatttcctcatctcttgttcgatattgcaaaattgtttttcaatatatttagtaaaaattaacaaaattatataagttatatattttcttaatagatttaattacaaagtttaatataaataatattaattgttaaggatgtaggttagttaagacagttagttagttaggctttctgttattttggttagttaattctgttatggttcaactctcttgtgtatgtgtatataaagctcagctgtaaccttttctcaatcaataacagattacattctttgtttcctctctttctctctgttcttaaatcattaca

SEQ ID NO: 141028 - DNA, 805 bp, Cannabis sativa
agtcaatatcacttagttgatctttgatcaatagatcttaatcctgagatggttaggttctaacttaactgtattatttgtgttttttgacttgttcgttaaagctggcaaatgatccaatatttatatcttgggaacatgaaagtacaattgagtgagagcgctaatcatagatatagaatctatagcttctataattatataaaagtgaaatgatgatttcctttgagcttagcttaatagatataaatggaagagcttttatttcagtaattatattagtttactgaaatatcaattataggacgctaagtattttaaggatataaaatacattgaggggtagaacggtaaatttgtccttactcaatgtaaatcatctgttgataattgttgattattttgattaaaacaatagataattcatagcatatcaatatttggaacatatagagcattctatgtaatcatgagtgcaattctgaatctatagtggagtcgagaagaattaataagatgggaaatttacttggtaaattttggatctacttattaggagcttagttacataggcccatagtccccacaatgtctgggataatatttttttgtagacttaaacaatttgttttaattaatcaattagaattctaaataagactatgtcttgtttatggattttcattaagcaatggctcatttgagaaaaaagaaaagattcaaggtttatttattaattaatagactttgtaaggtctaattaataaataagttaaatgacaatttaatttaataattatttata

SEQ ID NO: 141029 - DNA, 1357 bp, Cannabis sativa
  modified_base (1087)..(1094): a, c, t, g, unknown or other
gacgaacaatttatgctatatttttttccccaacttccttgttggagcagcgagtagctggtttaacaagtttactcatcattcaataacttcctaggagcaactgtccagggatttcaaaaagcaatttaggctgctagggataggcgacccgaagcgacctcgctgactaatataaatgagcagcttggtgagacacttaaggcttacttaagccgttttagcacggctgcaactagggttagaaatttggatgataccacgcaacttacaacccttcaggtggggatctctactgatccattgactgcaaggggcgagttgtgggatgacttacaaggatgtccagtgagaagcatcactgagttcaacgaaagggctcatgtgcttgttcagaaagaagaagcccgaaaggaaatgaatctgttgaaaataagctcaggaggcaaacccagcaatatttcaacaggatcaatttccacgagaattgataactcgggggcttctggttcgaaaagaaaggacggagttaaggaaccgtcgaaggatagaaagaaacagaaaaagcatgacaaatatgtgccagtgtatactatttataccgagcttaatgaaactcgagagaatatttacctagcacatgagcagaaggtggccttcggcaagcccgagcctatgaggaattcgaaaagaaaaagagatcctaacaaatattgtaaattccataaggatattggacatacgaccaatgaatgttgccaattgaaagatgagatagaaagtctcatcgctcgaggccattttaaacaatacgtgaaaagacaaggctagggttacaaccagcccactctgcctaataacccaaataaccagaggttacaacctattcctgtggaaggagaggacatcctggttatttcgaaagggccacatatcgcaggggaaagcaataacgcccaaaaaagatatgtgaaagaaataaagaacgagcaatcggtctttgccccagaaacttccaagaagatgagaaaaatgtgaggtatcctcacgtcgatcctttggtgataaccattcaactcgccaatannnnnnnnaagagagtgttaatagacaatgggagcttggtaaatatcctttataaggagactctaaagaaaatggggctcaaaaaagtcaaattaaggccttttatggtaaacctttgtggattcaccggagatagcattgctagccttgacataatcgagctcacattaaccttagacaaggcacctttatctactactgttatgcaagacttcttagttgttgacctgccctcagcctacaacatattgttgggtcatccagcactgat

SEQ ID NO: 141030 - DNA, 846 bp, Cannabis sativa
aatcactgaattagtaaaattaaataaaattggacaaaactccttaaatttaacaatctcaatagttcatggagaatttttaacggtcagaaaaatataatttggtacatttaaaaatttagggcacaaaaattctaatgagccgtagataaagcacaaaatattgaagaaactagatgaagattacaattttatactaacattgaatatttataccgctaaaagacaatcattaaatttatatcgtttataactccaaactttggacaatatttaccctaataataataataataattgtggtgtagttcctccaaatgaaaatgtctccaaaagttattatctttcctaaaaagttgttgacttgtggaagcaggtcttggaaggctttcttgtcctttcgaaaagggtcttaaggaaagctagtcctcctccaaaaaggattttcggatggctagttgttcctcctggaaggtagtcttggataggtgactctaactggctcttttttatccgtgaaggtccttcagtgagtgccttggaccgtgacttcgaaagccttcatactcgctcctggatgtactcttacttaggctgacgtggagacctcgctcaaacgagagttggttaagttagttattgcctaactaacttaacaaccttaattcttgcagccaccgaatttaagatcttgattctaagcttataaatatcatcaatacttatcatttcaaaaaggcaacaatgagagagagagagagagacgaccgagagagggatagggtgctgggcgttgctgaccttcagtgcgcaaaaatagagagagggagagacgaccaagaaaga

SEQ ID NO: 141031 - DNA, 520 bp, Cannabis sativa
ataaatagagtggtatattatttttatttgttatggtatctcatgaaagaaagagaaaaaaaaacttgtggaagtttatttaagttttttttatatatctatttgatgactatagaattgttgtggtatatttatattactctaaggtataatatttgtatgttatactatatatcatgaaggaaagaaataaaaataaaattaaaagaatactacctatcagtaaaaaaataaaaaaaataaaaaagacataatactcatatatattactttaaggtatatatagtatttatatgttatattcatattactctaatgtatttttataatactttgtatataataaaaggtattttagatattaaaaagtaaaacatgacatttgttttattatttaaaaaaaaaaaagaagagatattaactataattaaaattagaaataaagctatttacttgtatttctctaatattaatgtaatagtgcgtaaacactaactctaattgtaaagcccgcttagtt

SEQ ID NO: 141032 - DNA, 725 bp, Cannabis sativa
  modified_base (686)..(696): a, c, t, g, unknown or other
ggtatttttgacaagtgttgctcaagttttgttgtatttgtggtagttaaattattggtaataatccaaaccgcaacaattgtaccgcatcgcaccattttttgcggtgcaatttctgcgattttttagtttcacggtgcgagtgcagtttgagaaattggaaaaaccgcatgtgtggattggtttaaaaaaatggtcaaaaaccgcactacccgcactgcaaataccctaatatttttttagcacacttaaaaatataaaaatacaaacaaatacatttataaaagttttgattaatatttatttagtttttatttaaatattatataattattaaaaagtaaaaaagaaaaattagtgttgtctacagtgcccacctaaatatggtgggacactgtagacaaacccaaaattaatgttgcaaatggcgtgcagttggacttgcttttagtgtaatggccttagaaaatgaaaatccagtgaatagctagtaaatacttcacaattcctttacataaatctcccataaatattatcatcctctatttttatttattgtaaaataaccctagttgtcgtcagagtctatggtgattgtgtaatgaaggtatccacatactaggttttttcagagaaatttgattttttatgcttacatttggttaaatttttttttttctaaacannnnnnnnnnnatatttgtaggatatgacaacttttatga

SEQ ID NO: 141033 - DNA, 1043 bp, Cannabis sativa
gattaaataattagccttttattattaatagcaatttggggaatcatttggtaaagttttaactatgtcaaaaaaaaaaaagtttttaggtctgccccacccaacatatttgttttttaatgttatattatttataataatataatatataaattaaatatatgtaataaattaataatatgtaacatatgacaatgtatattagttgtcatctttttgtaatatttgggggagttacttgttagtatgagtaacctccatcattatcactaacattaagagtgtaaaaagatgttacatatcttaatttgaaatttttaatgctataggaattatggtatgtatatgagttatatgtgagtccataacatctatgagggttatgagtttaaatttcaaatagtgatattttaaacactatataaagagatttaaggtgctcattttaaggagagttttctattaagaaagcacttttctagaaaatcctaaggcttgataattcccaaagctatttcttagagagttcccttagtgcttaaagatagggaaaaataagcttttggacaaaagtgtaataccttgttcaagtcatggtaattttcactattctacactcaaagttgtgagtgagtgtatatatatatatatttatacttttcttatatataatatacataatgtatatatatatatattgtatattatgtattgtaacatttctttaattttttttattggtccttatattgtattgtaatagaattatattatcatagttttcttcaattataataaaatctctaacacttaatttatttctaaatatttatattgtgtacccctaaaaatacatatatagatgcctatataaaaaaatatagaaatatactattttttttttttttgtgggatgcataaattataagaatatttctatattggaaaatatatttttatttaaggaaataaatttctatttaagtaaataaataaataattgattttgtgataaatgaaaattttatattcattgaatctgg

SEQ ID NO: 141034 - DNA, 1262 bp, Cannabis sativa
ttttttcagagcctctttcataagagttttcttcgtccccccttttgatcttgtctgccactatttataattacataatggacagtgatttacaatagttggcaataatcgttacaacgattattccgtcaaatcatgagatttgattacaaatcaagctaaataaatgagttttttacgcagctttgaatatccagcttttattgggttgagatgaacgcgtaattaaagatatacggtaagcctttctcatagggatgccttgcgagaatggagccaagttaactttgatagcgagcagttgcttgtcatttggcttcttaagactaatattgtttaaactctgataactatattttctggtgtcaagatgatcttcctcgcatgcataccatcttgtagcgagatgaatgcctcgctgtctgttatcttgactcgtcacactatctatactcagtttgtatatcgtataatatacgctaagtgtttttagtgttatcgtttctctttcacgtagggaggttgtggcctcgtcatgcacgcgtgcacccacatggtttctcgtcaatacataagttagtagttcgtatgtttctatctggcagaagactattagccagccgagttataaacataccctgcgaattatatttccaacgagttgttccatgctaagtgtacttttcgtttgcgtgtttgagttcttcgttcttcccagttcgacatgtgttttcctctgatgtgcttactgaatttcaggtataacaatatgaaaaaaggtgaatgatcattcatattaaaaacaaaataagtagttgagtgcatttttttaaaaaaataaatttgtaacatcccactaagctcagattactttactttaaaaaaaaaaacaaaaccaacgctccaccgacgttctagaccgtttgctcgtccatagcccctcgcagtatacatacaagaactgacgcagcttatcaaacttacattcaatgttctctgtctattgcgtgtagggggaaagtaaggcggtgagctaaaggcccaataaagaaatgcttaacatacaatagcattcaatacactacacatatcttaaaattcacagtaagatgattctttacaacattaacataccaaattttagcaacattatataccttagctcatagctgtaatttaaataactctagatatggaaagttatatcatataccatatatttgtgctaaacgaaaccattacatatatgtagggatcacaac

SEQ ID NO: 141035 - DNA, 1407 bp, Cannabis sativa
  modified_base (228)..(239): a, c, t, g, unknown or other
aaatagaactctttaaaataatgagctttagttataaggacattcgatctccattgttggttctacacaattcttgtttttgtgagatattcctaattgttgttcgttcattagcaatttaatgtcgtagaatctcgaaagataagtattattgtaagtattttattctgattaacgtccaccgtaaagtggctgctaagagtaggacttacaaagtatgaaacaatnnnnnnnnnnnntaagatagaatggccttgactctcacctaaattagacaacgctgaattcttatcttgatcaaataaaaggttgctaaaatggtatcaatttttgatgagttttctactctattcaatgaatagtatctttgactctcgcctgaacgggacactacataagtttgttggaaaccttggaaattacttaaaatgtgtttgttttgtattttgacatgtctttattacatgctgaatttatgataatttctgaatgtgtatgaatttatattgaatcttgtagttttctcttattattgttatagtataaatttcgaagcttcattgttggtctaactcagcttgttgtttttaatgggacaaatcccaaaggattgtcattcgttaaacaaatataatagtgatagatctcgatagaaattcatagtgtccatccctagtgtggaaagcagtctttggaatatcctcctctaggattctcaactgatgatagcacgatcagaggtcaatctttgagaagtccgtcttcccctgaagctgatcaaaaagataatcgatcctaggtaaaggttattttttccttgtagtcagtttatttagttctcggtattgaatacacatatgtagggatctgtctttcttcttaacaaacaatacaggagctcctcaaggtgacacactaggccaggaaaaccctaggtcaagcatcccgtgaagctgaatcttcaattctttgaattctgccagagccattgtgtagggtgccttagaaaattgttatgctcttggtgccaaatcaataacaaaatctatttttctctacggtggtaaaccaaaaatttcatcatgaaaaacatttagaaattcctgaacaaccttgataacctctgaccaaactatctcaggccgtgtggtatccaataccacagccaaaaatcctatacatccttcttgtaacaaatctgtagtttttaatactaaaattattggaatccaggatccttgagccgaatccacaaaaacaaacggttcctcgcccttgggttggaatatcaccatcttccgcttacagttaatactagccgagtacttggataagaaatccattccaagtataatatcgacactactacaaaattcactattcacgtcggtcaacgcgactgttcat

SEQ ID NO: 141036 - DNA, 560 bp, Cannabis sativa
caccaatcttcatcattatcatccacaaccataacccaacccccaatttcatcaaaaaccacctacactactctaaatcaactaccaatttcagagaaaaatctaaaccccaatattaattgtgttcttcatcttgggaaatctttggtggaacaaagcctttatccgtcaagtaattgttttctcttcattgaagttggtgttttaagagtaattgattatggatggtgtgttatgtgattattgttgattgtgaaagagatattggctgtggaatcattgttgaattattgttgggatttcaattaagtttctgctatagaataatttggaaaaaaaaaagagagagaaaaaaatacaggggaggtgttgctcaatttttttttttacactaaaattattattggctagttgattggtatggcaaccaaaacagtaaaaacatgagctaactgcttcatgcaaggttcatcatcacatacccctaatcttcaagatgatcaaaatcaacaactcacaaggtttgtgaataaccaagcggctaaaagatatgagaagtt

SEQ ID NO: 141037 - DNA, 841 bp, Cannabis sativa
aataaagtctttaagtctttcaatcaatcaatcaatcaatcaatcaatatatatataaaggaaggttttaaggagttgatgtggcatgcataaccttcttactttttctaatacttatttttccatttttctaatttctttttaaaaaaaaaattagtatgtaactaataattaatactattaatacttactaatcaaaagaaatcaaatcaaagttttatagtattctaaattaataatcatgtatactaaattaaaagatatcattaaaaaaaattaaactaaagacttatagtattataaaaataattacttaccacctacataatagtttatatatttatataattgtgttgttataatagatgacatgacattttctataagctttccttccacttttctactctctcaattttttttacatttttaaatttttgttaatttttagtattatttaattaaagaaatttagtgacttttcattcatgaaaataatttgttttcaaaaaaaaaaaaaaaactctcattgaaaaatatatttcttgacctctttcatttcacatggctatatgtatgggtagtttttcctaatctctctattctctttttctctcatttaattgatcttttacaattgttagtaataataataaaaaaatattaactttttttaagcaaaacataatatgtattaataacaataaaaatatgtacacatttattcattataatgaataatttttagcaaaaatttataaccaaaaaactatttgtattctttgtgtaactcttacaattattaactattaaaacaatttttattcttccattaaaaaaa

SEQ ID NO: 141038 - DNA, 1189 bp, Cannabis sativa
  modified_base (678)..(691): a, c, t, g, unknown or other
  modified_base (777)..(794): a, c, t, g, unknown or other
ccttaaggatacaatgtatgaattttgaatggaaaatctcaaatgatagtgcttgtattggcgtgtgagagagaaagtgaagaagagagaagttatcagacttacgataagagcttggaggctagtattaggcttaatttagcttaggttttctaggttagagttaaggcctttatataggaagcctaaaatcctaatttaccctttaaactctaggatatttgaatagttaattaattaattataaaagacttaaaatgcccttgaacgtagatgttactcaactattatattgggcttttagggcctaatttgcaacccatataatattgtccacatgaagaagtgcacaaagaatcctgtagagtcccccttggccagccaaactcctatagggagcaggctggctggctatggtgcagtccaaaggctggctggccatagggcaacccaagggtggccgatcagcttctgtgaggaagctggtctgtcactcgatgcccgtttgagtgtcggggtctccattttcttagctactgacttggcctttttattggtgagctatactgccacgtggcactgattttttcagcataagcactgccacgtctagaggacaaaaatcgagataacaaaaactaaagattatacagcaaaatatatatacctacaataaannnnnnnnnnnnnnaatataatattattaaaaaaattgtatatgccatattaacaaaattatatatcacctttataaataataaaataaaaactaaacannnnnnnnnnnnnnnnnnatgatatactatacaataaaatgtatataccatataactaaaaatatataccttgtaatagaaatatatatatataaaataacaataaataaaattaaaaatatataggatgctaataaaattatacatcatgtcaataaaagtacaataaaaaataaaatttaaataatatttataaaaaataatataccgtacaacgataaatacatatatcatttaccaaaatatatatactaacaataacaataataataacaatatatattactaatagggagaggttttaatgattacatcaaatatgtaaccatcatggttacatatatttttagtcataagattactattgaatggttgtgattaatttagaaattaaaataaataaataacttgta

SEQ ID NO: 141039 - DNA, 696 bp, Cannabis sativa
atatgttgtgtttcggtatgattttcatgtgggactatatttgtaattaagtccaaaatatttaagtctatattacataattacactacttttaaagtatggtaacacaatttccaacaacaaaatgtacatggaatgaatagttagatttgtagtgaaatcgataatatattataacataaggtaaatattcattttatactctagattttgtcaaatacatacttgcatggtactctttattttaataataattaattagtacctcttatttacaaaaattagatatttagtatcttatgggtataaaattttaaaacttccaaatacatactgagttcgcgaaagtttcttacttgggttcgtgaagaactaattaaccttcatcgcacgaccagagccataaaacctagaatctacaactcgagaactcatcttcttcctcggtcttatgacagaagctgcttaatgaacccgaccctgatttctaagacagggcagtcctagacattttatggacgataagatttaaaaaagagtaatttgcggctaaactctctgaactctcaattcacttacaattaaccttctaagaaaagatgcctcataacatacgacaaacttaacatatatagtagatgatatgattaaagtctatttaacactttatctaagaaatagcagcaccaataaaag

SEQ ID NO: 141040 - DNA, 1624 bp, Cannabis sativa
  modified_base (34)..(42): a, c, t, g, unknown or other
  modified_base (402)..(402): a, c, t, g, unknown or other
  modified_base (606)..(619): a, c, t, g, unknown or other
  modified_base (1132)..(1137): a, c, t, g, unknown or other
  modified_base (1552)..(1563): a, c, t, g, unknown or other
cgctcttccgatctgtagctaagtgttttaaggnnnnnnnnnattgaagggtagaacggtaaaattgtaactagagtttggtccctttatggccggccgtaagtgttgattttttcccaatatttttttcttttttaatccatataattcaaccctaagccctagttgaaacactatagaaggaacatgatgctttattctcatcctctggtaaactttactattcaacctaccgaatctaattttcactctctgagaactgatgagagacaccttctatagtgattcaaaacctccttcattgttcttcaccattcaaaccttgagtgatagagtgccatgcccacacatagcaaacccgaaggagagaaacaaatccaagttcagatcttgataatgctntgcgacagaaaggaatcaagggctagagatcttgaatggaaggagccattatattccgctgcgatcaatgtaaggttttcttaaatccttatgtgtttaatttccttgttttagagagttcatatttaggatgttaattcaacatacttattagtaaatctagatcctggtaaattattcccaacaactggcctcaaagccatnnnnnnnnnnnnnnttcatgaaatatggatttaaaatgttgtttgtgtaaatttggatgtgttcatgttagtttatgtgcatatttgatgattgtatgaaaattgcaatttatgatgttaaatatttttaattttgttctaaaagtatttttcgtgaatattagatgaaaatttaataaattaaggcttttacagaacttaatttagattttttatgaattagttatgattttttgaatttagataaaaatatttgaaactgagcaacacgcatgcgcgagcggacaaaggttgtcctaagcccctcctgaccgagttttgcctctcaaaaaggttaccagtagccctttttcacacaatttggccccttgtgcgcgagcagggagtatgcaatgtgcaatcttatttttgtgatattttgactttcaaaaatcatcttgcattgataaaattcaaattttggtagaagtttgtgtagaatcaaaatttttaaataaaaatctctaattatcagaataaaattaatnnnnnntaatttttttaattaattaaaatttgttttagatattagtaatttgatttttccacaaactagccttatggttaattttaaaatttttgattatttttgtttattttatttattttaattataagatcaaatattacttatttttttattaaaatttgaaatgatcttgttttgatataaaaatattaataaatttagaaataatctagttaaagtttcaaagttactaaccatatcagattttcaaaatttgttagtttttgaaatatattaaattaaattataagattctagttaagatatttttaaatgttttattttaaatagaaatatcttaacctactttctagatatcttttacatgtttcttatgtttctttatttaattattcaatttttttttttacaaacctannnnnnnnnnnntctaaattgctatgattaacttattgacagatccaatgatctaattttaatcatagtctaa

SEQ ID NO: 141041 - DNA, 681 bp, Cannabis sativa
  modified_base (78)..(78): a, c, t, g, unknown or other
ttccaaatttaaactaagcggtctatacagatattgggtaaaataccttgtcttgatcgagttttcttatgataacanctatcggtcaactatcaggatgaccccttttaaactgctctatggaaagaggtgtagatcacctattcactgggataagttaggtgagacaaagtttcttggtcccgaagctgttcggaaaatgagcgaggcaattaataagattagaacttgaatgcttaatgctcagttaaggcagaagagttttactcatatgaagtgatggaatgttgacattcaggttggagatatggtatttctctgcatttagcctatgaaaggagtcaaaccctttggcaagtgtggaaaacttagactaacgttcattggaccttttgaaatcttggagaggatagggcaagtggcacacaggttggctatgcccctagtgctagcatctgtacacaatgtatttcacatttaaatgctttagaaatatgtgtcgaactcatccgatattttgagttacgaagctttagaactttaaccagatctttcacacgaaaacaatcaaggcagatactcgatataagagagaaagatctaagaaacaaaatactagtgttagtaaaagtgttatggagaaacaacaaggtcgaagaggctgttggaaatattttacca

SEQ ID NO: 141042 - DNA, 544 bp, Cannabis sativa
  modified_base (40)..(41): a, c, t, g, unknown or other
tttaattttctaattaattttatgtatttttaggtgtatnnggtggaaaaagtagggattaaattgaagaacatgtgaagaatttggggtcaaaatataattttaaaagaaaaatcaaatcaacctttatggaagcgccactctcagtcaaagtcagcatccatccgagtcgtccgtttgatgatcggagggtccatatggcgagtggatctcacccagacagcaggagcgtgagttcctttctttttctctcagcctgcacgcgtgggacccgcacgcaggagctggtctccctccacctcctgcctcgtcaacttccccagccaaccagcaagtgccacgcgagcacccgtcagctcctctcccatttagcgctcgccacgtgtccgcctgcaaagaggaaaaagaataagacaaattgaatcttctctcagccaaaaaaaattacttaaaaatccaaaaatctatgagctagtttggctgtgttttcagttttcagtttttaaaattgtgtttttaaaagtgagaatagaaaacagttttt

SEQ ID NO: 141043 - DNA, 1256 bp, Cannabis sativa
  modified_base (876)..(881): a, c, t, g, unknown or other
atccacataattattaatatttataacaatttaagattacttataaattttcaaaaaatttcgagtagtttacaatgacaaaataagatttacatatttattgcacacacgattgattttcttatatgtgtaataagtaactgtttaaaccttatttttgtcacgataaattattcagaattttctaaaaatttacagatggtcttaaataactacaacgtatgcaattatgaaaaaaaaatagactaaaacgctctcttagatgctaaaataaataaaaaaaaaatctaccaaaataatccttaaagggcatctactataaattttctataatatataatattatattatatatataatatataataaaaacataaatttagctcataatgaaagttaaatatatttatatttaaagagaaatgttaaaaggtactaatggtatttaatgttacttatggcgtcatatcattattacagcaactaaatattaggtctcagattattcaacttaataactattatgaagtatcactaaccatttataatgtgtcacatataggtgatgataaatattattggtatcttataacaatgctcataattaaatttgaatattgaaattgggtacaattgttacccattagcatcataaggtgatgtgttgcaatttattaataatattataatagttattaaattaagatatgtcatgatacttttaatattagtaagggagtcatttccttatatttgtttatttaatttattaaatttaggaaaaagataatttgattaaataagggagaaaagaaaaggagaacttctcccactaattttctaaggaatgtcattaagggtaatgacttttatttnnnnnnattttattttttaatattaaatttgtaatgacaattttatcctttaaaatatgtcttacaaaataactaacatatactatagtttaacttaaaagggtaatttagtcaagcatttcaattacatttcctaataaagtaaacaagataaatcactatctttctttttccaagcagttttagtaaataacatattacaaattttgattccgattattcttcatttatttcgttatatttctcttttaatttattccgattctgaatactagatgtatagtatgttgggttttatgccctaaataaaactctttacaatttgattagttatcaatataagaaatttgaagtgattgatttttgcatgaattttacatg

SEQ ID NO: 141044 - DNA, 552 bp, Cannabis sativa
  modified_base (52)..(65): a, c, t, g, unknown or other
  modified_base (517)..(523): a, c, t, g, unknown or other
atgagttaagttactactagccaaagggtttccctttggctagttaaagtannnnnnnnnnnnnnatagttaaataatttttggttttacccttttgctagttaaagtacttcatagggggacatagttaaataatttttggttttaagtgttttaatcagattggtaatgttctaattagaatttttgtggactgatgttgtttcaggtggaatttcagtgttagagaaaaaaataatatataattcatgatttagagaaaaaaaaaactataaaaacaccacatatatatcaaaaaaaattcagaaagattaaaaaaaactatgaaaaataatgattaaaattacataataaataccgattaaatatgtataacttaataattaatttacttgcattttatattttttccaatgcaaaaatagtaaagcgtgaaaaataatatcggtttaacaatcaacttaaataaaataataataataataataataatttggggaattaccccatatactannnnnnnttaacttttttttttcaaatttatggttt

SEQ ID NO: 141045 - DNA, 603 bp, Cannabis sativa
actcatcagttctttacctgacaattggcaaactttggtggtagcggtttctaattccatgctagaagggactttgactatggatttgatcaaagatagtttgcttaatgaagaggccagaaggaaagcacaaggtgaatcttcttcttcttctagggctcttgttactgaaaagcatgacaacggggacagagtcagactaaaaatcagtatggttttagaagaagatccaagtctcgaaaagatatcaagtgttattattgtaacaagttaggtcacttaataaaggattgcaaaatattaaaaagagagcataatcaagggaaaaatgagaaagagactaatacagtttccactgaaggtgatgttgtaattgtatgtgatgatgggtgtgttagtcttgtaacccaagattacagttgggtgattaattgtggtgcttcattccatgtcattgcttgtagtgatttcttcacttcttacactatttgtgactttggcaatgtcataatgggaaataattgtgcatcaaagattgtgggtattggagatatttacatgaaaaccagtgttggtagcaaattgattctcaaagatgttagg

SEQ ID NO: 141046 - DNA, 665 bp, Cannabis sativa
gtataaaactcaagagaagacattcatttgccatttctccctttcaaaccttcgaatattcagaaaaaaccatcgctatttttctatcaccttgaatgctctattatccttgacttattttttgcgtgtttcatcagacttcgtcttcaatctcagggaatctcataactcattactccagttatgaaattctcactcgacaagttcttcattacccaaaaacttttgtcaaaacattaagttgtttacttctttatttctgctattcctttttccagagtttgtaatcttatttttgctttcgattgcctcttcatttactgcgtttggtttaggcattttttgatttagtttctagataatttctagggttttaaggagaaaacttatgtataattaaattcctaggtttatggtttagattgaattaatttcttccagaaattgggattattctttttagtctatatgtcccaatctaattttaaaatttcaattccaaatttcctagaaatagaatgtcctaacgaattagcttttccattcgaacccaaaacccaaaaacctaattccaaacttgagataaatgatgccaaaattagggatcatctaataaaaaccaatcatgatgaaatttctagtcgctataggcaatttttacaaga

SEQ ID NO: 141047 - DNA, 783 bp, Cannabis sativa
ttccgatcttatatgtatatatatatatatttttaacgctctaatgtttgctagcaactttatttggtaatttgagagtttgattaagttttgggggtgttttggttgtgtttggaagctaattttcatgtaaaagcttactggtttctgggtttggaacccaagtgccgcggcatggtctttagcatgtcgcggcccgcccctcttgtttgaacctgggagttggtctcaagtgccgcgacatggcttttgcatgctgcggcccgccctcgagtttttgggcagatttgagtaccaactttgaaaatgcatatctttgtgatccgaactccgttttgggagttcgagataccgttggaaagctcgttttgagctctatgtgattatctgtattttaaatgccataaatataatttatgaatgtagaatcagaggttaaccctatttgtgaaaatcccagattttgtgactagtattactggcacctggtcaggagcacccagggtcacgtagagttagcacgtagagttatgcgcggtgacgcttatactggaaatgatatttgtgagtaattagaaatcgggattaggattattaccctagtgatatatgttgtatgaatacaatgctatgatctatatatgagtatatgagtatgttaagattctggattatgtattcaaggcataacaagattggactcggtaattagagctgagatgaaccgttctaaggccttattgtatttatacgtgtgagcgcaacacataggtctacgtcacg

SEQ ID NO: 141048 - DNA, 1356 bp, Cannabis sativa
  modified_base (614)..(614): a, c, t, g, unknown or other
tgtagggccacccgtcagtccatgaaataactagagtgacgtactcgtgtataagagccattattctgtgggtgtaagggcccaaaggaggcttgaagcggggacattacaactttaattctattattgtatagcatatttctagccactcatattattaagctcccaaaatagaagttgtaaaaatcatcttctgagagacacattaatgagtgaatcaaagaactcaaagaacacaaataggagttcatgtatactcaggattcagactgatctactaatgatcatcgttgtgatatgaataactctttcatggtaaacgacacgtcaatgaaagatgttatcatacatatcagtccaatcacgtataatcaaattatacacaacacatttactacatgtctatccacatatgtgattcgaatcaaaatcacacacactagagtataatgtatagtaaaccgtacttagtagtttcatattaaagattcattttattttaatacagtacaaactagttttatacatatcgtataatcttaattctcttgtacatccttacaagattataccttctctatatgaataaagaattttcagatatttattaattntacttctataattaatgtattcatttattttataattgtatttctgttgggttctgtgccctaaataaaactctatttcaatgtaatcttctacattcatttatcaataaagaaacagatttattttattacttgtttaatgtgttatttagttcacatatttatttcatgattatttgtttgatgtataaattcatccaaatccttatcacattgatattcttgattattgtgatgtcaacacagtggaaagtaatcgagattgtttgattaaatgaaatcctatgatttatcagtacacatgatttcactgacacaataatctataatgtagtttacttgcacgttagacaagtggtatgtcctttccagagtattggtaaagtaagcttggattggacgtatggagtatgcattagatgtgaccaatattgaacttagataagatataataaatttaccgtaatatctatgtaattcaatatcacctagttgatctttgatcaaatgatctcaatcctgggatggttaggttctagttcagttgtattatttatgttcttcaatttattcgttaaaattgaccaatgaatcttctcgtgacatatagattaaggacatggtagttcaataaagtgggagcgctaatcatagatactgaacctatagcttttaaaaatgcatagaagtgaaatgatgattttcttcgagcttgacataatagagataaatggtggagtac

SEQ ID NO: 141049 - DNA, 1043 bp, Cannabis sativa
attattgaataatttatattaaatatcggacaattccttcttcatatatgaggttgtggcttgtagttgtacagagaactaagacacctagctatgaataaatcagtcaatatattaaagttataaaatctgtaatcaacggtttctagtacggttcactaatacccattcttcggtgcaggtaatcttagttcagattacgaatgtagtatgagatctaagtgaagatactgtatataatagagattatatatgacaaggaccgatatgattaaagctgtctttattaacatatagtttgctataaagacctaattcatatcataacgatgatcaatagtagatcgacctaaagtttgagttatcatgaactctttttcatgttattaatttctttgatttactcgttaaagtttttaagagaagatgattcttacaatttctattttagaaatctaataatatggatgtctaagagcatgatgtacaattatagaatcttgactttcttaacagattgaatgttagttccctttatgtgttaattctagtattggaaagttgcacgcaaattcagatagaatcttaaattatgcttctactagtgaattaatgtaactaaaagataaagaagtaattagaagggtaaaacggtgatttgaccaaaactaattacgaaccaacacaaggagggctaatcactgtaattaattatatcaatggacactacagttaaattcagtaaatataattctataattactaagagtgcaattccatatttataatggagtaatcacaaaattaataaacaagagttctttggtttatgggacaataaataatctaatttattggaacttagacttataggttcatggtccccgaataaccaccttgaaacaatgttaagggtagggataacgaattgtataaagatattcggaaaaatctattttgaattggaaaaatagtaattacttatttttgtaataaataaataatttttcaaattaattaatagagaaaagacaaaaattatt

SEQ ID NO: 141050 - DNA, 606 bp, Cannabis sativa
  modified_base (557)..(557): a, c, t, g, unknown or other
ctgagttgttactacctagtcactgttcttaagcacgaatatagtgagtgttagttagaattagttgtaggtggtaagttatgtgtataccttccttacattatattcagttcttcatgtagaataagagtaatatatgactctcattataaagaaggtaaactaaaaaataatctcatgacaactataatacaactataaataaagtatagaacaaaaaaaaaaaaaaaacagtttattgattttactagaaaaatacttttgtaaataaaaaagttcaaagcgtaaaaataaaacaaaaatcatgttgatatatttttataattctcttaaaatttttggtctatatgtaaatttttcaaaaaaaaaaaaaatacacttctttacacccacccatcgtattatatttttgttaccatcatcgtccgatgaccttcatgtaactgctgtcgcactatttttcgacaacttgtagttgtcattgcccatcacaaccacaaaaataataaatcttctaaaaaaaattttttcttgctttctgaataaataaacctaancaatttcatgtaccgttcatcaccatttaaattatgttttttttttttt

SEQ ID NO: 141051 - DNA, 873 bp, Cannabis sativa
gtggatgcaactgctgggcatgagcttatgtcaattatggatgcatattctagatataaccagataaaaatggatgttccagatcaggaacatacgagctttgtaaccaacatgggactctattgctacaaagtcatgccgtttggattgaagaacgctagggcaacaaatcagcgattggtgaatgagatgttagcaaactagattgggcgaaacatggaggtttacgtcaatgatatgttagtaaaggcagtaaaaagtgggaatcataccacaaacctcgcagaatgcttcaaaatattaaagaagtataacttgaagctaaacttgaaaaaattcgtttggagtttcctcgggaaaatttttgggattcatagtcaacacgagggatatcgaagcaaaccccaaaaaaatcaaggcattgatagacatgccatcaccgacaaagcctaaggaagtacaagccttgacggggaggatggctacactcaatagattcatttcgaagtcaactgataagtgtttgccattcttcaatgtattgcgaggaaacaagaaatttgagtggatagaaaagtgcgaagaggccgttcagaacataaaaaggcacctagcgacgcctccggttttggcgaaaccaataactagagaaacgtactcctttatctggctatctcgaaagatgcgattagtgcggctatagtgcgagatgagggtaagcaccagcaacctatttactatgtaagtaaaaggttacttggggaagagtctagatatcaccttcttgaaaaactcattttgtgcctagtccacgcctctcgcaagctacagccgtacttccaggcacagcccataaaagtgttaaccgatcag

SEQ ID NO: 141052 - DNA, 519 bp, Cannabis sativa
  modified_base (203)..(203): a, c, t, g, unknown or other
gagggccactcttttaccttgatccattagcttggatatttcattcatttgagtagctcctcgtgtaggcatcgacctaggacactctgcccctgggtctgaatctgaccctgaacccgagttggctatatctacaccattaataaagaaaatttaaagttagctatatataacaagtaatctatacgaaatattaaatgcanaaacaaacattatgtattcagcataaacaaacacaatataaagtaagctatatatcaagttactaattctaccgaaatttcgacagcataacggctgtaattggacgttcccaaaaattttaaaagtgcataaagtaacaaacaaaataaatataacaatacagaacaaacaaaataagataaacaataaaaatttctccacccatccgacctgagtacatgtattcgcagaacctacttcactacgaatgaatatttaagatattcaaactcaattaagcatgcattgaaaattaattataataacaaaaagtta

SEQ ID NO: 141053 - DNA, 666 bp, Cannabis sativa
tatatatataactagattttgttttataatgtgtcgaatatattatagtactaaaataatccaatttaatatataatcttaattaataatccaatttattcagcatacaaaaggtaccctaaaggtaatgaaaagtgctcccactatcttctattattaaattgtgtcccacaattactttaatataattttcacacgtcacttcatttttatcaattaaaaaataataatttacattaacaaagccttctatttcttagaaattctgttagatattttattagagtaatttgcagcataaatacttaaatttaactactaattataaataaatatctaagtttaatttttgtcagtaataatatctaagttataatttcagaacttctgttattaaatttttattatttaaaaaaaatagttcaaatataccaataaaaaaaaagttttttcaatattatacctaaaattgattttatttaaaaaaataccttcaacaaatttatttgcacaaataccgattgccacgtcagcataaatatcgaaatttaaaattattaccgaaaatagaaaaaaactggaaaattctcgattccagaaattttagtgttttgcaagttttaaaaagagtaactttttggttgcttttgatgtaaataatatatc

SEQ ID NO: 141054 - DNA, 652 bp, Cannabis sativa
gggggtatactccccaatacacccagtacacggagctaatggactcccaagaacgtgtgtattttgctactaggcgaaatacgcactaccggagaccgtttcctttgtacaaagacagctcccggagggatcccaataagagatacgagtaccataatgacattgggcacaacaccaatgaatgcaaaaatctcaaggaagagattgaaaacttgatccgattgggagacctctacgagtggatcaaaaacccgttgccccatctcaacccaggtcaggcggctggagctttgccacaaggagcaccagggggtacagcaggagtattggctccagttgttccccccagagatgcccagcatattcccggcctggcacctagacccaacgagagagtggctatgatctcgagatgaccccacaacgaaggaactacccgcaaggagctgaaacggtacgcaggggccgtgaaacacgatgaggtttcggaagttactcaactcgcagctcaaaggtcccggctaatggatcaacccattacattcacagaggaagacgctaaaaaaatgcattttcctcaccacgacccgttggtcatagagacccccattgccaataaggtggtggtcagagtcctaattgacaacgggag

SEQ ID NO: 141055 - DNA, 983 bp, Cannabis sativa
  modified_base (937)..(942): a, c, t, g, unknown or other
caatcctattctcgtcccaaaacctaacggaacttggagaagttgtattgacttctcccatctgaataaggcatgcccaaaagactgttctctacttcccaggatcgaccagctagtggatgcaactactgggaacgagcttatgtcgtttatggacgcatattctggatataactagataaaaatgttcgtccccaatcaagaacatacaagtttcgtaaccaacatgagactctattgttataaagtgaagccgtttggactgaagaatgctagggcaacgtatcaaggactagtaaacgaaatgtttgcaagccaaatagggcaaaacatggagatttacgtcgatgatatgttggtaaaatcaataaagagtaaggatcaatcctcagacctcgcggaatgctttaaaatattaaaaaagtataacatgaacctaaacccaaaacaatgttcctttagagtctcctttggaaagtttttgggattcatagttaacgcgaggggtattgaggcaaatcctaaaaaaaattaaggcattaatagacatgccatccccgacaaagcctaaggatgtacaggccctgacaggaagaatggtggcacttaaccgattcatttcaaagtcaactaataaatgtgtgtcggtcttcaacatactgcgagacaacaaaaagttctagtggagaaaggagtgcgaagaggcctttcagagcataaaaaggcatctcgcaacacctccgattttggaaaaacccataactagagagacgttatttctttatttagccatctcggaagatgcgattagtgcagctatagtgcgagaagagggtaagcactagaaacctatttactatgtaagtaagaggttactaagggaaaaatctaggtatctccctctggaaaaactcgcgttgtgcctagtccatgcgtnnnnnnaactacggccatacttccaggctcaccccataaaagtgtta

SEQ ID NO: 141056 - DNA, 1245 bp, Cannabis sativa
taattataattattaaataaatagttttaacatttataggattgaaattagaatatatgtcattagtgaaagaaaagataaattgttaaataaaacagcaaaattttaactagtggggtccactaactatggtcggctacataagcattgttttgctattattttatctttttttattccatataacttaaatcctaaaccctagaggaaatattataaaaggaataagatgactctcattctcataaacctaataacctaattttctttctttgttagacaactagaaattgagacctccttctttgtattttgaaatacttctccctcttcttcttcattgaatttcgagccattagtgatagagtacatgcccactcatatcaaggcaagtactcaatcatagtgttgaagattgtgaagaattccaacacctgaaggatctacgttcagatcttttgttatactctgcgacagaaaagaacaagagttagagatctggacggaaggagtcataacattccgcagctaccaatgtaagattttctaaactttatatgtgtttatttcattattttaggaattcatgtttagggtgttagattatagaatataatccaacatacttgttagtaaatctagatcatggtaaaatatgttccagcaaatacttcattcttttgtctctcaagttagtacaaacaaaaagagagtaggctattaccattctcacgggctgaacctctagaaattctggtgttctctttacttattatttttttatttctattatttctcttatctaatcgctttattatcttgactcactgtccctggctagaagtgatgtcaacaatcttaatagcccacattattctttgtgtgtggtggatcggtttggaagactacggtgtgagtttctaatcaactaaaatgatacaacatacgagaagttcgaggataccctagtagtcatcaagagttatatattctttttctaagtaatttattattttgattattttgatttaatgtatacatatttggagatccattgggttatggtacaatgataatcagatattcaaaatcttaacagttaacaaccaggtacctacagaagttccacactagtgacggagggtaattttactgccaaaaatacgatttaggtacttatctgctatccgacataaaccttaaatatttacgacgcaaattactctaattttttattttatttta

SEQ ID NO: 141057 - DNA, 651 bp, Cannabis sativa
acaatgtgaggtagcattctaataattcatttccctatgttatcttttttgttatgttttttttcattttttaattaactttgttaattttgactcaatatttgagagtattttaggaagaaaaaaaaaatcccacatggtttaaaaatcactaaaaatgttgcattatatgctatataagggtgtttaataacttttgtaaatgttgtataatgggtgattaatagtagttttttttttttgataaagtgattagaatcactcatgaatttacaacgcaaacatccgctaccagcgcaggaacctcctcgaaccaggatagctcatcgtctaatcgcagagcatgttttgccaaaccatgggccgctaaatactcagagcgagccacatgggacaaaactgtccccggaaatttagacaataaaactataacatcttcaaataacgctcctaactcatttgacatacatcttcccattgttgctagctgtcaccaaagctaacgaatctgaataaactgtaattctacatgaaacacattagaaaattagaataaaactttaattagaaaattatcaagctaaacaaaatcaaccaaacaccaagtactacgcaactagaccccctatagaaattgtaatgaccgctcta

SEQ ID NO: 141058 - DNA, 1452 bp, Cannabis sativa
  modified_base (332)..(332): a, c, t, g, unknown or other
  modified_base (890)..(895): a, c, t, g, unknown or other
acaatcagttttagggtgattctataacgcactcccttcaaagggatgtactgatgcaaccactacttgttttggcattcaaaaaaaaaattatatagctatttaagatatcctacaaaattttgagaaattcgaaataatttacattatagaaaataatgttcaaacagtctattttacacacgtataaaataaaatagtcacgcgtgcaacacactacttgaacgtaattttcagtgtgttaaacttttccgaattttttaaaattttgcaggatgtcttaaataagtataattaacatgaccatgcgaaaaaatttgactaaaaaattntttcggatactaaaacagatagaaatgtatcggtgtatcccttttaagggggtacattatagaatttccctcagttttattataattgtatttttaagtagaatgaagttacttttatgatattaatactatttttttaataattttatttagttattattttttaatttatttatcatatcaaatacattggactttcttaattttttattactataaaaaaatcaagttatgtgaaactgttatttacgatttagttgttttgtcataaataataaaagaaaacattaagtgtgtatttaattatttgaatattatttttgaaaatgtaaattattaagaaaattattaaatgtctactatatttacaaaatatataaaatttaaaaattatgtcgttgtaattatggataaccacaatttttgtttaaatagccacaaaattattataaaatgcacatttttataatcacttaattgttatagatgtattacaaaattataacatatatattgatttgaactttaaacataataaataatagtaataataataannnnnntaataataataataaaaataaaagtgatttgaatgatatataataatcaaatgttttacctaatgtgttaatatatatggtgagaataaaatgagtttttagtaatttaattagttaaggacaaaagatattgtcacttttattaaggtaataaattttttctgtcaaatttagttacccattttatactaaacatttctttttttttaagtggtgtgaatacttgaaatgaaaaaagtatgtagtattatctcactttaataatggtccataataaaagtgagaaaaaaaaaattttaaataacatttagtagtttatttatatgaattgatcctaaatttgctattattatcttttatggaaatctaacattacaatcaaactttcattgtatttggacattatatagcataaaatatatacttctactattaattagtaattaaaagttcagatatatactaatgagtttttttgttttatttatataccaattagtagttatttggatatataccaagtaatacaaaattatatatgataccattaattatat

SEQ ID NO: 141059 - DNA, 578 bp, Cannabis sativa
gataataattttcctgactttaaaagaatataagttgttagtgattggatgatatttgtttgcattgtagtgtagtttatataatctcttatgtgtggtgggttctttttagtgaaatttgttcttctgagtttgttcatgctaagtagaacgaatgagaaaattaaataaggtattatatatatattatgtagaagatctctgttatgagatttctaatagatacacgaatgtctggattttggttaaaatgtttcttagctgtacaaatattttgtctgttaccttgattcatcttaatactgctacaaaaacactaagaaattgtttgcatgattttcagcttttgactcaatgagacctacctagcaattgaattgcctgagattcccaactcccaaagattatggctaagcagtaggacttagaaaatcatttcagttgttcaccattttctgctatcttaatattgctagaaagcattaagaaatctgctcttttagtgttacgtggaacatttgatgaggagctttcatgagaaatttccatttgcatttgagctctctctctctctctct

SEQ ID NO: 141060 - DNA, 500 bp, Cannabis sativa
aataatatcaatattactcaccctaagtgcgtgaaggacaaaaataaattaagaatatctcaaaaaaattaaaaaataaacttgtaataaaacttaactcattacaaaaaggaataatgttttagaaaacagaaaacagaaaccaaaactaaacaaatagtccataaaacaattaggaagattaaacgtatgagaccaatccaatgctctcattaatattaatacttttgctcgaatgactgagaaattactattaagttaacagtttctccgtaagagctcaatctagtgctaccatcaattttacttatcaacttgaagactttaatactccctaatctttatagtttctccgagtccggagtttgggtcggggtctaagttcgggtcccgagtttgagttcgggttcgggtccaagttcaggtcagagattggtgttgactccgaatcatttgtaaatattataatacaagctaatacggagaatacttatctatat

SEQ ID NO: 141061 - DNA, 540 bp, Cannabis sativa
cagcttgatgtcaataatgcatttcttcatggagatcttcatgaagatgtatatatgactctacctcctgggtatattcctaaggggaataacaaattacctccaaatgcagtatgcaagcttcaaaattccttgtatggtctaaagcaagcatcaagacaatggtttgccaagttctctacaacccttatagaagaaggtttctctcattcagctactgaccattccatgtttataaggcattcctctactagtttcatcatcgtacttgtctatgtagatgatgttattctagctagcaataacttgagtgagttggaagccttaaaactaaggctgaatgatagattcaaactcaaggatttggggaatttgaagtattttctaggacttgaaatagcaaggtccagcaagggcatctttgtgtctcaaaggccatatgctcttcaagttttagaggaacttggatatttgggaagcaaaccagtgagcacaccaatggagcctaatctaaagttgtctcaagatgagaaagacaag

SEQ ID NO: 141062 - DNA, 618 bp, Cannabis sativa
actgacataccactagcaagcgattgatgccgtgacgacatcctttgcgacctgctcttttgctacatgttgtcagtctcctcagcaatcaaggctagctctaccactttcttgtacaaagtgtcatgtgaaatggtaatcttcaagtcccgactgattgtggcattcagtcctatcacatatttctatttcctggagaaatttgtgggcacaagatcaccagcaaacttagacagtcgattaaactcgagagtatattcggccactgacattttcccttgagtaagcttcaaaaagtcttccatatgtgaagttctcacagcaatattgtaaaacttttcttcaaacagatttttaaattcctcccaagtcattacactgacatcctgggttcaacccatgaaatcccaccagacgcgggcatgatcttgtaacatgaaggctgcacaattcactgtctcagtcctcatcacccccatattgtcaagaatacaggtaatagtgctcatctactggtcgacctttattatatcagtacctcccagaaacgtcagaggttgcagcttcacaaaccgctccaatacagaatctcgatgcgacattacatacccctggtta

SEQ ID NO: 141063 - DNA, 510 bp, Cannabis sativa
ccgcagtccaccgtaagccggaactcaataatctattacacgttgtcactccctacttagtggcggacccagaatttaaagtaagggaggcgtaattttttttaaaaaggagggagggcataaataaatttaaaaagaaaaatataaagtgtagttagagggatttgaataaattttactgatacaaatttctttttttaattcgtgagatatatattactatatctattatcattatatttgacaaaaagtttaatttcatggtagacaaacaattcaaaggttagttaagtttcgtatcatgattatatataaaattaagagaaatacaaacttttctgggtattatttatttttattttttttgggtgtttttcgggttagaacaagaaaggaaagaaggaaaatacttagaacccttagaaaactcatagaacctttagaaaatttcacccctaataataataagggtaaataccattttgcaccctgtgttttgtaaaagttaca

SEQ ID NO: 141064 - DNA, 505 bp, Cannabis sativa
actataatcatgagtttaatcatgagttttaatatgattggaatttaatagaatttatatatcaaacatataattataaaagtaaaatgtaaaccaaataatatacaaaatagtaagaaaataatttctaaacttttattgattaataaattatgattacatttgaattgagttttatttaagatataaaattccaactgattgatctcccaaaacaaacgtaccttgaattatagaaactaaaagccagcttatatcaattaatcaaaaattataagttaaatgaagtaataatataatgataattatattgtaaagatattgtgaaagcattatatatatagaggtttcaatggttacattaaatatgtaatcattatggttacctttatttttaatcattagatcactatttgatggttgtgattaatttaggaattaaaataaataaataaataaataatttgtaacctgatagtaacttaaaaatttatttccttataaa

SEQ ID NO: 141065 - DNA, 502 bp, Cannabis sativa
cacgcacgttctgatgaggtttcacccgtgcattgatgaaattcttggtcgcctcaaagcgagcttgaattgaagccatcccaaacaattcaattaactagttcatgctttctgtagccgtgagagtattggaaaaccttgttttcaaggtgtcgaccatgctagacagcataaagtatcgagctttattgttagcattctgtcaatgctcgaacttttccttgactgccttgctcgcattctcacctggctactcaggagcctcttcagtcaacacaaacagggaattttcaccaatgagagcaatattaatgttctctctccatttgatgaagttagctccagagagcttgttgtcagtcaacagtgacaccatgggattgttcatagtcatattggatactgcaaataacaataaatagaaatcaattaaggtttaacacaataacatattcagaaattattagcatttagtaagttggaatgacaagtgaaaatacta

SEQ ID NO: 141066 - DNA, 514 bp, Cannabis sativa
  modified_base (29)..(31): a, c, t, g, unknown or other
gaagatggaggctataaatacatttcttnnncgttctctttggttatttttgtggttttttttattctggttctcctataaatacatttgaccagctcactgacaaaagagtattgaggtgtgccgttcttttatatttttcgaagtggttatattttttttcatttgtttttgtgttgtttcagtgttgttttagtaggttttttttattatgattttctaggaatggacatgcaaatatagttgattttgtatctggtgttgaggctgtgcagtaaattgtttattttttttaaatcattattttcttttgttttgtatgattgttttagtgttgttttacagttatttttccatgactattcatttgacgtcaattttaatgtttttgctcaatattgtcggaattaatggttgtttctggctgtcctggtgttgttgtggtgattttgtttgtggttgtgaaagagagagccctcatacttttttttggtatttacagtataaaagaaaa

SEQ ID NO: 141067 - DNA, 817 bp, Cannabis sativa
tcttgcttgagattgcaaggtcaaataaaggtatttttgtttctcaaagacattatgccttgcaactattggaggatctagggtatttgggcagcaaatctgtcaatacccccatggagatcaatctaaagcttagtcaagacagcgaagacaagcttgccgaccctactctctatagaagaatcattggaaaattgcaatatttagtcataacaaggcctgacttagcttactctgtcaacaaactaagtaagttccttgcttctcctaggactaataaccttattgcagcccaaagggtccttcaatatgtgaagggaacacctgggcagggcttgttttaccctacaaaatctgatatcaggctgaaagcctataccgatgctgagtgggcatcttgcgttgataccagaaaatctaccacaggtttttgtgtgtttcttggcgattctctcgtgtcttggaagagcaagaaacaacaaatagtgtctagatcttctgcagaggccgaatatagagcaatggccaacactacttgtgagttagtttggttgatatctttgctcaaagagttgggaattgaacatgaaaatcctgccatattgcattgtgataataaagcagcacaacaaatagcagccaatcccgtttttcacgagcgtaccaagcatatagaaatcgattgtcacattgttaggcaaaaagttcaagaggggatcatcaagacttctcacacttccagcaaagagcagattgctgatatctgcactaaagcccttttgccttctcagtttcaagctctcaaagataaaatggg

SEQ ID NO: 141068 - DNA, 786 bp, Cannabis sativa
atcaagtgggatttcttctagatttataccttctatcaagaagtcagctaaagttggacccttgatggatgttcgaggattgtatcttatgtcgagttgccccagttcaatcgacctttttatcaatcatccagaagcatctagttttgataaaacttgtctcaagggctgatcggttaacacttttatggtggggtgagcctggaaatatggtcgtagtttgcgagacgtatggactaggcataacgcaagtttttctagagggggatacctagattctacccggtaacctgttacttacgtagtaaatagattgttggtgcttacccacttcttgcactatagctgcactaatagcatcttcccagatggctaaatatagaaataacgtctctccagttattggttttgcgttgcgagatgcctttttatgctctgaaaggcctcttcgcactcttttgtccactcaaactttttgttgcctcgcaatatgttgaagaacagtacacacttaaaagttgactttgaaatgaatctagtgccgccattcttcttgtcagggcctgtacttccttaggttttgtcggggatgatatgtcaattaatgcttgttatcccaaacttgacactctaacgtgacatcacgagaatggtgacatgtgaactccacttggagcatctgtgcgaaacaatatgccgagcaggatgcctcgctggcacatccagaatggaatactcaacgagccgtgccgaatgatcaacacttagcgaattcagcttaacgca

SEQ ID NO: 141069 - DNA, 584 bp, Cannabis sativa
actccccccttaaagagcattctaagcttttagccttctacgaggaacatatatgatttttgttgtgtagacatatggtcaaaccatataccaaatcatacagtttctcaaatccgattgtgccattgtattcgtagacccaaataaatggcgaataccaagtcttgtcctaatctggataatattgaagatgtttacaaaaatgtcactgtcgtacaaacgaagcatcagcatgccaccaacatgcgccaccacttgaccaccacttggccagcttgtgggcatcacctagcttgtaacgtgctatattggcatgcacgtgacattttcccccacttcaatatgtcgatgccctcattgacggatggcaggcaaatcttccagatcttgactcttaagcttactccaagcttcatccaaatcctaagtctgcacttgtcgctttatctctatagaaccaccctcttggtgacgatctccctcgctcactcttggacttgatcaaagaacctgtgccattgtcgctattcagaaccacccctggagtattgcctccgcactagaatacttccctcaacatgaac

SEQ ID NO: 141070 - DNA, 582 bp, Cannabis sativa
  modified_base (342)..(345): a, c, t, g, unknown or other
gaggaggtcatgaagggtcccatggcccaagaagggtacaaatcccgtgccaacggatgggaaacggctgagcttcattctaccctgacctgcgcccataagctggagccgatcgtggtggtggcaggcatcaagccttccacctccgggacctaccaccggctgccccgagacgaggagatgcccaaccacaactatgggggcttcggagcctggagccagatgcatcttatggccggggccatgctccctctccaagattatttcattaacttccttgtatttgttggccttgcaccttatcaacttattcctcaagcttaccgcctgctttcaggcatnnnnattttttatgctgcctggagctgggactcgcccagtccgacagaaattttgtatttttatgaacttgtttccatccctaaaaagggagataaacttaaagacagtttttatggcctccaagcctatcctttaaatgagggctcggtcccttacaaccagcagaagcacgtgaaggaataccgtcaccgcttcttcttctcctccggtttccaggccatggaccatccagagcttctc

SEQ ID NO: 141071 - DNA, 615 bp, Cannabis sativa
aaaaaaagagttaataatcatataacacaaatttaaaatatctctaaaaatacattgttatattgttctacttcaacattttgagaatttgagataaataatattaactgttgttatacctgaaattcggctggaggatacgtgtcaaggaaaaaaagaatgtgaatcgatgcaatatcttttatggaataactcattaattgcgtaagtatcagagtatatatttgtaacccgctgactgtaaggtcttaggcgaggaatcaatgaacgaactggtacttagtgtattaacgagacaccatatgtcgctaaaggagaatagcgaggcactggagaagagtaacacataccttagcttacagtaagcaaactaagtataaaagtcgaatcggctcgaagaacaagaatgcgagatgaccatctcgcgcgctacgaggaaacttcctatagtttcatccaactaacgggagcgagactcataaccctagcaagtccgaagatttctgtgtacccgcgatcgacataagacatatcttatcgacctcagaaagaagaatggttccagcttgccataattgggatcattacaatcaaatttctgtcgagacatctcca

SEQ ID NO: 141072 - DNA, 523 bp, Cannabis sativa
aatatgtatatacatgggatgattctacctcattgctcgaaaagattgtggcttttgaggtgaaatatatttgtctttcttttaccactatctaggaaaaaaatcttctctcccaaaaaccatgtctccaccttgtcccaccaataaatttaaaccacttgtttttttatttattaggtattttattaattttttaacgttaactaaagttaagtcaatagttaattttcatcccataattaatgctatattctttctctcaaaattgtaaaagtcttattttagttcaatgtcaatatctttcaaagtaaataaggtagttaattttcatcctacaatttatgctatattctctctcttaattcaataacaataataatactaactaataaattaactatatatatatatcatattctttcgttcctatcttctatcttgtgctaatgtttatttattattcaatatatttatatttttttaataaatattgtatatatatattaattagtttgacaatttt

SEQ ID NO: 141073 - DNA, 1237 bp, Cannabis sativa
  modified_base (46)..(64): a, c, t, g, unknown or other
  modified_base (458)..(461): a, c, t, g, unknown or other
  modified_base (919)..(921): a, c, t, g, unknown or other
  modified_base (987)..(993): a, c, t, g, unknown or other
cctgtgtactgataaatcatagaaatacatttaatcacacaatctnnnnnnnnnnnnnnnnnnntgacaacacaataaacaagaataccaatgtgaataggatttggatgaatttataaaccaaataaataattaaataatcacatgaaccaaacaacacattaaataagtaatgaaaataaatatgtttctttattgataaatgaatatagaaaagattacattgaaatagagttttatttagggcacacagcctaacaaacttccacttgcactaacataaaacaatccgtacatttcaattaatcttagattcagcctgtgcttttcaaatgtagttacagtcaaaactttggtgaatggatcagctaagttgtcttcaatatccactttctccaccaatacatcccctctcgccacatattccttgatgatgtggtatttcctctctatgtgtnnnnttctcttgtggcttcgaggctctaaattgttggctatggcaccagtgttgtcataaagtaaaactagtgttttttccattccaggaataatatcaagtcctaagaagaactttcttagttagactagttccttagcagcctcagcggcagctatgtattcggcctctatggtagagtctgatattgtgatttgcttagcacttctccaaacaacttctccacccccaagagtaaaaactatcacagatttagacttcttgtcatcaagacaagcttggaaatctaagtcgatatagcctacgagatttaaaataccacccctgtagactaagtcaaaatgccttgtactttttaaatacttcagaatatgcttaactgcagtccaatgttcctctcttgggtttgtctaatacctgctcacaattcctactacatagcaaatgtcaggtctagtgcannncattgcatacattagacttccaattgctgaagcataaggaatccttctcatgtcctctatctcttnnnnnnnagtgggacactgttccttagataaacggataccaggtctagaaggcatcactaccctttggtatttgtcattgaaaatctctctaacaccttatcaatgtaagctttttgagagagagtaatatatttgttctcctggtttctaatgattttaatactaagaacataagcagcttcacccaaatatttcatttcgaattgagtgtcaagccatctttgatgccagtcattttcttgatattgtt

SEQ ID NO: 141074 - DNA, 747 bp, Cannabis sativa
tgtgaacaaagcatatgactaagttatggtatgatttttgatctttattcaaagtaaatacgattacattgaattgagttttatttaggacataaaatctcaaccttattttcatccaaactgaatttaatagcccactctattcttagagtgttgaggctgacttggaagaccctggtgtgaatttttcaacaagttcttttggattggatgttcgattgtattacgacaagatagtgaggaaaccttgataggcaacaagatgtaaaatctcttaaactagtagttaggtttgtattgtgtataattgtgttgagatccaaggtttatagttcatattagattcaacaattattttaaattcaaaagtttttgaattgcatttctactgcaactctcatatgaactataaaaactaacatcctagatgctcatctatggggccttaactgcctctgcttataagggcgtgatgctcttccaaattcggagagattcagtctcagatgtaattatcttgggcttcgaatgggtgtgaggcccatcctttcatattggatgggcccattacctaagtaggattttcggaggaggccttaattgattgattttgaattagaaatgtaaagtgttctcatagttatttttttttaaatttttattctaataagattttatgtatgtttttattttttatttttgcttttaatatttaaaaatactttattatctcatatactatttttt

SEQ ID NO: 141075 - DNA, 690 bp, Cannabis sativa
  modified_base (149)..(154): a, c, t, g, unknown or other
  modified_base (304)..(304): a, c, t, g, unknown or other
taaccatgtcaggattgagatccatagacctaagatcaacaattgatattgacttagaaagatataacgattttataatttcttatctatggtcaatatcgatcccttttaatgtgaactccataaatctgatactggtaaactttgcnnnnnncctagaaaggacataacacttatctaaggtgtaagtatatcttatcgcagattatgatgccagtctaaatcaagtgaactgacaaatcatgggaaataaacttttgaacatataatcattattatattccactgtgctgacgacactatnatcatgaacaaatatatacatatttatatattttctggacttaatagaatttatacattaaacaatcataaaataaatcatgtgaaccttgcagcataaaatacagtttctaatctttattaattagtaaatctgatttgattgcaatgggttttatttagcgtacaaaacccaacaatgttttgtcaaactggcccagttcaatcgaccattttatcaatcttccagaagcacctagtttttataaaacttgtctcaagggataatcggttaacacatttatggggtgagcctggaagtacggctatagtttgtggacgcatggactaggcataatgcgagtttttttagagggggatacctagattctgcccctagtaaccttt

SEQ ID NO: 141076 - DNA, 912 bp, Cannabis sativa
  modified_base (84)..(95): a, c, t, g, unknown or other
tgttacacatcttaatttgaaattcttaactccataggaattatggtgtgcatgagttacatctctttattgagtccataacannnnnnnnnnnnaatttgaatttcaaatagtgatatcctaaacactatataaaggaggtctatggtgatcattttagagtaagagatgaaaagttttctatcaagaaagcacattgctagaaaatcctaagccttgataattcccaaagttatttccatgagagttcccttagtacttagagataggagaaataagcttttggacaaagatgtaataccttgttcaattcatagtgatccccactattctacactcaaggttgtaagtgagtgtattcatatttatatataaatatatatcttcttctactttccttatatataatatatatagtgtatatatattgtatagtatgtattgtaacatttatttaatttctttgttgatctttatattgtattacaatagagttgtaatgtcttgattttcttctattgtataatatctgtaacacagtacgaataatataggcttaaatacgacacgatacgaaaaacacgtacaagatacaaaaatataaatttcttagcacaaaagcacgacacataatcacaatataaaacacaaattcaaatccatataataattttttatttagtaattcgtctactctttcatataaaaatactttatttaaatgtatttttatttggtaattcatctactcttttatctcaaaatatgacaaaaacataatttttctattgagattatgttgaatatttttttattgaaagagattatgttgaacattatgtacaactttatatagaaatttagtaatggaccacaattatggtgatattaatttgattattaaacatgtaa

SEQ ID NO: 141077 - DNA, 511 bp, Cannabis sativa
ctccgggtaatacacatctcggatgaggccattggttagcaacttatccacctcttgctccaaggcgtcagcttttactgggtaaagaggacgtcttttctgctataccagaggaatgtctaggttgacatttaggatatgggtgatcacgtgggggcttattccagtcatatccccttggcaccacgcaaagacatccgtggctgcccttaacgtatctacgatcttgcttctttcctccggctctaggttttttcctaggcgaataattttagtggagtcgaagtcgcacacacttacttcctcgatgtcctccataagttctatagttgtttcggatcccacacagtaatttaactcgtcttgttctgtcaccatgggctctttgtccctttgtaccatcaaaactgacagatgtaccgcaacattctaacattgtctcgcatctccttggttccccctcaccgttcccactctagcttctcgagtagggaacttaaggcatgagttt

SEQ ID NO: 141078 - DNA, 1291 bp, Cannabis sativa
gaaactttctgaatgaggtaatggaagatagaatttttaaccctaccaacacaatgaggaactccaagatatttactaatgaaaccttcaccattaaggagcaaagaggtccgaaatttggattgggaatcagggggagtatttggggagaagagaatggaagatttgtccctattgacagattggcctgaagcttggaagtacagaagcaaaatactatttatagcctctgaagattgaggggaaaccggcacaaataacatactgtcatcagcgaaaaggagatgggaaaatgagggagcccctcgacaaattttaatgccagagaacagggcagcatcctcatggagacggatggctgcagacaaaccttcagctacaatgaggaaaagatatggtgataggggatcgccttgacaaatacctcaggaggaagaaaacacatttgataagttaccatttagagataattggtaggtaactgtggaaagacatttagaaataagggaggtaaaactcagaggagcctcaatatgatgaagaaagtgagaaatgaaagaccattccacccgatcaaaagctttttccatatccagtttgatggcagcccaacctagtttgccagattttctagaatgaatggcatgaatgatttcattggcaataacaatattatcagtaatttgacggccagtgagaaaagcactttggttggggctaatgacagagtgaagaaccaatttgagccgattagccaggactttggaaaggcatttgtacagagtattgtaaagactaattggtcgaaaatctcgcacagttttagagttcttctttttgggaataaggaccaaaatagtgttattgattggagtgatgtccccttggttgttaaggatgtggaggaggccctgacagaggtcggatccaagaatatcccaatttttatgataaaagtaggaatttaaaccatcgggaccaagagatttgtcaccagagagactgaacatggctgtttttatctcatctgcagtaaactcctcagcaaggaaagcagattgggaagaagagagggtagtggtaacaccctggagaatggaggaaatagcagatggagaaactccttgagagcaaagaaggtcagtatagtaggaatggaattgagtgaaaatggtctgagtgtcatgggtgatagaaccattagggagggttaaaccacgaatgtaattattgcgtttacgattataggctttttgatggaaaaacctagtatttttatccccagcacgaa

SEQ ID NO: 141079 - DNA, 1193 bp, Cannabis sativa
ttataattatctttttgttattttatagttatttttatgttgttgtttaggtgttctataattgttttataattatttttatgttttttattttttattttataccgttgttatttagttcatgtgtatttttatagtgtatattttcagtttatttcagacaatattttcattgtatggtacatttattttgttatttttatattgtttttttaattttttttctcaatttatagttatttttaactatcattaacaaaaagaaaaaaaaaaaaagttaacagaataacattataacaacaattctataaaaaaaaatatataaaattacaaaaagataaatcaagttatcaaaattaagtaaaaaaaaatcgtcatacaaaaatatattaaggagttcatataattattgtaattaggtcaatgttttgttatttttcggttgctttatagttatattttttatgttttatagttgttttcatgttgttcgttaaattttttaggattttttttagtttttttttttattttattttatcgacacacaatattttttgtaattttgaaacattgaatacagtatttttgtaaagttggtaagtaaaaatataaaaaaatttgtctcacagtatttttataatttttttttctcattttgtaatattttgtaaattttccttttctataactatcctcaagcttcttccaaaaccctaaaccctataccatatttctttaagcttttgaaaaagatatttttttggtagagattttatatatatataaatatatgtttttattatatataatctattaaatattttctaaattgttagctgttacttataaaataaattattatttatttttttagaaattatagttaaattggtcaatctcgaccttcaattttgttttgtatgacgaatgtggttaattttagtttcgtatgcccagtttttttcttttaaggaaaatcatactttattagataaccatctcaatcactaaaccatgtaacaaatcagttggaacagactccagactgaaaatacaatcaggaaacgatacagaggctctagcaaacatgagccaccatatttgctgatcgacgaacaaaataaatagaaatattttttgaaacattaagaatagccttacaatcataaccacttgaccaaacgtggata

SEQ ID NO: 141080 - DNA, 545 bp, Cannabis sativa
gccattattgtagcaaaggcttgtgagactggtacagtataaccagtagcatcagaaaagttggcattagtgatagcaggggcagccactatcagactggatggtgcaacttgttcaggtacagacatgctattgttggtgtttatgttttggtcatggaacatggggtaggccgagggtggaacggatctacgtgattgggcaggactatcaaggtccacaacattactagaggttggccaagccgagaatggaggaacaacatttgaaccgttaatatcatggatgaatgtatttttatggggaacttgagtcatgtagcagcccactggagtagttcgaggttgatgaagatattgaaccccatactcagaaggtgggtcattaaaggatggttcagagataatatggttagagggaggccgcaggctaggaggggctagagagacaggatgagtgacatgagggcgaaggcgagttctagtgctagcaatgtaaaaaggattggaagttatgcagatttttgctcctaaggtgtgatcata

SEQ ID NO: 141081 - DNA, 1211 bp, Cannabis sativa
  modified_base (374)..(398): a, c, t, g, unknown or other
tatgctacctgcccaaccttctcgagtatctgaaatggcctaatgaacctaagacttaacttacccctcttcctaaagcatctaatacccttcattggagaaactcgcacgaaaacatgttcccctacctgaaatgaaatatctcgacgcttcagatcagcataacttttcaatctgctttgcgaagcaagcaaccgagtcttaatcttgtctatagcttcattggtcttttgaactaattccaaacccaagtacttcctttctcaagttacgtcccaataaattggagagcgacatttcctaccatacaacatctcataaggagccatccctatcgtactttggtagttgttgttgtaggagaattcaattannnnnnnnnnnnnnnnnnnnnnnnnctcaaagtccatgacacaggctcatagtaaatcctctagtatctgaatagttttctctgattgcccattagtttgagggtaaaaggttgtacaaaacttcagctttgtgcccatcgccctcagcagactcacccaaaatttcgatgtaaattttggatccatatttgaagcaatggatttaggagctccatggagacgaatcttcctttacatacagttcagcgtattgatcctgtgtaggtaatctttactggcagaaaatgagttgactttgtgaatcggtccactatgacacacactgaatcaaacattcccgttgttctaggtaaaccaaccacgaaatccattgcaatgtcttcccacttccactcaggaagggccaatggttgcaataacccttcgggcctctgatgtttggctttgatttgctggcaggttaaacacttggacacatactctacaacatctcccttcatcctaaaccaccaaaagtagagatcctggtacatcttggtggtttcggaatgcaacgaataagttgtggtgtgggtttcattgaggatttccttcttaagctcaccaatattatgaatacaaacctgagctttatacagtaacatttcgttaatcgagattgaaaagtcctcaggccaaccaaccatcacctcatctcaaatcttgaatagtaacgtagattctgaaatacttgaagagtacaagagattatgtgttagtctataaggttggtgctttaaatcccatatgctatgccgactcaaatttcaaggtatgtcttgatgacaggaaatctac

SEQ ID NO: 141082 - DNA, 684 bp, Cannabis sativa
  modified_base (37)..(44): a, c, t, g, unknown or other
tttttatatagtagtgtatattatagttatttaagannnnnnnnaaaattttgaaaaatttaatatgccaaaaataatgtatttcttttaatttaatgtaatttctttggtcatgagtgtaatgtttgttctctagtaatgtagtatttatgttattgcaatatgatgtttaatctatcaaatttcactaattttacagtattattatctttaatctaattagtaagtttatttaaattattagttaaatataatgtagtaatttttgttaattaatataatattatttttcttattttatcaaaaaaataacataataataaggaatatttttttagtataatttttggtattgtaatttgagtgaaaatactttttgacgctaaatttagtgatagtgtaacactaaatttagtgtttccttggagatgctctaaataaagcatattagtataattatttgaacatttgtaaattttatttagttgcacgtacgtgataatatttagagattactcttaaatgacactaggtgaacacaaaatgttatacattatgctaaaaaattagtatacactataattaattaggtcgacaatgtttagttatgtaaatatttatattagtatgttatgttcaaattttattttatggagttggcaaaaataaattattattattatt

SEQ ID NO: 141083 - DNA, 552 bp, Cannabis sativa
  modified_base (512)..(526): a, c, t, g, unknown or other
gttactccatatgaatggttttaccttgaagttgatcaaacagatcatcaattctaggttatgggtacttgtttttaatggttaacttattcaactccagaaaatcaatacacattcgaagagtcccatctttcttctttacaaataaaactggagctccccatggcgatacactgggccgggtaaaccctagattcagcatcccttgaaattgtatcttaagctccttaagttctgccggagccatacgatatggtgcttttgagacaggttttgccccaggtatcaaatcaataataaagtctatttcttgctgtggtggtaaccctagtaattcctcaggaaacacatccaagaattccttaaccactttgacctcctcgggtccgagtaccacgagcctatcagaatcaatcacaactgctagaaatcctacacatccacttcatagtaaattcttagccttcagtgctgaaattattgggacacaagtgttggaaatattttaccannnnnnnnnnnnnnnaccaagtatgtttgattaacatccta

SEQ ID NO: 141084 - DNA, 516 bp, Cannabis sativa
  modified_base (454)..(491): a, c, t, g, unknown or other
gaactagagtgtcatatttcttctgtttcggtcgttgtaactatgggaaatttcttttcagatggcccactaccccacactggaagcaggctttagcttgacattcgccctgatggcgtctcttacacctcaggcactttagataggttcgccaatttttgtttccaccacatcgaaaaccttggttaccttggaatatcttgttaggacccgtagctagtggatcattagaccttttcttgcaatcattagggtcaacacccttaccagaaccgacactcggagattgtttccacgaatgtctcctcatactatttctcttttggatttggtcttttgcaccctcagcagcaagggctaactcaaccacctgagcataggtttgaacaaaccctggttgtttggcagctacaacaatcacatctcgggtgatatgtgttgggttttgtgcccnnnnnnnnnnnnnnnnnnnnnnnnnnnnnnnnnnnnnntaataaagatcagaaatcattttat

SEQ ID NO: 141085 - DNA, 926 bp, Cannabis sativa
tgttgcctgggatgtcgacttggttcgtgatttgtttaatgacagggatgctaatttaattcttagtattcccttatctttaagtcaaagagctgatgaatggttttggtgttgggaaaaaaccaggcattttttagttaaatcaacttataagcagttacaattgtcaaaggatggggtgtctcaacaaagtaattctgcaatttggaagggtatttggaagttgtatgttcctcctaaagttaaagatctggtatggcgtgcggcttcggattgtcttcctagtaaaacatgcttgcggtctaagcatgtccaagttgatcatggatgtccaaggtgtgtgattcatgctgaaactccttaccactgtttggttgattgtccttttgctaatagctgttgggagcttgctggtttgaagaaaattgtcccagccgtgacttcttttgctgcttggttgaagccgtgtttctgcagtgagataaagaccagagagctgatgttgcagtgctttgttgggctatttggaagaccagaaatgatctggtttggtcggacacttcatcaacagcagcttctgttgtcttttggccaagaacactctctccaactggtgcaaagcttaggacagaatgcttgttcctacagcagcgtttctaacagcaaatgatgggcattcggtttggtccaagcctgctgcaaacacgattaaaataaacattgatgctgcaatttttgacagcaatggcacttacaacttcgtttgtgtggctagagatgctaatggtcattttgttgaggctataaccagatgtcgggcaaggactgtagctcctgaattggcggaggcaatgggagttagggaggccttaagctggataaaacaacgagattggcaaggagcggttgttgaaacggattgtcta

SEQ ID NO: 141086 - DNA, 733 bp, Cannabis sativa
cagtaaaattgaaataaaataggaaaaaacagtatgtggtgtaaattcttttatgagtttttgtgactaaatcctctcaactatcattccacctgcgcttaactttttgaccttaaattttagtggtaaaattctctaaattactgaattgttagtaaattttaaggtgttatctatttttcacagttaactgccaacatggattgtttatgtgtacactctcttccacatgtgatacatgtatattaatacacctaatatcattatttaaaaattataaaaaaattatttcaaaatttttaatattttttatttttaaatattttatttaattttaatatgaattttaaaataataatattaggtgtactattataaacgtgccacatgtacaagagtgtacacataagcactccatgtgacagttaatcaaatgacattttaaatttgttaatagttcagtaacttggaaggttttaccacgaaaatttgaggttaaagggttaaatacaagtgaaacgatagttgaggaggtttggctgccaaaaactcttatgtaaaataaaagctattttacataaatatggtaaggaaacttaattagataaaatatgacatttaaaataaaaagagtttttggcagctaaaccttcgaaattcttatttcacttgtactttttttttgaacatgaaattatcaatttcattgaaatttagcattcatcatacaaga

SEQ ID NO: 141087 - DNA, 1397 bp, Cannabis sativa
  modified_base (575)..(576): a, c, t, g, unknown or other
atgtctgcacagaacaaaaacagtgtggttagaagacagccatcagaaacacaaggcatgaaaatcaagaagctcaaaaacaagataaagtaaaattcaaggtgaccgtccgaacaagactcagaaatccatcgtcacctgacatcgatcttatttcagacataacagctttcccttttccgaacacgggaggggatgtccgaacaggtgaaatgggctcccttatgcgaatcgcatgttcaacaggcttgggcaaggctgggagttccttcttcctcttcagtggagtcacctgttcttcctcagcttcatctttaggattcaagggctcctgagcatactgctcagcccttgcacctcccttcaacttagcttcgcgcttcagttgaatcagctcattctccagatgagctcgttcagtccggccagcaccagatttcctcttcttccccgccacggacttaggagtaaagtcctcaagatagagcccgtacctcacaaagttatccttggaggtcaactggataatattccggtcttcccccggcagccgggcaagtttttgagctctatcnntaagagcaagagtgaggggaggatggtgatatgtcaaaatctgttggaaccgagtctgggtaatgctcgcgtccttcaccatgaagtactcatcagcaaaatgccctatcttgctgaaggccttgtagttcgagccggtcaaccacttgaagcctggttgagaggaacagaagtaccccgacctgccttgcttggggtggactttaaatcaaagaaccaggcaacttcgtgaggagaaggagtaccccactcctgcgaagcgtagaggacgaagagggcagataaatacttaatgcccttaggagtgaactgggccaggcaaaaaccgaagaagtctgccacatccttaaagtatttatgcaagggcatcaatgctccttgctgaccatgggcacccgactaggcgcacatccccttgtcagggtttgtggcacgattgttgtgggcggcaatatagcagaccagctcgcccaagtatccgctctagtcaagagttcgaagacgcgcccccgtaatcttggacagagggcttacccacctggcgcccaaggcaccctgcgttctatgaggaactgccgcaacaagctcctcactgacatagtccacgccctcaaccaggacatctccgtcagcatccccagcctcgttgtactccccgtaatttgggggttcaacctctgtctcttcctctgcctcggagggacttccaggacctacatcatccagctcctcgatctcctggacctcagcgtccccttcatgatcctcctctatctggacggccggatcctgttcgtcgctgggcaaagtggcgtaccaag

SEQ ID NO: 141088 - DNA, 1014 bp, Cannabis sativa
ttgctagagtttggtggatctaaatatctgaagtgagtagactcacttcttaagttattattttgggtgtttccacccattcgcagacttagccggttgaagagcgacctttgggttacttagtcttgggggtcctacgggagttcttcctgccggccggccagaggtgtgccaccaaggggttggccagctagaggttggccaagtagaggtgttgtagagcttgagatccctgaacgacccctaaaccactacttgctgggatttggctgttctcgtcacaagacctttgtggcaaggcttgtcctcctttgggcaggggaaggtatgtcttagttcttgagcaacctagttggatagtctgtcggtagaccctccctgatctgttgactagtctcacttggagaggaactctgatgagatcctggcctctcccagcagttctctcattgaacaaccttatcagctcgctaagttctctgttgcggcagtccagctccacctggtgagatcagagaatgtactcttggtcatccatccatctcaaaaattcacgtctctgttgtgcgaatacattgcaatcaacatcgtgtggttctttagtttggctgacttgatagatagtttgtctaagtttggctaactcgagatcttctccctagtctacatggggcttgccaatggctggcttgccaattcctggccctgtctctccagcataatatcaggagtaggtccagttgtgatgcctgagggctgctccatgtggatccttccttcactgggatgcgccagtggagggtcctccctaggaggcatggagtgattatttagatccaccagaagagttttattgccctgaccagtaggggtgtgcagaaagtcatccgatccaatcccaaccaaccgatccaatctcatccaatccaatagaatcagatatccaatcataattggatcggatcggatgcaaattttaaaaatccaattggatcaaatcggatgttggatgag

SEQ ID NO: 141089 - DNA, 583 bp, Cannabis sativa
  modified_base (215)..(218): a, c, t, g, unknown or other
atcctttgaacaatttggagggtgttctatttatgagatatgtagccatttaaactgggtatgaccaataaaccaagggtaagttggattggaatcctagtgctcgggctatattgagaatgtgttggtgttttcgttccacaactgaattttgttgtggtctttccacacaaaagtgataattaatgatgccttttgaggcaaagaaagattgnnnnttcaattcttttgcattgtctgagcgaattgctttaatggacaaggagaattgtgtacaaaccatattgaagaaattgggaattatgctttgaacatcggatttgtttttaagcatgtagatccaagtgaatcttgatttatcatcaacaatagtgaggaagtatttaaaaccttccacactagtgatgtgaaaaggaccccaaatatccacatgaaccaaatcaaatatgtttttggaaaaattgtgattagaaataaaaggcaaccttttttgcttggccaaatggcaaatgtgacaatgtaatttggaattaatatgtgaagaattattgtctttattgaaaaaacttgaaatacacatcga

SEQ ID NO: 141090 - DNA, 715 bp, Cannabis sativa
tatttagaagtgaatcgataattttcttcgagcttagcttaatagagataaatgattgagacctctattcaataattatattagtttacgaaaatatcatttataggtaagtaagtgttttacgcataaaatacattgaaaggtagaaaggtaaatttatccttacttgatgtagatcatctatagatgatctttgaatatttggattgaaataataggtaattcaaattgcatctatttttcgtaatagtgccttctatgtaattaaaagttcaattacaaatctatagcagcgcaaggaggaactaataagttaggaaatttacttggtaaatttcgaatctacttattgtaagcttgattacatagggtcatggttcccacactagttgagataacactattttatgttatccattgcctataaataagagaagaaattcatttgtggggcaatttggaaatagaagaaagtagactttaggagagagcaaccttctcaaaagctagattgtttttatatttcatcatcaataaagatatattgtttgagggatttaataactctgtgtttagatttagatagataatcttattctctaagaataacttatcattatttcataatttttttagtgtgatttttcttatagtgtgtaaataaaaaaaaaaaaaaactaatatacgaatacattgttggaagttattttaccag

SEQ ID NO: 141091 - DNA, 676 bp, Cannabis sativa
tttgatcacgtttcattaaaacacctgtagataacagtagataaccgcataacaatttatcattcttatcttcaaggtggttgacgctgacgtgcgacagtggtatctcgctttgcatatagatgaccaataataactcggtttaatcatatgccttctagcaatggcatgagccccaatatacagagcaaaattaagaactgttctttaaccataaggcctcgcagactggacaatcatgtcctacatgtttccaagttgttacacttagttattataatgtggaatatacactaagtgtttcaatagcttattcgtcttgtaaatatttccttatgtgtagcgaggcggatgtctcgctatatattgcctgcagttatttcgaataattttacataaaaacaaatcttgttctcgggactgtgtctttcgaggtaatatggtctctcgtcaataaaagaattagcctaagactatacagtcagagagttatgaatatactttattaattctatatttaatgaattattccattttgcattaaatgatataatcgttattatatttagtggttcatattctacttgattgacacgtgtaactctctacagtatagccaaattttggatataacaattgccccttaaaaagatcttttttagtaaaaagagctttt

SEQ ID NO: 141092 - DNA, 609 bp, Cannabis sativa
atgataacgataaactagacgtcacttctataatgaaggctcccgattcctctgtgaatggtcatgttccatctggacctatcaagttgaaattcgaaagaagaagaatagtccctaaaaatctatcacaaattgaaaaattcatcccaatatgtcacttctgcaacagaaagggacacatttgtcccaagttctataaactacagaactacttgaaagctatgatcaattgaccaaatggctttctactaccaaatagaacttaagggcacaaaactcaccgagaatggagaacaaaatctgaccttgaactaaatgttggattggtagctaaggtatctctgtctgcttttgtcactactagaaaaatgggttttagtgacccacattgagtaactctaaaactctttagtgacacttcaacgcgtgtcactaatgagggtgactggaaaggcaatttttagtgacacttcatacgtgtcaccaaacccttttactttcactttatgcgcgtcactataggcctataatgtcaggctttgtcagactgaaatggtaatagcaacacacatagagtgtcactatatcttaatatttttctaaaaaaaa

SEQ ID NO: 141093 - DNA, 759 bp, Cannabis sativa
tttcccgatcaaccgataagtgcatcccttttttcaacattttaaagaaatgccaaaaatttgaatggactgaagaatgcgaggaggcattcagaaaaccaaaagagcacatggccaaacccccgattctatcaaagctagttcacggagaggatttgttattgtacttggccatctctgggaatgctgtcagggcggccttagtccgagaagaagacaaagttcaacatcctgtctactacgtcagcaagcgtatgataggagccgagatatggtacccattgattgagaagttagttttctgcctcctgatggcttcaaggaagctaagaccctacttccaagctcaccccatcagggtgctaacaaaccatctgcttcggcaagtcttacagaagccggaagcgtcaggaagactcctcaaatgggccatggaattaagccagttcaacatacactacgtaccgcgtatttctataaagggacaagccctagctaacttcataacggagtgcaatgaagcagaggctagtgcaagcgtgtcagtaccacaaaccccgacatggaagatattcgttgatggagcgtcaaacgagaacggatccggtgctgggatagctatgatatctccaaacgagcttcaactccagcgaccctacattttgaattcccgacttctaacaatgaagttgaatatgaagccctgattgcggggctgaagttggcgaaaaccgtgggagccacgagagtagaagtctt

SEQ ID NO: 141094 - DNA, 933 bp, Cannabis sativa
  modified_base (865)..(868): a, c, t, g, unknown or other
ttaagttaataaatgttcatttttattaaaaattaacaaaatgtccattcagttaaaaatttaattatgaaattacaattataacattggataataaaccctaactttctaccctattcttattttcttgtatctagacaactcgtctctttcttctccctcagcaccaagaccatcttgcctctaccagtccgaccgccaccccttgagtattaccaccgtagatcgtcactattggaaaatttaccccagctttctacctcttcttcgtctctcgtgtcaaggccaaaagtctcacctccttcttctctctcgacaccgacaagtccagctctgttcctctctcgtctcttagattttgcactatggtatatctttattatgtacgtgctatgatatattaagaaataaaaaaaaaataaagagtggtatattattttcagtttgtggtataatatttttaagtgtttggtatagttattttgcacaatggtatatcgtttttatgtgtaatagtatatctaaaaaaaaatgaaaggtagtatattaatttaaaattgtggtatattatttaaatgtgatattgtatgtagtgaacgaaagaggaaaaaaacgtagaatattaatttaagtttgaggtatagttacattttactagggaatattatttctatgttcattggtatataaggaaagaaaaagaaaaaaactcgtggaatattaaattaaatttttggtatatatattttttgtccactatagtggtggtattttaattttttactataatatttatgcttatgattgcagaatatagcttttatatgctattgtatctcgtggaaaaaaaatcatttaatagtannnnagtttaagtttatggtatatttatattggtctaaggtatatcgtttgtatgtgatatgtatatcg

SEQ ID NO: 141095 - DNA, 867 bp, Cannabis sativa
ttaatgagccaagcttgagttctaaaactcaaagcttgctcaatcaataaaccatccatcaaaacatgcttaattcaacatttctaaccataatctaactacagaaagtcatactaaataccagcaggaactaaaacagccaataactcaaaacatgcataaattcaatttcttaaaactcaagaaacataagaggataaagtcaagagcttacctaaagcttaagaccacttattccttgctctagctagattgaaatgcaaaaaattagaccagagcctagctagttctagggatttcaagagagagaaagagagagtggaaaaagggagtctatttcatattttttctaattttgtataaatgaataaaaggttgttttattaactaattatcagctaaaaatcaattaaaaatttcattatcaacccaaaataaagtccactaaagaacaaaacacaaatggacaaaaagaccattttgcccttcccacactaaaagtcataaaaggtcacttaggggtattttagtaaattctaaaatcttgactattctcgacattcacaatgtctaactatgttgtcctgctatactaaacaatactggatgtgattctaatagccaaacactgcattccaatgttgccaggcacaaaatatgcaaaattatgaaattccatatatgacatatataatgcattctgaattcaaataaatcatcataaattaataattcaaaactaatataacaagtttcataattacacctaattatctgctcatttccaagttaaagctaagcggtctttacaaaacacttaagggtttaagaaaaccttatatgggttgtagcagaatataatgactc

SEQ ID NO: 141096 - DNA, 1028 bp, Cannabis sativa
tgcacttagatttgaattttttgcatctaacaatgaagccgagtatgaggctttgattgcaggattaaaactcgctcttgagatgaagatcggttacttacaggctttcagcgactcccaaattgttgtatgccaggtaaacggagaatatctggccagaggcggatgtttggctagatacctcgccagaacatgtgagctactgcagaaattcaagaaggtgcttgtctttcgagtaccgcgtgctcacaactctcatgcagatgctttggcccgcttggcctccacaagagaagcttaattactcaatgtaattcctatcgatgtgttaactcacccaacggtgagtcaagatgaagtaatggaaatagatactgccagaggaatcacatggatgactcccatagtgaattagttggaaaaggagatcctgcctgaagataaaatagaagcaagaaaattgcgatatagagctgctcgatatgtcatttctcgagtcaaacctcgcctgaactagactcagcgagatgatggggatatgaccaagtctaatcgcattcgtatgactcgcattatgtaggaacaaggaacggatttaacccgcatatatcaagatataggcgagtatccccacgatcctcttgcaaaaacatagagatcgattctctatgttgcgggttggtcctgatgacccaacagcctcgataaaccaatatagactcgcatgtcttggttttatcagctcgttatatgatgtccgtaaaagcgactgtacaagaacgcagacatcttagactcaactagtctcgaatgcattctaagcctgcgagcttatgcaaaaatatgaacagccaactcgcactatagaagtcgcgtacgttgttgtatttagtgaatgaaactggaaattgttcttcatttattatgtttaaatttttaagcttaaattattgtaaatcaatgtataaacggattgacaatgaatgcaatccttgtgtaaacaataggacacttgctttgtatataaa

SEQ ID NO: 141097 - DNA, 720 bp, Cannabis sativa
gtttgttgatttagtggtttgttattaattaataaaataatatttttattaaataaatgggctgagatatttaataaaacaaagttttatttcatatactcaaaaataagaaaaccttggaaaggaagccttaaactctcaaattctctctctcattttcgaaccccctatatcagctagggtattgatttttattcttcaaatccttgctaattcccgcagctttaagttaaatccaagccaaggtaacctctttacaactctttttttatttcttgaattgtaaaataattgattatgcatgcatcttttgaggaattggttgctgttgttgttacaggtgtttatctttattttctgaagttaaaatatgttaagttatgttgatttaagcatgttttggtaggtagtttgttgtttgagcaagctttgagttttagaactcaagcttggcgctttaaaggtgaaattcgattctgagtatgggtagttgctttatcacttggaaaatgtttattgtggtgtatgatgcaggtctaaaaagtttggttggttttggaaacgatttgattagggtttgaagttttttggttttttttgggtaaaaccggctaactggttttacaagcattgaaaaaccgattacccagattttgcagtagggaaaactgaaaatttagcttgtcgtttcgcgttagttttaggtttctagttggttga

SEQ ID NO: 141098 - DNA, 536 bp, Cannabis sativa
aaatattgattgattatggatttgagttgggtgttttaacaattttttgtgatagcactagtgccataaatatttccaaaaatcatgttcaacattatcaaacaaaacacattgaaataaggcatcactttattagggaacttgttgacaacaaaacactgcagttataatatgttgatacttgaaaaataattggctgatattttcaccaaggccctagactcaagtcgctttgactccctcaaaaaagccctgagagtttgcattctctaatcttttttgttctcgaatttgtacaaaattgttgagtttttctttgcttgcatctattcttgtttcattcttgtttgacaaaacatgtttatgcttttggatgataattagcttaggatattttacttttcatacttttgaggttgtgttaaaagattcatgttactttttatgtgtggttgggattgctaaagttcttatatagagttgaccgattcttgtctccgtttcttgtcaggccccttgttggaatagagctaccc

SEQ ID NO: 141099 - DNA, 782 bp, Cannabis sativa
gtttaggtatgagattttgttgttattgataaatacaaattttgggaatttatttgagttcatatatggtttttatgctattttatgttaattacctaatttctgtgttgtgttcggaagctgtggaaagcggcgttggggcctttagagagtcttatttcatatactttgatgtacgttatttgttcggggtattttgctaggtattgaatttttgagtttagtattgaccaatttacccttggggggttgttattcattttaatttgtctaaggggtaaaaaggtcttttctttaaaggttatttgtcttgtagtgatgagggggctgatgttatttgagtaggttagtattattttaaaagaaaataaattaaggaaaaggaaaataaaagaggaaaaacctagaaatgcttttgctcttcatctctctctctccttcgaacctcactcactctcatccaagtttagattttcctagctgaattcaggagtaatcaagggagttgaagcttatatttaaggtattatgatctagtcttctctttttagtaattcttaagcttaggttaggttttaaggtagaggttattggatttatggagctgtgaatataattgttattttgatttgaattctggagattgcttgaggttatttagatggatttgggttgtttttgattgtggttggatggttgtagcaaggtttgagtttatgaactcaaaccttgacctctaatggtaatttgagattttgtggagttcattgtgttctgctgct

SEQ ID NO: 141100 - DNA, 654 bp, Cannabis sativa
accttgttgatataggtagtaccaatcaatctatttaagccatcttcagctatgtagtcacatacctacacagtctcagaatcatcatagatgacctttcctaggtaatgtgagactatacatgtaacggttgttatacttagacatgggattagtgggacacttagcactaattaatatgactatgtgattatttatgtattttatgctttatagaccctattttcatgaaaatatgtgttatgattattatttctcaatttcagagattttattgaattatatgtgtgatatgcatgctatctttgaattttcatatatttacttttttatgcctagtaactgtggaaatgggtcgagtggcaattttagtcacatggatacaaatttgtatcaagcattttacggggcaataatattggatatcttataatatcggggtttgacgaaataatagaattggaccgttttacccctagggttatgagataactttgtgggaaaataagggcattttagtctttttacaataagagcttagtcactcttttcggaagggataggtggttgtggctcatccttttgaggatgaccagctgcttaggaatcaaacaaaaaggaaaagcaaaataaaaagaaacaaaaaagaaaaag

SEQ ID NO: 141101 - DNA, 819 bp, Cannabis sativa
aagagggttgtcagctcctaagtatactttaagtaataattctcgcgccctttcataagtgttgggcgaagtaaatgcaagacaccatcacagtatgataatttcgagatgaatcatgctgaaaatgtgacccttagtcttttagcatgctcgtaagtatgtgagtcaatgagttgcaagctctataaataattcattatttgccctttccaagcattatcattctgttatgtattatgtatttctcgagatgaaccttctaaattgattgttcatctcaccaatcttatcaatcgacagttattattcatagctcacccttatctttaaaatgatgagtttgaatatttctaccacatgtattttctaaaattgctttataacacgagctagtttctttacatgtgtcaatatcatattgtgctcaaaatatgagtataacagagacataaaataataataatttattttattgttagttatgtgaaaaaagaattaaattttttaagtaattcaatattagaaagtgaccaatctaaaataaccgatttaatctgtacttttacggaatggattggatttaagttattatggagattgaattgaatccaaaaatatgaaaaatagaattaattagtataatatgatagaattttgaaattttaaattaaatatgagtaaaaaaagaaaaatatctttattaaagtattgaactcctgatattttaattattttaagagtgattattataaaattattataagttgaatatgttataattttctataagtataattattattttaaaaataaatttaa

SEQ ID NO: 141102 - DNA, 711 bp, Cannabis sativa
tgatatatttacgttaatttttggcattatgctccaatgtacaattgctaaatttgatgcaaactataatgtaattaatattttattaattataaggtaaatagcggcataagtatttaaagttttaagattcactacaaaagattttacttttagtcataacaaaaattccgacaaaaaataaaaaagttgtgactgattataacgttgtgactaaaagtattagttacaaaaatcacaatttttgctgtgactaaatgtgtttttaatcacaacaagtattgtgattaaaactaaattagtgataacttgtatttaaatactatgttaacgtttagttacaagtaactttttattgtgactaaaagtcatatttagtcacaaaaaaattataatgtgactaaaaatttgttactaaaggtggccttttttctgtagtgtttgtaagcagcataaactcaatgtttatttttagcgccataggtacctaatgttcgtaaaaatataattttcctctagcttcatcagtacaaacttcgttttgaatttattaaaaaaatatttgaaacaaactgatagtacaaacccaaatgatctagaatctcagctttatatgtgtcctatttaagacaataataaagtctgtatgacgaaattagagaaaaattacagttttacaaatattgacactacaaaaaataattttttagt

SEQ ID NO: 141103 - DNA, 622 bp, Cannabis sativa
catagtgctttgaaacaaaaatggattgaaaaagaaaaatatctagctggtttttctgataaaagtgctgtttctcaaatgtggtattttaacagtagttgttctagacatatggaaggtgacaaggattttttagtgaatatcagaccaatgcaatgtggtgaggtcacgtttggcaatggtttaacaggaaatgtccttggtatgggaactctcaatttgaagggttaccaaggttgaaaaatgttatgcttatcaagggactgagagctaatttacttagcattagtcaaatttgtgatcaagggtatactgtcaattttgacaatgatcattgctttgttcttaacagtaataaacgatgcattttacaatggtttagatttgttgataattgctacactctcacatatgttcttacttgtcattttgtatgtgaaaataccagtgttgtatatatttctaaaaatcttgttcaaccttctcgtacaaaacacattgatataagatatcattttattagggacgttgttgacaactaaacattgcagttggaatatgttgatactgaaaagcaattggttgatatttttactaaagccctaaattcaagtcagtttga

SEQ ID NO: 141104 - DNA, 713 bp, Cannabis sativa
aaattatgtttttcacaatgaagtcttgaacttttttagacatgatggttgccaatggctcagcttccgtcaactaggtaaaataatcaactgcaaccactgcgtactgcacttttcctttaccttgggtaactgtccgatcaggtcaattccccaaatggcgaaaggccaaggactttgcatctgagttagttcgttgggcggtgctagaggtatctttgaaaatctctggcatttatcacatttcttaacgtaggccttagagtcttcaatcattggttgccagaaataaccttgctttagaattttcttggataaactttgcccagctgcgtggttgccacgaaattcatcatgtacctctgaaaaagtcgtgcaacttcttcttgtgtgacgcacttgagtagcggcatggagaatcctcttctatacataattccatctacaatgatgtaccttgcagcctttctccttattttttgagcttcgtttttgttatctgggagttccccagtgttgaggtagactgctattggcgacatccagtttggggatgtatcaatcattttaacctcttccgtcccggtgacactaggttttttaagaaatttaatggggattagatttgctttatcatttatgttgcttctcgcaagtcgagctaatgcatcaacagttgtgttttcttctcttggaatttgcttgagagcata

SEQ ID NO: 141105 - DNA, 593 bp, Cannabis sativa
ttcggggcctggtggtggagccggccatataccagttttgtgaacttttctttcaagttctaagaacctccactcgttcctaagccgttcttttttcaaaacgtttatagtcgtctagaactttttgcatttgaggagtaactttgccaacatcagactcctgtttgagatcttcatgagttagaattggatatttgcccttgttctttctagtagaaatttagaacttaagagaattataagaggaatttccctttaatttttaagtataagagaagtataagagaataacacttatgaattagaaagggatttgcttttatagagcagtatatttgttgagaatgtaggaaaaattaattaacattaaatgtataattgtataagtgcaacacatgcaatgtgcatttatcgatagaatatcgatacaatgtcgatagtttgttgataaaactttaacaaaaagaaatttggtatacgtaatatcgattgttgggattttatgccctaaataaaacccattacaatctaatctgatttgttatcaataagagattagaagtgatttgtgttaacatgtagttttcatgttt

SEQ ID NO: 141106 - DNA, 511 bp, Cannabis sativa
ttggtcgtcgactgtaagtctgcctgatgcaactcctctaaggactttaacttagcagccatttcgtccatagcctccctggcttcccgaagctcgcgcttggccctagctgtaacctcgccctctgccttcagctcctcctagtgccttgcctccgcccgagcctccttcttcttggcctgctctcggtacttcgcctccgcaagggcctccctttggagggcctcctcctggaacgccttcctttcggcagacaagtcccgcagtatcctcacggcctcgtctacgcccccaaattctgacatgacgaacccatgatcgatcagggtcttcgaaaggcagccgatctcggcagttttctgaaaaaaaaaagaaacaagaatgaaatcagatgccttagacgaaatataaaataagggaataaattacaagtactcaccgcggccagagcagcgctgatgtcttgcacctggtatacggagttcacggaggcacaagccgcgtatctctt

SEQ ID NO: 141107 - DNA, 678 bp, Cannabis sativa
atgcatattaaagcacatctgagacctctcactgttgatcttaatgaattctttcattgacctttatctttcctagaatagttgaaacttttctttagataaatgaaatttatatcaagaagtcgaaaaaattctatagatttagctactagaaaaaaaatgcttcagcatcttactaaattaatttgcttgcactagagtaagtaattaaattaccaggcataccacaagacatttgtttagataaattcaaacctttaatactaagaatgttggccatagttaaaaagtttataagaaaatattactaattattctaataaaaatattggtgaatagttatgtattatatatacacatataaccaaaatatgtatatatataattctgcatatcttatactactgtgtagcaggttaaagatcgaatcaaaaaccattccttatggatgaagctacctacaacatgcctttctagcgctactcagaatatgatgaattcatctcttaattccactcacaaaagaaggtctattatttttcctaattcccaccacgacctgtgactaattggcgtctcaatccataaaaagaaaagaaaaataaataattattctatttaaataattataataataattagtgagtaaaagtgcagaaaataaaaaaaaaaaaaaaa

SEQ ID NO: 141108 - DNA, 538 bp, Cannabis sativa
tttccaaattcaagtgtgttggtcgacctgaacgaaaaatcttgtgctcgatggatgccctaatcatatattaaaaccggctaaataatattttcgaaaccctaatttgggaaacacgaacctataactctaggctctgctatattcactagcgattacactaactcaagaaacagtgaaacacccaactacggcactaaaaaggacgagaattgagaaaatggtttgttcgaggaatctgccaaaactggttaaccgattttacaggtcttggcaaaccggttaactggtttgcaccaggtttccccaaacaacacccaacttgctcaaaacacatccagttgccaccaaactttccagagtacctaaatagtgcaaatacaatatattccaaccaataattcccataaaaaaacactgaatcaaaacatgccattaaagatcaaagtttaggtttctaagctcaaacttgcataaatccaatcccatacaccaaaaatagttgcaagaagctatattcaactcaaattaagcttag

SEQ ID NO: 141109 - DNA, 762 bp, Cannabis sativa
  modified_base (56)..(56): a, c, t, g, unknown or other
  modified_base (281)..(281): a, c, t, g, unknown or other
tggcatctacgctttggacatcttgattttggcgggcttaaactcttagagaaganggagatggtgagaggccttccatgtatcaaccaaccagatcaactttgtgaagaatgtttgcttggaaagcaatccctaagaatttttccaaaggagtcattatcaagagccacaaagccgcttgagctcgtacacactgatgtccgtggcccaattaaaccaaactcatttggtaagagtaaatattttctcctctttattgatgatttttcaagaaaagtatnggcttatttcttgaaggagaaatcagaagtgttcaaaaagttcaagaaattcaaagctctagttgaaaaagaaagtggtctacctattaaggccatgagatctgactgaggacgagagttcacatcaaatgagtttaacaaatactgtgaggaaggatcatggaattcgtcgtccattaacagtgccaagatcccccccacaaaatagagtggcagggaggaagaatcgaaccatactcaacatggctcgtagaatgctcaaaagcaaaaatgtcaaaggagttttgggctgaagcgatagcttgcacagtctacttggtgaatcgctctccaacaagaagtgtacatgagaagacacctcaagaagtggaagaaaacctggaatttctcacctctgagtctttggaactattgcttatgttcatgttcccgatcagaagagaacaaagcttgatgacaaaagtgagaagtacatcttcat

SEQ ID NO: 141110 - DNA, 501 bp, Cannabis sativa
tttttttaaaactaattactttattgaccatttaaggaatagtagaacgcgcttattcattttcttaaaagcattttataaactaattagtttatttatcatttaaaaataattagacaaaatcgtatacaattaaactatatattttaataaacataatatttagataatccacatgttttgtccattatatgtacccataacaagtttaagaaatattagaatgttaattcatttttttaaaagcattttataattaaactaatattcactatttgaaaacaatgagacaaaatcgtataagacaaattatgtattcttattcgtttatatgcaggggcggagctaagacttaaatgcaatgggccaaattttaaattttaatatcaaataaaaattttataatacatacttatattcaatattaaaatttaaaacaattacttttatatgtcgaaaattatatctataatgaaatgttaaaataaaacaaaaagtact

SEQ ID NO: 141111 - DNA, 521 bp, Cannabis sativa
  modified_base (472)..(496): a, c, t, g, unknown or other
ttatccaaaaatgcaccaattaatgaagcatatgacttggccagcatgcatgttggtggtggcatggcatattggcatatatattgccaattgcattgctccaacattatggcataactaattgtgtatatatacagctgccttagtttaaaatcatgagcacgtgcagtcaacctctctcatccgtgatagtagctgtatgtagtggccacttcggagctgtagctgtacatgtactcattcattagcatttctcagacattattggcatggacatgaaactttatttctttttgttcactaaattaattaatagtaataatgaaagttaagcccacactgagtagttccataccaaatatttccttgacagttaagtgacgtttggttggaaagaataaaaatataaaaataggaatgtgaatgagaatgcaaattagaatagaaattgaatggaataaaatttaaaatnnnnnnnnnnnnnnnnnnnnnnnnntattaaattttttcaaatcttgcat

SEQ ID NO: 141112 - DNA, 776 bp, Cannabis sativa
  modified_base (631)..(635): a, c, t, g, unknown or other
aaaaaaatgatcaaatataataaactaactaataaaaattataagaatacatttattacatattatttttttaaaaaattatataataattaaattaaattatataatttttttatattataacaaaattgaataaatacattagattgttaaatatatacaacagtatttgatatatcctatcactaaacattaagataccgcaataataaaattatataccacaaaaaattataacaatactaaattaatactcaatatatatataatgctaacaaaattatatataccactattaaaagatgtatacatacaaaaaaatttatatataataaaaaaaattaaatatcatcttgaataaatgatatactataaaaaaataaaaaccatataccatacaacaaaatatatatacatacaataaaaaataaaataaaataatatctttaaaaaaattgtatataccatattaacaaaattatataccacgtttatatataataaaataaagactaaacatgtatgatctaaaataaaataatatagtatacaataaaacttatataccacataacaaaatatatatatatatataccttacaatagaaatatatatataataacaataaannnnnataaaaatatataggatgctaataaaattatatcatgtcaacaaaagtataaaaataaattgaacttaaatattatttaaaaaaaatgatataccgtataacaaaaaatacatatattattggggaattaccccaaatact

SEQ ID NO: 141113 - DNA, 1044 bp, Cannabis sativa
  modified_base (998)..(1018): a, c, t, g, unknown or other
tttgttgttatttagatgttatttgaatgttacttttatgtagttttcttgttgttttcgtgctatttctataaaaatgtaaaaaaaaaataaaaatttaaacgtaaaaatgtaatttttttacaaaaaatgatacttacgtaattattcctaaatttaattcctaatctataactatatagaagggaaatgtgggtttggactttttaaagtaaattacaaaattatctttttttattattattattaattactattaaatcctcacatcatttaatcacaagaaaaaatcataatttagagaactccattttttatatacaatattatgcatataaatacacctttttatttttttttactaatctataattataatttttcatataatttgtttatataaaaaaggctacaaaacataggttagaactatataaaaagggtaaataatttttgggcttttacatattaaattatttatttaatttttgtttttttccattaaaatctcatataatttaatataaattatattattttgataaccaaaattttaagcttttacatattaaattatttatttaatctttgtcttttttttttttattaaaatcttttataattaaacataatttccattactttgataaccattatacttttacaagtgagaaattttgtaaatgatattttttgtggataactacatgttagttaataatcacacaataaattaatataaataatcatatttgtgttgatgaaacaatatgtatatatgtatatctcatagtttatatctataaacattacaataaataattatatattaattaataatcacataataaattaatataaataatcatatttgtgttaataaaacaatatacatatattataatttatctataaaaatattaccattaataataaaaaaattattaaaatattctttcaattactctctatgaataataggggtgttcatccgatcnnnnnnnnnnnnnnnnnnnnnaacaacatccaatccgcactaagtgc

SEQ ID NO: 141114 - DNA, 955 bp, Cannabis sativa
cctaaaatagctccccccccccccccctcctacagttgttcaagatcctcctgacattgtagaccctccttctcgctatccttagcgcattcgtaagtctactcgccaaccaaattttacatactcttcttattttgcttcttttactattttagcatctattaattgtctttctgagcttctctgctataaagtattgaccctctttggcagcgtgctatgaattaggaactctttcctttgcaaaagactcatacttgggatttggtacttttacctcctggtaaacattctattggttctcattgggcgtataaaataaagaccaagtctcataggtctatttaacaatacaaggctcaatcagtggctaagagtttttaataacaatatggtatggactttgaggagactttttctcctgttgcaaaaatgactgttgtttgtactcttatcgcagtggcatcagttcatcaatgaactatatctccattggatgttaagaatccctttctaaatggtgacttacatgagaaagtctacgtggttcctcctcttggtgttcctcataagcaaggcgaagtttgcaagctaagaaaggccttgcatggtcttaaacaagctccccgagcttggcttcaaaagttcgttactgttattttatctcttggttttattttaagtgatcatgatttcaactttatttgttaagtgcacatctgtaggtcgtattatactttccttgtatgattttttgatgaaccagatgaatttcattactccaaaaaataattttacaaactaaagagactttataaatagcctctaactaaacttctatacaaatattcaattaatgtaaatttcctcactttttacaaagcctcaaaccacattgcctcttccttagttatctttttggaaccaaggaaaagcaactctatcttcactacaa

SEQ ID NO: 141115 - DNA, 983 bp, Cannabis sativa
ttaataggacacctgcttttccataaagtcttcgtccaaaacaaatcaccaaaattctggtctgaagtaaaccagttgaatgctgacttacaagagaaaatcccactagaatctagtttccataatctgatatcctctgagatgttgagcagcctaatatgttccagtagttgcaataaaataataagattaggcatttccctctccatcaagttccttctaaacttaaaattctagcttggaacacaattttctacctctccttcaatggcaacaagatcttttatactcgtattttttgcctttgataccactgccaagtctggaaaacgactctttaatgttgtatctccaatccatatatcttcccaaaaccgaataggtgtaccattgcccactttgaattttattaactccaaaaattcaccatagagatctgaaatatccttccaaggacctcttggagatagtctatgacctgatttagtatcccaacaattttctgctctcccataacggcttttgatcactttatgccaaagtgagtttgattctaatgggaattgccaaagccatttcataagtaatcctttacttctcatgtctaacctcatagcgagacctccctcatgtttaggtctacacacctcctcccaggccaccaaatgatccccacccatcaaaactcctccttcccaaagaaaatctttcatcattttttctaacgagagtaaaaccgcttttggagctttaaagagagagagagataataaatcggaagagatgaaagaaccgattgaaccaaggcaagtctaccacccctggataaaaatgaggatttcatccatcaagccttttagcacattttcccaaaatgggtgcccaaaacaactttttcctaggcgagccacctaaaggcattccaagatatgacataggccaattccctacttcacatccaatctgattagcacacaaggcca

SEQ ID NO: 141116 - DNA, 743 bp, Cannabis sativa
attttgttcttgggtttttattcttttgatacttttttttttctgtgtatagataaggaaaagagaaaatgacaaaaggaaaaaaaaagacaagtaaatatgaaattagaactaatgaagtgttgaataaactatgtcctaaataatatagaataaaacaattttattaaaattatttggaccaattaaaatatgacacgtatacatatgtgcatatatggtggaaaacccaattggcacttccaatcaaacggatttaaatccttatccatttaaaaaaaaaaagatttaaatcccatttttttattaattttaaaactatatttgcatttaattagttcaaaaataataatctttttttaaaaaaagataacataatttttttaaaaactaactagaaataataagagtacgtatataaatagacaaatcttgtgtattagaaatttgctaattactttatattataaataaaatcaataatagagttacctttcgtaaataaaatatatagtaaaatttattagtacactattactaaggtgatgatgtatatggaagtatttcaaaaacaattattaaacttccaatttccatcgacattggataataaggaaaataatgaagtcattcctgatgaggatgttggtggtttaattgaagagttatattacgaagatgatttaataagtaataataattcgatgcaattaaacttccaattattaccaatatcagaagat

SEQ ID NO: 141117 - DNA, 1189 bp, Cannabis sativa
  modified_base (129)..(133): a, c, t, g, unknown or other
  modified_base (884)..(888): a, c, t, g, unknown or other
  modified_base (1154)..(1164): a, c, t, g, unknown or other
gccattaccaactttaagtttcaactctctggatttcaaataagtccagttatcaagcaattgtaatgaacagcagacgtggtttgtagatcgagaatcaagaatccagatggatttatcattctctannnnncatgattcaaaaactaaagcatcattgtttaactgtttttggactattgttcttgctggttcaatctgttgtgaaggataatctgaggaagtggaatcactttctctattcttctcaactgagcttgaagttgtaggattgtcagagaaattattctcaatctcttcagcttttcttttgcccttatctgcatcactggagaaggatctcgatgcaagtgacaatgtccgctcataagcacgcaattcattgtccagcttgtttatgtcagatgagttccaattgtttaaaacaaattggttaaactcaagtgataagctgttgagaataatatgaactctttgctcttcatataaaacaattcccagcttagctgatttctagaatttcatgttcatcatgagcaagtgtgaagtgatactctgaccaggagtcatcttcacactttaaagttcattcctataggcatattctagatgaggattggggtgtgggttgtacattttgacactacaaatatcaataaatagaaataaattattggtttaataaattcatacacaagtttagaacataacaagtaaagcatataggtttgtaaaaataccaaaatctaaacatatttattattttccaaggttttcaacataatgaaatacagtgtcccggtaggcgagagtcaaatataacatcagttgaatagagtagtcagctcatctaaaatgtacaccattttagcaaccttttattnnnnnaaaatgagaatccaacgttgtcccagtaggcaagagtcaaggtcattctccttttatgagcttctaccattgtttcatgttctgtaaatttatctctaagtagtcactgtaggggagagtctaatatagacgaaaacttacaaaacacttatcatatgagatcttacagtgttaaatacttttaacgaataaccatccataaggggcatgaagtctagcatctcaagattatattgaaaatatttaaccattgtaagaccaacaannnnnnnnnnntatctcttgattaaagctcattatt

SEQ ID NO: 141118 - DNA, 529 bp, Cannabis sativa
  modified_base (452)..(462): a, c, t, g, unknown or other
tcagaaaccgaaagaacagatccctttctctctctcaaacaacttacattgataaagtgttagagagattatcaatgacaaatgccaaaggggcacgatgccttctagatttggtatctctctatttaaggaacaatctcctactgatccccaagagatagaggacatgagaagggttccttatgcttcagcagttgggagtttaatgtatgcaatgttgtgcactagacctggcattttctatgcagtaggaattgtgagcaggtatcagacaaatccgggagaggaacattgaactacagttaagcatattctaaagtacttgaaaagtaaaaggcattacgtgttagtctacaagggtggtgctttaaatcctgtaggctataccaattcagattttcaggcttggcttgatgatagaaagtctaaatctgggatggtgtttactcttnnnnnnnnnnnagttgtttggagaagtgctaaacaaaccgcaacgtcagactctatggaggtcgagtacatagctgcc

SEQ ID NO: 141119 - DNA, 513 bp, Cannabis sativa
ggtgtaaggacccaatggaggcttgaagcggggacgttagaattatgctatagtgaattagaaccaaattctgatataagacgagagtacctatatggtttggatagcttataggatttctgtgtttaatatcttttacatgtttaatttatcatgagaagagaaaatttacataattatgatttatatatatgagaagactttaaattaccttagtaaatctgctattgcatagaatttggtaatagaaatataatcatgttaaaccataatcaatagatgcaattgaaattgaaagccctaacttgtattcatcgttaatttccttattagtaatttacctgcttcttattttcactgtttttattgttctagatttaattttctcttaaattttatatagccaaatagaagtaagatttaattttaaaatacttaactacaatctttgtgggatcgatctcattctttgtgagcttataacttgttaacgatacgtatacttacgtgttg

SEQ ID NO: 141120 - DNA, 790 bp, Cannabis sativa
agtcacaattttttcatttttagtcacaaaaagtaaaattttttgtagtgatatatgcattgcagataaatatattacaaataatttttgaatagttataatattaatttttttatatattgtatttatttaaaaaaatttaaaataatttataatataaaatataagttttaaaaaatttattttatacacttataaaataaaaaaaaaatactttatttgaatattttcaaggcattaattttttttttttgaatattcacaattaattctaattgtcgttgacctgaatagtagtactcttgccagctgtcacatttattatatttgtatatccattattatatatgtaacaaatctagccacgtgtccaacatttcccaaccaattaatttcatccttgatttgaacaatgcttcatctttccaattatatagagaaatataacaataataaacaatcatcacaacaagcatggaaatggttatgaagatggagataaaggagaagacaatggtgaagccagcaacagagacgccacgacacgtgctatggacctctaatttggaccaattggttccgaaacatattcacatcccaactatttatttttataagcccttatcatcagcgacggatgataaggacttttttgatcctgtcaaactaaaggatgccctaagtaaagtcttagtcccgttttatcctgtagccggtcgcttagtagattcctccaaccctaatggcggtcgtattgagatcgattgtaatggtgagggtgtcctctttg

SEQ ID NO: 141121 - DNA, 592 bp, Cannabis sativa
ttgatgaccattctagaaaggtttggatttttgcttagaaatctaaagaccatgtgctcgatgctttcaaagaacttcatgccaaaattgatctattgcatttattcggattcatcttattttagacctagtatttttttagatcggatcggatccatctaattttttagatccaatatttattagattttattcaattcaatctaaacaaaaaaggtaaaattttaatctaattttcatatatgcatacatattttaagtataacaacataaaacctaattaggcatcttaactaagtaaaaatactaatgagtttgattgaatttagatgtgttagatttttagacatcacatctaatatctaatctgatccaattgatattcaaaatatcatctaatctaatccaataataattggatatctaatatttagcggttagatttaatttaatcagtcaataataattaaattagatcgatttatgcatactctggtgtactaaaattttgtattttaaaatttccagttttattatttaattaaatgcttaattaaatgcagaataatgaaactggtactgaaacagtttt

SEQ ID NO: 141122 - DNA, 1136 bp, Cannabis sativa
  modified_base (277)..(277): a, c, t, g, unknown or other
  modified_base (1022)..(1023): a, c, t, g, unknown or other
ttctgatctttattaatgagtaaatctgattatattgaaatggattttatttaggacacaaaacccaacattggctttgcagaacttggggtatgacgattgaatggaatcatcgaaaaggcagtcagttgttgcgaaatttagtgtaacagtagaagaatatttccttttttcctaaggtaataaaagatagtgttcatatgctgaaacaaaacaacaaagaaacacaaaataaatattttaaaaatattttaaaaacttaataacagtaactaanctaaaaaacaatgataaaacaactataaaaagttttaaaagaaaaaagaaattttaccgagtcattgataaacatgtcacagcaagacaaatgataaaatcaggttttatcttcaacataatcaacacttaatctaaacccaggggaaaatttctttgcaacatcctcataacaattgtaagccctaaaacaacaaaaaaaataatattgaattccaataattgcaaaaataaaaacagaattcaaacaaataaaaaatacaaaacagaataaaaaaaataatcacctaggatgttttagctaacctttgccaatccaagcatcaaactttgcctcaaattcaagagagacgggatccgtacatgtatcgttaagagtgtaaaggtccttcacataagtaaccatcttaaaatccctctcatctcctccagattgagaacctgatgacattacctccattggagtgctgctcacatcagctgacccaaaatcaacaaaatgtgatttcaatgtcggtgcacgctttctcttatccaaaagaggagtataagtaaaagtgtcatcagcttcttcatcagaaggaatggcagctgccttttcaacagcaacacttggattggattctggaacctgaaaaataaaatttgaaaatcagaaaaaacaaaagttgcaaaacaaacacaaaactgtcaagcaactaaaataaaacataattttaccaacaaagaatataaactacacttannttgattttaccaacagcctctaaatcagcctacacaacttgctcatcatcaatttcaagctggcttaaaccatcgatcagcttcagtccacttagtaaagtagtcgactgcta

SEQ ID NO: 141123 - DNA, 636 bp, Cannabis sativa
  modified_base (28)..(46): a, c, t, g, unknown or other
  modified_base (273)..(274): a, c, t, g, unknown or other
tttatatgtgtttaaattccattgtttnnnnnnnnnnnnnnnnnnntgttaaataacatacatggtagtagatctagatcctggtaaaataatccccaacaaatcggtcttccagttaaggaaccgttctgcaggttaggccagttttaggaaccctagtttttcctttttttgcgatatttagggtatttccatgttgtccaaagatagagaaacttttagtttcaattttcagtcctcgaaaagttatttagcgtgtcactcatcaatttnncgaataatgttatttaggggcctgtaaatcgtcaagcagcaattctactctagttggtcggcacacttaaattcgtaagtgagttaaaattagtataatgatgtgtatatgtgcttacatgtttagcatacatatttattaagcatattaggttacatcgatagtggtaccaatatacatagagttatattggataccgatagatgtatgtttggctcaaatactaatcgacgctatcacatcggtgtgactagaatatgaatagcgtaccaagtataggctgatattatggttgatagtattgtcatacgaacattctagactcaataccatgttgaacacggggatagggttatggttgg

SEQ ID NO: 141124 - DNA, 893 bp, Cannabis sativa
  modified_base (625)..(628): a, c, t, g, unknown or other
cttccattaattaaactagattttgaattcccaaaactctaacaattaattgggatggtcatcttatcacaacaggtgcagatacaacctgacttcacaattgaaactatgttataatggtttcactccattttataattccacaaaccaatagccaatatgcttgcatgcttacctctctccactaatgttgacaacattcttttgggaatcaaaatgactttttaggcaagaatttattgcttagatatgcagaaaataaaagatatttttggctaaagatataagcacattgagaaaccacaagcttctcataattttaaagcttcctcaagtgttcccataactaaccatgattgagattttctgtatttttcaatcatcggacatcactgaaaatatatttatttttcttttcttttatttttgatttttttcctacttttctagtgatgtcgagttacaattttttttttcttttttttttcacatgttactcaatcacacaagattttttttttcttttcttcaacacttccacacactctatttttcactttcccaaacttgttgtaaggcttatgataccattcaaaatgggatgaggacaaaaacaacagtgtgnnnncatcttttagttcaatgggtgaagaaacgaaacaagtctaggctcaatagggttcactaaggatattaattttatggtaggcttgaaaggctcaaactatccaaagaaactgcctaaatcatgttcctattaaatgctgttaaggattttgcctcgagagaataagacatccatgttctaagctattcaatcaatcttacgacaaaccatagtaaaatagttataacatatttcacagattgtcggattgcatccatacacaggc

SEQ ID NO: 141125 - DNA, 856 bp, Cannabis sativa
atgtcgatccattggtgattaccactcgccaataaaaggatcaagagggtgttaatagacaatgggagcttggtaaatatcctttataaggagactctacggaaaatggcgcttgaaggccaaattaaggcattgtatagtgaatctttgtgaattcaccagagatagcattgctagtcttggcataatcgagctcgcattaaccttaggcgaggcacccctatctgccactgttatgcaagacttcttagttgtcgacctgccatcggcttataacatattgttgggtcgtccagcactgatcagactagaggcagtcagttcgatcgagcacctatccataaaattccaaatgcaagaaggagtgggagtggtgtgtggcgaccagatgctagctcacgattgctatcgcattgagttgcagcataggaaagtcggtcatcagttgatggcgatcttggcagaagaaaacgggaagaaagacgaagatcttgacccccgagttcaagatgagagaaacctattgaaaccgattgagaaatcggaagaggttattctcgacccaagaaatcccacaaggtgtgtatacatcgggaaaaacctggacgagcagctcaaataacaactaataagttttttgaacgcgaaccaggatcaatttgcctggacccatcgagatatgatagggatcgacccttatattatctggcgtcatttaaatgttgatccaaactatccagcgaagagatagaaaacgagacccctagattctgagaggcaaggggcactaacaggaagttgacaagttgttagtcaacgactttatacgcggggtgttttatccctcgtggatagc

SEQ ID NO: 141126 - DNA, 663 bp, Cannabis sativa
aataatatataaataacaaaaattcaaccataaaataacaagagtacaacataaaaatacataaaaaaaaaccgtattttatataaatatatctaaaaactatgaaaatataaatattttgcacataccgtatttaaataattttttattattttttgttaaaaaaagttatctcgaaatttaaacaataaattaaacatatatggttacctcatactacttttctcatatattttttttttttatgtatttttcacaaaaaaacactaagagttagctagggagcatcatacaaatgggactctcaaagaatatatttgacccatttggcctttcattataacaaagaatacttcttacatatgtatgtctagacctttttggacattggcttcccaacaagacattatcaattatttagatatatactctattccactatcactatatattgtcacaaacaaacatgagaataaaccatgcatataacataacaaacaatattcacacaactacaaagattccaattagatttccatctacccttttcggcatttgaagaatttataaccgaatatatgacaatctacattatagttataatatgtattcttctgttcttctaaaaaaaatatataaattatttatgtataattctaaaat

SEQ ID NO: 141127 - DNA, 549 bp, Cannabis sativa
ttaagggggttttaccactaaaaataaagaatagggggttaagtgtataacaattgaaacataggggggtttagccgcaaatttctctaatttatatgtttgttttacctcattacgtaattaaaagtaattaagaggtgctctctctatgagaatttaatgtgattactcaaaactttccattttaaatattaaagaataaaaattattatttccatatgtaattactaactattttctcaaacaaaatattaaaaattcataaataattaccatcttatctaaacatgcttattttaaaattagtataattgctagttgtaattaatattctaatatttacactttctagtaataacacaattattcaaatacacttttagtgtacaaaatatatggcaatagatttctcactactatatatataataagagtaattaacgacatgagactatctttaataagaaatgtaaaaattgagctatatttgacacaaaagtggttttgtgatatttttacatcaactttactattgtgctccaatgcata

SEQ ID NO: 141128 - DNA, 1150 bp, Cannabis sativa
atttcgtcctcgaaatctaacctaaatagctctagatattgagtcctcatgtcagactctaactcccaggtggctttctccaccttgttgtttcttaagagcactttgaccaaagcgatggtcttgttttgaagaactttctcctttctatcaagaacctgaattggttgttcttcgtaggataaattttattgtagttcaagggcttcataactcaagacacgagtcgggtctgaaacatatttcctcaacattgaaatacgaaatacattatgaacaactgataacacttgtggtaagtgataactctatgggatagagttattttttatgctttaaaactgaaaatattgagaggagagtagcgaaaatgtgtttggttgcttgattttaagtagtttgagtttaatttctatttagtaagctaacttttgagtcttgtaaaaaatgtgttaatttgttttttttttttaattaaatatcgcttgtttgttgtaggaaagaagaattaacttgctaggaaaaagaaagtgaagcaaaggaaaagtttgagcaaaagctgaaaactgggcagaattgctgaagcaatgctatagcattctgggcagattgggaattgacgtggaaaaagtctaaaaaatgaatttcacttatccacatcagcattttcgtcccagtcacttaaagtacgctagctggcttctgtggaagaaaaaggactaaactagtgggccaaggtggaaaaagactgtgcttctaattttagggtgtgaattttgtaccctagggatccaacaaccaaaagaggagaaaatccaagtacaccatcatcttctccataacgtgagcagctgccattttttgaaggggagtaattgcagaaagtacaaagagaagaaaagagaagggggacccaagtgcaaaagaagagaaggacacaagcttttttttgtttgcatttctcttccctttccttttatattttgttcttgtctttcttatctttaaatatcaaaaacttgataagttgtaaaaaggacagcagccatggatgaacaatttcgaatttggattgtaatttttgtattgacaatgagctaattttcttaaggcttttcagtggctagaactcctatgttgggtatgatta

SEQ ID NO: 141129 - DNA, 579 bp, Cannabis sativa
ctgaaaacatagaaaacaagcgtaattctgtcctaacacagtgaaaaacgaacataaaatcgatccaaaatatagcctaaaaaaagcctaacaaataggcgtaacccatcttcaaaccactctgtgcgaaaaaaggcattaaaatccaaactaagcaaacaaaaataaaagaagaaatgttagaaaagacttaccctcgaaagctctttcaagactcctcccatgaccaactcgagagacaagtcactatgtgccccagccaactgttcgtttacctctgggaccgaccggcttacatagtggttgagcatgtctctgcctcttttggtctccgtgtgcaataccaaaggtggggtgggggccttaacttgttcaggtccgcttctgactagttcagatccacctttcgccttctcaggtccatctaaactccctcctcgagaacccttggacttagtaactttcaaggcatgaggatccacgataggtttttcctcacagagatcaatgacctctttagtttgtgccttctctttggacggagtctcaccgcccttagacttcttggttggaggagag

SEQ ID NO: 141130 - DNA, 854 bp, Cannabis sativa
tggtggtacagactcgtaggggcgtggttgatccagcgaatccacaggcggtggatcctgcactgcagaacctaggaaacataagggttccgccagtcgtaaatctcggacagccatcaactgcgggtcatggtgtgacgagtcctgtagatcaaatcgcgccgggtatgcaagagactgggaatactagttcagtagccgaccagggcattcataacacagccgttctgcccgctaccaatgttcaaacaaccatttgagatgacactgagatctagaacctccgtgctgctcttggactcatgcagggtcataccaacaccctacatcatgattaggaggaacttcgcgctgtagtttatcttgggtttgaagagcgaagacacatgtgccgaatggagggacaaagagatggaagcgttaagggctcaacatgcagtcattaattaaaatcctttttccatttgaagaaaattaagaaaataaggaaattaagacatttcttgaactctctctctctctttcttttggctgggataaatcaagggcaagaaccaattttctcttccatttttttgagttttcagcaaggaattcaagggggaaaatcaacctaaggtaagccctaatgaactcttctctagttttcaagttatgagttagtttgaagtaatgaaattgtgatataggagttgttagggtttgatgtttgtttagtttgaattctagggttagtatgggttgagtttagttcatagcagctagttttgaggtttattgttggttttatacaactttgaactttgagttcaaagctttgagatttaatggcaacttgggttttggtggtttgt

SEQ ID NO: 141131 - DNA, 853 bp, Cannabis sativa
gggaaagttcaccggaaaaaccgaacaggctccctggagaatcttgccaagtattttgtatttacatcttgacaaagaacatagaaagtgtttacatggccactcagttactagtcccgtacaagaatcccgcacccatgaaaaaagatgtcagcaagagagacatgaccaagttttgtcggtttcatggagactatggccatgacaccaatgaatgcaacaatttgaagggggaaatcgaatttttgataagaaaaaataacccgcgtgtacagaagtatgtcaaggccgatcaaaatcagagggcaataacaaccaagacttgctaccaccaccggtggatggacatctgcaattcatcattggaggcccgcacatagctggagattcaggaaaagcccaggagaggtatgcaagaacagtacaccacgagcaagaagaagggatcctggtcgaagaagagaggaagccaaaaattccatgggcaggagagcccaccataacattcaatgttgaggatgctatcaaaatcagatttccgcaaaatgacccgttggtcgtggaggtccagatagccaacaagatggtggctagaacgatgatagataatggagcctcttccaacatcttattcatgaccacatatgaaaagatcgggctccaactcaaagatctaaccccctgtcttctgcctgtgtatggtttctccagccaaggagtcgcacctctaggacaaattcgcctacctctcaatgttgggcaagcttcgacgagcataactataatggcacaatttcttgtattggacgttccatcagcctttaacgtcatgctaggtcgaccaaccttatat

SEQ ID NO: 141132 - DNA, 520 bp, Cannabis sativa
tttgtgttaattttaatatttattttcaattttttttttaaaattatgtatgactagtaaataactcacgtttgcgtgcggtggttaaattattttataaatattaattgaacaataacattagtttcaaataattttaaacttatttttatttatatttttctaaaaaaaatatatgtttattaaaaaaatgataaatctatattaaaaactctaaggaattcaaaaaaaaattatcatataatttcttacataaataaaaaattacgcaattttttttaaatgtaccttatagtgaaaaaaattagaaactgaacaattcttacacaaaatagagatctaaaataaaaagaaagcaatagatctatagaaaactcatcatatataatttcaaaataactatcatcgtcgcatccatttataatcaccactgtatttaaagttgatatcatcactgtatctcacttgtaatcatcattaatatcatttctaatatatttgctttgtacataaaataaat

SEQ ID NO: 141133 - DNA, 609 bp, Cannabis sativa
tatatcaactaattttataagttaataagtaataagcttatgcacttagcttattttgtaacaattttgatatgtttctaaaataaatatatggcaatcacatagtacttaaaatttaagataacaaccaacatcacaagttactttatatcggtatatgtaaatatcaaattgtttaggaattgttgctgttggttatctaaaacatcatatgacttacattaaaaaaaaaaaaattaacctcaatgtatcttaaacaataaaataacatattatagcttgaaaatataaaaaagaaataattttttttttaatattagtcgtctttttttggagacagaaaaacatatattttccacatattaaaatgattattttattatttatatatgtataaaattttaaaataaattttttaataaaaaaataaccaattgatatcttattcacatcaaaagtaattaaaatattacatttttcaaaactctcaaaaaacgaaaaaaaaattggaaacgagattttctaattttttccattttcggtaatttttttttggaattcggtatgtatgctgacgtggcataacgttatttgtacaaataattttct

SEQ ID NO: 141134 - DNA, 853 bp, Cannabis sativa
aaataaatcgatgtaaggagtacaatgattactcgaaattgttatgagatgatttattgaattgttaaaattccgttaatgtacatacaacacacggttggttgtagtacataccaatcctttttttttacacatcttcattgcagtgcaacaacaatacatattttaatatcttataatttttactctatacatatatatataaattttgtaggggagaaaaaaatgacttaacttgtgaacgatagagggctatatatagtacttgttgatttgatgtgtggtgttttcaatatggtcaaattaatattaaatatttacatttaaaacctgatttgactagactatacaacctatcaatgaagatgattttgtcaatgcatgggaaaaatgcatttcgataaacccaaccaaatgggcggattattcaaattttaaatgaaaaattaaaaaacaaaacatgttcatttccatgatattactaattacttgatatttatatgtaattattttaataatattttaccatcaatctgtagaaggtcatatcagtatggtgtacgatctactttcaaaaccctagctcataccatatcaaatattaaaacaagagcaaaacacgcaaaaatatcctaataatatttttaaattgaaaatattttttcatttgttatcatcaaacccaaatatgctccttatgtcatgcattattgaaatttgattgtgacgtactgtgtacaggctttgacgtatgtattttcaaaactttgaaatattcaaatacgctgtgaatgtgaggacttacgtagaaatacattattagaatatataataaatcatttatatttggtaa

SEQ ID NO: 141135 - DNA, 633 bp, Cannabis sativa
cacgcggcgccgaggaggccgaggagagtgggcttcgcggctggcagtcttcttcttcatccagcatgtctgaaagcgggtcgagcacgacccggttgcaggcggtcgggtcagagaatcaaaaatagccaaaaacgcgacgaaatgaacgaggaaaggaggtgttttgctcgtgattggatttctagtcaatctacactactaatttcgggtattaaaagctaaatgtctaaatctcatggcaaaagctgtccgaaagtttaaaacataaaagaaaataattgtaatatcaatctcgaccaaaatacaaaattaattatgtaagaacattcataaacaattgataattagatattgataatcaattttagatcaaaaaacaagaaaatcaaaaatctcaaaatataatttcataaaaaccctaaaactttaaatttaaaattctcataatatactcaatgattttatacataaaatatatcaataaaatgagaatttaacaataaataaaacccctacagtttaaagatttaataacgaaaattaatatgtaattatggataattaacatatacaaattaattatacaaattataggtcctaaatcatatacaaaaggcaatctgataccac

SEQ ID NO: 141136 - DNA, 581 bp, Cannabis sativa
cctgtgggatcgacctcactcctagtgagtctactactttaaacgatacatacacccctctgttcgaggaaccaaagccacttactcccgggaacagaatggattttcctagaggggccaaggaattttgagacacactgaaccgagctacgcctttagccagtggaagcctcatatatacgtgttagactgtggacttagtgatcaggcttttttaggtacaatgtcagaggttgtctccaacgacacgctatcgtacagagcatgtgtgtccttctgtgcctaaccaaatgatccaacgactagggataagggaaattcaaagaggagaagccttgatgtgacacgcgtttaaggcctagcacgatctgatgcccttaaacgctatatgggaaatatgccacctaccaatctaacggtcagattttgccccaacgatgatctatccttggcaacacatgcaaagaagttgacctataaataccccaaaaaagtacaagaggagggagagacctttttcggatgaaagactcattcttcatcatcccaagaaaacacattttgtaaccctattacttact

SEQ ID NO: 141137 - DNA, 1257 bp, Cannabis sativa
  modified_base (1213)..(1213): a, c, t, g, unknown or other
cattaaaatcacctagaatgatcctttctttagaaacactaatcccagagagatatctccacaattccaatcttccatctatagaattggctccataaatgaaagtagcataaaaatccttttgttgaccaatcatcttaatccgacaatgaacatgctgattagattccttctccacttccacattaacaaatcctctcctccaaattaataagattcttccttcgatctcattgctagtataataactccaattaacaaatctcttttgcatcatctcaaccaatctatcaccctttattttagtctccacaagagctccaactccaacattatttaatctcaaaatatccaaaaccgattcctgtttctcttttttatttaaacccctaacattccaacttccaatattgctactatccattagaagctagaaaaggtcccctcttcacccatctcctctctctgattttccccaagcatctcaaaagaattccttagaacttgctgttgttcacttccatattttttataggaacctgatcctttgtgtttagaaacctgccaagtatctttgtgagtactcacttctcttttttcccccaaacgagcatttccagcagcagtagcagctggtttttccacagcactacctgcagcaacaataccagcagcggcagtacctgctgctatagcatcaggtttttctacaccagcaacctgttctcttgtcccctcttcctgaccctcactatttttattcccagcaacatctttctccttaactatccccttattaccttaagatttctgcccaaatttctcttcaaatgacttatcttttttcctacaatcagccataatatggccataccccttacaatgactacatttaacaggtagccattcatattcaatgccttgttccatcaattgaccatattcattcaagaaccataacgatcgattaggattatcagtaatctccatttccacaagtattcgagcaaactggaccctagtttgatccttagtgtgcttatcaaccataataggttttccaattgtactaatcaaagcacttaaagttttatttccccaatattgaaggccaagatcatgaagtctaatccatagaggaacagatttaactaacctgactgcattcaaatcagtcgaccacggtcggactattgggttttatgccctaaanaaaactcatttcaatataatcagacttacttattaataaagatc

SEQ ID NO: 141138 - DNA, 705 bp, Cannabis sativa
ggattaaattgggacatgatctaagggctggggttaaagtaggagtagttagggtgcaaaaaatggtaaccagttggtattttattttaaaataattattttaaaaaaactgacagtgattgatgtactgacagttatcatttttcaaaatacacttacatttgtcttttcttcttcttcgtgggttcatgggttcctttcttttagagcagagttttcttcttcttctccacattttattcttcttcttcacattttcttcttcttcttcacattttcttttagggaataaaattattttacaatttgggggaggaaactacagtactttcggacttagtgtacttcgttttttgtgtctccgactccgtctccaaccgcggtgggtttgtacaagtaagtgtcttcgaatgtacaaattttcttcttcttttgcatgttgttcgttctttagtttgcgtatgtgaaaatttgtctaacattgttaaagaaagattaaaacttggtaaagagaagtgttgctcttcaatccgtgtatgtacatttcatttttttttctgttccatttttggtttattgagcagttttaattctctataaaggctttaaatctgcttcgtgaacaaggtttgattcacagattgctaaaaatcgaaggtacattttatgttccccatttccacatacagagtactaggaagtagt

SEQ ID NO: 141139 - DNA, 819 bp, Cannabis sativa
aaatctaagagatctgtagatttagaaagtatatgaatgtttgtgtgtttatatatatatatatatattgtgtttcgaataggtatgtgtacatgtgagcttttgtattgtatttctaaattttatgagtgaacactgttggtttgtttagaaagtggttgacttaagaaatttgagtttctttaggagaaactttgtttagtaaaaaataattgtaaattattagtgaacttttctttttttagtgttaaatttttattattggtttataatgtctttttaataatataataaaactttcatatgatgataaagtttattttgtctgcaggtaatatagaagatattgcattggatttgaagagaaaatatttttcatttgtacacttttatgtaatttttgtaagagtatatatatatttatatgtttataaagaatttgagagataatccggttgtaagaaattaagatctcatgatttttttgtatggaagatctcatgattatttatttagttatgtgaatgttaaaatgtatatattacttatttaatttgtgtaagtatgtaatgtttaaatatttatataaataaatattgaatgataaatatttttatatagcatttatgctgttaatattacttaatgaataatattttaattttaaatatatttaatattaatcaatttatattgttatttaaaagaaacaaatattaatttatttaagaaaataaaaagtattacaggcggactcatccgtcgctaataatactatcacattataaatctgacactattattagcggtgggagtgtc

SEQ ID NO: 141140 - DNA, 829 bp, Cannabis sativa
ccactaaccaaagagtcatcattaattgccaatattgtttccccgaaagaaccaaattaaagtctctcaagcttcaaaaacccaattctcctacatgtttatgacgacacaaccgctccgaactcatccaattaatacctttccccagaaaagctcacttactgcctaatcttagcaacaaggaatagctaaggccttactttcaagctcatcctgtttagttgtacactgaccaaccattacgccaagtattacaaaaacctgatgcctctggacggttactcaaatgggcagtggaattgggccagtacgaaataatctaccaaccccaaacagcaatcaaaggacagactttagcagattttgtagttgagtgtacgggcaaagaagagagcatttcaaaaaagaccccggagccagtacaagaacctcagccgagcaacaacaaagacaaacctatctggaagttacacgtagacgggtcggctacagatcaactgtctggtgcagggattgcccttatcacacctggggggcaacacttacacgagcgagatcaacacattaaaattttatacttttttggattggatggatctatttcaatccaatagatactggatctaaaattttagatgaattcgatccaatctaataaatattaggtccaaaatattaaataaacactaattaaactaatagatatacatgaaatatgtttaatcgatagaactgatctaatacaacatttattggatgttgaataaatgtaatgactaaaattaattagatcggatcggatggtaaagtctaacatccaatatatgat

SEQ ID NO: 141141 - DNA, 605 bp, Cannabis sativa
aattttttagcggctaaaaaataataagataactattaataataaattttttattaatattattattattatataaaataaattgagacttatcaatttcatttcgtacgtataatatatatttattttaagtttaacatatataacatatataacagtatagaacgagcgaataaacctacgttctcttcctgtaacaccttactagattaggcgtgttacagtgttttctagatactgtgcatgcctttgctaatcaaagagtttaataaaaacgtgaacattaaaacttaattaaataacttttctttgatatttaaacataataaattacatgattcgggatcccgtttaaaaagttacaaaagtttataaactgtctatatttcaaaagtcgttgtcaagcaaccaacaaaagtgagtcaacactgccccaaagactctgaacactccaggtctaaccgtcatgatatgtacaatcctcatccatagctttagacacttcaatggttcgattctagctcatacctgcacgtacacataataactgtgagtcgatagactcagtaagaaatgcataatcataacataaatgtaaacaggat

SEQ ID NO: 141142 - DNA, 1081 bp, Cannabis sativa
agggaacaggagctggcctacatcaaggcccaggcggcagccgggaggacccttcgtctggaagctcctccggagcggaggccccccaggcccaagcatgtggtcgcggtccccaatgttggtgctcccgacgccaacacttcaggttctggtaagtcttctttaataatacattttgttcctcccgtctgagagtatacccaccttagacctatagggttcgatgagtgccttcgtaattttagaatgccttctacctggtgggggaatcacgccaaagaatattatttgtcccacttaggccattttttaggtcgatcctggatgggctctggacctccggcgcctattcccctggacaattcagcccatttatcttccagctggtttctcccctcggaaagctttctcggggatgatgaagccagcattgtgattcgagactttgctagggctgaattagagagtcagggtaggactagttttgttgctttattgttgggcgcatgcctttcttgcgaatatcctaacacttagcttgtttctttattgcagcagtcaggcctatggaagatctcctggctactctcgccgaggcttacagccctgatgcctctcttcctccggctccctcccagtcggtgacccccgggaggtcctcatcaagtgcccctttaggcacgatcgtcttgatagacgaggagggggaagttgaggaaggcgaggtggaggatgcggccgcccttgagcgcaagcgaaagggcaagatggttgaggctgagactcccaagcggacccggaggagggacactccggcggtgagcaacgactctagaattccttccgaagcggaggaatacactgtgcctcacggcattgtgctgaccctggttcccgcggatgaggagaggcaaaacctctgagtctccaagcacaactacgccctggacgagtacagtcgggggcacgctgaggtggggggcttaaagaagattctgcgggaggagcagcagaacactttgcacgaggacgccttccaaaatccttgggaccttaacatggaccctttgacggattggtt

SEQ ID NO: 141143 - DNA, 568 bp, Cannabis sativa
gaatgcattttatatgtcatatagcgaaatttcataattttgcattttcggtgcccgacaacatggaacacggtgtatggctcagtagaatcacaatgtaatgttttagtatagcggggtggtattgttagacattaggaatgtcggaattagtcgggaatttagagttttcccaaaatacccttttgtgcttttaatccttttagtgtggtaggggaaaaatggtcatttttccttataagcttttgtccattagtggaattagtattatgtgattatttgatttattttgaattaagttggctgaagtaagtggattagtatgacagttgttcattttattaaaaaatcaaaagaaaggcaaattctcattttctctctagctctctctctctttcggccgcccctagaacaagctagggttcttgattcttcttcctcaattcagtgttttgcatcaattcttactacaatccaagctaagggaaaccttgtgtaactttcttttagtttcttaaagtttaaggaagtaaatatttgcatgcttgatgattttgatgattgtagc

SEQ ID NO: 141144 - DNA, 887 bp, Cannabis sativa
tgtctttgtaataaatggaagtgtgtctgtgttagtaagtgttaaatagacttatgttgttgtttttatgtgtattaagcagaaaaaaatgcgaaaataagtatatggaaatgttcgggacaagaaggaaaatgagtagaaaaaggcttattgctgactggcattgctatagcaatcatcgcgtagtaatttgtcaacccagttagtgtattttgacagaagtccagctggcattaatgaagaaaaaaaggtgttgaggtggcgaaaatgtggacaatgactcaactattatgtggaaaataaagggcaagtggaccatgccttggatttccaattagggtaaacttcggtaccctaatttgggggcaaaagagaaagaaggacattagaaaatggtggctgcattttagaagaagggagtacatttttaagatctaagtacagaaaaagagaaaaggaagagagcacaaagaatagaagaagaagatgaagaaaaaggagaagaaggcaacctccaaagaaaagatttgagcacacaaactaatttctcttgctctcctcttccattttgtatcatcttctactctttagtattctcttaaaccccatgaacatgtcattttctcgttttgagttttaaatttcagctatgaactaaaatctttgagatttgggtggttatgaacccttgtatggactagtactttgattttgcaatgattgagtaatcttgtctttgttcaattagatgtgacgcaatgttgattgaattctaatttttggccagctttaacatttagcaagctagatcttacttggaaaagtaagacctagttgaacccctctaattgatgcatgatttttaaccctcttttaggtgttaatta

SEQ ID NO: 141145 - DNA, 781 bp, Cannabis sativa
aaatccattggatgtgatctaatgaacacccctaattattagagattattattattattattattattattattattattagcttaattggagttttttcttttaaaagtaatatagaagtaaaaaaaaaatagagaattaagaagagaatagatgaagtattgaagcatgatttatgattaagtgagaaagaacatatatatatatatataattaaaaaaaatcataattatataaatacatttaaaataaatcataattataattatataattaaaacataacatcaacatagagattataaatcataaactaaagttatccttttaagaaaaacatatatggttacactcttaatgtgtattacccataaatgagtattattaaaaaaaatttaagtttttatgcttaattttattatttaattaaaaaaaaaaaaaaacctttgattttgttccatccggccaagagaaagataaaaaaaaaaagtttgagagaagggtaaaggtaatgtttaatataaaaatatttttatataatttaaaaatagagagattttttagttaagtaataaaattaagtacaaaaaatttaaattttcttttattatcagtgatcgaattaaaataacatttttaaaattaatattttcaaactgacaattaatcttaattagtttttaaaagttttcaataatataaaaaaacaattcatataataaattctcaaaaaccgtgtttttgctaatgtcagttgtatataagaaaatataaaaactgta

SEQ ID NO: 141146 - DNA, 690 bp, Cannabis sativa
tctctctctctctctctcttgcgtttagcctcaagaaactcctgtaatagaaaccctccttcgattcctcgaccccccgaccgagatcaagttgtctgctcttcttctggtatgtatatataatgtatttttatctatattcatctaggcttttcccaaatcatcttctttctctttttttcttttgtgtattattgtaaagtttgtagcttttttcttatctatttttgttttattttcctgatccaggtggagagggagggcattttcagatttgccccaagttttctggcaagagaaggagcggtggaggcgttgcgagagaaggcttcatatttggggttggatgaatgtgaagtgttttcaaatctggggttctcaaatttggtttgatttttttttgtttgtttttgtgtatgtgtgatttaggtataaaaaatagggtacggtatggtgagcagtggtggtgggtggtggttgtagatggtaggtagtggtggtttcggtggatgttggtggtggtggatgttgatggtatgaagaagatgaagaagaagaaaaatagaaataatgaagaaaaaaaaaaggatttgttggaatgaaaaaaaaaatatttcacttttcatttttaactaatttttctgttaaaaaaattaaattattttttttattttaattttaaatatttat

SEQ ID NO: 141147 - DNA, 544 bp, Cannabis sativa
ctaggaagctcatatacatcaagattacacacaatcaagtggtataagtttactttagtcttattaaagtgatttgcctggtacactagggtttataagtttaaaagtttggcacactaacttgtgcgacaggtttttttcacaaaaatgatatctaaattttctatattgatttttaagatcacatatcatttaactaagagaacgcaattggaatttttaaaatcggataaatgagtaaaaagttatgcacgttttagtttgaaaaaatgaatcttttgcccttgttagccatccatcttaaccagaattccagttgtaaccaatctagaattctgaatcacagtagaattagccttgaaaaatgtgctaacggctataaacggctagttttcattcctacactatataaactcatttttcactcaaaaattatggtgggttgagcttctattgatcatataacatcattctaagtgttctaagataaagaattatcatcttttcataaacagaccaaccacacacacttgagcgaaacttg

SEQ ID NO: 141148 - DNA, 1128 bp, Cannabis sativa
  modified_base (1005)..(1028): a, c, t, g, unknown or other
ttgttttcccaggaatcaaaccagctaattgaggtttgtttctgtggcataaaaaccatagatcataaagctatagaggatgctttcttgggaagtaggtggggtccggatgagtcccttggtttgaaactatctgtgttgtgtttcatcaaatgtttccttcttagcaatactccagataaagaagtttctaggtttgatctagatgttgttgatagtggtcgttgggatgagtattgttggggtagggagtcatttgaattgactattgattcattcaaaggaagaatagagcatgggataaaaatgaaaagtaaaaaagaggagaggggaggtcagtatgatggttggtatagagcgttgtgctgtccttggatgtttattctttggttttatgaatgttgtcctgccatggtaaacacattttgcaaaagaatttcatccaggattccaagaattctgaattggagcaataatgttgtgaccaaaaatccaacttttagagacttgaagggcaagatttttgatttgtcgttgaacaaagtgattttttagtttctttactgttttgtgctgatttattaatatttatttttttaattgtttttgttccatgttttgttgttttgattatgattttcagttgaagttaaaaacattcgtcctactaatgaggagaagttataattggaaggtttatttttagatgaatctattgatgatcgcggtacatctaagcaaacatttgagagtggttcatcttctaaaaagtctaattcagaggacgttgaattgttgaaatctaagttggagctggtcattttgaatcaagaatcctcggccgaagacttcatttctttgatgtgttttgttgaccttaatttcaagtctgtcatgactgtaattaaggatattcaagaaaaagttaatgtcattcatcgtcgaccttctgatgaggtatttatttatgagttggtaacacaagatgatgatgatgatgatgannnnnnnnnnnnnnnnnnnnnnnntgatgatgatgaggatgatgacaagggattacctaatccaaagaatattgattccgactccgatgatggtgatgagttgggtaaagatggtggtgatgct

SEQ ID NO: 141149 - DNA, 544 bp, Cannabis sativa
atatatatatatatatgtacaaagttgcacttgtgagccagattcaatgtacttcttgttgttgtattgttttggtgtattccatgattcctttagcaaacttatttttattatttcataccaaaataaattaggtaaaaatttacaaaattataattaatgtacgagtaattgagggcgaaaatttttatggtttaatttttatatacttaatctttttatttatttatttatttatttattttttgacaaaacttctataaatttactttttttatatataaatttgaagcgtcaattaatatcattattaaatattaactggatgactactgtctacatctgtgtatatgtgaaattaaaactttaaagtcaatacaataataattcaattgaaatttaacgatgacatccagctagcatctcaaatttataaagaaaaataaatataagaggattttgtcactaaaaaataaataaatgagttaaatgtaaaaagtacaagtataaaaaagttcgtcacaaataacccttaataagtaga

SEQ ID NO: 141150 - DNA, 539 bp, Cannabis sativa
aacttgtatatggcctaaaaatgtaactagtagtgaagagagttggttcaactcattgtaaagattatagtttttcttgaggccttttattgagggtgctctttaattgtataaattgtttgttcggtctaatacacttgctgatttaccaaaaaaaaacaacctatttaagacaacaaatgagaagatggggctccaacttaaagatttaatcctctgtacccaacttgtatatggtttctctggccagagcgttgcaactctggagcaaatccgtgtacccctcactgttggacaagctccgaggatcataactgtgattgcataattcttgataatcgatgtcccatcagctttgaatgtcatgttaggctgaccgaccatatatgacttaaaagatggcaaattagtttttcatttgtgcatcaagttcccaacaacaaatggggtagggtgcttaaaagggaatcaaagagtaacacaggaatgctataaccttgcccttgttggattatggttttaccaggatctagatttac

SEQ ID NO: 141151 - DNA, 928 bp, Cannabis sativa
  modified_base (42)..(55): a, c, t, g, unknown or other
  modified_base (900)..(902): a, c, t, g, unknown or other
acgaccattccataattctaaaggtgtcttagggactgattnnnnnnnnnnnnnntttaaaatgtcggttgccatctgaattgcttaagttatatattttaacataatacattacaagttcatcttagaaaagaaatattataatcgtttttaacctattttgacagacaaatcaatggatcaagcactcaaattattttacaacttcttatttagctagattattcacaaatcacaagacatctttaccaataaggtaaaatattatggtcttacaatttattatttttttttaaaaaaaaaaaccccatttttcaaattatacatatttttatacaatttctaactctttctcatttttaatttggcagcctccatttgaatcattctacttaccacacaaaagttacaagaaaataatagcaacaaaataaggagcaatattatgaaattttaatattatcaaatttttaccatatttgttttgttgtacactatattaacttaatactatatatgctttatttttttggtatatcacgttttatattattattcaatatatatattcatcattaatctaaaattaaaaacaaaatatatataaacttcttatttattacataatattactatgtatagtcttatttttttaaggtatatgtttcatctatttaccataaataaaatttatgattcataatcttacaaaacacaataatttaaaaaaaataatgtatctttttttgaaatttttacatcaaaaatacaaaatgtaatttttattacactattaccacaacacgactatatcaactttattactcttcttctatatttaattactattttaccacatggacactcattccatgcatcatttgttgggttttatgcccnnnataaaactctttacaatctgattagt

SEQ ID NO: 141152 - DNA, 557 bp, Cannabis sativa
acccacacaataaccgggaccttgacccagaatcaggagagggacctgggaaacagaacaaggaccgggacctagtacctgaccaagatgcaaacttgaacctcggacccagctcatgacccggcactagaaatggatcaaactgggacccgagattgggatccggatctggacacagggcttgaacaaaaaccatagtcggtttctagatttgggacccagccctggacccgatcccacacccggacctgaaccttgtaccaaacccaaaagttgacctgaacccgtaccttgtgacccaaaattggagccaaaaccgtaagttgaccgggactggaactaggacttggacttggaatcaaaactgaaattggacctagatctagaattgtaaccggaccgggacaaggactccaaaccagacctagacccgaattgggagccggacctggatccccacccaaacatggactcgggacacgtacccaaagctgaactcagacccaaatgtggaaccagactagggacatagaactagggtcgggacctagaactgc

SEQ ID NO: 141153 - DNA, 616 bp, Cannabis sativa
  modified_base (125)..(125): a, c, t, g, unknown or other
  modified_base (578)..(591): a, c, t, g, unknown or other
attaatgaaaattaccttgatttcagttgatctaaaaattttatttaaattaattttcaactcaatctaatttttcaaaatatctacatttaaaataaataaatgcaattcgaaattaggtgggnaatatgattattaaaataaaataaaagttattttgaaaattattttaatttaagttgagcagaaattgaaaaaaattccaacttgaatgaattttctatttaattaaattcattaaaatagaaataattaagtatgtagaataatttcaacttaattattaattctaatttaatatctatgaaaatattctaatttaagttgatctgaaattgaaaaatttccagcttaaatatagttttgtatttaattaaattcattaaaatataaataattaagtatcttgaataaaatcgacttaattattaattctaatttcatatctaagaaaaatatctaatttaagttagtccaaaattaattgacaaattaattttcaacttaaatatattttctaaattaattaaataattaagtatcttgaataaaataaacttaattattaattctatttnnnnnnnnnnnnnnatatcctaatttaagttggtctaaa

SEQ ID NO: 141154 - DNA, 513 bp, Cannabis sativa
gcctagatgaaaagaaaatgaaatctgaagtgttttgctaattgacttgcttttgatcattcttgttcattctcttatgcatacatgcttaattggtatgtcacatactatttgtatgcatacaagttttgattagttgagttttgacattcttgaaccatacatgtttaaaaattcagattataagtcattatgcaaatttcagtaagctttggacatacttttgaactagtgtatatgtaaatttttcatgtttggctagtatatgcgtttatatctttgaacatgtccaaatgagtgtatttagcatgcctaaaggtttttcttgattgaaatatgctttgaacaaaattttagtatgttatttacttatttttaactttttaaggccataatgggtaaaatttgccaaaatttcatattgttgagaaaattattattttaaaagcttgtacatctctaaatactaatatatgacctgccttaaaaagaatttttcaaaaataatgctca

SEQ ID NO: 141155 - DNA, 533 bp, Cannabis sativa
attggatttttaaaatttgcattcgatccgatccaattataattggatatccgattctattggatcggttgggattggatcggatgactttatgcacaccctatgtagtattatgtccaatatatggtttatctttggagtttttacaaaaatactagattttagataaaaatttacaattttactgttacagaattttttataaaaatactatcttttttataaaacaatcgtaaaacaacaaaagagaataattaaaacaacagtggaacaactgtaaaaacttaacacattacataatataaaactaacacagtatttttgaaaaaaatcccgtcatacaataaaaaattaaaaaaaaaaaatggaaattgtggtgtaaaaacccaattttattttatttttatttcttacatataagtgaaattggaaagggacatgtacttaacaaaatccaaagaggaaattgtactctataccctttttatattgtcctattttatttttaccttcttttttaaaatctatcattt

SEQ ID NO: 141156 - DNA, 505 bp, Cannabis sativa
aagtgatgtcaaaatatcacatagctacatttatatacaaagttttttaaaaaaaaaatgttttagtataaagtaataaaactaatatgaataaagaaaactaataaatgaatgaattaattaaaattagtaaaaataaattgttaatatcattttagatcatgtattttgaaaaaaaaatatcgatcttaatctctgttttattatataacaagtggacctatatttttcaaaatggtacatacaataccttgagtttgatatttgacgatctttatttttattttaaatataaacaattactaatacgaataaatgtaaaaaaacataactaattttctcataatatctacaaattaggttcttattaaaatttatttttacttaatttttacaaaaataaaatccaaaatatgttatatccaaaaataaaagccataatggtgtgtttggaaagccacaatgtaattggatttgtgtataattggaggtaattacacaattt

SEQ ID NO: 141157 - DNA, 692 bp, Cannabis sativa
  modified_base (61)..(71): a, c, t, g, unknown or other
gtctacctattagtaacctgctattacaggttaaaggaaaaatgtaaccatatggttacannnnnnnnnnnaccattgaatagtcacccaaaaaatatatagaagttctttcactttacatttttattgatactattaataataaataaaatatatatttattatctactttttttaaaatatatacatataatttaaacatttttttttctttcaaatatgctaaaatatatagcactttcatagaaatattcttagtaattaaatattacttgatcgagttagtttatgttgcaaaaaattatttattacatagagataaaaaaaattaatattgtgttaaaatttaattaaaatttattttaaatttgtataaaaagaaaaggtctcgtttcaaatttcgccctaggcctctcataaccttaagacggccctggtgtcagccccttagggacacaaattcctagcagatatacaataggacatacatgaccaatgcagcaggtatcttagggattaggtgaaagtaatctttatccttccttgattgatgtgattcttcataatggagtcgtcactagactcgttgattatcgtgtaatcgtcgtaaaagaggcttacaccatctgtcaaatccttttatatgggttctgatacgtttcccccatgccgcattaaatgtgaaatgactg

SEQ ID NO: 141158 - DNA, 516 bp, Cannabis sativa
ttacaaaatctccgcgacgctcttggactcatgcagaatcataacaataccctgcatcatgatcaagacgaactccgcactgtggtaaatctcgcgttcaatgaacaaaggcgtatgtttaccgaatggagagatagagagatggaggcattaagggctcaccatgtagagattgaaaatcgtagtcggcaagctactgtgctgatacgaaaagcctaccaaactgtaggtcagcaacctccgaatgtcattcccctgggtgagatggacaaagatccagtgatgaatacttcgctgactgcaaatggtcaaccgcccaatccccggtcacgagttccactcgtgggcctagcggtaggcgggcagaccttgtctagtaattcattaggagaagtcatgcttgatggttcgaaccagatcaatggtgccattccacctatcaaccaagcgaatcaatcgctaagacagccaggcacttctgtattcgaaaggttgggggcgacccatgacctaagg

SEQ ID NO: 141159 - DNA, 595 bp, Cannabis sativa
tagaaaatcatcatcatacaaagctctcttctctttctttttataggcttcacttagggttaggtttaaatgagatgagcttggaataaagacttgggctgaatcttactcttagtgtcgaatttacatatgggctttagagtaagatttttgccactttatttcaactaatgaaacaatgtgtctttttctatttttagcacttttctcatctaattatttaaatatcagttttattttaataattataaataattatcaaataaaatacaatttaaatatattttttaattagacccacaaagtatcttagttaacaaataaacttttatttctcttttcttctcaattacgttattccttagtaaaattcataaataaggcagtcattatttagaatcctcattgattaaataaattaattaattgagactacaaaataacatcatcacagttagtgtgaggaccatgggtttatgtaaaagttattaatgagaaaatttactattttggacgctgtgttttgcaaaagttattaattagaccctcgattttgttaaatgataaaatggaccatatattttccaaaatagta

SEQ ID NO: 141160 - DNA, 522 bp, Cannabis sativa
tattagaatcacatccttgtatttttagtatagcggggcagtatagttagacattgggaatgtcaggaatagttgagattttagagttaaaaaaaatacccataagtgattttatcattgtttagtgtgggcaagggcattttggtctttttgtccatttcatattttgtccttttgtggagttaattatgtaatacaatcaggtttttaatttgattttggctgatattttaataaaacaaaagcttatttttattcatttatacaaaattgaaaaaaaaaataagaaaatgactctatctttcaactctcttcttctctctctggaaatccctagaaccagctaggatttgctctaattttcttctcaattcaagcaagttcagcaagatcgtagtgtatctaagttctaggtaagctcttagtaatctcctctttagtttcttgaattataagaaaatggatttttgcatgaaattgtgattttagttgatgttgttgtttgaagtatgtttctgaagt

SEQ ID NO: 141161 - DNA, 840 bp, Cannabis sativa
gataggcccaaaggactcgagggagctccttcggccagtgagctttacaggcctatagcttctttttcaatgtggttttgaggatttttttgacgattctgtgctggacacaaaagttggtgaaatgtttactgccaaattgtttcccattgtccgacacaatctcatagaagagcccgtatccacaaaaaatgtttttaacaatgaaatccaacatcttctttgaagtaaccgtattcataggctctgcctcgacccactcattgaaatagtcaacagcaataatggcgtacttgactccaccttttcttgtggggaggaaccctaccaaattgataccccaaactgcaaaaggccaagggcttctcatgagcgtaatttttataggtggcgctcaggggactttggccaacctctgacattgattgacttcctaacgtactccatgcaatcgttcttcatggtaggccagaagtatccttgccataggattttcttagaaagactagggctggacgtatggtctctgcagaaaccctcatggacctcatggatcacaacactaatttaatttctgtccccatgatacacctcagatatgttggaatatattttaccaggagctagatttactatcaagtatgtttttaacatcctaaatatgaacttctaaaacaatgaaaattaaacacatataaagaatgagaaaccttacattggttgcaacggaattaaatgacttatttcactcagatcactaacccttgtatcttttctgtcgcagagtataattaagctctgagcccaaaactccttcagttgtttagattcttcacagtc

SEQ ID NO: 141162 - DNA, 1022 bp, Cannabis sativa
ggtttttattattgtgcgattttatgcgattctatgtgcgattttgtgcgacgtagctggagtctgtactggtctttattgtgcgacattgtgcgatttatatgcaattttgtgcgatttttacatagattattactttttggtatgtttagcgactttaggcgacattatgcgcatgtgtgtgcgatgtatgacatattgggtaggctgtgcgattttaacaatattatgcgattaaggtgcaatttttgtgcgattgtaactgacaggatcttatttttttggttgttttgttctgtattttttagcgatattgtgcgatttatgtgcgattttctgtgattttatgtcacagtggtaaaatttatgcaatttttaggcgatatttgtgcgattattatgcgatctaattaatctttgtaaatgcaatggctccaacttatccattgtcagagcactttccagggcgtataacatacagagggaacgaatactttgcttcaataaaggctaaatttgaagcttttaacttgactcagaaggtgaaggagacgccctttggtgttttttggaatgccagtgaattaaaattcagtggggttattgtgcatcaactattactaaagaagaaagtgagtgaagccaaaaacgatgaagtgtggttttacatgggtaaaaccgaagctagatttgggtggtctgagttcagtttgatcacggacttgaagatgagcggtggtccttcgtcagaagaatttactgcacaatgtgattctgatcgaattttgcgagactatctcaacaactcaaaaagggtgacctttaaaaccctttggctagcgtttgaggcatgcgatgtggctgacgatgtatacaagttggggttgtgtgcatttctcgaaggtgttctgctgtcgcgggccgagggtgtgtatatctggacagatatgctaaagttggtagaaaatgaagacaagttcttcgagtatccttggggtcttctttcttatcagaagttgttg

SEQ ID NO: 141163 - DNA, 550 bp, Cannabis sativa
ctcgagaattgttacaacaaagcaaaataaaaaccagcaatagcaataacaaaatgcttaaccattttctattctaacagcccccctcacgtgacattggtgaaaaccaagtgttaacttgctgagaaaaaattgaaatgggccaaatggcattgctagaagaagtttagtgaataggtctgatatttaattctctgtctccacatatcttatgtcaagttgcttttggcaataattttgtctcgaacaaaatgaaggtccacctcaatgtgtgtttggttcgagcatgaaacacaaggttggaggctaaggatccaccttaatgagtgttaaatgctctacttgtttcaaaaaaaaaaatgagagagatacaatacaaaattaccatagctgagtgaaccaatgcaatatatgaaacatggttattaaattgaagtgtcaatatcatatgaaaattattatgagaagtagcatttagtttctaatattaataatattaagttttaaaataaaaataaagatcggaagagcgtcgtgtagggaaagagtg

SEQ ID NO: 141164 - DNA, 817 bp, Cannabis sativa
  modified_base (35)..(70): a, c, t, g, unknown or other
  modified_base (785)..(787): a, c, t, g, unknown or other
tccttgttcttgagttaatacaaataacgaggatnnnnnnnnnnnnnnnnnnnnnnnnnnnnnnnnnnnntaaaattcctgtgtctttatattgatttactatatatcaatcgcaataaactacttgtcgcttacaaaattagactcactgtcgttggctaaaagcgaggtcaacatatagaaaatagatattaacaacttgtgaaagttataacgtagtgtttaatgtattatggaaactgaaatttaaaatttttattggaatctaaaatataaagtcaaagacataaatttataccaactattcaatgagtaattattctagttttgaccaccattaaaatactaatttaactctaagtttaagttgcctttagtaagcatatataagtaggagatttttctaagatcgaggatttatatcattacgggatagaatatctagaatatggtcatctacgccactcatttttatagaagaaaatagagtgacatcataaatagatgatttataaaccttcttgtccagtgatatactatcttaagcaatttcttaatgaaaaagctaaagaaaaactaaagaaaaattttgatcaaaataagaatccaagatgtctcggtaggcgagagtcaagattattcttattttaacagttctccattgtttcagtattgtaaacactagtctaaattgtcatcgtagggatgagtcaattagattttgtatttacaagatacttatctgttgagatctaacactattatgttgtaaagcccgcttagtnnntttggaaattagcagttgtttatgattaat

SEQ ID NO: 141165 - DNA, 781 bp, Cannabis sativa
  modified_base (51)..(64): a, c, t, g, unknown or other
acctctttgccagcgcagtttacgaaatacgctggtaaaagttacttttannnnnnnnnnnnnnagctgtgctggtaaaagtgacatttcttatagtgtgatcaaaccattctctatcatgatactttgggattgtttggcttcataacttaaaaactattttaaatttttaaaaacaaatagcttttaaaaactaatagggatcgtttggccaaattttttaaaaacagagtttcaaaaaactagtaaacagaaaacatcaaaatgtaattttcaattttcaaaaaaaataatttttcctaacatattatattttatattttcgctcacataccctaaccctagacccagacccacaccttggaccccagacctgaactttggaccccgaatcctggaccccgacccagaccccgatcctgaccccagaccctagacacgaccccgggcccaaactcggacctcgaacccagaccccaacccagactcggactcgaacccagactcaaacctcggaccccgaaccctagacctagaccccagacactggatcccgactagtgatgcacacggggcgggaaattggcggggagtgctcccctcgtccccatccccgttaaatattttaatcctcatccccgtttattctccatcggggataaggtggggaatctcctaatgggggtggggacgaggcgacaaaccacctaatagaaaaataaagtttataataaattttttaatatataaaaatatttaactacataaaaattaaaatatt

SEQ ID NO: 141166 - DNA, 831 bp, Cannabis sativa
  modified_base (760)..(762): a, c, t, g, unknown or other
gtacgaactacaataccaatttatagtgagcctcccgttgatgatgttgattcatcaacatctgagactctcatgttcttttccataattaccactaaggtttgacttcctagttcatacgctaccactgcttccttgcaatcatcactatcttcatacttggttaaccacttttaaaacttcttatacactcagttatatagctctttgttttataaacaacctgctttgtgatccaacattcaccaatcactcaaatacatgtccattaaattgcatctcataagcttttccccattatgggtgagtatgcctttccattattgcataataaagtaatcttttcccagaatttcaatggtctccttatatacaatattgactatcccgtcaattatgaagtactctctatcattaccatatcaccttaagtaatttaggtaatcttctttaccttagagatactactactcttcttgacgttcttttatacattacctcggtgacgtccatgcttcatgggaaaatttcataaatgaaatcaccccaaatcaagaacactcaaccatggagttccttcatggtgggctaccaaacacaaaatgcttcttgctaacataggtagtcccacgcctataaaatctcaaaattagtgcataatcactgccttcaattcacctatgattccagacaatactcataaattgtcccacttttgctaatactagatcactcctaaacaaaatattttgttatttgnnncaattagatcgatgcctccattaactactcatgtcttatattccacttgggaatatcaataatttaact

SEQ ID NO: 141167 - DNA, 606 bp, Cannabis sativa
  modified_base (33)..(58): a, c, t, g, unknown or other
aatagttcaagggacatttttaacgaccttaannnnnnnnnnnnnnnnnnnnnnnnnngtcaaagttcagggggcaaaattcctaattagccttttaataatataattgcttatatatatatatatattcttaaaaaagcctaatgaaaactatatatgtatatgtcttaaaaaaattagatttagttgacatcttacccagtaagatgtgttaagaggccatgcgtgttaagaataaaaaaataaaaaataaatgcacttaataagtattattaatttaagagatattggcggctaaaccatctgaactttagattttgtaacacttaaccacaaaaactaaaattttgggggaaatttgattttctatccttacattaaggagaaattttttccttaaacctaaaataccctatattggtaaaataggacaacatttacttaattcccacattacccccctcattcaaatctgactcccctctctctttcccctctaatttacataggcatcagaccatcagacccaccatcggacccaacacaatttttttttgaaaaatcactcaacaccatcgggccccatcggacccaatgagaaaatcc

SEQ ID NO: 141168 - DNA, 1000 bp, Cannabis sativa
ggagatctctcgacagaaacttgaatatagtgatcccaatggaaagcgggaaccattcttctatccgagatcgacaacatacgacgatcgcggatataaggaaatctactgacttgccaagtttgtgagtctaacttccgttagcgggatgaaactataggaagttttctcgtagcgagatggtcatctcatattattgtactccgagctggttcgacttttatacttagtttgcttatttgtgagccgaggtatgtgttattcttctccggtgcctctttttagccacatatgatttcttgttaatactctaagtaccagttcgtacattaattcttcgcctaagactttacagtcagcgggttgtaaatatactctagtacttacacaatttatgagttattccataaaaagatacgacaccaattcacattctctttatcttgacacgtgtcctccagccgaatttcgggtataacagctctattcaccaagaatagatacattatgattacctgttgtttcaatctaaacaatcaatgacaagtgttaatagaagctatagatttcatatctagtattagcgctccctctcaattagactattatgttccaaagatgtatgtatgggctagtcctatgagtgataacgaacaagttaaagaacttgaatagtacaattagggtagaacctaaccatctcagaattgagatcattgatctaagatcaactaagtgatcttgacaaaaaaagttattaaggtgagttgatgatatcttttccactgtcaatattggtccattataccaatacatctgatacaagcttactttgtcattgccctagaaaatacattccacttatacaagtgtatgtaaactatatttgtcaatgattaatgttatcccaatttttgcactctgacgtggcatcatatgaatggtgacacgtggagtctacttggaacttctgctcgggaagcacagtccgagcaggatg

SEQ ID NO: 141169 - DNA, 581 bp, Cannabis sativa
gatcttagagggccagagatggtgcaaaataactgtgagaaaatgataagaggaagatggtaatcttccaacccaaaggtgaaaaactgtttcttttcgttggttcagttcagggatctcggatcccggtgatttcggtcttatcaaccaaagaattgttgtgtgatggatgtttagggtttcttgtcgtggtattggataccactcggcctaactctgttcggccagaagacttcaaggtggttcaggaatttttagatatttttcccgatgaactttcgggtttaccacctcagcgagaaattgattttgtaattgatttggcacctggagcaaaaccaatttctaaagccccttatggaatggctccagctgagcttaaagaattgaaaattcaagtccaggggttgcttgagatagggtttactcggcctagtgtgtcaccctagggagctccagtattgtttgtcaaggagaaagacgggtctctaagaatgtgtatcgactatcgggagttgaataagttaacaatcaagaataaatatcccttagctagaatcgatgatctttttgatcaactt

SEQ ID NO: 141170 - DNA, 566 bp, Cannabis sativa
gaccaaatgcaacaattaccagcgggttcaagagactggacttcagagatcgatgtcagacgaagattgaacgaagcccgagccaaaaaagagatttattggaagcaaagggctaggatatcgtggcttaaggatggtgataaatgcacaaaatttttcttcctttctgctgctataagaggaaggaggaatgccatcgagtgcattctgaataaaaacaatgaatggattaatgaccgaacgctgattggccaggaattcctggaatttttcaatagcatcttctctggttcggatagtaaccgtccgatggattgtggtcatttatttcgagagaagctctcggctgagaatcaagctgatgttgtttgttgcccgtcccgtgaagagatcagaagaaccctgtttgccatgagtaaccacaaggcccctggtcctgatggaatgtccgttcttttcttcaaacactactgggagtctgttggagatgacttttgcgaagctgttgaagatttttttgtcaagggtcgaatgcacaagggggttaattcgacgaatgtcgttct

SEQ ID NO: 141171 - DNA, 849 bp, Cannabis sativa
ttttctattgctcgtaatcttcctgtttaagtacttagtgatctaccaaacttttgattttcgagcagttgtcaattctgcctcgctatagcagtaataatctatcttaggcaaacttaaatgataatatcctgataagcctaatggtaaataattaagatttataattatattatgtgttaattagataataagtgggattatgatcctactaatctagttcaacataaattttaaattttctataagttgataaataagcgtaatttataaattacggagatttataaggtatatgtcaatgtaatatgagctaccggtgtaataaaaatattttcaggtttggcgaccttagagactcgatcgggggccagaaatatcataaccggtttaattgatagaatttatgggaatattatgataagttgataatatgggtattgggataattaggagtgtgtgcgatttgacttagcgctctaaaagtataaatttctttgtggctaagaaataataagataatttttaataataaagttttaccattggttatgtactttaataagtgtggtattaaaatagatgttgggcacttgttcactagaataacacaagtgataaaataacatgatggacctaaaaagttccaaggaacttataaaatcatagctacgttgtatactcgcttcattaagtgcacagaaaagctatattgatttaaagctatagatattaaatttctagggggagacttagtatttctttgagtattacctatgagaggggtgcatagatttggaaagaatggaagattaagccttagaaacatcgatcctttttagatattgg

SEQ ID NO: 141172 - DNA, 1553 bp, Cannabis sativa
ttcgggtcccaagtccaggtttgggttgggatctggttgttggttccggtttgggtctaggtttgagctggagtttaggtcctggtcaagttacggttctgggtctacgtccatgtacgattatggttccaagtccaagtcctggttttggtcccattttttggtccccgtctacttccagtttcagaccaagacccttgaacaagactaggacagagattgtggtccaattctcgctctcgatcccagttttgggtcctgagtcatgttcaatgttcgggtctaagtttaggtctgggttcaggtcccgagtccgggttcgggtttgaattcaggttttggaaccaatcccagggtgggtttgtgttcgagtttggatcctggtccggttacagttttgggtctgggtccatgtcctagtcctgctcctgttcctgggtcctaatctgcttctagtttcggttcttgttaagtcacgaggtacgggttcggggcgaggttcaagtctgagtttcggtctcgagtagggttcgaggctaggtttggtttcgggtttgggcctgggtctagttctcggtcccgttcaaagatctcggtccggttcaagtttaagtttcagtttgtgttcccaagtgtgggtctgggtcttggtatgtgtctgggtcctgatttgagtttgagtttgggttcgcgttctagtgtacgtcctagatctagacaccgacaacgaatcggatccaaccatcaagtcctggatcccaggtcctgtggtgggtcctatgtccaggtttgggtcttgggtcaggttcccgatcgaaatccaagttctaaggcccaagttctaggcctagttttggggcccaattcttaggtctgggtcccccatctatattctggtcctaggtcccggtctgggttcgggttccggtcgagtctgactccaggtcccgatttgggttcgggtgcgagttcgcctcccaatcccagtctagctctaggtttcgggtcccaggtccgagtctggttcttcggtcctgggttcggccccggttttggggtcagggtctaggtcctagtcctggtctgggtccaggtcccgaacttggtttaggtcccaagtcacaagtcctggtctgggttcaagtcccggtatgggttctggtctgagtttgggtttaggtttgggtctcgtgacagtcccaagtttgggttcttatcctagaccgggtttggatcccaagtttgggtccgagtttaggtcagactacgggttcaggtttgagtctgggttcgggtcctggtttgagtctaggtctttttttcggtcgaggtcggggtcccgatcagggtcctagttaaggtctaggttccggaccaggttctggtctgggtttgggtccaggttcaggttcaggtcttgagtttggttctaggttcgggtcttgattcgggtgtgggtctcggtcctgggttctgatctcggtatgggtatgggtcttgagttttagctcatgtcttgggtcttggttcgggtctcaggtccaggtttgggt

SEQ ID NO: 141173 - DNA, 529 bp, Cannabis sativa
tataagttaaatccttacctcattatcttttcttggtgttttgtaggtttatctatacttcaaaggtagaaaattcacacattacagaagatcgaaacttattggttacttcttagtcattcaaccagaagcattagccttagaggtagtgctggattggttccacacgttgctcttcctcttagttatgtggagtctgattgtttagcttctgcttttcaaaagcgctctttcttttgtaataagaaaaattttgtaaattttttgtaatgagctaggtttttttagtttttttgctagtgtgctttccagttttcctgaggcatccctagttcatgtctgtttctcatgaattagttgtgcatgcacttagggtggatggtgaattagcttagattgagaatttttcatcttttttattgatttgtattaaactatggttcttgttaataagggtttaatttcaaaaaaaaaaaaaaagacaaataattgataaggtgaaccaaaacatacataaatgaatgaaaaa

SEQ ID NO: 141174 - DNA, 817 bp, Cannabis sativa
attctaattctaatgcctcaaatatttaagtggtatgtctagttgatgtcccatggcatgttttgaccatttttcacaaagacagtcttaggaactaaaacctaagttatggatgtcaacttaggcatcgggtgaaaccttaggtgcaaggtttgtttcagattacatgttcgtgtaatttcagctcttagggcttggattaggttggttcatatcttaatggtacagaatactaaaagatagtgggttggtttgaagtccaaacttctatcttggagattccaaagtcaacttgagcgcggggctagggtccccccaggtcgactactatgacttaggtctactcaactctgttatgtcatatttcatgccacgtgtgaaacattgatgtccaagtcactagagaaagtttttaggttagtatttccccccatgtaaactttacacttgtctggagttgacttaatgacgtgaaccgagcctattttgcttgaaactactagatgggaatcaattttgatcttaggccttgtatctgttcttcaagcattcacaattaaattaggactttgaacacttttaattagtccttgagaatttcaagaattaattaacaaagaaaaagaggaaaaatcttatcttttttttcacttatctttttctttgaaattttaattttttttatttattcttatggcattaggattaattggattggaatcctaatcctttttgttgatttcatttgaaattagagagagaaagaaagacgagaaaagacttttggccttttgcttatcatttatctttttccttt

SEQ ID NO: 141175 - DNA, 1164 bp, Cannabis sativa
  modified_base (600)..(604): a, c, t, g, unknown or other
gtaaagtcttaaacgagacacatatgtacaaactattaattcacttattgacgagaactatttcgtatatgaagacacaagcacggcatcagtaatacaacacgaggcaccaacctcgttacatatgaaaagatgtagacgagacatgttgactgttaaaatacttagcgtataatatacattatacaaactaagcataactgttgaatgaatctgaacaacgaatagcgaggcatccatctggctataggaaggcatactcatggtaccttcactaattagcttcagacatctttcaatgagatccactactccatcaagtcagctctcttagatagaagctgacattcaaaggatgttgactgctgaagttcaccgtgtcactaagaactgcaattgtcagatggagtgttatgccttcaatagcagaaacgacggtatttatattatcagcctaggaaagacatgggaaaagctccaactcattgtcagggttattgttgctatcccaacgaggtcacccagcgagatacgttttgtagtgtatctaaacctacgtcagcattgaccaagtaaaagtggataaatcacagctgtgtnnnnntcaaataataaccgcatttatttttcgtgggacgtattcaaatcccataattgtgggatattaatctgattgtaattaactgcttccctatataactataaataggggcaggatatactaaaaaagggacgaaaaatcctttagagaaagagtcctagttttgtatcaaagaaatctaatacgatagactcgtgaactatgcagaattttactgcaaaatcacgtaaaaatctttgtgttatttcttcttcttttactactattatttctatgtaaatcaatcacgaaataagctttaatatagttaacaaaaatctgcgttaacaccaacaatgaagactcaaaattatactacaacattaataacaaaaaataacacgattcaatataaattcatacacatttagaaattatcatacattaagcaagtaagaaagacatgtgaaaatacaaaacaaacacatcttaaataatttccaaagtttccaacaaactgattcaatgtcctgtattaggcgagagtcaaagatatcatccattgaatagagtagtcaactcat

SEQ ID NO: 141176 - DNA, 1288 bp, Cannabis sativa
ttttcctcgagtgttgccgcgagaatgcggcattttgcaagctgtggtacctgatccacttcgattatagtattaaatttttcaagataatctatagcattagacgtacctttatattttagggattcggatagtcagaatccctttggaagttgagcttgtcgcacttccgtagtgaaaggagaggtcccatgcagcttgtatatggactttctttgctcctcgagcattttcaaagcttgcaaaagcatgctttgatcaattccgccagccacaggagtcgggactgctgcgactgcaggagtcacgactaccgcagcgaggttcgctgggatagtgaccccagtagtcgctatcggtgcgctaggcgggttgttgtgagtatttacaccttgatctcccacaaggggatcacggggtgtttcgttgttatggggggcgcgagagcgcgctctgaaaactgggttgaggtgatcacgtagatcacctcggtgtacctgatagtgtcctccctgttgtgtttctacagagccggaccttgtgtacctgcttggtgtacgaccatgcgaagatgaagaggcagattctgcgtccttgtctctcgatggtcgactgcgaggattgcgtcgctcaggatcttcgtcagcctgcgttccttggttaggatatctcacagattggtctctcgaggttggctgattcaggtcaagcccctcagggttggctcttgattccctgcgaacacggttattatgacgtctagaattcgttacatgagggttgtccgtgggagtagtaggggctcgaggggggcgtcaggcccggttttttccatccacttcggcctgtagtgcacgcagttggtcctggatcgcagtatattgatctgtggtgagctggatgattcccttagataccaccgccggagtgacaggggaaaagtgcatggttgctggtggtgtggacgtgtccccgacttgagggtcagctgtttcaggaaacaggttgagaggtctcatgttgctcctccctactccgccattaacgacgtccacaggtggtgttctagatccagataacggtacattcatcattccgatgttgatggacccgttgttagcacctccgtttgtttgatttccagccatgatggtattcttacttgagatgaataatactttcattcttcgatttccacagacggcgccaaatgttgtcgagtgaatttcgcaataccaattttatatgatattattaataacagaaagaaatctatatgaagaacaag

SEQ ID NO: 141177 - DNA, 621 bp, Cannabis sativa
  modified_base (333)..(334): a, c, t, g, unknown or other
  modified_base (589)..(592): a, c, t, g, unknown or other
gatcggggtccagacctgaacacaaacccaaacacagactcagacccgaactcaaacacccacacctataatgtgactaaaagctagacccggacccgcactcggacccaaactcgaacgcagacccgaacttgaacctaggacccagctcgtgacccggcaccagaaatagaaccaaactgggacccaagatagggatccagatctggacccagggcttggacaaaacccgtatttgttgtctgggacccatcctggacccgaaccatgacaaggactcgaacccacacccgaaccataactgaaattggacctagatccagaaccgaaacnngaccaggacccaaactccaaattagacctagacctgaattgggagccgaacctggatctcaacccaaacctagacacgagacccaaacccaaacctacactcagacaaaaacatggaacctgactagggacacaatacaagggtcgggacatagaaccacaccccaatctcgatcccaaacccaaactcagaaatgggatctgggaccttaaccaaatgcagaccgagacacgtgacagtgatccagatcttgannnnggattcgggtaacgaggcctggaagagac

SEQ ID NO: 141178 - DNA, 842 bp, Cannabis sativa
  modified_base (34)..(44): a, c, t, g, unknown or other
ttttaattgatcacgatttccataaacctcgttnnnnnnnnnnnagctgcacaatacgtttaaaaaaatcacgtaatacgcctatgccagttagggtgttacatgcaaggctttggaaatgtctttttcagagaaggaaaaccattgacctctaacaaacacttttcgaaaaagtctagaattctcatcaagaaaatcatttgataagttagcatagaattctttgacaatgttttcaatgtacccttcgaaccagtgagagtgttctcccattgatggtattgaatgaacttaacaataccatataccctatgagcatgcaaatcataattcctttcactctcaaactttcgggtagcatacaaactccaatcacgctcattatcacgatagtagaaacgagaataataggagagagatgtagggatattaccaggagatgattcctttatgggcttcttgcctttggcagcatcagacaccttggctgccgaagatgctcgagaagttgttggcagagatttggtcaaaggaggctctggttcgagttcagtttcctctctgtccgaggaaactccgatgatgtcttcaaggaatccttttttttcagaatggagagacacggatttatctgaggaatcaacagaaggatcctccataggttcttcttcttcagagcttgaagaaaccgaagggggatttaccttaattttcttggctggaggaactggcttgtcatggcttcgagatgtgcgaagttccttctcgatagaagcttgctgggcacgagtgcgagtggaaggaccagttggggttgaagcagcaacttccttcactgttgc

SEQ ID NO: 141179 - DNA, 799 bp, Cannabis sativa
tgtaattatcatcctagtaattactctatctagtaattacacagttacttctaaacacacccttagtatttttcccctaaacacataacatgtaatatttgtgggatatgaaatattttacaatattcctaaaatacccacatttacattatcccctatcccctctcttcttctctctttcttcatacccatcggacccaaaaaaatttacccagcacatgcatcggaccccaatcggggtccccatcggacccgtcggacccaaaagttttttcaacacatgaatcgaacccaaaaataggatttttgcaacacatgcatcggaccccattaggccatcatcttacccaaactgcgattttcccaaatcgcaaatctgaacataaatcgaaccctaaatctaacaaaactcacggtgcacacataaacacatacattatacattataaccctaaaatcaatacctaataatactccaaaacatatatcacacacacaaaaaaaaataatgacaaaaaaaaagagggggtcaaatcttaccctggacatttcagttttgatggggctgacgatgtaggcgttaggcggtgagaagtgctcggttttgatttgggaggggtcggcgttgtaggcaatggtgaggggccggcgttgtgggcgatggtgaggggggttggggttcagttcagagagagagatagaggaagagagagagttggggttgagttatgagaggggtatttttgggttttagataaagtggtcataggttttcaattttgatatgtattagtttagg

SEQ ID NO: 141180 - DNA, 725 bp, Cannabis sativa
cacccctggccaacaatatggccggccagccttgggactgcaccatggccggccagcctagcctccacaagggcttgcacagccaagaggtgctcagcagggttttctatgcagttctatacgtggacaacaacacatgggctgtgaagtgggccctaaaacccaacagaatggctgaataatatctagattcaagggcaatttagtcttttgtaaatatctaacaaacaatgcaagtattaagggaatcatactgtaatctaggcttttaggccttttatataaagccttaaccttagcctagaaacttaagttgcatctatgtctgaaacctgcctccaagctctaagtgtttgacaagctctttttctcttcctcacttcttctctcacacgcctaccatagcctattctcaacacttgaattttgccattactaattcataccttgtaattctaagggtgttatagcagatcccatctatagtgatctagatagtatttccctcagtataaatacaactaaagggagaataggtcattacctaccatcacaagggggtcgaacctctataacaaatctgttgtttattgtttttcattattatttgtgcaaacatgtggcaagcatgtgatccatacaatcccgctatcggttgatcactttttgagatcaatatctaaacttactgtaatatctttctaagtcaatatcacttagttgca

SEQ ID NO: 141181 - DNA, 546 bp, Cannabis sativa
tcaatgtacaaactggcacttagtgtattagcgagaaaccatatgtcgctaaaggtgaatagagaggccctggagaaaagtgacacataccttagcttgcaataagcaaactaagtgtaaaagtcgtatcggctcgaagaacaagtatgcgagatgaccatctcgctatgagaagacttcctgtagcttcatctaactaacaggagtgaggctcataaccctggcaagtcaaaagatttctttatacccgcgatcgacgtaagacatacattatcgacctcggaaagaagaatggtcccagctcgctattgggatcactataatcaagtttctgtcgagacatctccagatttagcaattaaggacgtgtttaatacacgatattcttgacccagtaaaagtgggaaacaatctcgaaaaagagacgaaaattacagccatacgattttcaaaatcatacaccgcatttacatttcgtgatatgtaatcagatcccacgattttagggataatggctataaacatattctggtcagctttgtaatt

SEQ ID NO: 141182 - DNA, 855 bp, Cannabis sativa
agccccgagtgtagatgtggatcacgttctcgggtcccagtctagttccacttcaggtcccaggtcctggtccggctctgcagtcggattctgggtctcagtcccagttctgatgcccgtgtcctaggtccaagtccccaatctaggttcgagtcctaggtctgagtccaggacccgatccggattcaaatcatggtccgagtctgggtcagagtttcgatcttggcttgggtccagatctcgatttgagtctagctccaggtatgggtccgagtcctgagttctgatctaggtcggggttcaatggcccaggtcaaggtccaagtcccaggtcttggtgtctgggtccatgttcgggtttgggtcctagtcctagtttcaatttcgatttagtgtctgggttcgggtttgggtctgagtctaggtcggggtctgagtccttgtctgagtcttggtccgagtctagatttaggtccaaatcccagtttgggtctaggttcgggtccaggtcggagttcgggtcccaggtgcgggtccaggtcagggtctgggtcacggtctcaatctagatcttggtcccgagtttcgatctcggtctgggtccgggtttgggttcaagtccaggttcgtatccagatccctatctaggtccgagtttgggtctgggatcgggtcctaggtctaggtctgggtcctggtctcggtcccggtctgggtacacaactgtgtccgagttagggtccaagtccaagtgaaggtctcggtgcgtgttcggtactggtccttgttgatgaggacatcaaggaccaagtatcaagtccaattccagtgggtccagtgactagggcacgagct

SEQ ID NO: 141183 - DNA, 501 bp, Cannabis sativa
cagtagccaatgaaacagttgaacgcaaacaaaaaacaacacaaactcagactttcaaataatctcaaaccatgtcacaggacaagactttttaaacaaataattatttaaattatgttacgctattatttactaataggaaaaaagaagaaaaataataaaaaaaatattatcaaacaaaattgaaaaaaaaataaataaataaacaaagcacataagtaaaaaataggcaagaaaaaatatacaaatggttaaaaatataattttttttttaaaaaaaaatagagtacataaaaggagagagatttttattaaaaatctaaaaaatggtcaaaaaaaattgaataaaaaagacaagacaaaaaaataggtaaaaggctaaataataatatttcttttaggatgaaatggagtaaaaaataacacttataaaatgtgagatttctatttttttttttaaaaaaaaagatatatacattataatatactaggtgaatgtac

SEQ ID NO: 141184 - DNA, 535 bp, Cannabis sativa
aaacatatcaataatatgctcatcatataatataaacaacaacgccattcaaatctgtttgtgtgacacagacctgcatgttgcgctcacatggctatttatgtttacgcggcgtaaacttacgtgttcctctcacacgtctatttacagtaaggccttagaatggttcttattggttctgattacatagtccaacctaattatgccttgatcgcataatccttaaatctcaatataatcatacacttagcatgggatatcatttattcaacttatatcactagggtaataaccctaagctattaaccgctcatattagggtaataaccctaatctcggttacaattactcacatatatcaatctcaatataagcgccaccacacatattctacgtgctaactactgtcttacctgttgtcccgcaaaggcagagattccaaataaccgggtgctcccgacaaagtgccagtaatcctagtcacacaatataggattttcacaaatagtgttaacccctgatttcacattcataa

SEQ ID NO: 141185 - DNA, 624 bp, Cannabis sativa
  modified_base (64)..(66): a, c, t, g, unknown or other
caagttgagtttcattgggtttttctgtgattttctggttggaatatgttgtatatgcattgtnnnggtactctggaaagtttggtagcaattggacaagttttgagcgaattggtgagtttttggggagactggtataaaaaccggtttatcagttttaccaatacctgtaaaatcggtaaatcggttttggctaggttccccaaaaaattagttttctcaattctcgtccatttcagtgccatagttgggtgtttccctatttcctgagttagtgtgattcatagagagtataacagaacctaaagttgtaggtttggatttcccagattagggttttcgagcatgtgatttacccagttctagtatgtgattagggcatccatccagcacgtgactttccgttcaggtcgaccagcacacttgaatgtggaaagaaggtaagaactgtatataatgtgtgatatggatatgcgaatgtatgtttatgtttagtgtatatgcatgcttatctgttgtgattcctacactaccaacacgtgtacagttgcggtacagagtgcattggtaaggtgtatgatgtctgaaagtacatcgtggtgttaccagcacttgtacaggaag

SEQ ID NO: 141186 - DNA, 542 bp, Cannabis sativa
tcgattatgccaaggctagcgatgctatccccagtgaatctgcaaagattcaccatacaaggccttaacttggccttttcgagccccattttctttagtcttcttataaatgatatttatcgagcacccattgtttattaacactctcttgatcctcttattggtgagttgaatggttatgaccagtggatcgatttgagggtatctcacattcttttcgtcttcctctgtgaacgtaatggggggttcctcggttttcatcttcttggaaggttttggggcaaagaccgactgctcattctttatcgccttcacatatctcttctgagtgttattgctttcccctgcaatatgtggccctcctgaaataaccaggatgtcccctccttcgtatccctggccctgtcttttcacatattgttgaaaatggcctcgagcgacgagatgttctatctcatctttcaattggcgacattcgtcggtcgtatgcccaatatctttatgaaatttacaatattttttaggatctcttttgctcctcg

SEQ ID NO: 141187 - DNA, 559 bp, Cannabis sativa
aataaaaatgattaattaagttaccttttgtattatatcaataagagttagattttttattcgaaaataagagtgagattttaattatttttgtggacttatatattagtaactattatattaatttgttgtggcaaaaataaaaaagcctacttacatgtggttcatcaagtaagttgtattgaataacttgaattgatcatattcttaatagtgtgaatttattctattttaaaaagttgaacatatatgataaagtgacatttttaatattctccataaaatattttttaaaattaagtttttacggaggaaaaaaaatctttaaaatttgaaaaagtattaatcaataaaaataggttaaataaaagtataggattcaaataatttccaaccatttattgtatatttaatttaaaagtagatattttacaaattttggtcataacaaaaatatatatatatcgtgtatttaatatttttaataagaactaaaaataatttatatatattacttcattcaaaagaaaataagtattctttatatacacattttttt

SEQ ID NO: 141188 - DNA, 614 bp, Cannabis sativa
ataaattagcaaattttattattaatccacaatactttgtacaattatttacaatagcttacaatgaagagcatctttgaatcaaaaatctcatgtacaatatcatccttttctccacatttttttttacaaagaatgaaaccaatctctatcttgttgaccaatcttttgtggccaaaacaattctattctatgttttacactatttttgactctttgtacaattgtctctttactttctaagtgattattccaaatttggtcatttctagcatgccaaatggagtaaaccaagcttgctatagcggctgccatggtttttttcctaaacttgctgatttttgctttatgaatccacttgagtagttgggagaggctgttggtttgtgctccccatgacagccagattttcacctgctgaagacaatatttagtaaatgagcagctgaaaaaagatgctcaagtgtctcagtttgtaacatgcataggctgcaaatcgggtcatcaaggagattgaactgctgcagcctttccttagttttgagacgattttgtacagccaaccaaagaataaaactatgctttggtgtgttgaatctcccccaaacctcatt

SEQ ID NO: 141189 - DNA, 824 bp, Cannabis sativa
ccctgttggaggggtgactcctagtcctctcttggttccttgggcgctctttaggtccatagaccaccctctccctctagttccttggtttaaggtatctattgattgtgggcattagtacccatcccttgagtgttttggttgaagtagcttcgtattaagtcgccagcctcttgggtgtgacgatcttggtcgtcttggcgcctcctcatctcgcgagcatgatcttccagcaaagattggaattctctcctttggttagcgagactttcagtcaaagccactcgagcttgattttactcttggtgcacagtttggaactggccttgcatctggcctatcgtgtctcgcagttgatccatctcggggtcaattccctcaatgtacacatggggttcattacgcgctgcaaagatgccagggccgcggccagtctgagtttggcctgcaccgttagtaggtgggacaaaatttctagtattacctcttctggtggcgccatcagtagcgccgcctcctgcagcagtgacattgtggtacgcccagtagttgtctgtccagtgactacagtttggccagttgctccctggccagcagtttgagcggtggtggtagtgccgccgttcctcggacgcgggggtcattctctattgtttccggcgaggttcctcgctgatggaacttggtgggaactttccatctcttcatcaggtcgctattgagatcatcgggttaacaccattttttccggtgaaaaacttaaagattttggctaaagctctcaatgaaagcaccaaaatgttgactggatttttagccaaccg

SEQ ID NO: 141190 - DNA, 680 bp, Cannabis sativa
ctgtcaattactaaatataaaaaatctaattgataaccaaaaaggataatttaatgtaaaataatttgaattgaatacaaaatttaataaattaaatatagaaagtaattacttaacttaatactaatcaaaggattagcttaaaattaaaattaaaaagttacagctaataaaataaatcttaatagaccaaaagattaacttaaaattaaaagtaacagctaataaaataaatctttttaaggaaaaaaccaaaaagtaattaatttaattttaataaaaattacattttgaaatttaatcaattacattttgaaaaagctgaaaaaaacgtgttacaattaatatcgatgaaatttaatataaaaagcaataaattctatttatataaaaagtccaatataaaaatgaaacgaatatacaattacttttccgattactatcattgaatgtaatgtcatctccacgcctccgcctaaagtgagccaccaagaacaatagcggatttatgttgctgccaccttcgttttatagataaaatatttggaattgcttccggtcacaaataaaagtgttcgacataagtaaatataaaattgagaaacactaaccacttcggatttcacacataagtattgtaaatacatatataaacttgattaataataagaaaacaaaac

SEQ ID NO: 141191 - DNA, 580 bp, Cannabis sativa
aatatgatttaggcatttgttggatagtttgagcctttcaagcctaccgtaataagatgtatccatagttaaccttttgagcctaaacctatcatgtttttcacccatcaatttaaaaaaaatttgcaaccacactattaatttttcttcaccatgttatctatgatttcataagctacataattagtttgggggaagagaaacatttagtgtgaggaaatcatgagcgggaaaaagaaaaattttgtaagattgagaagaaattttttttgtgtaattcaatgtcactgaaaaaaaaatgaaatatgaaatgaaaaaaaacacaataaaaagtaaaaatatgtgtgaaaaaaaagaagaaaaaaacttcagtgatgttgaaaaataatagagatgtcttctatcaatcttggtgaattcgggaatattatgggatcttagaagaaagaaaagtaagaagcttgtgggttttgttcgtgtgcttataatatctttagccaaaattgtcttttgcctacccctgaatatctgagccatactacctaaagccttgaaaagacctaatgattccaaagaatac

SEQ ID NO: 141192 - DNA, 2414 bp, Cannabis sativa
  modified_base (1637)..(1637): a, c, t, g, unknown or other
  modified_base (2262)..(2266): a, c, t, g, unknown or other
cgtaacatatcttccagtatctggattgtcctttcagactgtccatctgtctgaggatggaaagctgtactgaacttcagtttggtacccatagcccgttctaaactttgctaaaacttcgaagtgaacttcggatctctatctgaaactatggattttggcacaccgtgcaaccttactatttcctttacatacaaatctgcgtattgatccactgaaaaggttgttttaactggtagaaaatgagcagattttgtaaatcggtccaccactacccagattgagtcaaataaacccgtggttctaggtaatctaaccacaaagtccattgcgatatcttcccacttgcactcaggtagggttaaaggctgcaacaaccctgctggtctctgatgttcaaccttaatctgctggcaagttaggcatctcgatacgaattctacgacattcttcttcattctgctccaccagaagtagggtttcagatcttgatacatcttagtggtgccgggatgcaaagaatagggagtggtatgagcttcttcgagaacctcgtttctaagttccacactattaggaacacaaactctggctttaaacaataacattccattgtccaacacggtaaaatccctgacttgaccagctgaaacctcttctcttatttttactaactctggatcagtcatgtgagcgaccttaattcgttctagcagatcagattgcagcgtcaagctgtgaagcttgcctacaacaaactcaatgctagccctgaccatgtcctctgctaactgaggtgagatttgaatcatgctagctacctgcccgggaccctttctacttaaagcattagccactacataggctttcccaggatggtaaaggatttcacaatcgtaatccttaaccaactctaaccaacgcctctgtctcatattcaaatctttttgagaagaaatatttgagacttttatggtcggtatatcgttgctcataatcttttagctaacgggaggcataagtaataacccgatcgacctacatcagaacgcaccccagaccctgtctggatgcatcacaataaacaacaaatttctctttatcagaaggcagagctaacactggagctgaattaacctctgcttcagctccagaaagcttgattcacacttatctgtccatataaaatgctgattcttttttggtgagcttggttaagggtgttgaaatttagaaaacccttcaacgaactgatgatagtagccagccagatccaagaaacgtctaacttctgtcactgttttcggtcttggccaatctctgacggattctatctttctcggatccacattgatcccatctttgctaacaatgtgtccaagaaaagacacctgtgacagccaaaattcgcacttcttgaatttggcatataacttatgttcctgaagtcattgtagaaccattcggagctgttgctcatgctcctcttctgactgagagtacacgaggatgtaagtcaataaatacaataacgcaaatatcaaggaaatccttgaataccccattcatcaagtccataaaagctgcaggagcattggtcagtccaaaagacataaccaaaaattcataatgtccanacctagtgcggaaagctgtctttgagacatccacctctcagattctcaactaatgatagcctgatcggagatcaatctttgaaaagacagtttcccctgaagttgatcaaaaggatcgtcgatcctaggtaaaggatatttatttttgattgttagcttattcaattcccggtagtcaatgcacattcgtaaagatccatctttcttcttaacaaacagtaccggagctccccagggtgacacactgggtcgggtaaaccctatgtcaagcaacccctaaatttgaatttttaattctttaagttttgctggagccattctgtaaggagccttggaaaccggttctgcaccaggtgccaagtcaataacgaaatcaatttctcgctgaggtggtaagcccgaaagttctttaggaaaaacatctaaaaattctcaaaccaccttaatgtcttctagccgaacagtatctggccgaatggtatctactaccatggccagaaaccctagacatccatcacataacaattctttagttgataaggctgaaatcaccgagatccgagatccctgaaccgaaccaacaaaaacaaacagttctttgccttctagttggaagattaccatnnnnntcttacagtcaatactggctgaatatttggataagaaatccactccacgtatgatatcaaaatccactaaattcatctctatcaaatcagcgctcaactctctatcctctattctgattggcatagacctaatccaccttttggaaat

SEQ ID NO: 141193 - DNA, 845 bp, Cannabis sativa
agggctctttgactcgtacgtcctaaactacctctaaaaataagtcgataattcacttaggcatttttattccatatctgaatgcaatcatgttaccaatatatacctcccttgttcttctcttctaatttttccactttcaattggacgaaacttagttgtgtgcaataagttggttattgtcggcttgagagagtccttccaaagaatctttgttactggctttttagattgagaaaaacatctaatatttttccgaattctttactcttaacaattttagcttttgacaaatccattatcattcttttctcaggcactatagggcctagaaacaccatctcttttcatcagggctagactctgtgagtttttctcttagtctctcattatgatgacactccaacatacttattctattgtccataatataagtcgtaattggattgtagtatcatttgcttacgttgtgccttgaattattttatgttgtatgagcattctctgaccccaacacttatcagaaacttgtatagtccttgacatgccatgaaattcttcaatatgtattactttggtcctaattgtgtctcacttttctcctgtctctaagtgaggctttcctaaccttttctcgttaagcaatactccacactgttgttgttgtatcagtgagtatttggaatctagggatgtcacccttgaatgttaatttctcctcttcctcaagttttgaatttaccatctactctctgtagttgtttgttgtacacccactacaaagctgcatccacaatctcttagttgtgtagttgtgatctatttcgagtagtcaccctcttagt

SEQ ID NO: 141194 - DNA, 1007 bp, Cannabis sativa
ttttttttttttttttctaattctctttacttttgaactttgtaatttttgtctatcttattatgagtgaatttttattttgctagaattattttgttgactgtaaattatgatttaatattatgttgctatgtttaagtgatttgattttgttcattcaagagtatttattatgcaattgcttacttttacttaatcatcattagtaagtactagctaatcttgattttgaagaaaataggattagcagaattacttgaatgatgcatgaatatcactttggaaaagtgtaatttgtaaatgacataagaatatgttagttaccttatgtgacttgaaggaattgtgcttaaattgatattcttaaaattaattggacaaattagagaatcaacccctaaacaatttggaaaaaagattataatattttaaattcctagttgacatcatcaattgacaacaatactcatttgcaccattatattaactttgtatttttaggccaatttaatagttctagcttgttttcttcatagtttgtgtttgttaatttttttacatattctcatcactttattttattttttgttgaaaccatttgtgagtaattagttttgtaaattaatttctaattttttatccatgtgaagacgatattcaacttatcactttattatttgttgacgattgcgtgcacttccgtatacaatttttgcaataagttttttgcgccattgtaaggaaatgatttagtgaaattttgtttgtggaacttaattactatcaatttagtttttttttgttttcatttgtttagttttatttctttgctctattttatgctttgtttgtcttgttttggtttcttttgcagggtacttgagatgtctcatcgacaagtccttatgaaatttgttcaatatgacttggagtccttgtataaagcatggtggagatacaagtcatttctaatgaagtttctgttggaatttattttaccagaatct

SEQ ID NO: 141195 - DNA, 623 bp, Cannabis sativa
  modified_base (571)..(579): a, c, t, g, unknown or other
ctattttttaagtctccttctcctagctttagctttgtatataaatttgtactattctatgaaatacacacataattcgattcactctagttgatgtgtacttatcccctctagttgatgatttgagtcggttgtggtatgagggtgttcctgcttgcgatgcctttaggaaagaagagttcaatcttaaagccatattactgtggaccattaatgattttccagcttttagaaatctttttggatacaggttgaaagggtacaaagcatgtgctatttgtgaggagagaacatgtgctgtgtatttagaacactcaaagaaaatgtgttattgggacaccaaagatttttgccaaaagagcatgtgtttcgggtgtggaaaagagcatttgacggtaagcaagaatttgaattgccaccgccaccttttgcaaggggaacaattgttagaaaaattgaataaagttcaattccacattggaaagcgaaaagcgaatccaaagaaaagaaaaggtctttgtgagaaaagtgacgttgttgcaaatgaacctcaagggccatggaagaagannnnnnnnntttttgagctcgagtattggaagcatttgttgatacgtcataat

SEQ ID NO: 141196 - DNA, 654 bp, Cannabis sativa
taggttttgccaccaaaattttaatttttgtggttaagtgttaaaaaacataaagttcaagtggttttgtcgttaatatcccttaaaaaatttaatcgtaataattaatacaatacatgattttatatatccaaacatatatagcgtgatttattatttaatataatatatacgtcccttatacgacctatacaataagacttatatttagagatttatacacttatataccaaatgttttttttacggatttttgttatgtccattattgaatggatttattagtgctgatattatggtctaaattaattaatatttattttaataataccaaataataaaattttctatttttttttaaaaaagaaagttttaatttttaagaaacatttttttaataaataaataaataagtaattaaataaaataaaaagaagacgataaagaaaatgatcaccttcttcatcaccttctaggcttctacttcttgaccaccattaccatcttctatcttagatcagatttttttaaggataattaagcactattttttttgtaaaaaatattacttttttacgtttaaataatatttttttttttatatatttttacggtttttttttatagaaataacaaaaaaattacataaaagta

SEQ ID NO: 141197 - DNA, 1067 bp, Cannabis sativa
  modified_base (900)..(900): a, c, t, g, unknown or other
gcctagggcggctcggggggtcgtgatagaaaaatggtatcagagcactaggtttaattacctcggagtgtatcaccaaataccttagatttattttaaataatagtagtaataagtatcttgatatttatatgtataagacatatttatattattagcatccaatctcagacctaagaaaatgcctccgaaaggaaggaaaacaaggataacggttggagaagatgcccatacagttaatgtccaacctccacaagctaaaatccttatgaacgagcatcttgaagccttaagagtagttcccgctaaatagatggatcctgccactcgacagagtcatcactttaagatctttcatcggatccaagtccgtgagtttgaaggtggataagatcccatggaagctgaaagatggttgaggcaaataaagaaatttttttaacacaataaaaccaagttacttttgttgtgtccaacgggaacaatattttagtccatctcacaggagggctctaattggggtattttattgttttagacaaggggatatgactgtggatgagttttacatgaagcttgtagagctatcatcttatgcatatcctagtgtggttgaccaacccttggtgattgaacagttcatgcatcgtttgaggcctgcaatatgtggtccaatagcctttttgacctttaacaaactgactgagtgtgtgacaacggtcttgagaactgaggctcatgtagaagggaatgagaagaagaacacaagcagaggaaaaggaaatgactgatagatgactaagaagatgttgggttttgtgccctaaataaaacccatttcaatgtaatcagatttactaattaatataagatcagaaatcgttttatgttgcatggttnacatgatttatttcatggttatgtttaatatataaattctattaagtccataacataaatatataaaaatatttgtccatgattatagtgtcgtcagcacagtgaaatataatcatgattatatgttcaaaagtttaattcctatgatttttcagttcactggattt

SEQ ID NO: 141198 - DNA, 831 bp, Cannabis sativa
aataataatatattagttattcaattgcctatgatttgtttcatcttaatacacaaggttgaaacaagaaagcattttgtacaaggtctcctatactataactataattacattattcaacatcatatagaaaaatatattaacaacaattattcatgcactaaaataataccaaaagtaatgacaatacataaatcttagttgaagatgttgacagaagagacaccaacttcatgaatttaatcactttagctaaaggaacagaggacctgtactcacacaaacacaaacatacatacatatattagcataacaacaaaaaaaaagagtataatcatgataacatgtatgtaatgtatgtatacgtgtatacatcaacaacaaaaatagatgtatacctcttcattccttctcctcatgatgatcaaataatacggttgggaacatgagcaatcttatgccaatctgggcctacttcttctttgcatgcttcctgtaatgcatcacaatcttcaatcttcaaatgtgtgagggaagtgaggccttctatcccatcaggaagagacaacaattctggacactccttaatcacaagcttctcaagtgacgtgagttttggtagccactccggcaatctcgataatttgggacacccacaaatctgtaattgtcgtagtgtcttagcagcttgttggagccattggggcaattctgttgtctttggtaatacataaatatcaaatgtgtggaggctcaactgaacatctttattaataaattcacttgctaagttgagttgatcacaacaacctattatgagagaacgtaatg

SEQ ID NO: 141199 - DNA, 742 bp, Cannabis sativa
  modified_base (557)..(559): a, c, t, g, unknown or other
gagctacggatagcttgtacaaccgaaagacaatccgtttctaaaaccacactgagccacgaatgatctttgatccaactcaacacctcttggatcccaattacttcggccaccacaggagaaatcgaaccatggaacaactttgtaccgccctctacaaaaaagctgttggaatctctcgccacaaacccaacaccataggtagagttatcattaaacacagccgcatcgatattaaccttaatactattaccgcttggaacacaccattgctccgccccatcccccggaatgaaaccagtgaacagtagctcattgttcgaattttgagcaacacgccattgattaaggtagtttgttgcagacgccacaatgctttcgacccctatcactttgttttgccaaactttgtcatttctaacattccaaattccccaacacaaggccaccagcaagcttgagttatccaaatcaagcaaaataaattggtgcatacactagtccataaacgagacgtcctgctgcattatcctaccaatacccacccgatcccatannnctgctgcaactggacaagataagagagagtgctcaatggtttcaggagccatagaacatactggacaaatagggtttacattcactctctttgattgaagttgagtcattgttgaaagacatgttttcgccgcacgccacaacaaattcttcattttcggaggggttttgagttgccacagct

SEQ ID NO: 141200 - DNA, 658 bp, Cannabis sativa
  modified_base (35)..(39): a, c, t, g, unknown or other
ttactaattaataaaagatcagaaatcattttatnnnnnatggttcacatgattactttcatgattatatatttattatataaattctactaaatccaaaatatatagttattaacaattatagtgatgcctttacagtgaaaagtaattgtgattgtatgcttcaaagtctttagtctcataatttatcaatgaactggatttacactgtcgtgataatcaacgataaagtttacttacacaatgttatgtgaaatgtcctttctagggcattagcaaagtatactagtatcagatatattggttatacatcggactggaccgatattgacacttgaaaagatatcatagacttactgttatgtcttttctaagtcaatatcccttagttgatcttaggtcaatagatcttaatcctaagatggttaggttctggcttaaacatattatatgtattctttgacttgttcgttaaagttgaccaattggatcggcctaatacttatatcttgggaacatggtagtgcaattaagtgggagcgctaatcatagatatagaatccatagcttctataactatgaacagtgaaacaataatttctttcgagcttagcttaacacgataaatgatagagcgctcatttcagtaattatatta

SEQ ID NO: 141201 - DNA, 519 bp, Cannabis sativa
aatattttcatttaaattattgtgatatattttgtgttgataatattttatatggatttaattttgtttgtgtttgattaagaaaataacatttgtaaaaagaaaagaaaagtagtaaaaaatgtggtccaaagcatagaaaaatggcatttttagaatgtaattcagcccgacaaaggagcccagcccgcagcccaaccggcccactttctcttcaccaagagacaacctcgccacgtggcgggctgtgattcgcgtgctagaaggaaagcaggagcagcagctcccttgtcccctcacacgcctcacacgcgcgtgaatcgcacggaccctcctggtctgtgtgtttcctccactcgccagccccgagagtggtgcttccttctctccgcgccccatcagccaaaagccactttccacgtggctttccctctcttgccacgtgtccacatgcaattagtgagagtgacacgtggcagctccaaattaagttattttaattgtgcattagtcatttta

SEQ ID NO: 141202 - DNA, 502 bp, Cannabis sativa
atttcgttttaagtttaaaaacaattggtttcgtataggggttttgtgaatttaaatagttatgaaggttctgatattataggattgttctcgggtaatcatgggactagttcgaatgttttcttgttgaatttgaggtgattttgagttagaaattgagtttggatttttttaaagcttagtccgaacgctaatggcatttttcattcaaggggtcaatttttatttcggttacataaggatggtgatatttatggtatatatgcgccctgtaaagtttgtagtgatttgtataagtttttttagtgttttggtgagtgcgaaaattgggattttctagttttatagtttttagaaatttcttagagatcagaaaacatatatttgtcataacttttgatgagggtgtcaattttggacattctatataccgttttgaagcttgcgataagctatacaatatggtgtatgttttagagcaaaatataagttttattttagt

SEQ ID NO: 141203 - DNA, 544 bp, Cannabis sativa
attttaaatatttttacgatttttatgattttatttacagaaaattcggtctttttatgttgttcttattaattttttgttatctgtgtattattttttgttggtgtttggatgttattttctttttcttgttacatttatgtagttttcttgttgtttctataaaaccgtacaaatgtaaaaaaaaaaaaaattaaacgtaaaaatataatttattctacaaaaataatgttttatgtaattattttttaggaaattatattgtatacccactttattttatatattttaatttttacttttattttcatattttttaagatgtacccacttttatagatgatattcctattatatcctttaaattaatgaaaattatgtgttagacttaagtagatggtgatgatattgggcaacccactcaaagtgaatacattttaattttaatgaaatataataataaaaaaaaacatttttcattgatggatacaaaaaagaaatatttttcaacttatcccttatttttttgggttaatttcacaaa

SEQ ID NO: 141204 - DNA, 640 bp, Cannabis sativa
caaatgttctacgttcttattagcgagccatcaagtcaagcaaatttatagactccgactccaactattgcttcgatgaccctcccaattcgggttaaacactcatgttgatgcgtctctcgtatttgcaaagactcgtcttagcaccaagtctccaccattgaatagtcttttcttgactttttttttgttgaagtatcttgtaactcggtgttggtatgcgatgttggtgatttgcgactcagttcatttttcctcaagtagatccaaagacaattttaaaagttcttggttttcttcttgagtataaaactctcatctgtgagtcgatatattcacttcaacaggcagcattgcttccgagcaaaatgttagcaagaaaggagtgtgtcttgtggctgaggtagctcgtcaacccatccgcccttgacatcgtctaacttcttcttgatagtatcctttagggttttattgatggcttccaattgtccaatttcctgaggcctgaatactgacgagaagcttttgataattttattcctctcgcgaaattcagtaaacaagttgccatcaaattgggttccattatcggatactatcttcatgggaattcaaaacctacagataatgttcttgacga

SEQ ID NO: 141205 - DNA, 1726 bp, Cannabis sativa
ttttttttttttgaaaaagatatagcatcaatgtcatatagtggcatcaacacaattttctatgataacactaatttatctccaatgatataacatcctcgtattttttttaaagagcattgttattgggcaccagtagtgcccaacatcttttataggtggtactttataattagatagtgatatttcctaaaatctaattttttaaattatatgggacctaatacttcattacactaatagcggtatgacaccgagaaaggtgctaggcaccaatagtactttttagcatttttctttgccaaataagtattctacataagcaagcattctccaaaatttaaccatcaagactactccaatagtaaatatcaaatttggtatcaaatcaacaaaaaaataataaaattttgacactattttttttctattccaatcacaacactaaaaatatattttttattattatattattttattaaattataaataaacacaaatgatatatatacaaaaaaaattacttataaatatattatttaaatattaaaaactaataaaaatatatttggagtgtcacactaatattagtgagacactgtagataatattatatatgtgatagatttagagtgtgattagaatgaatttaatgtgaaatcttaaaaaatttaatattttagtgttctattagagttggctttagagatgctcttaacaaaataaagattttaaaggttttgctatcaaaatttaaattttaagggttaactactaatgaactaaaaatataaaggattatgtggcaatttactaaaataaaaagcaagaccaattttagaagaggagtgttaccgtcaacctcttgttacaacctcttagtcaacctctacgcctgaaaacacatgttggtatatttttttttaattttttttttcacgggagtgtttgttatgcttacaacatcatctttttaaatttttaaaaaaatttgaatagtttacagtgccgaaaatacgtttaaatttttttgaatgcacgtggtaaattggaatttcaggaactctgtttttggtactgtaaactcagtggcggaaccagaccacgaaataaggaggggccaaataaaatatattttcatctaatttttttagtatgtagtattttataaatcaatataagaagttaattagttttatacaacgtatataaaataatgagaaataataaaaggcaccttatagtaccaaatactataaaaagtgacatatcgttattggtgtaaaataatatcgagtcctaaatattttgatttaataaataatataagaaaccgctaaccatttgtaaagtgccatattaatatggtattggataccataaagatacatatataaagacacatataaatatagggacacgattttgtcccgataatgtactttcatggaatatattccgtgatgtacgacaaccgttagatggagtagttatttgatctgagggctggggttggtctaggaataattagggttaaaaaatggtaacgtatcctggaacacattattacgtaccctgggacccataaataaattcacacacattattacgtaccctggaccaggggcggagccacagccaaaggaagagtggccatggcccccccaacaattttatatcccttttaatatatatatatatgtaaatatttataaataaaaataca

SEQ ID NO: 141206 - DNA, 856 bp, Cannabis sativa
  modified_base (38)..(44): a, c, t, g, unknown or other
gatattgaataatacggattacattgaaatggagtttnnnnnnnggcataaaacccaacagtgtgatagacttcaagtagtccttctcttcttggaaggagggttgaaaaaatgtcgtacccccagtgatctttcacgcacgagaaactttttgcatgcgagagtgaggttgaatttttttgaggcaaaataattgaatatgttttattttggtatttttgctaacatgtttactcacttgttattttctgaacttttgtatgaatttaattgaaccaaaagatttatttttgtttattgatattagtagtgtcaaaatgaacaacccacaccccaatcctcaccttttacatgcctttgcaaataaactctatattgtggaaatgtctcctaataagagcattaattcacacttaatcatgatgaatctaaagttccagaaagcaaatttgctgggaaatgatttatcaaaagagcaatggattcaattcattcttaacattcttccacctgattataatggattttttgtatcatacatgattaacaattttaactcatcccccgtagacaagctagacgctgaattgcatgcttacgagcggactttgcatgtaaggaagcctccctccagttttgtagacatgagaaaaaaggaagaggattgagaatgatgcttctaataatggtgcttcttcaagttcaaggactgaaacaatggacagtcgtactcttctatgttcgcattgtgataagaagggacatcaggaagaaacatgtcccagaattctagacaattggaacgaaggtaacacttttgtttttgaatcacgtgttttagaaaatgacaaatcct

SEQ ID NO: 141207 - DNA, 552 bp, Cannabis sativa
atctcgaggcctccaaatcaggttttccaacagtatcgtgccccggttgtctcctgggtttcgtgacttgatgcactctaaacttattctccaactcgctcactttaaaatggaatgaatccttttgccttgaaccgagtcgttgacggaggtcaggcttcttcaggttcagatgttctcatagatcactcttgtcatgattgtggtcgaaccttgccttcctctcaaggtttgaccgacatttttttcctaaaagggtttgcacgagtttcactctcatgaacctgaatagtgggttggcaatttttgtccgatgttccacgtatctcaggctgtgtctctaggttttcctcagttccctcaggttgcatttcctgagggtcctaagtatatctttgggttatcctctgccccttggtctgcgagtcgtgaggtttgccctgtgaatctcttttcccaaggtcaagttgattttgggtatcatctcccatcgttgcctttacggcagctatttcacgctccaacttagcattacgccggtttacttcctcc

SEQ ID NO: 141208 - DNA, 999 bp, Cannabis sativa
cataatttttaaataatttacttctaattctaaaaaaaaaaattattgatttttttatgtgataaaagacaatataaataataaatagtttaaagggctatttacataaatataggaacatatactatagtttacatatatatggcaagaaaatttaatgccactaaatatggcattcaaaacaaaaaagttaacaactatgggaaatgacatgtctaataccataaaaaacattaaaaatcaaatcagattttttttcctttaaatttaaaaactaaccaaaaacagaaaagctaaaacactctccacgttttttttctctctctctctctacaatttcacgatagcttctctctctctctcactcttaattcttctctctcccaccgcacctgcgattcaacctgcgatcaaaatcgcaatcgaattttcttggatcgaaatctgcaaccatcgattaacattttctccacaccgatcaatcggatctccaacaaccaatctgcacaaatcaaatctgataacaacaatcaaactcatctctaatgttcatcatcggcagcaacaattgaagaatactcaagagaaattcacattatcatatctacatgttgacctcgcttttagccaacgacaatgagtctattttgtaagtgacaagtagtttagcacgagcgaaatataataaagcaaataaagacacaaaaattttataataggttcagtcccgagcagttcggtaatagcctaatccttgttatttgtattgacttaagaacaaggagaatgattccttttcttagagctcttaaaattaaatctctgaatatgaattcttagacaaaatgtttcgaccctttgcccagtgagtatgactcactatttaggaggctataagcttggtagggaagtatttcccttctagttacaattgatataagtagaaagattgcatagtaaatacagaatacactaatcgtaggatttggacagcttgcc

SEQ ID NO: 141209 - DNA, 534 bp, Cannabis sativa
aaaaaagaagaagaagaagagaaaaagatataagggaatgatgtaaggtgtgattgatataagtcatcaatccatgacgtgtgtgactgcatggattgtgtgtgcaagtggtaaaagtgtaataaaataaagctaataagtataaatgttgatttaaccgggtgaagatatatgtaataaagtgtgtattttgtatttttggtgtaaatgtagtgtttatacataaggctacatttaattataatttcgtttattttttaaacacatttttcaatgactaataaacataagtgttatttaaagtgtttattcaaataaataaataaacttacgtgtttcatttttaaaattattatgatattttaataaagaaattatgtttactatcataataaacatactaaaattaataatctataattactataaaagtgagaatatttttaggctttctctatataaattacataattaaccttcattaaatattaaattacaattttttttttgatgaacaacaaacccattaatatt

SEQ ID NO: 141210 - DNA, 593 bp, Cannabis sativa
aaagaaactaaaatgttacatttgaccctgattaatcttctttagtgatgatgaaaaaatatatacttatcacataatagtcatcttaaaaaaaatacaatgatgtaatttttaaacccaaacaattatttatgtagtaaaaattaatctttttaaacttggaaaaagaaaaaaaaaaaggagaaagaagtaaatgaagttgaaaattattataaagtttttcaaaaataaataaaataaaatgaaagagatatgttgatgtcatgtcattaacaaaaaaaagtaacaaaataaatgaataaataaaaagaaaaataatgtagagaaagtagatggatgcttaggcaaaataaaaataaataagctagcatgtacatacaaaatgaaaaaaagaaacactgtaccacgtatatacctgcccaaaatttcacacataaaaacatcagcgttagttatgatatttttttaaaaatttcgtcggtaggtgtaaatttctcattatactaagtacacaaccatttcatcattctgaaattctcctatcactagggtatttccttagaaggacctaagcaacgattagtaactaatca

SEQ ID NO: 141211 - DNA, 551 bp, Cannabis sativa
gacatcgatctcttagattcgtctagtattttcttcctaattcatctagtttgtgtgtgtgtctctccataattcgtctagtatgtgtgtgtctctctctatctaaccgtgtttttttggatttagatttgattttgttttctcagtggaacctatcatctccttagctctctttctctctctcacgctcaaggaaactcaaattcagaggtatacatggctttttaaaatattgtgttttttattttgggtaaaagttgtttgtttgaaattatatttgtgttttgttcttggtaattgattagttcttttgggatgggaatttgttgggtttccttttagattaatttgttggcgaatgatttgtgttttatattaatttgactgtaaaataacattgagaccttggatttgtatcatgattagtgttgattacttttgaccccaatacattgttttaaatatagcaatgatgactccaaatcaatttcctaggctttgtctgaacccaagtattatactctttaatgggacgagttctcagtgaaaaa

SEQ ID NO: 141212 - DNA, 605 bp, Cannabis sativa
  modified_base (311)..(312): a, c, t, g, unknown or other
atgatgtccccattatatcccttatgttaatgtaaattatgtgctagacttaagtagagggtgaagatatattgggcaactcactcacaaaagtggatactttttgataaaatataatagggttttttacaaaagtactgaattttgggcaaaagttcacaattttactgtggggtggatttttttttttcacaaaatactatttttttttataaaacaactgtaaaacaacagaacaattaaaacaacagtagaacaactaaaaataaccatgaaaacttaatacaatacatagtataaaacttacacannatttttgaaaaaaattccgcccaacagtaaaaagtaaaaaaaattgaaaatttcagtatatggtgtaaaaatccttataatatgagtaggagtgtaaatggatcgagttggatctgatccgactatgatccgacctgatccagattatgtaaggatctgcctcgccccaccccgctagatcagatacttggatcggatcagatctgacccgacttattcggatcgaatttgatccgacccaagttattcgaatcggatctgatccgacctgacttttttttttttttttaaga

SEQ ID NO: 141213 - DNA, 618 bp, Cannabis sativa
aattagtattatttgttctctccttaattctctcttttttttttaattttttattagttttataaatattaattaatataaaatatatatttttatttattttctgttaattctataattttttattatttttaatttttttaattaagatatcacgtttgcaattgcatggctattttttcttaaacttaattttatatatagacacatgtttaccaacatcaatttacactttctctctctcaaaaagctcaacccctgtaaagattatggtttttattctcatccttttgtttatctatctttcgaatcaaattaaaagcctcatatcatatcagtattataattatgtttttcttaattgcacacaacacacttcgtttagactacatttttccatttatatttgtgtgttttgttagtaaaattttttagttcaccccatacatatttctttatttattattaacaaaatattttattttattataatactaattatatgtattgtccatatttctaatattttgccagttattctttattttctttttttgattgtaaggtttttattatttgttctttttgttaatagttggtctaattaattaaatatat

SEQ ID NO: 141214 - DNA, 742 bp, Cannabis sativa
  modified_base (668)..(673): a, c, t, g, unknown or other
tactcatgtgtgtcataaaactcgattttctagtagtgcttgagatcaaatatgaataaaagatcgcttcacatgcataacgccaaggccctacaagaaccatataggccgagaagaaccagacagagttcctataggaatcacgtaccgagctaaggctaaggcacagttcgtggcaagttccaagccaaaaggcacagttccttgcaggttccaagccatacataaaactctggacaaccgcacccaacagtactttccatatcatgtcattgtacaaggctgggtattagcaaagtacaagtctcaagtgtaacaacttgaacaaatgttgagtcttaagttgaacattcgactataatagactcaccattaagtttcatagagagtttctaaggaaacgacgcatgagactaaggttgtatatgcctacaaggccatgacaggattcttgctaaagtcaatagaggacagaaagctggccacccgcttggaaccaaggcccaagccggccagggttcctaagccttgaaattgtcagctagggtcccatgacttagtcaagaactgtccagggtcaccaaacccaagcatgaaccgacaagctttatagggtgaaaccctagagctggccacctactatgataatgttgggaatattttaccannnnnnagatttactaacaagtatgttgaaataacatcctaaatatgaattctctaaaacaataaaataaacaca

SEQ ID NO: 141215 - DNA, 589 bp, Cannabis sativa
ctgataatgaattgtattacaactccgaggttctctcttatgttcaatgggtccttacatgggttctttgaagctagaatgggacttaggcaaggggaccgcatgtctcctctgttatttgtcttgggaatggaatacttatctagacttatgaagaagataggggagaaaaaggacttcctatttcatgacagatgttcctcactcaaattgaatcatctggcttttgcagatgatgtgcttctcttttgtcatggagatacacagagcatcacttatatgcttcaagctctcaagcttttttctttcacttctaggcttcacccgaatgctagcaaaactgcaatattgcagtaacatgaaggaaggaagtgtgaagaaattgattaaagcattggggttctctagacaagtcttgccatttacttatctagggatacctatttgctctgggaagatttcaggtaaggaatgtgaacttttggttggaaaaatgacggctagaattaagagttggagctcaaggaatctctcctttgcaggtcggattactctaattaactcagtattaatagcaattcaggcatat

SEQ ID NO: 141216 - DNA, 625 bp, Cannabis sativa
aaatttaatgtaagcccaaataaaagtctaacagtttattcttttctcattgtaataggtgttgaaatactattgctcactctcttgcaaaaagagctagttttagatgagtctcctatcgggaggccgaggctccttttgaatttagttgtttaatcttttgaactctttttttgtatcttaagactttttaagtttaataaatatatttattttcttttttaaaaaaatattttaaactaaaaatactaaattagaccaaaattaatcaaattaaattcaaataatcaaaaacatatataaattaagatttaagaatagttagatgggatatatttattttttttaattataaaacttaactacatgggaaagagtacttaaaaataaaaaaattaacaaacatttaaaattttaatattgaaagcaataaactaattaaaatcaattaattgaaattataaattattttaacaaaaatctactttgttttggaaaaaaaaaaatcttaaaagctatgcttaaaaaaatctttgatatataactaattgaaaaaaaaaatcttatatacgttaatttgaattgtacacatgtaatgtaagtgtagaatttttttttttttttt

SEQ ID NO: 141217 - DNA, 502 bp, Cannabis sativa
  modified_base (259)..(259): a, c, t, g, unknown or other
atgagaaaaataaagttgtgagatacaaagcaagacttgtagctcaaggtttttctcaaaggccatgtattgattatgaggagacatattctcctgtggtttaagcaataacattaagatatttggttagcctggctgtgagtgaaaaactcgatatgcgattaatggatgtagccacaacttatttatatggatcaatagatagtgatatttacattaagatccctgaaggatttaagatgcctgatgcatataattnaagcaatcgagaaatgtcctcaattaaattacaaagatcattgtatggattaaaacaatcaggacacatgtggtacaatcgacttagtgaatatttattaaaagaaggatttaaaaattatcctatttgcccatgtgttttcataaaaagttcaagtcctgagtttgttatcattgttgtttatgttgatgatttgaatattattggaactcctgaaaaactttcagaagctgtggaatatct

SEQ ID NO: 141218 - DNA, 724 bp, Cannabis sativa
ctttattgatgttgaataaaatggattacattgaaatgaagttttatttagggcataaaacccaacatttagtccctaaaagcttatataaagggtgaactggagttgatttcagtgaagcatttcagaaggaaaaaaatagcagacaaaggagtacgaatttcagagacgaaagtcaatactggaggcattcttaagagggttttcagcattcttttcttctctattttcttttcttttcttaaagttaatatgtgtgattttgctttcataaacatgagtagctaagcacttaattagggttagatgggtattgtttgatattgctttatggtattaacattgtaacgccctaaactataaggacgccacgtgtgtgattttataaactagtttagtactaatagactaattaattattaaaaatcgtgataatattaaaaacttgactaaaataaagcactaaaaacaacattataacgtcataaaaagcgtgtttcgggaattcctgttataaaaaaattttgctaaagaaatatatacaacaaccatttaaacacataatcaaaatacacagcaaatatagccagttcaaaataactcttgacaactcagcacgcaagccgatgaggtcaatatgtacattgctggagaagactgtcacctcatagttgatctagcttttttcttgcctttacccgcaccacatagcacctgtgagtca

SEQ ID NO: 141219 - DNA, 518 bp, Cannabis sativa
ttggaacaataggggaaggagtaatagcaaagattcttccaagggtggaagatatggaaatgggaagtctccatcaagaggacagaaagatcctaaaggctgctatcactgtggtaaactgggacatttcagaagagattgttatttttggaagagaagtaacagaggaagaacagatggtagcgatggtgaatcaaatcagggagaaaatcatttctcaaaggaaaaggaaaacaagcatgaagccaatctaagtgatggctatgggagtggagaagcttacataattgcaactaaattcaaagatgagtggattttagattgaggaggcacttttcacatgactaataatagatccttactttttgatttcagggaatcaaaaggagggaaagtcatcttaggcaacaactaaacatgccatattgaaggctcaggtaatgtgagctttaaaatgtatgatggtattgtaagaactcttacaggggtaagatttgtgcctaacttagcaagaaatt

SEQ ID NO: 141220 - DNA, 871 bp, Cannabis sativa
agaaacaatgatctcgagttggaccgagcacgtggaacccctttctctcccgagatcaatctcatagggttgccccacaagttcaaaatgccaacctggaaaatgtacactggaagagaacatcctctttcccacctcaagtatctcgagatgcaaatggatctgtagggggtacgaggtgacgtatgttgtagaatttttcctgctaccctctcagaagccacccaacaatggtatttcaagctgccccctggaaagttcaactcatggaaagccttctcctcggaattccatgcacaattatcctcctctcgccagcttctgttgcatttaggagacctgttcgaagtcaagcaaagaccaggcgagcctctctgggcatacattagcagattcatgacagaggcgaccaaggtttcacgggtaactgaagatggaaagttgtccgcaatactggggggcattgaagtcctcggtgaactttagaagaacataaggaagaacggcccggtagactcaatgagtgattttctcgaccgtgcggaaggcttcattaaactcgaagaagctatttagcaagcagaaggtgaacaaaagcctaacaaatcaaaagctccttccaatggaacgactgcccaactctcccattacccaaataattcgagctcaaatggtaaacgttctaacaacaacaacaaacaagggaatgggaagaagggaaagtttgccagcaaaatcgaggaggatccctgggagactcaagcaaggagcactacatttaccatcttgactgaggatatcgaaagtgtttacatggccactcagttgctagccccatataagaagtcctggcccatgaagaaagatgtca

SEQ ID NO: 141221 - DNA, 715 bp, Cannabis sativa
ttatttgaaaaatatttgggtatgaaatgacatgttctacccttatgtgtatgtgagttgatttttagccctaggggcaaaaaggtcttttacctacattttcataatcatcaaaagaggttgattttggaaaaagaagataaaattctggtgtttatccctctctctcacccgacatctctctctctctctagctctctttggattttcaagatttcaattggtgaattgcttgggttcagcttgaaattgaagtaaagtgttggtaaattgttgtgctagcccttaaagtgactcttgaggtagtttttataactctaattcctactatgttgctgaattttaatgttagacatgcatgattaggttgttgatgaatatgatatttatgtattgcatgaagtgatgttcctttgggaatctatgtgtgttttgcttaaattcttggtgtggtggttgtttgagcctcagagggaattctaggatttcttttatatcttaaattcaagttaattgatgatgttgttgctggaaaaataattgggtatattgaatttagttcaagttcttgagcttggattttgtgagtttgagcatgatttttgaagttaattgtgcaagctgattttgagggaaaattgtgaatgttaatgcatgttgtatgtattttaatatcctatcttggagtttgataagttgtgatcatgttttgaga

SEQ ID NO: 141222 - DNA, 651 bp, Cannabis sativa
gatggattggatcgtacggattggatcggatactttattgacagtcctaataaaaaccataaaagaataacaaaaaaaaaaaccaatttcttgaaataactaaataaaaaaaattaaaacttataactcaattatgaacaacaaaaaaaaaaaaaaaaaaaaaccagttatgaaaactaattacttaaaaaaaaaaaaaaaaaaaccagttatgaaaacaataaaataatgtgtgtcagaaccgttatttaaaataaaaacagaaaatgttgttcaaatatcaaataataataaaattagtttcatataaactaaaaaatatttacattcgctccttccttcactctaaaatctcatttgagaactgaatttttagagaacataactctggagaattgttcttaagcattaagattaataaaacttgaagttgactaacttattatcgctgaaaggggatgaaccattataaaaccttgtgttcatatcgttaattttgttttctacaaatcgatttactttgattgataattacttgtgttcatcttgctcgtgtacgatcttcctagatctgttgacaaaaaactacgtcaacaatatcatacatcaaattttctatttttctacatatcatttatatatttaattttt

SEQ ID NO: 141223 - DNA, 778 bp, Cannabis sativa
cgaacaatgacaaaacaaatggagagtagattctgcttccagattgcaaaataaacacttcctatgctcaacctcccttagacctaatctggctgatgtggaaagactgtcagaaagaattttccaccctagaaactttaagcgaggatgcaggcgcgtcttccaccacttttcccaaagcttattaggcgtattgaaacggtgttgttggctagcctagtaagcacttttgacagaaaatttgtccgactttgcagcattccaaaacacaatgtccgtgccccccattaaaggcttgatgttgagaatatcattagcaattcctccattgaaacactcacggacaagttgctcattccacattctagtgccctccacaaacagatccttgacttgccaaggggctgattcttcttgatttcctcctccttcctaccagggatccaaggtctgtcccaaatttcacaattcccatccgcaatcataatgcccgcttcctccacacaaatatttcgcaccttcaaaagacttttccagcatctcgaatcaatcccttttttttccacagtccaaatcaaacagatatgacaatacttatctttaaacattttaacccagtcctttccttcatcttttagcatcatccaaaagagttttacaataagcgattcatatctgcaaagcgcctgaaacccaggcctccgcacctcttaggttggcaaagatcatgccagcttttaagcgcacaatactgcttcttttcaacattcccattcca

SEQ ID NO: 141224 - DNA, 562 bp, Cannabis sativa
tgaataaagtatattaattcctattttatgaggagtccaatagtacactatttttatttgaagtgtattatttattattattattattattttatttttacatattaaagtatttttttttattttttacggaaattatttcatatagcaactcacatagtaattaatggagcaatctacatcacaatcaaatttatattgcaatctacataaaaattactggagaaacctaaattgtaaagtttttttttaaaaaaaaattaaaaataatatacatggtaattattattatgtaaagtgagataatttatatagagtaataatatacttaaaataatgatacgtaataacgaaacaaattatttaattaatcataattaattaaattgagatttatttttgtaaaaaaagataaaaaaaaatgggaaattatatttgcaccccaacaatatataagtacaccccatacctaagttcacccctctttatttttaaaattgttattttttataaaagcaccccatttttattacaaaattaggtcttgtttaaatggagaagt

SEQ ID NO: 141225 - DNA, 934 bp, Cannabis sativa
tgtgtaggtatgggactacacagttgaagagggcttaaatggattgattggtactacctatattaacaaggtgcatcttgttttcttgttttttgatagcccattgcaaaagaactccatagttaagcgtgcttgacctggggtagggtcaaagcacgctggaaggcatccgaggaagttttcctaggaagcatgacagtgaggacaaagcacgctggaaacactcgtgttagtttgtaggttcagtcattagtccatgaagctgtaacaccctaactagcataggcgtgttagcgcgatttttaatatactgtgcagctcattgctaatcaaccaggttattggaaaacgtgaataattaaaagtttgcttatttaattaaaatataacaaataacttttataaacttctgggatcccgtttacaaaatactgttacaaaagtttactacataattacaaagatttgtcgccaagcgactaaacaacagaagccctgacgtcccgaggatcgtacgctgcaggcctaaccgccccgacatgtacaatcttcacatgctccctctcacggctcctcagatttagccttgcccttacctacaaatagcaatagcactttgagtcaacaaactcagtaagaaaagcataacataataaacattctaatatcccgggttataatcaggcacccatacacctaaccataaccctaactgaatcaggaacgttcttgacaaagtatgactaactgcgaactcaacctatactcagtactctaatcgtaatgatgtggtagcagttaaatcacactatctgaataacctagcatatatgtgatggtatctcggtgcaactctatgtacacctcactgttgccctgatatgctaatgtgatggctatataaaatttgcctcatatatctaatatgttatcc

SEQ ID NO: 141226 - DNA, 610 bp, Cannabis sativa
tacatgctttaatttgtggatgaatctgtttaaactgaaattgtgatttagtatgtttgtttgtgataaattatgcatgagaaatctggggaaattatgggggtcgtggtaaacgctgttttttcctgattttagtttttgtgcgacattatgcgattttatatgcgatgttgtgtgattttaacataggttaatacattttggatatatttagcgatatttaggcgacattgtgcgatgtttgtgcgatttagtatatttggagtagatttcagcaatattatgggtatatttagcgatatttgggcgacattgtgcgatgtttgtgcgatttagtatatatgaagtatgttgtgcgatttctgcaatattatgcgatgtttgggcgatgtttgtgcgatgttaactgacagggacttgattttttagttgttttgttctgcattgttttagcgatattatgcgatctatgtgcgatacttatgcgattcttgttgagagtggcctaattttcgctgcctttatgcgattttaggcgatgtttgtgcgattattatgcgataaaatctaattaatctttctaaatgcagatggctcctgaacttattct

SEQ ID NO: 141227 - DNA, 679 bp, Cannabis sativa
tgtcttagagttttcttctactcatgaaatcatcaacccatgcttctgactcggcaatcagtttcagacatgctcttctagattagtagtaagcttctagattagtaggtgaagacacttttcattttatttttgatattttgacaggattttctcttcctttgacaataaagaaattttcaaatttataatatatatgattatgcagcagcaaattaaattaaaaatttagaaattatcttagtagaaagatccgcagtttaggtccatttgaaaaaagaagctgtttctaagttttgatctatagaaaatggcggggggcagatgaagaaacatagtttttagtgtgaacagtaagtgggatcttcacccagaatgaggttttatcgaaactgacttctgttggagtgagacaagccagcaaggcataaccaccataggagctccacatacaaaccaggttcttcaggtaagcatgtacattgcatcctcctggcaagcgaaggagaactacagatctcccatttaatttccctccttttctgattctgtttatgctaagaatttttcctaatagcatcttatttggtttttgtggttcatccacttttccagggtccaagttgaagacaatgtctgttggaatatattttacgattcagatttactaacaagtatg

SEQ ID NO: 141228 - DNA, 973 bp, Cannabis sativa
tatgttgttgatttgttgagtcttctgttgttgctgcattgtattccatcgtttcaaatgcgtttgtctgtgcaactaatgcgttactattttctaagaacgatagattgatggttgttggtgggttgttgatgacattcacacacaatggatatgttgtgaagtcgggttctttcagtttagttgtatgtagaaatgcaggctttggccatcctttatcctcaatggttggtatccttctttcccttgatatttcagttgcaaaacaatgttttcttggttgcattccaagacctctttaaacttccgttataattcttcatacttataattgattgaaatgtaatgtccactagcttcataattttcataattcattcgatcatcaaattgtccattacaaaagactaggaatggaatgtcttctttttcctgtgattttgaaattattattagtgtaaggcaacaattttaaaactattttgattctgttattgctaatgttagtaatgtatccgaacatttttgacactgatttttataacaaaaaaaatatatatttatgaaatagaatagaaatttacttctatttcctttcctctattcaagtcttgtatttccagttctgaaccctatttttgtcattttttgttttattgctgttattaaactatgaaaaaactgaaataaaactattacggaatgtttaaatttattacacaaactaacaatttgttcaagtgttttctctttttctactgtccaaaataaattcatgcaatattgaataaaactattatgaaatgatgatgcaattgtaaataaacttgaaaaaatatgaaacttaactccaattaacatagttgttgcttgattttattttaaaatcataaaaaaacgattatacaactgaatataacttatatgtattggttatacttgatttggattgattgggagctcctaatctttt

SEQ ID NO: 141229 - DNA, 641 bp, Cannabis sativa
actgtcacaatcacccccttacgaggtccgacgtcctcgtcaaccacactttcagctaactcaaggctctgataccatttattaacaaaatatacaattatataattatttaccaaaatcagaaactagcatatttcttaaccactcatgcagatcataaacgtactcaatcagcttagaaaaaatactacccataattatgtattaatttacacgttaaattgtataacatactaaataattaatcaaaatagaaaaaatatctcagcataaatctctaattaatatcatacatcctaattatattctggtatcatattgacagtccccaaatagtgaacactatttttactatttattctaattaaaatctaattaattagctaattaattataaataattataataaatatctacaatgatcaattatttataaaccctatttcatatcatagcatatacagtaaatgatattacaaaaatatgttttactgttttagcatcacctaagtattttccataattaattcaagtctccattgggtcgttacacccatggaatgatggctcttatacatgagtacgacactctggctacttcctggattgatgacttaccctacagaccaacacgagtgtt

SEQ ID NO: 141230 - DNA, 839 bp, Cannabis sativa
  modified_base (30)..(54): a, c, t, g, unknown or other
accatgtaacataaaatgttatttctgatnnnnnnnnnnnnnnnnnnnnnnnnntattgaaatgggttttatttacggtacgaaacccaacactttcaagttggcatcttgaacttctgaggaaactctaggacattaatctctggggagaaaggggatccacatgctcggtccaactagagttcattgttcttctgatcggccaggccttgtaacatattttttagttcatccaactatgcatgcacggttggattaacttgttcagcctcttgaccgaccagagtcacgtcagcatctctttgagtgggattttaagcacgagccccgggctgaacgactggcgtgtcatgctgctcgtccaaccctctctttctgtttagatcatccctgagatcatgaaccgttcccaatcgattaaatatagaaacacccggttttcttagggactggttagtttgactaattagctggccggaaccattaacttgggtggagttattaggtatgacttctcctaacgaattgctaaacaaggtttgcccgcctaccgcttggcccacaggtggaacctctgaccgtggattagacggctgaccatttacgtggcgtttggttacaaaataaaaatagaataggaatgagaatgagaatggtagtaggattaggaatagaatggaatggaatttctattcttttgtttggtaaagactatggaatcaataactgaagaagaattgtgatgattggtatagcatagaatgaaatatattttttattattttgaccaaaatgtcctttactcttttaaaataatttttgttttataaaattactat

SEQ ID NO: 141231 - DNA, 524 bp, Cannabis sativa
  modified_base (109)..(124): a, c, t, g, unknown or other
aatttaaaacggagtctatactgatgaaaatagagaaaaattacagttttacaaacattgagtacttatgccactaaaaaaaattattggatttatgccacttacaaannnnnnnnnnnnnnnncttatgccgctatttaccctaatgataagataatgttataatctaatttattataatcataaaatatataaaaacttattctatataacaccaggcaacataaccgcgcaaatactaattaataaatatttttttagttttttttaataatttacggttattatattatcttatgctgcaaatatctttttattgtattacaaaaaatgtattaacttttgtgttaattttaaagtagtaactaacaatggttagtttggtaggatttaataattttattagtaatttttaattttatattttgatcataaatttattacatgaaaatacaaaaaacacttaattcattctccaattttgactatttaaaaaattaaaactaaatttatgaaaaactaaa

SEQ ID NO: 141232 - DNA, 1134 bp, Cannabis sativa
  modified_base (143)..(143): a, c, t, g, unknown or other
ttgaacaaagttagatgtttatagttcggtttcagactagaaaaaccatttagggggaagccttagcaaccgcaacttaccttgttaacaggagcccaaatagaattataaaccttaagacaccttatgaaatgtggtacaanagaacccccaacctaacgcatttaagaatatttagttgtacaacatatgtataccaatctattgacaagctagaacctaggtcagtgaagggaaccttcctaggttatgccttaggaaccaaggggttagaatatatatttccaggaagggtaaactaaaggttgtgattgctaaaaatattttttcaatgagttagaatatcctcacttgaactccgggaaggatagtgtttctctgtgtgttacagaataggaaacaaagacaccccaagtgtggaagtggagtacagaacgaagctcccaaaagaaggttcacatgtggaagatagtgtggaaccaaaacacaatgcaccatcggaagttgttgtggagccaaaaaaaacaagataacgaaggcctaatagtggtgccgaaagggttcgaacagacaggtttggaaggttatcagttggctcgggatagaacccagagagagtttcatcctccagcaaggttcgcataagcagacataatagcatttgcactggcagtagtccaataaactaaaattgaagagcccagaagttatgaagaggcaattttaggaggaaacaagtacaaatggcttcagaccatggacaaggagatggattcactacgaaagaaccagacttgggtagttgtgttgaagccagagaacaagaagattgtggagtgcaaatagattctcaaggtgaaaaaggtaatcaataaggatgaacccgtgaggttcaaagccactctagtggctaagggttttacttaggtggaagatcttctcacctgtgataaactacaagacaataaggttgatgttgtccttggcagcacatttggagtttaaagttgaacagcttgatgtcaacactgtttttctaaattgattctaggatgaagagatctatatgaagcaaccacctgggtttgaggttgtaacgccataaataattaggcacgctacccaaaatgctta

SEQ ID NO: 141233 - DNA, 831 bp, Cannabis sativa
cacatcgcacaaccccccacacaacccactccgactgaccactccgaccgagacccacacccaccattccgaccctcatcaccgcgtcatggaggagacccacttcgacatggaggagacccgaacggtgcccaacaatgtccaaggttcagatctacgatttgggaaaatcacagtttggggaagacgatgtctcgatggggtccgatggggtctgatgcatgtgcaaaaaagatctgtttttgggtccgacgggtccgatgcatgtgttggaaaaacttttgggtctgacaggtgtgatggggaccctaattggggtccgatgcatgtgttgtgtaaaaaattttttgggtccgatgggtatgaagaatgagggaagaagagaggggatatgggatataatgtaaatgtgggtattttagggatattataaaatatgtcatatcccataaatattacatgttatgtatttatgggaaaaaatattatgtatttataagcataaaaagtaaaatttccctataattattctttgtaaatataattaaaaggatgaatcatttatttcttatggttgtgcatgttttaaatccacacaagcctaaataagtgcccaaaaacgactataaagtataaaacgacaataatttcaaaaaacctatgaaaatggtattaaacgagaaaaatgtcagaaaacgacggcattgtactaaacgacaattattgaagaaaacgacagtagaataatcggacaattttttttttttgaatcaaagatggaatttattcaaaaacactcagaagatacaatattctttagagcgctaggag

SEQ ID NO: 141234 - DNA, 848 bp, Cannabis sativa
  modified_base (36)..(47): a, c, t, g, unknown or other
  modified_base (272)..(284): a, c, t, g, unknown or other
taatcatagatttagaatctatagcttctatctggnnnnnnnnnnnnaacgatgatttccttcgagctttgtttaatagagataaatgattgagtactcatattacagtgattattttagttaattgaaatatcatttatatgtagctaagtgttttaaggatacaatacattgaagggtgtaacggtaaatttgtccttactcaatgtaaatcatctatagaggatcattgatttttaggattataacaaatggataatttatagcgtatnnnnnnnnnnnnncatatagagcgttctatacaactgagagtggaattccaaatctatagtggtgcaagtgtgtaacccaaaaccaaatattttcatccaaatttaaaaaatcataactaattcataaaatatcaaaattaggttctctaaaagcctaaattcataaattttttgtttactttccagtaaaaatatttccaaaacaaaacaaaaaatattttacagtatacattgtgatttccatacaatcatcaaacatgcacataaacgaccatgaaacaatccaaatcaacacaaacattgttttacatccatatttcatgaaagtaaatcattaccatggctctgagaccaggatctagatttactaccacgtatgttatttaacatcctaaatataaatttctagaacaatgtaatttaaacacatataaagtttgagaaaccttacattgtgtggagcagaattaaatgactcctttcgctcaaatcgctcagatttgagcctgattctccttcacttgaattggattcttcacagtctcacacaatatgattgaggactcacttgttatg

SEQ ID NO: 141235 - DNA, 515 bp, Cannabis sativa
tgatataactaataatgatttaaagatttagattataatttctttatatacataaacaattaaacattcctaccaataggacaaaaatcaattttttagtttagtgattaaagtctttctgttttttttgaaggaaagaaaaaaaaaaaactcttatgtgtgttttgtttgtggagaccaatatatgtcaaaaatttgttgttgacctatatatgttttatttcttaagattcttcccaatttattaataaaattgggattttttaaaaaaaaaatatatatttacaattaattaaggatctcttaattaattggtgattagtctaattaatataagatattatccagaagttattgtagttttcgaaatattattaataatacaatatatactttatgacaacaacaattaattaatatgtatataaatttaaaaaataaaaataaaataattttaagttcaaattaaaactatagcttatcacattgaacctgactacttactttaattaatt

SEQ ID NO: 141236 - DNA, 745 bp, Cannabis sativa
tgtaatgtgtgtcactaaaaacataaagtgtcactaaagagtaatatccataatttttctatttattttttttataaaaaatattgactaatagagtcacgccaagagagactaggaaagtgtgtccccacatgcctggcgtgtcactatatgtactcaaccctaatttaaaaaaaatacatatattattaatttttttttaagaatacacttatacgttgggaaaaaagctaaaaagaaaaaaaaaaaaagcttatataaaatacaatattaaggtttacagtaaccttattattatttttaaaaaaaaaatacaagattacattaaaataaatatatatattgctgagttttaattattctctctctatttctcatttaatctctcattatttctcttttcttattaataaaaaatcataaattttctaaacacataatactcagcccctttttcttctcagccacacgcaccctcacttctcagccgcaccccttcttcttctcacttctcagccgcaccttctctctcaatcgcacattctctcttcccagcacggtggggctctgaccaccatcgaccacccttctcctccccagttctctcaattgcacactcctcagctcacttagtcgccctctctcattctccttcgtgcacgaacctccgccagccgcctttgtttcccatcagccaaagttttgagatcacccaagatagataggtttttttcttttttttttt

SEQ ID NO: 141237 - DNA, 644 bp, Cannabis sativa
cgtcggtagcgaatttcgcgaaaaccgacgcctaaagggcttaaaaaccgcctctaaagggtgtttttgtagtagtgatttgaccactcaagttatagatatattatatatttgtcacggcctaaggctcgggttgtacagtattaattaacttaaactgacatatatataaatcacagataaagccaaacaaaaataatatcaacggcgacaatgatcaaaatcttaatattcaaaaatcaaatccctattcttaaaaaatctataaaaattcgtaaaaataaatcatcaaatcttcaattaatccagcaaaagtggatctgatacatactcatgttaggatttataaaatattcaagaaatacaaataatcacaaatttaaatatatttcaaaaagtgcttcaatatcaaaatcctagagtatacttatagaacctttgctaaattaaagaagaataagatgaatacagatgagcggaaacactaacttgaagtcatttgttagacattgcacaaaggttatgatcttctaagaatatactttttctttaaagtattctttttcatgcgaaaggagagaatacaaaaaccttagtgtttcttggggaccactacatagttataggctaattatagaataagt

SEQ ID NO: 141238 - DNA, 531 bp, Cannabis sativa
ctaatcatttaatgtttgcagttcaagctgaaaaaagatttttttctctttttgtttttcttcacgatttaaagcttgataaactaagtaataggcactcttgtaattaacttaaagcttattgtaattatgactgaaatagcttattatttttctatttacttgactatttggccatgaacttgtgttttggccaggttgcaggcggtgatggtacggttggttgggtattggaatgtcttgtagaacctaacaaagagagtcgaaatccaatttctcccataggaataattccactttgtatagaaaatgacctatctaggagttttggctgggtaagctttcttctcttgaatgttgaattatgtaaattgttgctctccttgtcttgttgagcattgattgtttggattggatgtttttaacagggtggttcttttcctttcgcatggaaatcagccattaaaaaaacactcaacaaggctactactggtcaaatttgtcgtttggataggtaaatgttctcttctt

SEQ ID NO: 141239 - DNA, 539 bp, Cannabis sativa
tttgttaaggcatcggcgttggaggttctgttctctcagaatttgttcgattttaaagtaatcaaatctttccaagttctttcgaactgtctctaaatactttgccattttcaagccttttgcctggtataccccgagcacttggtttacgatcagctgcgaatcactatgacagatgagatttttgactttcacggcctctgctatctttaagccagcaatcaaagcttcatactcagcctcgttattagatgcgtcaaattggaatcttagagcatagtgaaacttaaagccttctggcaatattaatatcatccctgctcccgaaccctgctcgttggatatgccatccacatataacttccaggattctgcatctcgctgatcagatgggatttcttctggagttattccttttatcaagaagtctgctaaaccttggccctttgatggaagttcgaggatggtatgttatgtggaactgccccagttcaatcgaccattttatcaatcttccagaagcatctggttttgataaa

SEQ ID NO: 141240 - DNA, 583 bp, Cannabis sativa
cctcgaccgcgagcacctcctcgcccccgacctctagctcggtctcttacagctgctcgacctcgaccgtgagattctttcttctcaagggaaccaagtattaatgaaattatacctataaaaaatgaaattatagaattaatatatgaactaggccttattattatatgtagttattaataattgaaaaaaaaaaaacttatcgtgagatagttctagtacatcttttatatatactaggtgagtattctagatgcagcgtaatttttcttattttatttcatttatactttttgtttgcttaacttttattttataaataattgtaacaaaattttatataatgtaaattttgcatcttaattatagtacaaattatatatttattattatattggagataagagagtaagaataaatctttaaaatgggcattatagatttttgaacattgttttcttttttctacttttttttaaaaataaaatttgtaatatacctttaataattaggctgattaggatttttgcccctcaagctttaacacgtactaaatcataccccttaacttttaaggtcgtta

SEQ ID NO: 141241 - DNA, 533 bp, Cannabis sativa
atggaacagtagtgggaggttgagatgaagggagaataatggtgtgaaacaattgatccaattattgtgtgttattatatttgggaaaagggaaaattgtttcatggaagataacattccttgattgaaagatagaattagtttgcaaatcaaggagggtgtaagccttcattccagaagggtagccaagaaaaacacagcttttagctcttggagaaaatttgtgacgatttctgtcaagtgtggaggcatatgcaaggcatccaaatgttctaaggtggtcataggatggctttttgttatgcaataattcaaagggagttttggtatggaggacctttgatggtgtcctattgatcaggtaagtggctgtgtgaattgcataaggccagtaaaccagagcaatctgaaattggaaaacgagggatctagccacattgagaatgtgttgattttttctctccacaactgagttttgttgtggggtatcaacacatgaattgtaatggaaaatacctgttttggtatagaaa

SEQ ID NO: 141242 - DNA, 988 bp, Cannabis sativa
cgtgaggaatagatcgacaaaggtctcccatgtcgagattgaggcctcaggcaattggctgaaccaatcgtgggcattttcctccagatttgctacaagaatgcgaaatttcgcgagctgaggtacctgatccacttccataatagtattgaacttttctaaataatctatgggattagaggtacctttgtattttagggatttggataatcggaatcccttgggaagctgagggtgtcgcacttccgtagtaaaaggagaggtcccatgcagcttgtatatgggctttctctgctgctcgagtattttcaaagcttacaaaagcatgctttgatcaatactcccggctatgggagccgggactgctgcgactgcaggagttgtgccttctgtggccaggtttgctgggacattaaccccggtagtcgctgctggtgcgttaggcgggtttatgtgactgtttacaccttgatcgcccatttggggatcagggggcgtttcctcgtcacgaggggcgtgggagcgtgctctgaaaacgtgttaaggtgatcacgcagatcacccctatgaacctgatatcgtcctccctgctgcgtctccacagaaccagacctcgtgtacctgcaaggtgtgcgaccctgcgaggacgaggaggcagattccatgtcgttttcccgtgagggcctgctgcgagggttacgtcgttcggggtcttcatcaatctgcatctcctagttgggttacctcgcagattggtctcctgaggttggctgattcaggtccagacattcggggttggtccttcgttccctgcgaacacggttattacgacgcctagaatttattactctgtgcaagtagtgggggctcgaagggggagtcgggccctgttctgtccatccacctcggcctgcagggcgcgtagttggtccaggatcgcggtatactggtcagtggtgagctggacgattccctcggatactaccgc

SEQ ID NO: 141243 - DNA, 860 bp, Cannabis sativa
caaatgcggattctacagccacctttacttcaacagcggaggttgctatgcaaccccgcccatcgccatgaaaatcttaagttggaatgctcggggtttggaaaacccgaacgcattcagacatttacgatggcttgttcaacaacaatcgccccatgttttgtttcttatggagacaaaattcagttctaatttggttactcgatttcgtaatagtcttcatttttcgaatggtttggaggcccctagagttggattgagtggcagtttaatgcttttatggaaagataatgtcaatgtcaagctctcccatcttggacacattttttttttattgttctttggattttgaagatggcccctcattccacttcacagttttttatggtgcacctgctacacaagatagaattgcttcttggaccctcttgcggaggcttactaatatttctcccaccagtcgtggcttgtaattggtgatttcaacgagattctatctaatgctcacaaagaaggaggcccgctgcgaaatgaacgtttgatgaatgacttccgtgcttgtcttgaccattgcaatttgaatgacacaccttatgagggtgattctttcacctggattaaaaaccgtactgctgccacaactttaaaagaacatctcaactggtgtttcattaatcatctatggaacaatatgtttggggttccaagagttgttcatttggactattttcactctgatcacagagctattactgctgtgattgcagctcatggtgaaccagtgcagcagcccaaaagaagaagtcgttttcgctttaaaaagctttggttagcaaatgctgaaagtagggacatcatct

SEQ ID NO: 141244 - DNA, 947 bp, Cannabis sativa
atcattctctttgctgaacacgggcttctactactcggatggaacaaaataatgtagaatttcaacaatctactcatgttgcaccatatagtgaaaaacctactactgttgagctcattgaaatgttagcagctaatttcttacagtttcagcaaagctatcatgagactatgcagagccttcaacgatatctgcaaaagttagagaatcttgcagagtcaatggaaacatctatgagtgagtatgaaatttaatgtttaaactctatgccttcacaagtagagagtaacccaatagagaatgtcagtagcatcactatctaaagtgatacacaacttgaattaccaccacatcaacaatttaatgatttgattctaactaaaggagtcaacaatttattctttgaagagtcatctccaccaagagttgaatctcatactttagttggtctaccatcactgaaaaagctatacaaaccaattgtactaacttatgtcactccaccttttccaagtagattgaaaaattctaagaaaaaggagcccatctaggacattcttgaaactcttctgaaagttgaggtaaaaattccatgtctttaggtaatcaaagaagagtttgtgctaacattcttaaggagttgtgtccaatagagaaaaagtttaatggtggtgagaaagtaagtttgggggagaaggttgttgttctctaaagaaaattattgcctaagacaaggacaattcaatgcacaattagtaaaaccaggtttgatcattgcatgatagatttaggagaaattattaatatgatgtcttattgcaattttgcttctttatatcttggtttattaagagaaacgcaggttttaattcaattgactaaccagactaatgcttatcctttagggataattgaagatatttttgtgcaggctaatggacttgtca

SEQ ID NO: 141245 - DNA, 837 bp, Cannabis sativa
tctacctacatacaatttaattaaacaaaataaattattttttttttctacatataacattgcacattggattagactcattggcggacccaatgaaggaccagtgtgggcttaagcccgtgctgaaaaaaaatatttcttttactttttaattaaaaaaatcttttaattattttaattgcccacaacaaatgcgcaacaaaataggagatcaatagttgaatgataatttgtcagtatatctcaaaaaggatgtattcaatgttattgacaacgagcttattattcatcgttttcaaaacatgaaaactcgtcgaggacaactctaaaggtatgagctcaaaaattgatatatttgctaaaattttaggatattgagtatgttatatattttgaagatcattttaattttttttttctattagaagatttttagtgcttgatatttaatattttttttagttgggaattgaaatattgaattgtgtttttctttatatttacttgtttttttggaatatttttatatatgaaaaaatttgcgcccaccctccaattaaattctaggtccgccactgattagactggatttgagaaatattgtgcaaattgaattaaattcaaaatataaaatccgcatttagtgcagattggattggatgaacaatcctaataataggtatgttatctgttttttaaaaaatttatttacgctgttttatttgaggagaatttttaaaaatattattttttatgttttatttataatttggaattataaaaatacttttgtaaagttttaaaattataaaaatacactttgttcggcaaaaaatt

SEQ ID NO: 141246 - DNA, 1020 bp, Cannabis sativa
ttctcatactttatatatgtttattttataatcgttttagaagttcatatttagggtgtttatcaacatacttgtgagtagatctaagatcctagtaaagtaatatccaacaaaagcgtggcctaaagttacgaagagtgcgctgtccgttggcggagatcggagacttgagaagagaaagacaaatcgaccaagagcttttgagatttggaggtcggagaagatcatggtggtcgtcgtttcagttgccggtgatgggaaaggttgggcttagccaaggctgagtcatcttacggaggaaccgagagggagagaaagagagaggcgaatggttctggtttcatcgccatggctgcagtacactcacgcagagaaagagaaggaaaagaagaaagcgaaagagaagaaaaggaaagaagtggctgctagagtttatcttctttttgttttagggtttgattaaaagaaaagcaatttacatatattaataactgtatcaccttttattgcaaaataaaaaaaataataaatgtatcagctcttttttctataaaaaaaggtacaatttttttatttctttttccaataaagtatacacagcttttttataagggcaataaatgtatttacatttttttatttaattttttctttacttacagcgtcactttatgcgtgtcaggaaaaagttttccactcacgcatagggtgacgctaattacttttattaaaataaaaaaataagtaaaaaataaatttgtatttatagtgacacgcattaggtgccattaatattgaattttgagtgtctcactatgcgcgtccctaatttcttttcaaatatttagtgacccacatgttttgtgcgtgtcactaaatagagtcactaaatgtccaatttgtagtagtgaacgagaagagaaggagggatagaaccttggaattgattggaacttaagtcaactattacatcatcaaacatatgtgggtatgctataatatcaaacacaaaacaacttc

SEQ ID NO: 141247 - DNA, 566 bp, Cannabis sativa
tgtaccaaagaggtcctttgaggagtttgagcacacacatttttatataacaagaacaccaataaaactattgcttctaatttttcaaagtggaactttgatgtacccaaaatatctaaaaataaaatatttctcttaataatatttatttagcttagttaatttaaattagatttgctccagtttaatttaacaaaaatagattttcccaatttgatttaatcaaatttagtttgtatctaatttttttacaattaaattagtttttattaatgcagatttttcgttaacgaataatgagcctttttcataataaatttaacacagatatatatataggaaaattaattaataaatttaaaatggagcgtgtactaacgaaaatagagcaaaattacagttttacaaacattgggtacttatgctactaaaaaaaatcattgggaaactttatgtacttatgccactatttacccaaaatctaacaaatctcctaaatatctaaaattcaaagatgaaaatcaaatatccaactaattttcaaaattttcagtttatttaaataa

SEQ ID NO: 141248 - DNA, 622 bp, Cannabis sativa
  modified_base (551)..(551): a, c, t, g, unknown or other
aagtgatacaaatttggattatgcaaatgttcaccataaatatattccttttttacttaattttatgtcatttttattattttactagtatattttagtaagtactaggttgtatacttaattatattgttagttttgtttttgttatgtgtatttttaaaattttataaattaaagggaattgcttattaatttttttatttttcttgaaaaataatatttaaagttttaaaattttgaaaaaaataaatacaaaatataaaatattaaaattgaacatattccctatattaaaaataatgatattacaaataatattaatatttatatatatttaaagtaatttaaaattgtaataagtttaattaacataaaataaataatattaatatttatatatatttaaattaatataaaattaattaatatttatcaaactaactttattaacacttttaaatttaacagaatatttctatatttgtaaaatattttgttaaatcaacaaaaaccattagataactacaatttttatttatatatatatatanatatatatgagtatgctcttaatgggtattacccatatatgggtattttattcttgaccattggatcaaat

SEQ ID NO: 141249 - DNA, 1206 bp, Cannabis sativa
tgtggaagtgttgtgtccaaaattacacctagctgagggtacgattctggaaaatgaaatcctccctcaagttgatatggcatctatgtgctgcatgaaaatcagaaaaaattaatcaaagtcgtaaattaagtcgctaaacgtcgcgaacaatgtcgcataatatcgcgagaaaagtcgactagtgtcgcgacattgttgtgacaatgtcgcgacatgtcgacaaaaaaaataaagacgcttataaacataggattagttctgtgttagcgacaatgtcgcgataatgtcgtgacattgtcgctaacacatcgaaaataatcacagagacaaaaaaacatcaaaatagtaattaataattaaatacttacatcatcgtccagccccattagaaacaattttgtgaaaaacttcacatcagcatcaccggtgtgcacattcctaggtcaggtattgagaatgtctctaatcaaccacatcttgaatgtacgtagcaatctacggtctgctggtctttccagatctacgttatttggaagaactcgcctctttttcttttccgcagtgtagtccttcaagtacgtaggcggcttcctcttcctcacaaacgacacattctctgggggtccaggtagaagtaggacttcgtcctgtgattttgtatcaacaatggccgtgataattgcttccaatggagttgacggtgcctcgttatcatctggttcccaatcttctgggaacacatcttcgttatcgctctccattcgttcctcattttgtgttgtcggggtgggctgtggttttaccattgccatcaactggtccatcttagccagtagagtgtccttcagatctttctgactctccgtgaaggactgcctcatactgatatggctatttactaaccccgtctgtgccaacatgacggcttcctgctgggcctcaagcttatccagccggccctgaatgctatccaacctatttgcgaggtcattattgacggttgtactggttggagcagacggagcggctgaagtagatggctcgtgtacttcaggtgccggtggtggtggaactaaatttgcctttgtgacggcctcgtttatggtcttcgcttgagtttcaaacacagactcctgtgtaccatcattgtccaccgtttgttcgacatccatctcaaaacaaagaggggctttaccctcatta

SEQ ID NO: 141250 - DNA, 636 bp, Cannabis sativa
  modified_base (51)..(56): a, c, t, g, unknown or other
gtaaaattttcatatcctcgaaaatagtgttataaagctgttacatactgnnnnnnttgcctttaatattcttggtgattgagtcaatttttttttctgcgtaaccgatatgatctcattccactagttcattagcttgataaaataatttctgactattcttatgagtttgattttttcatcagggacaaggacaagcgaacattgtgtattttttgttgcaaaaatatcaagattatttttttttgttgtttaaaaaataaaaattataaaaaatatgtgtgaccgacattgtcaattgagctttcttaaaaattcttgttatttttcttgttatgtttcactattttcttagcattattttttctcttaagtgttgattggtactttctgtgttattatgacgttgttcaattttttgttatctttggctccttgataggcaaaaagggggagtagtattaattttttggattatgtgtcacaactctggacctttgttttagggggagttggttgtttgtggtttgtgcacttttccgtttaaaaagtggctttgtatcggtttgtaagcttttccgtccaaaaaaagttctttgttttatgtgttagagtgctttcatgcagggggagtat

SEQ ID NO: 141251 - DNA, 536 bp, Cannabis sativa
atggagaattgttttctgtttacactaaaaatagttctgataatatggacaccaatgtttgacatgtggcaaaaaaatatcatggagttgagtagtcccagatcatagcaagtcaacctgggaggggtccctagctctgcacccagattgactatggaaacttcggaatgggtgtttagatcccgccaagttatctttaactcactatctttcagtattttgtactatgaagacatgaagcatgcaagtccaggccccgaaagctaaaaacacacgaaacaataccttagaaattaaccagggcgcacccaacgcccaagttaacaacccaactagggtttcagtttttgggactgtcttagtgtaaatgggtcaaactttgcactgggacatgaactagacataccgcaaatatatttgaggcatcagaatcagattcagagaacttttatttttgagcacctggtgctcgggcacccagtgctcaggttgacaattgtcaacctaggccacttccaagcatcaaaacaaaaatc

SEQ ID NO: 141252 - DNA, 663 bp, Cannabis sativa
aaattattaaaagtttttaataattttttaattatgtttttatattttatttgacaggaaaatattatttagtagacgcgggatacccacaaattacaggttttttaggaccatataaaggccaaagataccatcttccacaatttcaacgaggtagcaaacctactggctataaagaggtattcaaccaggcacattcttctcttcgaagtgttattgaaagaacttttggagtatggaagaagagatggaaaatattaagagatatgcctagttatccataccagaagcaagtaaaaatagtgattgcatcaatggccttgcataattacattcgaaggcatgcaaaacgtgatcgacattttgagaaaattagagacaatccagattattgtgcaaataatcaaacgaatattgaagatgaagatgagaccattacaacttcaaatttaaatgaaatggacaatatcagagatatgattgctgcaagtttaatgggacataattaaaatatattcatatatattttgtcaaattaaattgattgttatgagcaaaatttgtaataatctaaaattatttaatagataatatttatgttgattttttaattatttttaaatgtctactaattattttattatatatacaaaaattaaatat

SEQ ID NO: 141253 - DNA, 614 bp, Cannabis sativa
tagatatggatggagagaagaaccgatttaatcaataccaatctccccgcaaaagacaagtgcctcgagctccaaatccttattcttgctaccattttctggaccagactactacaattagaagccgagatcttcctagcacaaatgggcactccaaggtacttagaaggctcattctgctttgtaaaaccagacatgtcaagcacccttctaatttcattctcactcataccactacagtacactgcagatttagcattattaggcaccaaacccgaagtgatagagaatagcttgagagcttgcatcattaagtagatgcttttgaagtcccctctgcaaaacattaagacatcatccgcgaaacttaaatgattcaactacatatcagcacatctttcatggaaaccaaattcttttttcttcccaaccttcctcatcaatctactaagtattccatgcctaaaacaaatagcaatggtgacattggatctccctgcctattaattaaaataagagaaatttttaaatattatgttttatttataattttattacttaaagtttttagttacaaaaatatgcatgcttattaaattttaaaattacaaaaa

SEQ ID NO: 141254 - DNA, 699 bp, Cannabis sativa
  modified_base (671)..(673): a, c, t, g, unknown or other
taaataattttcataattaaccataattaactgctaatttctaaattaaactaagtggtctttacaataaaagacaaagtcgagccaagaaaaattggaaagcaggatttggttcacttctggccgcgacagatttattaacggccgcgaccaagatttggcagaatgtagtttttgagattggcccagtagccgcggcgagctactccatcgtcgtggctaaagcaacactcgtcgcggcgaggttccgtacagctggaggccaatttcatcttttgaaatttgggacgaaaaatataaaggaaactgtgagaaagagaagaggggaagcgaagtttagacctaaaagctgtcaagaacgacagaaggagcagagtggcagcccggattcaccaacagtttctttcgtcatctccttttatttcttttatgttaaattctgctttagtattgttatgtatttgaacatgaactaaattctcaatttagggatatgatgattgttagatgacgtttctctaattgagttaatgttattattattattcctccctgattgtgtgatttgtgcttatttgttttaattacatattttagactagccatcttaaatgtgacttatgatcctaatgtgaaacctgagaagtgaatattgttgggttttatgcccnnnataaaactctttacaatctgattagt

SEQ ID NO: 141255 - DNA, 539 bp, Cannabis sativa
ttctaaaaaatgaatgtttacctattactagcttgctattacaggtcaaagaaaaatgtaaccatatgcttacaataaaaatataatcattgaatacacccatatatataaaataaaataaaaaaaaaaaacatattggttatatactattttaaccttgtttagtatgttgaattatttttaatttttcaaaaattatgccgaatgttttaatttattatgacatatactttcatattaaaaaaattaaaattaaaactattacaatattgaaaatgaggaaggagtatatcactacacccatttttaagggtgcactagattttcccaatatatttgtaaaataataaaaataagaaaaagggagagacaaattctcgtgcacacaatattctttttcttgttttaatttaacttttgcttttcagatctcttttgtactaaaaagcatgtcaacaaagctacaaaactacaagttttaattcctagctcattgatttgaaaagttcctaaaataaatagatataacctctattttt

SEQ ID NO: 141256 - DNA, 624 bp, Cannabis sativa
actttttgaagctgaactaatgaaagcctaccattctgtacaattctttttccctcttctgatattaacgttctgtactaaatttttgtttgcaaatttgcaatttgtaaaaagtaaacagatacagatgtctagcttcgcattcttgctatctcaagaatctcaaccatatctttccaatttctttctctaaattcttccatgtctttccttcattggtaatttgcctccaagagctggcaatttaaatatatatataaatatttatataattaaattcttgacacaagtcttttagtcatctcaaaagttgactactcttttgaatgtgagatataatttattttccatttccacttcttcgttcggttaagtcaaactcctttgctttttgctctcaacatattaaataggagaaaagtaataaaagatctcaacatattaaataggagaaaagtaataaaagaaaaagaatgcgagttagtggagtggctatgattttcattgttattttctagactttaagatatgggaatctattaccaccttagttttattaagtcatatataattaaaaagattgctagttgaactccaaacaatgatgtatatatatatatatat

SEQ ID NO: 141257 - DNA, 725 bp, Cannabis sativa
  modified_base (286)..(294): a, c, t, g, unknown or other
gtatgctttctttcttgcctgtgcattctaccacaaagtctaccaagacttggcttttgattgctgttcgaggttgtgatttcatactggcccaactctaccgcccacttgagtagctgtccagaagcatctggtttttgcagtatttggcgtggtggctggtcggtgtatacctgaataggatgagcttgaaaataaggcctcaatttccttgttgctagaataaggcagtaggcgagtttttctatcaacaggtatcggctctcggcctcaatgagtcttttannnnnnnnntagactgggtgttgtatgctgttcccttctctaattagtacgacactcatgacatgtttcgtgacagctaaatatattcccagttcctctccgtccagaggttttgagagcacaggaggttttgcaagtttttcttttagctcttggaaagctttttcacactcctctgtccactcgaacttcttgtttcctcgtagaatgttgaagaatgggacacacttatctgttgattttgaaacaaatcggctgagcgcggcgatctgaccagttaggctttgcacttctttggtttttgttggtatgttcatatccaggagggcttgaatcttctctggattagcttccattcctcgggcattgacgatgaagcctagaaactttcctgagctgagtccaaaggaacactttaagggatttagtttcatattata

SEQ ID NO: 141258 - DNA, 564 bp, Cannabis sativa
  modified_base (42)..(46): a, c, t, g, unknown or other
actctcagtcatatagaacgctgtatatgttccacgatatannnnngctattaattatccattattataagggttttttttttttaatattatacctaaaattgattttatttataaaaataccttcaacaaatttatttgcacaaataccaattgccacgtcagcataaatagcgaaatttattaccgaaaatagaaaaaacttgaaaattctcgtttccagaaatttcagtgttttgcaagttttaaaaagagcaactttttggttgctttcgatataaatagtatcaattagttactatttatttaaaaaaattgtttcaagataatttttttctcatatacatttagttacatttttttaattagataacttgaaaactatgattttatttattaatttttaggctatattatgtgttattttattatttaagatactttgaggttacttttagcaattttaagctattttaaattatgagaaacatatatattttctatgatataaaaaaatatgaacaagataaaaataacacttccctttcttttataaattattaa

SEQ ID NO: 141259 - DNA, 656 bp, Cannabis sativa
  modified_base (277)..(283): a, c, t, g, unknown or other
ctgaaacataaattaaaaacaaaattagttctacaataagaaacctcttaacacataatacctcataaaacagattttaattttcttaaaaggtgaggatcaatttggaaaaataccgaggtataaatatgaaaataaccagctccataacaaaataaataacacacaataactaaaaatataatataaaaaaaaattggttatatttatcaattagttaaaaatttgattaaaaaaaactagtttcgtaaagcaactaagataaaaacttacacannnnnnnagttaaataaaacaaatcaataaaaaattgggtccttgaattaactacataaaaaatcagttccagaaaaaactaaatcaaaaactaatttctaaaataaatactccaagaattaatttttgaattgattaaataaaaaaccagatgacaaaaattaaaatagactctcttccacaacaaaatgactaaaaacaaataacatataataactcagaaaccggttataatttaaaaataagagcgaatcatattaaaaataaaaacatagtgatgtaaaataaaatagaactggttccacaacaaaacgagtaaaaataaataacacacaataactcagaaagcaagttataattaaaagggaaatttgcggcaa

SEQ ID NO: 141260 - DNA, 635 bp, Cannabis sativa
gtcggccacatcgcacgcctcaaaagctagccaaagggttttgaaagtgacccgttttacattattgaggtagtcccgtaatatccgatcagactcacatagtgtagtcaattcttcaatcgaggggccaccgctgatctttaggccagtgatcaatccaaactcagaccttccaaatctggcctcggttttacccacgtaaaaccagactttatcattttttacctaacgtaacttcatattcctcaacagcagttgatgcacaatcaccccagagaatttcagttcattcgcattccaaaaaactccaaaaggagtttccttcaccctcttggtcaagttgaaggcttcaaactttgctttaattgaagcaaagtacccattccctctgtaagtgatacgcccaaaaaatctaattaattggactaaatcgcacaataatcgcataacaatcgcacatacatcgcctaaccaaaactacaaaatttataactacctagtaaaaattgcacaataatcgcatagaaatcgccaaaatgtcatttctatgtctaacaaaactttcaacacttaaatcgcataaaatgtcgcacaaaatcgctcaatatcgcatcaaaatcccaactccaaaaaaa

SEQ ID NO: 141261 - DNA, 1456 bp, Cannabis sativa
catgatagattttatttatgtccatttagtttttggaccaattcaattaataacagttatttatttgagaaaattacttgaaaatacgcatttttttaattatttatggaatgtgctttacgttattaatatgaaagaataccgagtattttataatcattcttatgatacgtttacccaaataaaaaatttttattttttttttatgaagtgacacaactgataaaacgtcaattttttttttttttttctgattgagaatttctttgtgaggttgtttttcactagcttttatcatactatttgtttttgttcttataattcttttaatatttttgagagattttgttattatgttaatgtgatgtatgtcttatttaattatttatgagattttgttattgttattgttatttttttttcacttttataactctaaagtgaatatttttgtatttgagaaataatataaaataggtcatcagttaatttcgaatatatttaataaaaaaaattgaactttccactccaataaaaaaactcaaacaaaattttatataccaatcaattttacgagttagtaataaatattttataagtttattactataagtaaatgtaacgtcaaagtatcttaaacaataaaattacataatgatacctaagatattttagcagtaacgataaaaaagtaacaaaaatgtagcttaatcaatataaacacatactttaacatattgaaactataattttagtagtaactaattgaataagtaaccaaaagttggttaatacataattttgtgtttagttaaaagtttgtttgttttatctcttaataaaatattaaagtaactaaaatgtagctttgattacgataatcttcattggtgaagataatgttacttttaattctcaaatagattttgaaggtaatttaaatgttattataaaaaataacttaaaattatcttaaacaacaattcaacataatattacttaaattgaaaccttttttaatatagttaagtacatattttttaactttaagatatcaattagtttcattgattagagaatatttttataataacatgtaattagcatattgaatgttgtttaaatttaaagtttagttggttttctataaataaaatataaaagaaactatgacgttattttgtataatagttacattttttttatgcaacaataaaaaatatgtgttctcacatatcaaaatgatcaccttaaaaaatagatcacaatgatattatttttaaaccataatgatcaacggtgtgatccgaaaagaattttgaaataatagataagagagagaaaataattgaaaaaatagaaaccaaagtcctattgtaaaagaaaatcgctcatagattacttacataaaaaaaaaaaaaaaaaaacttgctgtacacataaaatatatagagag

SEQ ID NO: 141262 - DNA, 722 bp, Cannabis sativa
tactgagattctctcttctctctcatgcgattctctctctctctctctctctctctctctctctctactgcgattcgactggcccgtgattctcttctccatcttctccaattcaattcctctcttctccatgtgcaaattattcctctgattcaaacaaaactgacctgagaaactcaacatcggcacctgcaatgaattcttaagctctcacctacaacctgcaacatcggcacctgaaaagcaatgaagctctcacctcaaagcagaaaacgaattcttaacctcaaagcactgatcaacatgcacacacaaaattcaatcaacaaaatcaagccaactccgatcgtccatgtcaacagcgatcaaaataaaatacaggtacaattatataaattatgctatgaataatataggcatatatatactgcaaaagaaaaatacaccgaatatgtgcatttcgaatataaattaaaaagaaaaaaacactagattgaaataagtttcataccaaaactatatgatcttgcattgcttcataatgaaatgttcatacttaatctagatttagactatgaaatttcacaaaaaaaaaaaaaaaaagaaaacgaaaattaaacattatgaaaaatttaattttagacgttcatgatcaaaaatgaaaagattactgaaaattatgaatataaaaccagtttctaaatacattatatattttaact

SEQ ID NO: 141263 - DNA, 528 bp, Cannabis sativa
cagcaaaggtaactacaccctcaatagtacctaccaagcaaacctcaatcgcctcctcaccacacttcccacctcccaaaacgacaacggttacggcttttacaatctctcctatggcaaaggctcagacaaagtttacgcagttggactctgccgcggagacaccacaccagatttctgccggggttgcctcaacaactccacgcaggtgctcaaagacatctgcccgaaccagaaggaggtattaggtgtgtacgaacactgcatgttacgttactcgaataggtccatgttgggaactccagagattacccctagatacgccttgtggaacaacgaaaacgtgtcggcttctaacgttgaagagcattttgataatcttagcactttattagatggcttgaaaagcgaagccgcctctggaggctctctgcgtaagtacgccgcgggaaatgcgaaggctccagggtttttaaccatttacgcactcgtacagtgcaccccagacttgtccgagcaacaatgtat

SEQ ID NO: 141264 - DNA, 502 bp, Cannabis sativa
aagatcctggataaatataattccaacatctgcatctttgggtcttcctcaagacctacagatcgcaaatcgaaacactcaagttccagtcacaattggaatgcccatgaaaattatagtgtggtaaatcctatcaccgcaacaggcgtaacaagtatggccaccacagctggctaacctgacatgagcatcctggtggatccaaggggcaggcccatgccgatctagtaggagatccaccattggtgcctcccactaaaggaaggaccaaggggtgatagcctcttagaacaactactggacctcaactccagttctacattggaaagacaagccagggaataggcgagcaaacaattggcgagcctcaccttgacctagaagaagaccttcagttagccaaactcagaaaaattgtacgtcgtccaggcctaactgaagaaccacgcactgctaattgcgatgtattcgctcagtggagacgtaaattcttgagatggat

SEQ ID NO: 141265 - DNA, 806 bp, Cannabis sativa
tgtactgatcggtggtcagttggataataccttcggataccaccgctggagtaaaaggtggaaaatgtcccgttgtggccgccgatgtagacgtttcaccagggtgagggccagtagtttcagggaataagttgacaggtctcacgttaccccgacctactccgccgttaatgacatctacgggaggtactctgcttcccgtcagtggaacgttcatcattccgatgttgatgcattcgttgttaagacccacgtttgctttgtttctagccattatgatcctctctcttaaattagcaagacagtacttctcgtttcccacagacggcgccaaatgttgtcgatggaatttcggaacaccaaaaataaataataataataagaataagaataagaataatatggtgaacaagtgcgagtattcaacctagaacgtcgagtactcaaagtaggaacacgaatacttaataaaaactggaaatacaaagaacacaagggaatatagttgtttagtcagatcacggtctgcttagtccactgttgcaaggatttcgtaggtctccatttcacggtggatcactcctttatatacaaagcaagtgtctgatcatttacaaggattgcattaattgtcaatccgttcatacattgatttacaataattaagctaaaacataaacattaataaatgaagaacagtctttactcactaaatacagcaacgcatacgacttctaatgtgcgagttggctgttcatattctggtgtaagctcgcggccttaggatacacctaacttttagttaa

SEQ ID NO: 141266 - DNA, 576 bp, Cannabis sativa
  modified_base (537)..(549): a, c, t, g, unknown or other
atatcaaacaatgaacattgggagacaatcaagagagaacctctaaaagtgacctatatgttaaatataagggtgtaaattagaacacttatatctacactgaatcagaacttattattacataaggtggttactctggggtggagaaattattctagaagggtgtaaaaacccatctataataatttagttctatcggagaagctaaataacttagtttcttttgaaagacactaaaaagttattcaaactgaagaaagttcttaactatttttatcactattctattttggatagaattatagatgtgtcttctgtacattcagatgcacttaataagtagtaaatgatgaagtatacctagaggagtaatacatctaaggaagcaatgctgcataatattttatgaacacaaaggaagtaatggtggagaaagtagttgcttaccatagccttacagttcctgtaacttgggtataatcaaatatactacacttgatatggatatcaagacaatggattaattgaaatgcactnnnnnnnnnnnnntagtgcaagtgggagtttgttggaatt

SEQ ID NO: 141267 - DNA, 619 bp, Cannabis sativa
atagagtttcatgtgaaacttagataaagaaagagagattttgattttaaaacacttagagagtttctaggtttgttttgtcactttaaatagcttctgcacgatctaaggaagctaatggtcgtgaccaaacacgctaagatagtaggtttcgaaattaccattattcacgttcaagtttgttgttcttgaacgatttcggatttgacaaggttttttcgtgttgtgagttcttggaaggtcatatttgagtttaggagaccctaaggagtagattggacgtagagaaacgggttgaagtagtccagaacgcaaaattacagtttggacaccatttttgccaatgtaccgtgtttggagaagacaatccaaaaacggccatttcaagatgaaatatcagtggtatttgccttctttggggttctgggatccctgggaacattttcaattgaaaagacgcatcgaaacgggccgtagaaggagtttgatactagccatcgccggagaagacgactacgccagcgtaacgccggcgaccgtgatctgggcaattctgaggatcttgttctcaacaaggaaattcattgaggtgcttggagtagcaagaaggtgttcttaa

SEQ ID NO: 141268 - DNA, 1270 bp, Cannabis sativa
taatttcataattaatcacaattaactgataatttccaaattaactaagcgggctttacaaagcaagtagagaatgtgtgggagtgagattatggatataacatattcgggaagcatatgaattacactcaataaataagtatcaacataagcagttctctaagaagataatactgcttgcaccgctcaactaaaaggagggtacattgaaggagaaagaattataatacatttcactaaattcttctttatacatttcaagaaaatgcatattagtgttcaacaaattcaatcaagtgtcaatcttgcagacttattcataaagtcattaccaacatcaacattggagatgatggttcacaagattagaattcgtcgattaaaagatctccacgaatgcctaaatgagggggagttagtttatattacactctttttcttttgattaagtttatcagcaaggtttttaatgaaatagtttttacgaatatccaagggggagtgttatgaaatattatttatggatgtccaaaccagtaaattaattatcaccattaatgtttggttatatttttctttattatattgatttagttttccattctttagttatattttgtataaatagagatttaccccattgaaataaacaattaaaaaaattctcatttagtttctcttttttttatcttcttcctcttttttcttatatattttatattattttatataaatataagttattagtgtggatattttataatatttattaaattatattttataatgctgaataatttatttaaccaatagtgatatgaggttgacactgtcattaaattttagctaggggtgagcaaaaaattcaagaaaccgaccaaaccgagtacaccgactgtccgaacaccgaaaaaaccaacaccgaaaaaaccaaaaaccgaaaaaaccactttcgcttaaaaccacctttgcacggttgattttagtgtcaatggcaaaccgaccaattaaaccgaaaacttaccgaacatatgtattatacactatatgttgcccctattttcgcccaaaatacgtggaccagtatgacgacgacacgtggatctaagaggcgcaactcttagatcaattgactaagttttttagcttcaagagtgtcataaagaatataccctccaagaggaaaggtaaaagctccacgtactcccggagaccaaaggaacgccaagggacctccggggggaacatgacattatttgaacagtcacct

SEQ ID NO: 141269 - DNA, 619 bp, Cannabis sativa
tataatatattcataattttcttaaaaattacaaattgtcacacattatcataaaaagaacttgaactaagaaaactctttgaatactaaaacatccctctagcgattgcaattcaaatttctcctataatatatactcaaacagttagtaattttacctcttgaatttttaatactacttaattcttccctttaaaatatacgcttactaaaattttttcataaactttatatttataaaaagagtaatttgcaacataaatacttaagtttaactcccagttgtaaataaatacctaagtttagtttttaacggtaataatacctaagttataattttgaacttttgtaggtacctgaatattattttaatttctattttttaaaaaaataattttatatttttattgaatttctaattacttttcattattttttgatacatgattttataaatataaataagtttaattttttctgcacaaactcttaattcgtttaaattatttattgaattttcatttattttggtttatttttttaagatatgtatttataaataatttttttttaataatatatgttttttgaagtaaacttaatatatttttattaattt

SEQ ID NO: 141270 - DNA, 520 bp, Cannabis sativa
ttaaaagtaacaattttttgtagtgcagccttaccccatgataaacatacatgatattttagtaattaaataaatactatatttagtttaattttatagaaaaaataaaattaaaaatattatttgataaaatttgaatgaattataatgagtttggaacaatccaggttatatattgttcacctcaaaatttgatcaaccgacatgggtcgtattaatctgatgtatgccacgtgttacacaacaagaacaataaagtaaataagacaaggatatttatagaggttcgacccctttagttagcggataatgacctactctccttttagttgtattgatacctaaagataatactattcagatcactataggtgggatctgatatagctctttattaagttacaaaacatggatcaagtaggtagatctctaacgagagaaaggtatagccttagagacgagagagagagagagagagagagatgagtcatgagagtgacttttcagttttttttttttt

SEQ ID NO: 141271 - DNA, 780 bp, Cannabis sativa
aacttgtcaatttttttatgtacaaattccaaagaatgcatcatactcttaaaatcttcttttaaaatgacaaattcagcagagaacgcttcctgcttggcagaaatatctaccaatctcctatgaaaatcataaaatttaaaagataaactatttttgtcaacagaaccttgactgccaacatcatcaatctgcacaaatttccttttctccatgccatctagattcttatccacaaagaatccatctaaatgtaaacctcaatgattcctcctcagttgggagcaaattcttgaccttaagctgcaacaaacataaaaaaggaaataaaacataaaaaacacataaataaacatatcattaacattgaaatcaaattcttaaaactaaataccttagaaagagaaacactgaagattgaattcttgaactcttaaacagaaggagcagaatcattggaccagttcagaattctaggaatacgatcatgcaatttaaacaatgaatgccatcaatgtaaagacaacattcattgaaccaaacttgaaaaacataggccaaacctctcaacctataaaaacctattctctctccactatcaactttatttattttcacaagattctttaaaatcgcattccttaccgaatcaggaaataaagaataagactatttaccccaagcatattcattaaacctcccactatcaataatatccaactctaaatcagatacttttttagagtctaaatcacttaagacaaaacactgaacaaagta

SEQ ID NO: 141272 - DNA, 506 bp, Cannabis sativa
ttaactaattaatatagttttatctaataaaactaaatagttaaatatcactttaattatacaattcataattgatagggatattgcggtaaaactactcaaactacacatttagttacacttaattacataaactaattttttggttgtaaaaccctccaaaccccacttctgttagctatttacccgttctgttcaagaaactttgttaagtgacatggtagactatcccagtggacacaagtgtacacatgtcaaaattttagtggtccacataattttaattatttaaatattataaaaaatattttttttttctttcctttcatttttttcttcctttcatctggaaccaaccgagttccttcttcttcttcacctgcgactagaaccagttgttcctccctgcgaggaacccaacaaccctagtgaaccccaggcgacgaacaccaagtctaactactctctatatctgtctctctctccttctttctctctctctctct

SEQ ID NO: 141273 - DNA, 803 bp, Cannabis sativa
ttacttaatcttaagcaagtattttacattattgttaatactagattgctatgatgatgacttagtctaaaaggaacttacagtttcagactaagataatatgtcacaacaagatatcactgagaacaatagtaagaggttaaatgtacttctatatatgaatttaaccagactcctactgttaagtgggagccatctaagatgtaatcaaatgaggaacattagaagatagtcaagaaaaatctttgataggggtgtatattagaatccttatatctacaccaacttataacctattagagatggtggttactcttggcgtgttagaattattctagatggatgtaacaacccatctataataatttaagctccatcagtgaagataaataacttcgttgtttcgaaaacactggaaagttattcaactgaagaaatttctacactgtattatctatattccatttttggatagaattagagatatgtcttctgtttattcagataaactttataagcagtaaggaattcagtatccctagatgagtaatgcatatagaaagagatattgcataatgttttatgaacacaaagaaagtaatggtggagaaagcagttgcttaccactgacttacagttccggtaatttgggtttagtcaaatactttacagttgatttgatatcaaggcaattgattgattgaaatgcactactttttttttatgttagtgcaagtgggagtttgttgggattttatgctctaaaaaaacccatttcaatctaatgtgatttgttatcaata

SEQ ID NO: 141274 - DNA, 922 bp, Cannabis sativa
atctagtgtaaaaatctcattaattagtgtcttaaatttgtaatcaaacttagtttatcaatttgttcaaaaagtatttggaagtaacttacactatatgttttcgtccaaacacaatcatttagaatttgaaccttacatgtatcaatttaaaacactaacaaaatcaataataaaaaaaattaaagattgaacgaaaattaaaattttattacttgtgttgctaagaaaaatcattgaatttatactaattacaaatattttagcccatcctaacatttaatcctagctccgcagctgcttgatcaccttttaacatcaaaaaatataaacaatgaaatatcatatgaaattaattatcattccccaattagagctggcttgtttcttctattaatctcaaacaacttaaccaaataaactatgatgaataacaagaaacttcacatcttttctactttcacgatcaaccttcttcgccgaccattaccatctcaatctctgaaaccaaaatcatcgacatattggtcgagtaccacttagcttcataacaccttgttccaatcgcctgcgaagattgctgccctccaatgaacgagtttttctttgaggagacagtgctagagatcatattgctcataacatagaaatgagattgggatgaaggctgtttcagaagttttcattactcatccttacttttggggtagttttgaagatggtaataatggtgagattaatttccctcatacaattttgggagaacacaatagagatggaatgtttaagggtgagtaaaaacacatttttgtaccatgtttcgtgctgaatatagaatcttctgattttacaatgaagttacattaaattaaaacaactcaatttgacagctacatttccatatatacatatacaaatacaa

SEQ ID NO: 141275 - DNA, 726 bp, Cannabis sativa
gtatgcttgagttcagaactaaggcaacaaaagtattaaatactttataaggttaatattatgattgttacaatatcgattaagattgaaatctcgatataagttgttgtgatttaatcttaatggagggtaacgttatgtgttggttgtgactcgattatgatcgagggaaataataggaaacaattatcatcgttgtgactcgattataatcgagggtaatgatatgaaccgattattatcgttgtcactcgattataatcgagggcaatgatgtgaatggattattatcattgtgactcgattatgatcgagtaaaagatacggtcattaccgttatgagtaattactcctaaaaccgcgcataggtttcttacttatcgtttgctgtatcgggcaacgatagtgacataagtagctcgtggttaatgagtggtaaaggtactttataaagtaccagaattgtctgattaagaagttttgaaatgacttaagcatgttattatgtgtgacttgtaactggatatatctttattataatatgaatgaatagatttttatattgcttaagaaattagtttcttttcttgcagaatcttagtgactcacgaattgtaagagttcgtatttatagagatgtaagattagagtgctttatgaagcactgagattatggagttatggtaatgtgtgaattagagtgctttatgaagcactgaaattatg

SEQ ID NO: 141276 - DNA, 522 bp, Cannabis sativa
  modified_base (327)..(327): a, c, t, g, unknown or other
tctgggtcttggtccgagtccaggttcttatccggatccctatctaggtccatgcctgtgtttgagatcaagtcctagatttaggtccaggtccgcgtctcaattccggtctaggtacaatcatgaccgggcccgtgttcttgtctcagtttgggtctgaggctaggtctgtgttcggttctaggtctgtgttccagtgctggtaacggtcttagtcttgttcaagtgtcctagtgcggcgattcttattcaggttccaattttgggtcctaggtctaggtttgggtttggttcttcgtctgggttctagtgctagtctgagtcccngatctagacacagactactggtctattccaggccctgttacccgaatcccgagtcaatatctggatcactgtcacggggtctctatctagttctctttcaggtcccatatcaaatttctgagtttgggtcccgtatcaagactagggtgcggttctaggtcccgaccctcgttctgtgtccctagtctggttcca

SEQ ID NO: 141277 - DNA, 700 bp, Cannabis sativa
tattagcctgtactgcccattttatttgaatattttccaataataaaacgaacaaaatattcccaattcactattattgtccccacctcccattgattacaaaatctccgcatttataatttatacaccaaataatattatgttatctataataaaactcatatttattgtcatttgtaatttctagaaattgaagtaaaatgaatcatctaatataatcaccctccaatttgagtattatagtttaatttgtccttattttttgattatataactactattagagcccattatgctactctatttacttaattaatttccatattatatccttagagactgattactcataatttttacaattttccctatttgcaaacagatagatctcaatccatactaattaaagattagtccaatcacatctattatcatttaaatctttaatcctcttaaataataccgaaaatgtaacgcccaaatttttctttgccttattttacaaaatactaactttgatgcataaattgaaaggatttaaaattgtttggaaatacacagcgggttttttaatcactgtgtaaaaaggagaatgatcaatattcatattaaaaacaaaataagtagttgagtgcatttttaaaataaatttacaacatgtaacgccctaatgctaaggcacgcttcagtgctttttcaa

SEQ ID NO: 141278 - DNA, 1099 bp, Cannabis sativa
catagtcctatgatttggggccatttactataatttcccttaaccaaatttacctctaaataaaatttaatttaaatataccttttcaaaacataattaagacataatttcaaatataatagatttgtgttcttcgtagatgaatgtgtaggtttgtaggaaagttgggaaaaaattttaattagagaataataaaaattatcgtgaagaattagtagaatgattgaaaaaagaggtaaacataatagattttaaaaagagagattaaaaattaaaggtatcaagttaaaagaggtatgtagtataattttctctgttcattcattatattgctcatcgtatatttaattcgcgcaaatttcatatttttgtttcaatccaatccatacaataatttaaattcaatttaatccaattcacaaaagtataaattagatcaattattttggattagttattttttaatatttaattatttaatattttttaaaatatatatttttaacataactaacaactaaataaaataaattattgttattttatgtcttcaacaataaattaaaataataaaataacaaataataaatttaaaagaaaaagaaaaaaaaatgtgtgtataaagaaatgtttaattttgttttagaatataatttccttatattaagaatggaatatgcatttgatctattaaattttaaaatatatttgtatcatatgcgttggaattttaaattcatatctcttacattaaaatattaattgtatatatatatttttaaaatatatataaatatgtatggatttgattgaatcagttacttttacatatcaatcaatatccaatctgcccaaatgaagatttagattttccaattagcacaagtgcgaatatttgcactttgcagattttgtttcactcgctcgttgcacctcttacactatcacttacacaatcagacgatggttgcaaggtggttgctacgtggttgtgcaatggtttcatcagacgaaagtttcaatcagacgatgattgcaagatggttgctgggtggttggtcgaaagttgcatcagatgaaagtttcaatcaaatgaagg

SEQ ID NO: 141279 - DNA, 856 bp, Cannabis sativa
aattatatttaattaattaaatataattaattaaattttttttaaaaataaaatttaatacttttgccggcgcaatagtcttctccttctccttcgagcaagctagaaccagccagctttggggaaattttcatcagccactcttcttgatttcaagctgattctaaccccaagtcaacctagaatcttgaggtaagtttcctcctattgttcttgtcgatttcctagatttttaagctaggttttattagttttatatgagttttcacggctgtaggcttagataagttctgagcatgatttctaagttaaattaagtttgtttgtgcgtgttttacttcattacagggctgtttgggttgtattgtgttatatgaagctaaaggaattgagtttctttcacttgaacatgtgattttgagttagagattgaactattgtaatttgaagcttgggatatattatgtttattgtattatactgttctggaaagtttggttaggtttggaggagttttgagtcgaatttgaaggagagaacccaaggaattcaggtctgccagaaccggtcgactggttggttctggtgcaccagaaccggtctaccggttgccctgcagggagaatttctgggtttttttttaggtttcatttttggtcccgagagttgcgaagtaactgtttaggtttcaatttaaggtattcattgagttttggttgtcgtgacataggaccaggatcgcccaacttgttttccactcaggtcggcccataagcttgagttttgaactaaggtaaaaaaaaaaaagtggtaagcaccttatgtggctaaatgttaatggttgaatggttatggc

SEQ ID NO: 141280 - DNA, 537 bp, Cannabis sativa
aagaaagaagatctggctttgttgaaaattttgagagagagagagtgaaacttacttacttaagtatttatatatatatatatatgtatattataataatattattatgtatggatgtttgtacgttgttatattagataaataattaatgaaggtacttattaataaataaatgaataaataattaaggagttatgtgtattgggttggtgatattgataggaaaagtttaaattttcatgtaatattgatgatccttgtgttcactgtatatatatgattataaaataataaataatattgatgagatgacatttaaaatttaaactatagaatatattattttggaccaacatttattgtgggcatttatttgtgaccttttttttttataggaaaggaaatgaaatatatgttatattatattcattaatgtaaaggctaattatagtttttactcccgaactttgacatgtactaaatcgtgtttctcgaatttttttggccgttagaaattctcccgaactattgagattg

SEQ ID NO: 141281 - DNA, 989 bp, Cannabis sativa
atagtaaactccatattaataaaaatattgttgatcatatatcaatattgataataagttgtgattctacttttaatgtttcattattgatcatactattatatttttttgagtgtacatatttcattttctttctaattcaagaaacttattgcttgtttgatattgtgtatttggtttaggatataatgcttctcctcgtaaagtttcagttttagtggcatagatgttattgaagatataaagtacaagtacaagtccaacaacaacaacaaaactaataatcaattcaatacattgtaatatttatttacttattattagttgtaacttgtaaggattctggcagaagcattaatagcattggttatgcttgtttttctctttttcccacttactgctttgtatttggtttttgctttcagggtcttccttaaccaacagagaaacactagtggagaaacaactaattttattttcttctcaacattgagtttttagatagttgttattgcagccatgtgtttacatccacatattatatagcttattgtatttagcaactatattttcaagatttattagtttgattgtttaggtttgttatgtatttttgtagtgatgaataaacaaatttataattttatgtagaatgatagtagttttttttttcaattatattaataagtaaattattttaatttattgtaaataatatttatattatgcttttaaaatctttgttgattttagtattttttttattttttattccactttaagtgtcagttttaaaccgacactagagagagttttattgccggttctaaaacgatactaaaactcaataatgtcggtttgaaaccgacactaaagaaaaaacatatatgtatacattaagtgtcagtttagagccgacaccaaaactttgactttttgtgactatggaatatgtgtcggttttgtgaaccgacactaaaagtataagt

SEQ ID NO: 141282 - DNA, 693 bp, Cannabis sativa
aaacattgatagtctttgacatcaacttgtttttagaacaaacctccaaccacttatcatacattaccttgtagtattcagctaaagaatctttgtccgattcggattcatcagattcagattctataacattgtgaacacctttattaactgaaacaatgttgtttaggcaaacaagatatctctttttctgcaaaaaaggagacatgctagaaagagcagatgttaaagcaactaattcatcatcactactttcataattattgtcactccaagtagcattcaagctatttttattctttttcaaagtattagcacaatcagattgtatgtgaccaaaaccatcacattctctgcattgaacaaatcttttattattatgcacacatttctttgaagatgagttactttctgaaatcttagaaaaattctttttgcatcccaaatttttcatgtattggcaaaaaaatttaattcatatggccaattcattatcttcctcatcaccaggactaatattcttcgaacttttgaaagcaattgatttttctttttcttttaccttattgggtttctctttctattggattttttgattaagctcaaatgttcgaagtgatcccatcaactcttcaactttcatcgtgctaaaatctttagcctcctccatagccaaaagtttcacattaaacc

SEQ ID NO: 141283 - DNA, 517 bp, Cannabis sativa
tatatttcaaaatatatcctaatattggtctatgcgaccttgtgcgaccatgtgagaccatagtatatttcaaaatatatcctaaaattggtttatgccaccttgtgcgaccatgtgcgattatgtacgaccatagtatatttcaaaatatatcctaatattggtctatgcgactatgtgcgaccatagtatatttcaatataatcatttaatacattatatatatgataacaaattatttaactatattttctaagttatttcattaagtatgtatgtgtataatcatttagtataatttataaattataattaaagtatattatataattgtataagtcttggtgattatatagttacatattttaaataactcaatcattgaattacatggtataagagttaatttttaactacttaaagaattagagtacacaatatacaagtataaattcaaggttgttcatggtcgttaagagcaaagttatgtttttatcgaagaacataaaagaccatg

SEQ ID NO: 141284 - DNA, 558 bp, Cannabis sativa
taaagacttcaatttagtgaagtatgaagagacagagctatcaccctgttggagatgagtcaattgagtttgtaattggaagacccgaggaccattaccttcgttaaagcgttcagctaagtcgttccacatatcggtagccaagtcaaaatataatatgctttgagcaatctcaggagacacagagttaactaaccaagacatgaccatattgttacatcttaaccaagaattgagatagatgttaccaggttccgggcgaggaagggagccattgatgaatgcaattttgttcttggcattgagcgccatggtgatgcctcgcttccatggctggtaattggtgccgttgaggacggtggagacaagcacaaggccgggatgatcaccggtgctgaggaagaaagggctggaatgatcgtcagccacggatcgagaggtgagtgcttggtgcgagttgtcatcaacaatggcgggaggatcttgagaaaggggatctgtgttctgagttgaaaccctaatttgtggattacggggaggaatcgctgaaggattgga

SEQ ID NO: 141285 - DNA, 1126 bp, Cannabis sativa
tcaacaagacaatatcggacctacagggccctatatcgcgcccatcggactatcttcttcaaccttcaatcgcttcaacattaaactaccatcaggcctacatcggacctgcgtcggacgaggggaaaatcgcagattcccccccaaaacatagatctgagcctaaaaacctcaaaaatcacatattctctactaaaaacacagacctaaccctaaatctaaatgctttaaccctaaatcatgaaaaaattaaggattacctttgacgaagacattgtcggtgttaggtggtggttgtcatggtccggtcgcggtagttcgtgggtcgtgtgggtggcgtggtcttaaagtcgagggggttcgtgagttgtgggtcgtgtggtggtccgattgtgtgctcctttgtgggtgtgtttacagagagcgagagagaagggaaaaaaaaagagaggggggctgttcaaatgggagggtagaatggggttttaggaaaaaaaataacctattctaccaatattgaatagtttaagtttagaaaaataattttgactgaataaatgcataattagttaattttttttttttttttatcttcattatttaaactataatgaactttcttgtatggtgtattgtaaaaggccgcatagaaaaatgattaaaagagattttgaggttgtattttgaaaggtacaacagagaaactaatttagagtatctatttcaaaataaaaaaaaaaagataaatataagagttatttgtggcgataataattaaatctatttaattattgtattttattatttaaaatatattttttacagtaataataattatgttaatattttgttgcaattagatactaatgtttaaacataagttaaacaaagagtattaaataaatactaccacatcatcattttcaataaaaaaaataatagtttgtactaaattgtaataaaatattaacataacgtattatgaacaaaaaaaaaaaaaaaagattttgttgttaaaatgcgcaaatatcttaaaaatataatttttttttgacgtggtgaagagagtcacacatgattaacaaagcaacaaaccacaatcagcctcctcgaaccaggatagctc

SEQ ID NO: 141286 - DNA, 623 bp, Cannabis sativa
gcacgaaccgaacccttgaacccagacgaaccctcgaacccactccaatcgaccccatcgactgacgcctgagcgaacaaggagacccagtcgaatcccacgaacatagcaatccaggttagttttcgtggaatttttctttgaattttcttctttaaaatgcatacatttgtggttgaatctggtattgaattgaaagttgttattttgtatgttttttggggataatttgtgcaataaaactgtgggatgaatgtgggtttcgaacaatagatttttctgggtttttaggttattgtgcgattttatgcgattctatgtgcgcttttgtgcgacgtatctggagtctgtacatgttttttgtgtttttgcgacttttgtgcgatttatgtgcgatcttgtgcgattaagttgtagactttctgtgttgggtatgttaagcgatattatgcgatgttgtgcgattttgagcgatttatagaatgtggtcaacgtcttgaattttggcgacattatgcgatttatttgcgacttattgtgcgattttactgacatcagaaatttccaagtgttacccacacgacccacacgagacccactccaagcacaatccacgaaccagg

SEQ ID NO: 141287 - DNA, 1981 bp, Cannabis sativa
  modified_base (1014)..(1016): a, c, t, g, unknown or other
  modified_base (1076)..(1080): a, c, t, g, unknown or other
taaaactttaattaaaattaattatatgtttaaattaaattaattataattattatttaattttttacaatttactactatataatgatcttttagcaattgtttttgcactttaattatttaaatttttatagcaaaactttttatagtttaaaattatacacatataattttataatttacatttgattatacttgtaatcttaattaaaattattacacttaattatttaatttttttatttaaatattaaaaagtaaaaagttaaataagtttagaaaaaaaaaaatggctacacttgttaaagtattaataatacagcagctcctctacattccaacacaagaaaataaataaattagtaaaaattataacagggcaagtatattaatttccaaaaacaaaacaaattgattttttctttcttccatactgttagcagtaacaaatgaggagttaattacattcttaaaaaaaatatctgaggctattaataatataaaattaagcaaaactcaaatttacttcgtggatttattgattgcaaagtaaacaattctaatcaagaactaaaaagagcataaagaattcaccaaataacaatattattttctacaatagccccatcactgacaaagtagctcgcgacttcttcccttttctcagaatctacaaaagtgcctatattgtgcatcagaccatgtgtcttcatcaggtacataacaactctattttagagttgttttgcaacttattgcttattctaattggtcgtatgatattcttatttgagttcataaacatccaataaattatttagtgataatcatggagttggtggataaattttaaatattcaaaggagtatttgaactctataaaagtagtcactttctttttagagtgttctcgtagtgttgttgagggaatagtttgttgttgggcaaagtcctttgagacttgtctggtccttgagttgtccgacaaaattctttgagaattgaagcctttannnatatattctgcttggaaaaagtcaaccacaactttacaaaaattttaccccagaatatgnnnnnaagtagtatttaaaaaaataactaacaaattttctcgcaaggtgcaaatcttgaatcaaatcaagtacactatattgagaaaatgtctttataataagattatgtattacaatatatatttgaattaatcgtaaagttagcaaaaagtatgaagaaaataatgtgagagtgatggttcaactacattgtgcgtaaaagagattttgtctagacatatgatgtgagaataaaaatactcaataatcttaaaaaaaataaaaaaaattcaaagtaatataatttcaaactgtaaaagatttagtaagaataacatctaactagggagataaggctaaattaccgaatagattaaccattaatgataaactaggcaatgaatgtatgtattaagtttaaaaggagaaaaaaggagatgttagaaaattaaaattatatccatatatagatatataaatatatagatagatagatatacaaattttgttatcaattgactagcttgagacattatacttagtttatctaattgtaataaaataattaaatattatttaaaaataattaattatttaaaaatttattataagaagaagattttaatttgtgtaaaaagaagttttaattttgtaataaaataaaattttattataaatattataattatatagtttaactgtcaaaataattataataagaatttaaatataaataaaaatttatttataaataataattattaaaagaggtcttgttaaatatttaattaattattttaaaaaaataattaattataattaattaatactaaaaaaaattaactcttaataacctgtatgaaagaaaaatatcactataattataataaaaaaaatataattatattataataaaatgtaatcat

SEQ ID NO: 141288 - DNA, 715 bp, Cannabis sativa
  modified_base (69)..(78): a, c, t, g, unknown or other
  modified_base (215)..(219): a, c, t, g, unknown or other
taatccattgtagagatagtctttatggtgattttgggtaatgatcttccaagaaaacaagacttaggnnnnnnnnnntttctctcttgatgggggaagatgataacagaaattggctcttgtttcttggggaccactaccaatttataacctcatagcaaggttattaattttaagtatttctaatttaacccctcaataaattagaaatatcnnnnngggtatctacacatttagctcatgacactttaatacataatgacccacaattactaaaatgatcactttattttgggctaaacttcaaatagcaatacactaatatacatatgagtccatattgaggattttaatccaacattattggtttaaaacattgtttttttacacataaagagaggtggttttggtcattttggtgatgttggtgaggtttaactttgtctttttgtagtaattgcacatgtatttggtatggatgtgtgtgtatgagccgagccttagctttcttacttgatactttgtattgaataagttaaaacttatagggaccactgattgtttagttcatgacaaatgctcatattatattctattattttctttgcagagccctttagtaccttatttactctaaaagtgcatcacaaagggagaattgattacacacttaatattcctactagttacaatggtggggtagttgagtatgttc

SEQ ID NO: 141289 - DNA, 721 bp, Cannabis sativa
caaataaatggcgaataccaagtcccgtcgcgtttcgaacaatattgaagatatttacgaaaatgccactgcttacaaactaagcatcagcatgccacctgcatgcaccataacatgcgccaccacttgaccaccacttgaccaaattgtgggaatcacttagcttgtaacgtgccatcttagcatgcacgtacactctcccccacttcaacatgtcgatgccctcatcgacaggccgcaggcaaatcttcctaatctcgactcctaagcttacccaaagcttctcctgaatcctaagtctgcacttgtccctctacttccgtagaaccaccctcttggtgacgatctcgcttgcccactcttggacttgatcaaagaccctgtgccactgtcgttattcagaatcacccaaggagtagtgcctccgcactagaataacttcccccaacatgaactcctccaagtccaacacaacgtccctccagtcaacaaagtagccaatgtaacactgaccctgaagctaacacatcctttgatagtagctcactcgccaatcgtccaatgcatacacctttttgacaaggactaggtatggtgcacccctcggggtaagtatggtgcaccccaacgacacctacaaacacgcttccactgaagccaagtccctctggacaagtccctctggaaacttcatacaccaactccatggtgcaccatcctc

SEQ ID NO: 141290 - DNA, 906 bp, Cannabis sativa
  modified_base (289)..(290): a, c, t, g, unknown or other
aagctccaaagcaagtatcagatggttgcatctctgaactctgagtaagtgcgaaggagacatcttcaatacgactagactcgtcatgctttgcacgtttattttgtttggaatgtgggactatggaatggacatttttggatccaatgtctgactcagtatcagcatagttggcgctagtaaattcattatgttggggaggacatctctctaaaacttcttcagggttggagtgaagtaaacgaatatttttgattacataatttgactcctcttctttgaatggttnnttggacaatgttgaatgaatggccttcacagacctccctaagtatggaaggcaacttctcacccaccaacgacagtaccaccatgtgcattgacccatacagatagtcctaggaatgtgaaagtggatgccagtatttctccttaatattaaaacccaagctttagcgatttcgcttattccacactgcctcctcctagggatactcaaacaaaacttatctgaggacacaccttgatcaaaaccaaactggcaagcaaatttgttaggataataaagttctaaatatgcatcgttacccacacttacgggtaacaaagaagaacgcatagaaatcaataactcaaatttctcattagataaatattcattatccagaaagtctagatcttattccatgggaaatgaatatgactgatgcatgacgtaaatttctccccttaaaatatgtctagccccattcatgcttcgacgtttagcagggatcccagcatacttacttaaatgaggaagatccataagatcccaaccactatagagaaggaaaaaatgctcagctaaccaacctatcacataatgcatatgtaagaaggcttgacctcgcccctggccatgta

SEQ ID NO: 141291 - DNA, 513 bp, Cannabis sativa
  modified_base (36)..(39): a, c, t, g, unknown or other
ctacaattgctgacaatcataatcatagtcgtggtnnnnatcataatcaaagtaatagacgtggtcatgaccataatcaaagtcgcggtcgcggtcgcattcgaagcaatatttggcatcgtaatggctaaaataaaattcgtatactccaatgaaaaacacaactactgagaacaagggaaaaggtcctcaaaataataattgtagaaattctaaaaatttatgttccagatgtggaataaaaggacactaggcacgtgcctatcgtacgacaaaacactttgttgatctttatcaagcatctgtgaaaggaaaaggaaaaatagaagtaattttttcctatccagatgatggctttcgaaagagcttttggatattacacttagatgttgtagatgatttttttaatgaagatctcattaattgcaacatgaatattgatattacagatgggaatgtccacaattagtcacttttctttgttattttttttttattattatttatttactt

SEQ ID NO: 141292 - DNA, 659 bp, Cannabis sativa
  modified_base (26)..(50): a, c, t, g, unknown or other
  modified_base (170)..(177): a, c, t, g, unknown or other
tcttaagtcaatacaaataacgaggnnnnnnnnnnnnnnnnnnnnnnnnnggctgaacctctataaaatttttgtgtctttatattgctttatcatatatttgctgctataaatcatttattgcttataaaaatagactcgttgtccttggctaaaagcgaggtcaacannnnnnnnctttcattgagagaaggatcacgaatcgctctttattcaacatctaatcacaaatacgatggtgcaaactcatagaggcttgactgattcagcaaattcacagaggttggatcctagatcgtagaacccaagaaacataacggttctgccaactgttaatcctagacagccggcgaacgtgttgaatggtgtgacaattcctatagatgaaatcacgcctggtgtgcaagagactaagaataacagttccgcacccaactagttcatccataacacaattgtttctcctggagccaacgcccagacgaccatcaaagatgccactgaattacaaaatctccgtgatgctctccgagtcatgtagggtcataataataccctagatcatgattaggacgacctacgcgctgcagtaaatctcgcgttcgacgaacaaaggcgtatgtttgccgaatggagagatagagagatggaggcattaa

SEQ ID NO: 141293 - DNA, 1335 bp, Cannabis sativa
atctaacattctctaacattctcaatagtttcaatagttcagaatagttcagggagttcaggggacattcaggggacatttttaacgaccttaaaagttcatgggacatgatttggtccatgtcaaagtttgaaggacaaaaatcctaattagccattttattaattacttgattcatatttttctaaaatattgtataaaatatttataaaaagtaggaaacttatcatatatactatttttttttgtcaaatttatagtttgggttgctttgatggttttcatatgggttgctatgtgaattttggttacgatttaagttgctccgttggttgtgttgagaaaaactataaacttcaagcgtagcgaaataacaaaaaaataaaacaaaggaatttactcagtttggtaaaactaccaaactcacaaagagagatatatttcacttaccacttcaaaattacatatactttctatctcaatctctccacccaaattctaatacaccaattgcttcttcctcactctcgccacataacgaaactcacacacttctcttttcacaagtcactatctttttcacactcacacctcacacacaaaacacatatttataaagttacaaaacttggacatcaagacaacttggggaccaagaaattccaaagcttccttaagaagaattttcaaaacttggccaccaagactttccttttcccataatgaataattacctaaaaaaaaaagataactttacaaatatagataaataaataatttgagtcaaactccaacaatttccaccttgactcaaattctctaaactcacaactcaaaccattaataagagtatatatgaaacgaattcatactctcattgaacttcacttgagcatttgtcttcacattattcaatctttcattgatgtcccctttcttcaaacaactttgaactgaaattggagtcttctctacattgtcacattccttcgcactaactaaatgccttaaatgacttgacttcaccttcacaactccacctaaaatagtcttcccgactaatttatacaaatttcactctttcttacccttcacaactaccaagccacctttcttgatagttatttcaccatcttttaaataatagacacaacctcgagtatctaaagctcccaaagagattaagctcctccttaatgttggaacatgtctcacatcagttagtgtcctcacaacaccatcaaacattgtcaccttaacagctctattcaaacaactttagagctagaattattgctcataaaaacaatgcagccatcatatgccttataagtg

SEQ ID NO: 141294 - DNA, 2022 bp, Cannabis sativa
aaagatatacaaagtcacaatattagtcactacaaacaactcgacttatataagaccaagttatctcaaaaatttagacaaaataacttgagaccacctttaagagctatcagatataaacaaccaattggactaaaactatctacaaaataaatagatatagaaaagtagattagcttactatacaacgataatgttgtgaatttttaaattaaggatcaaacgcaattattatttgaaaaattagcaatttgtttcctgaacttttgacaatactgattttgctccctaaaatatacgacttgttaagatttcccctgaacatttacatttacagagttttagtccttcttttaatttttcgtcctattattatgtttaaatactgacatgggttggagtctattaacttcgaatttgacaagatgtattaagaatttgaaatcactagacgcgaaactgcagtgaagaccctaaaataaaatggcattgctgaaaggataaaccgaaccttgttaaaaaaagttagatgtaaactgtttggttctagattagaaaaaccattatgggggaaagctctagcaactgcaacataccttgtaaatagaagcccaaacagagtgatagacttgaaaataccttatgaaatgtggcacaacagaacccccaacctaacgcagttaagagcttttgggtgtacaacatatgtacaccaatccattgacaagctggaacctagatccgtgaaaaaaactttcttaggctatgccttaggaaccaaggggtatagaatgtatatttctaggaagggtaaactagaggttgtgattgctagaaatgttatttttaatgagttgaaatatcctcacttgatctccaaaaaaggtagtatgtctctgtgtgatgcaggaaaaatagaaaacaaagacactacaagtatggaaatggagtacggaatgaagctcctggaaggaggttcacaggagaaagatagtgtggaactggaagacaatgcgcagacggaagttgttgtggaatcagaataacaagataaagaagaccaaatagaggtgccggaagggttcggatagacaagtctagaaggttatcagttggctcgtgatagaaattggagagagattcacccttcaacaaggttcgtggaagcagacataatagcatttgcactggtagtagttcaacaaacaaaaattgaagaccccaaaagctatgaagaggcaatttccggtggaaacaagtctaaatggcttcaggccatggatgaggagatggattcactccagaagaacaagacttgggtagttgtgccaaagccggagaacaagaagattgtagagtgcaaatagattcttaaagtgaaagagggaatcaatgagaatgaacatatgggtttcaaagccaagttagtggctaaagattttacttaggtggaaggtatagactatactgaaatcttcccacctgtggtaaagtataaaataataagattaatgttgtctttagctgcttaaatggagttcgaggttgaatagtttgatgtcaagactacctttctgaatatattcttgcatgaagagatctacatgaagcaaccacctggatttcaagtggaagggaaaggagttgaattagtgtgcaagcttaacagatccctctatggtttgaaacagtccccaaggcaatggaataagagattcaatacgtatatgcatcaaatcgagttcaaacgatccatgtacgatcactgcttatattttaagaacctggatcaatctacggtcgtgttcttattgctctatgtggatgatatgctcatcatgagcaaagataaatctatgattaaaagcatcaaagccaagctcaaaagagaatttgagatgaaagagcttagacttgagatacttgctatcgaagtctcacggaactggaaagaagggactattagcttaaagcagtatgggtacattaagaaaattattcagaagtttaacatggaagatg

SEQ ID NO: 141295 - DNA, 584 bp, Cannabis sativa
agaaattcatgaaatttcttaaacatttcaaatttctttgcataaggtaaaatctagagtaatcgtcttaagaatttaacgataacttatccacctctaaattcacatccatattcgaatataaatgatcttactttcaagtggatatagacatatttctctttgtagagaatgatcttgtcaaaatcactatgaacaagatacaaatgccatagatatataatattcgtggttatagtttttttttttttttttgatgatttagatatagttacaataaagagttcttagaataatccaagtggattctggtcatagaatactaaactcatattccatacattaataaactattcgaatccattgacatgaaatggatattaacaacttgtgaaagttatactgtattgtattctaaaaacatttctatgggaatctaaaacttaaagtcaaagccttaaatttatactaaatattgcctgagtaatgattctttcttggaccactactactaatctaactctaagtttaggttgccttaagtaagcatatacaagtatgagatttctaagatcgatgattta

SEQ ID NO: 141296 - DNA, 1129 bp, Cannabis sativa
  modified_base (26)..(31): a, c, t, g, unknown or other
  modified_base (302)..(309): a, c, t, g, unknown or other
  modified_base (936)..(951): a, c, t, g, unknown or other
aggatgttaataaaacatacttggtnnnnnntctagatcctggtaaaatatttaaaacagttataacattctccagcagtctactggtttcctctcagacaccctaccccattcttcgttggaaacttcaggcacgagtggaatatcgatgtgacagcctttaagtcatacagaggtggacgacctagaattatgttaaaggctgaaggaacatctaataccagaaattgtgccataatagtcatgctcgtcggagcttgtccaaaagtgagggatagacgaatttgtcctagaggtgcgannnnnnnnccggagaaaccatatacaggcaggagacaagggttagatctttaagctagagccccataatttcataggatgttttgaataagatgttggaagaggctccattatcaatcatggttctggccacaatcttgttagctatttggacctccataaccaacgggtcgttgtgcggaaaccttattttaacagcgtcttcatcattgaaggttatggtaggccctcctgcctgtgggattttaggcttcctttcttctacgaccaggatcacttcttcttgcatgtgctgtactgttcgggcatacctctcccgagctttgcctaaatctccagccatgtgcgggcctccaatgatgacttgcagatgtccgtctaacggtggaggtagcaagtcttggttattgtcgttcctttgattctgatcgaccttgacatacttctgtaaatgtgggttatttttccttatcaggaattcaatttcccgcttcagattgtttcatgcattggtgtcgtggctgtagtctccgtgaaatcgacaaaacttggtcatgtctctcttgctgacatccttcttcatgtgcgcgggctccttatacgggactagggactgagtggccatgtaaacacttnnnnnnnnnnnnnnnnagatggtaaatgtagtgtactttgcttgattctcccagggagcttgctcggttttgccggtgaactttccctttttcctaagctcggtcagccttttgttgttgttagaacgtttaccatttgagcttgaattatttggataatgggggaattgggcggactttccactagaaggagc

SEQ ID NO: 141297 - DNA, 867 bp, Cannabis sativa
  modified_base (102)..(103): a, c, t, g, unknown or other
ataaaaatgcattttgaattcaaaaataacagtataaataattatttaaataactataaataattttcataattaaacaaaattaactgctaatttccaaannaaactaagcggtctttacatagagattgaagacttactcttcataaaaaaacactttaatgtaaccctattattaactccagaatattcctaccaagcttcctcttcttcaagaggaacacggtggaaaggagtaaaagtctgttgtatctgtatttgtgtaaacaatgatcgtccaatgagcctaataaaataaactcgtggactaagaataattaatgtctgaatcatgtaaaaatctcttgtttgttattttattattcacaccttcattactttcttaagctctaaaaatattcggttgccgaaaaactcggtaaacacacatatattaccaaaaagaatgtaattactattatgcactcataaatattaaaacctagtttctagaagataaaaaaactaagagactgtttggcttcataacttaaaaactattttcagttttaaaaaatagaaaacaatttttaaaaactaacagggctcatttggcaaaaagttttaaaaaaattagaaaacaaaaaacatcaaaatgttgttttcaattttcaaagatatttttttttgtctaacatattatattttatatttttgctcacatactcagaccctagacccagaaccaaacccgaacctagaccctagacccggacccggacccggaccccgacctagaccctagacaccagacgcggatgtggatatgtgttggatatattttaccaggatctagatttcctaccatgtatgtttcattaacatcct

SEQ ID NO: 141298 - DNA, 710 bp, Cannabis sativa
  modified_base (68)..(68): a, c, t, g, unknown or other
  modified_base (332)..(341): a, c, t, g, unknown or other
  modified_base (443)..(448): a, c, t, g, unknown or other
ctcgccattgggatcactacaatcaagtttctgtcgagacatctccagattcaacaattaaagacgtntttaatacacgatatttctgacccagtaagtaggaaaattaaagcttaatgattttcaaaatcatgcacccaatttacattttatgatatgtaatcagatcccacgatttaagagataatgactgtaatcatattttggtcagctttgtaattaactgccattatgcaattataaatagtgccaaacaatctcaaaaaaaggacgaaaaagctcttatgaaagaggccctaaaaaaatactcagaaatttgaataagattgacnnnnnnnnnntgcagaattttaactgcaaaactatgtaaaaaaccaatgttcatatttttatttttgtataacttttattatttctgtgttgaattatcattgtgaggctcnnnnnnggttaacgaaaatctgcgttaactcctattattggtataatagttttatatcaccagatatttgtatacagatgcttattcatggcagatgctagttatttggatttcatcttatgaacaatgcgtattggtttaattttgattgtgtataaattataatattagaataataaactatataatcattgttattgcttttcttgctgagtccttgtgactcacgggtgctatgtggtgcaggtaagggcaaggaaaagttaga

SEQ ID NO: 141299 - DNA, 828 bp, Cannabis sativa
  modified_base (50)..(52): a, c, t, g, unknown or other
aaaaggtaacatttcaggtaacaatccctctaaacctttttcatctaacnnnaaaaaaggtattcaatgcagagagtgtgaaggatttggtcttactcaatcagaatgtgctaataccttaaagaaacataaaaaaggattgaaggttacttggagtgatgattctgaaagtagtgaagatataaaagaaaaagttgctcaaacaagtgttttgtcaagaaatttgcaggaaaaaggaaaaaccatttgcatgaataatatcttgatcgatgacaacaaggaaaaagctagatccgaatcagatgagttagaaattgatgagaactctatggatgaatcttacaaggtaatgtttggtaagtggttggacatatgtgctaaaaaacgttccctggttaaagataataaagtcttgtgtaacaacattaatgacttggaagaaaaaataaaatgttgtgaagctgaactgtctttaaaagaatctaaaattatttctttaactaaggaacttgaaaacattaaaaagaatgtcaacatgctaaatctgggttctaacatttttgaaaaaattcaaaaatctagccaaaaaaatcatgtaggtctgggttatgtttctaatcaatatgatttcaacacaacttttgttaaatttgatatgcttgtttcaggaagaactatttctaccccgcaggattctatcactacagcaaaacaccttgctgttacagaaaaaaagcagcacggtaagtttgacaattccaaagggaatggaagaaatttcattcctattttccatttttgtgggataaaaggtcacattcaacctaa

SEQ ID NO: 141300 - DNA, 527 bp, Cannabis sativa
gcggcccattttgcggtgagaaagagaatgcattacctcttggccaatgataatgttatctgagattaatctgtttggaaggaaagcactttgggagtgggagatcatgcgacttagaatgggtttgagacggttaactaggacccgagatatgatcttgtaaatcgtggagcaaaggctaataggacggtagtccataatctgctcaggatttggctttttagggataagaacaatgagcgtattattgatcgcagcaatgtctgcatctccattcaggaagctttgggcagcattaataacatccacccccaatagatgccagtttttttttaaagaaacaaccattgaatccatctaacccgggtgctttatcatttgcaagttgaaatacaactttcttaatttcattggctgaaaaagtggcctgcaagagtccaacttcatcctcagttaggctttcagtgataccagataaaacagagtcaatgatatcatcctcaggtaattggctttggaaaagttgg

SEQ ID NO: 141301 - DNA, 674 bp, Cannabis sativa
tcttgacaactcacgtttatctgtgatggggtccatccaacttggcttttgttcaattgcaaccaccgtatctttgattttgatgctcggctccgcgaggtgttcaacgggtactacccccagtctttctatttcattgtccgataccaacttggccaaacagtctgcgtgagcatttttttctctggggattctttccactttgtactccgtgaactcatggagcagttcccggacaatatctacgtacgcgaccattttctctccacgcgtttgatattctcctgagacttgattgaccactagttgcgaatcgctgaagacttctactcttgtggctcccatggcttttgccaacttcaatcctgcaattagggcttcatattcagcttcgtttttagaagctgggaatgcaaaatgtaaggttgcctggagtcgaagtccatctggcgatatcattgttatcccagcaccggatccgcttttgtttgacgctttgtcaacaaacactttccatgctggggttcgcggtactgacacgcttgaactagcttctgcttcattacactcttttatgaagtttactaaggcctgtccttttatggaaatgcgtggtacgtagtgtatgtcaaactagctcaattccatgccccatttgaggagtcttcttgacg

SEQ ID NO: 141302 - DNA, 507 bp, Cannabis sativa
ttgaatcttttctattgcctcgttggtccgttgtactgattcgaacccaagtatttcttttctcccgtttcataccagtgaatcagagatctacactttttgtcatacaacatctcatagaaagccatcactatagtattctgatagctattgttgtaaaaaaattctattcgtgacaaatatcaactctgggagctttcaaaatccattacataggctcgtaacatatcttccaatatttggattatgctctcgaactgaccatctatctaggaatggaaagatgtactgaactttagctttgtacccatggcttgatagagactttcccaaaatatagaagtaaacttcgaatccctatccgaaataatagacctcagagccccatgcaaaccttaatattttcttcacatataattaggggtgtacatcaaaccgctcaaatcgcccgcaccgcaaaaaaaatgcagtttgaaattcttcgcggtgtggttgcggtttgaattt

SEQ ID NO: 141303 - DNA, 694 bp, Cannabis sativa
cttataaaattaaaatctaatagtggtgtataagactatctctaatagatgatgtatatttttttattaaatttgacttaaaatataccataaaattatgtttgatccaatttttgtatttgtgctctaataaataaggtgcaaattagctatataaaagtcaatattaccattaattaatgctcattaacaatatacaaagtaattatttttatttatattattttaatatctcataaatatattttattgaaagtcaatgaatagtattaataagtgacaaagagataattaaaaatataatatttattgtgggttaaaatttggcccatgcaatcttttgagctaaatttgacattatttttagtttggaccaaatttgacacacattttacatcattattagagttaaattttagcaaaatattcaagaaaaaaaaatggcaatatatacaccatatttatacatattaaaagttgtgccaaatttaatacaaatttagcataggctgaattttatcacaatagatatcatttttttcgtatacttttgtatcactccttaatataattcaatcattactataattcataacttttcatatttttatttatatatttaagggtttgtttggtacactgtattacaccaactgtattgtataatattatattgaattgtattttatgcaat

SEQ ID NO: 141304 - DNA, 583 bp, Cannabis sativa
  modified_base (410)..(414): a, c, t, g, unknown or other
agatgagctcctgacccccgtctcctgcaagcactgcgtcaagcgcttcgacgacggcgtttatatggcctggcagtcaaatggccaaagcatcacgctcgacttctatccgaagcctgaggaggctcttgccaaattcttggagaagaagaagaagctcgatgctatgcttgaagcgtgtcaaggccctcgccttcctcctcgtaccgattaggccgccaagttcatttcattatatctctttttctttcttttatttacagctatttttctttcctttaacacaatcttaactaggtagctgttttattttctaaggggagacaattacttatggcctatctttgtattacatatatttttttttcctgcccttagggccagaatattttatatatatgatccttttnnnnnatgcatattctttttgactttgttttaacttttggcctgttttacatctatttacatatgtccgtgtggatgccttagtacccccctgagtggcatgaaaactttgtttttaaggtacgcagttttatttaaaatttagaggttgcatacactttgacggtacaaattc

SEQ ID NO: 141305 - DNA, 682 bp, Cannabis sativa
tttctcaaaaataatattgaaaaaatttaaaatccaaccccttaaaatggatgtactgatgtaacccctaactgtttcggtatctataaaaaaaattttgtgtaaattttttcataatgtgtacgttatacttattcaagataacttacaaaattttaaaaaattcagaaaaatttaacacattgaaaacagtgttcaaagagtgttatacgcgtttattttatacgcttgtgaaataaacggtttaaacattaatttctatattgtaaattatttataatttctcaaaattttgcaggatgtcttaaataactacaacgcacacgactatgaaaaaatttagactaaaaaattcttatagataccaaaacagttaggggttgcatcactacactccttttaatggagggtattgtcgaagcacccaataatgtatacataatttagaataattagcaaattttacctctaaatttatattactacgaatttatgctccctaaaatataaagatattaaaaaaatctccctaagatataacctgtatattattgtaccctttctattaagttttttaactagcacccgtgctcttggcataataatttgatggtagttgaaaatttattaatacccctacacaacaaaaagagtttaattaaaaataaaaacaaaaaatacg

SEQ ID NO: 141306 - DNA, 755 bp, Cannabis sativa
  modified_base (224)..(225): a, c, t, g, unknown or other
ttttttaattttttatgagttattatgggttattggtatatagattttgttgtacagtataattttgttttgttgtatagtatattataattcttagataatatttatttcttattctgctacatataatagtggtatataatttttttagtataataataatattttaatgtatgtatataattttattgacatgctatatatatttaattattatttttatnnattttaattgtatgatatatatttattttaaataatatttaattagtttatattttattatatacaatggtagtatataattttattgtcatgttatatatattttaattgtgatatataatttaattagtatagtatatgttaacgtagattttcgttaaccaaatttgagcctaaatgataaacttgcacaaaaaaataaaaacagtaaagaaaagaaaatgaacacaaaggctttttacgtagttttgcagttaaaattctgtatattccacgagtcaatcttattagatttctgatagtttttcaaggcctttttcttatgattttttcgtcccttttccagtataacttaccattatttataatcacatagtaggtcgttgattatagagttgactgtaatctttataacaattatcccctaaaaatggggatttctgttggaatatattttgtcaggatctagatttactaacaagtatgttttttaaacatcctaatatgaatttctaaaacgatgaaaataa

SEQ ID NO: 141307 - DNA, 1111 bp, Cannabis sativa
acaagagtccaagttttcttcttctttagagcagtcatttctgatcccattgcagcattccacttagggttggcaagagcttccttgagggaagtaggttcatgttcagtgtgtgtattagcaagaaaacttctgggtttgtaaataccaagtttagatctagttaccatatgatgttggtttgttgtgtgaggttgaacctggacagtaggtatagattgtgttggagaaggggaagaactggtggctactgtggactgatttggtagttgctgagttatgattggtggtgtttgatttctggtaggagagacagtaggtgatagggttgttgtatcaggttgtggtggaaggacaagacttggaagtggaaaagaaaattggttactggtttgggcaggggtatgtctaggtgttgtgggaaataactcattgtagggaaattcttgttcattaaaggtcacactcctagccacatagattcttcctgaaggatgtaaacatctatatcctctaaaattggggctgtatcctatgaatatgcatttagaagatcgaaaagcaactttatgagatgcatagggtgtaaggagagggaaacatgaacaaccaaaaaccttaagcaaattataatcgggtgagtgatgaaataatttttcataaggtgtttgaaagtgcaagattggtgttgggagcctatttatgagataggctgcagaaacaaatgcttcccaccaaaaggataagggcattgtggcttgggacagcaatgttaagcctatatcaacaacatgtcgatgttttctctctactcgaccttgttgttgatgagtgtgaggacaagaattcctttgaacaatgcctaggtttttaaagagtttgtacaagggttcaaattcttttccaagatcacattggacagcctttattttagtttgaaattgcctttcaacaaaggaattaaattgacagaatagggtactagcttcagatttggatttcattggaaaaagccaagtgaatttagtaaaatcatcaagaaaacttatgtaatatttgaaaccatcagctgaagtatagaaagaagggccccaaacatcagtaagaatta

SEQ ID NO: 141308 - DNA, 856 bp, Cannabis sativa
  modified_base (641)..(650): a, c, t, g, unknown or other
  modified_base (801)..(805): a, c, t, g, unknown or other
gggatagtgcctcacccaaggtcaatgcgagttcaattataccttgacaggcgatactttcgccagtgaatctgcatagatttaccatgcaaggcctcaatttggccttttcgagccgcatcttcatcaatgtttccctgtttcactgaacacccgttatctatcaacaccctctttatccttttattggcgagttggatagtaatcaccaatggatcgacgtgagggtacctcatgttcttctcatcttcctctgaagatataattggaggttctttagtttttaccttcatggaaggttctggagcaaatactgactgcacatttttcatttccttcacgtacctcttttgggcataactgtaacgccctaacaattaggcatgctacttgaggtgattaagaaatgttaatcctttaaacggaattactagtaagataaccgcgggaaaatttaaacattaaacgaaaacagaatgaaaataaaacttgtaataactttaactttacaaccaaaatgacatgttttgggatcccaaaatattttataaaatattacctgtcctttccactagtcgacctaagcgacaaaatcagagttacaaaagcacatcactggtagaccgcaacccgcttggtcnnnnnnnnnncgaacatgtacatacatcgcccagctttagcacttatggctgatgagagacagacttatcctatcctgcacagtagagcacccgtgagtcaagaccagcaagacaatataattatcaataatcatcattaacacatcacataaatattaannnnntttcatatctgtctgtatgacacagacccgcgtgttacactcacacgccta

SEQ ID NO: 141309 - DNA, 1923 bp, Cannabis sativa
  modified_base (714)..(750): a, c, t, g, unknown or other
tacaacatactgaacccaaccctctctcacatgaagaaccccaactgtgaaggcctatttgccttatttaaataattgtattaggttaattataatagtttaaccaaattaaaattgattagcaatacaattaatttttaaaatatatgaaatttatttttcatcagattattttgaaattaatttaagaaaaatacacttagtttaatgaaattaattcaagataaactatatgtatttttttaatatttaattaaataaagaagttataactaattagattgttctagacacttgattatttaaattttcatagaaaatatatttaagttgaaaataattttttttaaaattaattttagaccaacttaaattagaatatttttaaaattgataattaagtaaattttttctagaaaattagttatttagatattctttgaaaatatatttaatttaaaaattaatttgaattatttttagataaacttaaattgggatattttttttaaattaagttgattagtttaagatacttaatttgttatttaattaaatttttaaaaattatttaagttgaaagtttagttattttagaacaacttaaattagttatttttcaggtatttattttatttaattttgaaattatatatgatatgttatatatatagattttcgaaatttaccttgaaaattaaattaaagttgaannnnnnnnnnnnnnnnnnnnnnnnnnnnnnnnnnnnngtaattttcattattaaaatacatagttaaaatatatgatattaaacatacattttaaataaagagctaacataagatatttgatctccattattggtcttacatggttattgtttcaatgtaacctcaagatgttagacttcatcccccttatagatagttatccattaaagcattaacaccgtaagatctcgaatgataagtattttgtaagttttattttctattagactctcccctatggtgactacttagaaataaatttacaaatatgaaacaatagtagaagctcataaaataagaataaccttgactctcgcctgccgagaccacattagattcttattttgattgaataaaagtttgctaaaacattgtttattttagatgagctgactactctattcaactgatgttatctttgactctcgcctactgggacactgtatatcatttagttagaaaccttagaaataattcaaatatgtttttgattttggtatttttgcaaacatattttctatacttgttattttctgaatatgtgtatgaatttatatgaaccaagtaatttatttctatttattgatatttgtagtgtcaaaatactgtttaatagtcctcatctactcaatacatttgcaaatgaactccaaagtgcgaagatgactcttggtcagagtatcacttcacgcttgctcttgatgaacttgaaattctagaaagcaactatgctaggaattgtcttatcaagggagcaaagagttcaatttattctcaacagcttatcacttgagtttaacgaatttgttgtatcttttatgataaaaaatttgaactcgtctgacatagacaagctggacactgaattgcatgcttatggaaggacaattttgattgcaaggagatccttctccagtattgcaggccacgacaagagaaaagctaagaaaattgagaaagattcctctgacaatcctacaacttctggttcagttgaaaagattagagaaagtgcttttacttcctcaaattatcttacacaatagattgaaccaacaataaaaataatccaagaacagttaagcagatataatattcaatgtcctcattgtaacagaagggacattttaaatcaaaatgtcccagacttctcaacactaagaacaaagg

SEQ ID NO: 141310 - DNA, 855 bp, Cannabis sativa
actttcaatatatttaatctttttcagagaaataaattataaaagttagttttagtcttcaattaatgatgatattactatataaataaataagtatatagtttgaaatgttacctctttagaataatctattatttatattacattagatcttaaaagttattttactttatattacacatagtttttacaaataaataaattataagattatatgctgaaataagtatattatattaaattatacgcttttagtgttgtcatttatttcatataatcttacactaaaaaacataattattatttttacgcttggatggacgacttgtatgtatcaatgacttataattagctatcacttttgctttcctgtcatatatgttgttggattgatattgttaattgtggtatttatactgtttaattctataatattgtaagattaataaaattaaaggtatattgttacaaatataaatatttgataatagtataagttaaaaatattaaatgcaatattatgacataattaaaaaattaaactttaagaaatagtaatattgcaagtaaatagtaaaataaaattataaggcatataattataaaatttttaaaaaaaagtgtttctttttgaataagtaaaagttttgttttatttatatatttgggtgttcaatgttgattttttttttttgaacttttaaaaatttttaatgtattaattatttttttatacataaatttaacaatacgatttttttttgtatatatttccacatggtgctgatattattatttttaaaaactaaaattattatctttaatttctattttgaataagaataatattttgca

SEQ ID NO: 141311 - DNA, 570 bp, Cannabis sativa
  modified_base (499)..(516): a, c, t, g, unknown or other
aatatatattattcacataatattatatattaccatattttaatctacatattattatattaaaaataatataacagaaatttttttttaaaaaaatatatatagttatacgtgatttaagtaaattaatatatatagaactaattatattgtatacatgtatgaagattttgaaataaaaaatcaatatatatatatataattatacgtggatgattttgaaatatagatttttaaattattattattaataataattaataattttaaaaaagtatgaataaaaaatttaaaaaaaataagaaaatagatagaggtgtttagaagaattttagagtgtcatatcaccgtcttatacttctcctttatatatatattaggaaacaaaccgcgcttcgcgtgcagttgtaataattaagtcataaaactatatcaatttcaaaatttgatattttttatttaacttttctaataataaaagtgttgaccgaggttttcnnnnnnnnnnnnnnnnnnattataataaagagctgtaagaaagtgagatgaagattttttacgtggttgggg

SEQ ID NO: 141312 - DNA, 508 bp, Cannabis sativa
  modified_base (272)..(274): a, c, t, g, unknown or other
tcttgtgagaaattttcagttgcttaccaagttgacatagtccacattttccctaaaactccttacctaatttaggtaatcttcgaacaattcctgcgttatacaatctcttaagatttttaaaatgaatatgaccaagtttttcatgccataaatcagtaatattatcaatgacataatgacaagtagcatacgtagtgagagtataacaattgtcactatatctgagcccttgaaagacaattttatcaagaatattatacacataacannnattactatcaaagctcacagtataaccctgatcacaaatttgactaatgctaaaaagattagcttttagtccatcaaccaacatgacattcttcagtctaggaagcccttcaaaattgagagttcctatccctattacttttccaacaagactgttactaaaagtaacttttccacattgcatgggtctaatgttctcaagatattctttttcacctatcatgtgtctagaaca

SEQ ID NO: 141313 - DNA, 967 bp, Cannabis sativa
acctagaaacatgataagacccatctaaatcaatttgacctgtgtgagcctatatgtttgcttttggacttagatgcatatagaaagctcatttacttctagatatcgacgaggtgatcaaaatcacacaagattatcaaagcaacaatccacaatcggtgacggcacctcctcgaaccaagatagctcatcgtctaatcgaagggcatgctttgccaaaccatgcgctgcagaattctcatcccgagccacatgggacaaaattgctcctgcaaatttagacaataaaactataacagcaccacatcacattgaaaaaacaccttcccattattaactagttgtcttcagagcaaagtgaaactgaaaaaatttcaacaccaaaacaaaaaatacacttatattagaatgacaaccttcaaaataaaataatatacaaatttataaattaacacacacttcataactctagctctcagcaatactaaaaaactaaaaaatcaacaaaatttctaagaataactagccaaatgtattaccctttggctagtaacaacaaactagcaccctaatataaaaatgttgaaaataatatcaaacaaattatgcttaaaattaaaattatcagtaattctctgtaattgtaggcgccctccacaaaataacctacaaaataacaaaaaaaataaaactctattaccacacaatatataatgaaaaagataatgttaaatagcgatagtaaactaatccatatttaatataagaacttaaacttgaaatacttatttgtcaaaagaggaaaagtcgttgaaatagaaatcatgagcacaaacttctcttgccaactgaccaaaccacaaaactactctaaacaactagggacaagccataaaaatggcacaaaagccataaaaggcacaaaagtcgtaaaaggtatcaaaactattaaaaaatagtgcaaaaa

SEQ ID NO: 141314 - DNA, 1259 bp, Cannabis sativa
  modified_base (1033)..(1033): a, c, t, g, unknown or other
tgtacactcatgaatgaagtcttccatgaagacttagacgagttcgtggtggtgtacctagatgacatcgtggtttacaatgccaccttagaagagcatcaaaaacacttggctacggtgttttggaagttgaagaaagagaaattatatgtgaagcgagagaagtggatgaccacagccaatgtgaaacaactacgctcatttctcggtctagccaattactatagacgattcgtggagggctattcgagaagagcggcacccttgacagagttgttgaagaagggtgttatatggacatggtctgagaagtgtgaagaagattttgaagtttgaaagaggccatgattgaagatcctgtattagccttgccacatgtatgcaaaccctttgaagtacagacggatgcgtcagattatgctttgggaggggtactcatgcaggagggccaccttgtggcatttgagaatcgcaagctttccaaagcagaaaggcggtatactacgcaagagaaagagctcctggtagttattcattgtttacgaacgtggaggcattacttgttggggtcgaagtttgtggtgaagactgacaatgatgttgttagtcctttcctcacgcagccaaaacttactcccaagcaggcccgatggcaggagtggttggaaagcagaattggcggcggctctaaaggtgatagcgggtatgtcagctagccgagtggttacaccaatcaaggagcgcatcaagcagaacttgaagaaggacccaattgcgaagaacatcatggctctcgcaagaaaaggaaagacaactcagttttggggtagaggatgacctcttgtggaccaaaggtgggcatttgtttgttctgaaggcaggtgatctgtggaggaggctgctgagtgagtgtcatgacacgttgtgggcgggtcatcaagggtggcataggacacatgcccttttaaagcattggtactattggccacagattcgggaggatgtggtggactacacaaggacctgtctcgtntgccaacaagacaaagtggagaggcacaagatgtcagggttgttaaaacctttgttcgtcccaagcagaccattggagagtgtctcactttatttcattacaagtctaccaaagattggagacttgaacgcgatcttggtgattgtggatagattttcaaagtatgcaaccttcatcccggtgtcaaagtagtgtccgacataagcgacaactcaacttttcttca

SEQ ID NO: 141315 - DNA, 630 bp, Cannabis sativa
  modified_base (337)..(346): a, c, t, g, unknown or other
acaactagagttttgagacttcttattattcttttctctcttctaattcaaaattcttagtcttcttcactatcaaaatttgagccttaatgatagagtacatgcccacgcatagcaagttggtactcaatcatagtgtttaagattgtgaagaattcaatcaactgaaggagaatcaggcgcagatcttggtgatactctactactgaaaggatacaagagttagagatctgagcggaaagagtcatttaattctgctacaaccaatgtaagatttcttgaactttatatgtgtttaaattccattgttttataaattcatatttaggatgttaannnnnnnnnntggtagtaaatctagatcctgtaaaataatctccaatatatatgtatatttatagatatataaataattaaataaacatataaatttattatattacaacactgtgcgtggttttctaattatgcaatataattaaaaattgaggtatttaataaaagtgtaaaattaaacaacaattaaaagataagattatatcaatataactaagattgtgaaatctaataaaaataaaatatagtagtcaataattattattatatatattttataattaacaaaaatgt

SEQ ID NO: 141316 - DNA, 568 bp, Cannabis sativa
aaaaatgcaaaaacaacctacaaacaaaaattgaaagcgtacagaggagacgatttgaagaaggagatcggaaaaacattgaatcttacccataatcaaatcagagaagaaattcaaggtacaaaaatattaaaaaacaaacatcatctaagcttctagaaaaaaaaaacaaaaaagcaaccacaaaacaatattttaaaaacacccagacataaacaacctaaaagatgaacaacctggaaaaaaacatattaacaacaatctgcaaaacatgaaattactaaaaaaattgttaactgtgaagtaaaattaaacaatactaaaactactaaaaataaacattaaaaaaatgtttagaaaaaaccaatagaacactaaaagaacaatcaaacaacgaattaaaaacaaggaaaaaatgttatgaaaacacaaaaccttcgtacaaaaacaacaataaaccctaaaaaaacacatttaaaacttaaaaacaacttataagaaaacttaaactgagaaacagaaaaatggtgtagtttggttaaataatgctaaaaactatttaatagca

SEQ ID NO: 141317 - DNA, 1562 bp, Cannabis sativa
gtttttctcagaaccacattgatttgattgttcatcataataatttatttgattggaggttcacgggtgtttatggtgaaccgaaccgggctcttagaggaaacacatggaaccttatgagaactttgaaagaagaatcggctcttccttggtgtattattggtgatttgaataatgtgttgagtcaagtggataaaagaggtgcaaatccctatccgaattggcttcttgaaggttttcaacaagcagttgctgattgtgatttagtggatttggagttggttggtcatcagttcacttgggagaagggtaaggattcagaaaatttaattgaggttcggttggatagagctcttgccaactcagactgggttgatttatttccaagttctcggttactcaatctcatgttcaccacttccgatcattgtccattgcttcttgacccttcttttcggtttcaaattggttctactaaagctttccgttttgagaatgattggctccgtgaagagacttgtttttctattattcaggagcaatgaggaggctgcatttctaataacattattgacaagattgtggctgttcaggaacctcttaaatcttggggaaatgatttgacgtgtaactttaaggagaggattcaaagctggaaaagaagaattggtgctctcaagaattgtcctgatagtgcctcggtttctgaataccatgacgcaaaaaatagcttgctgagatttatcatcaaaaagaaattttctggcgtcaacgatctaagcacttttggttaaaagaatggaatagaaacaaaaagtactttcacgctgctgctagttctcgtcgaaaaaataatttcattcatcagctgaagaatgaggcaagcgattgggtcaaatgggagactggtttacctcaggtgatggttaattattttactgatattttccattccttggggacacatggtaatgatatccaggataagattcagccttcgataagtgatgatgataatgttactttgcttcgaccagttttggaagaagaagttcgttaactggtgtttcaaatgcatccagataagtctctaggtcctgatgggatgacacttgcgttctatcagaagtgctggcatattgttggtcaagatgtcgttcgacttgttcagaattttttcggaataaggtaatgcctagagatcttaatgctactaatattgtgcttactccaaagaagaaaatgcttgtagtcatgggagatttgagacctattgctctgtgtaatgtgctttacaaagttatttctaaagttttggctaaccggctcaaaggtctattgtccaaggttatttctgagtttcagagtgcgtttattcctggtcgcctcattacggataatgttcttgtctcttttgaaatcctccactatttgcgacgtaaacaacaaggaaagcaaggttgtatgacccttaaattggatatgagcaaggcttatgataaaatggagtggtctttcttgcatgcaatcttacttcgcatgggtttctcggttgactgggt

SEQ ID NO: 141318 - DNA, 502 bp, Cannabis sativa
ccattttagccatagactatcttttttggtagttatagcccaaacatatttcatcatcgctgctgtattccatgttgaaatgtccttgaatccaatcccccttgtggatttggtttgacatagtgtgttccaggccattgctcctggtccagaggttgcagcctgacctttccataagtaagcacgacaaatactctcaatttctgcaatagtcttctttggcagtatcataatttggctccaataggtgtgtattgccattaagaccgagttgatcaaggcagcttgtcttgcgaatgataaattcctggtactccgtggtctaactcggacagtcatcttctcagtaagagatttgtatccggctgctgagattctctttgaacaaattagaatttcaagatacttgaagggcatctcactcctgcaaaagccaaaaatatctatgattctttgacactccccttcttccatcccgctgaaatgcacgacagacttgttt

SEQ ID NO: 141319 - DNA, 520 bp, Cannabis sativa
ctcctcagttagcctcagatatgtttagggcaaatattgagtttgtgattgggaaattgcataatctgacacttcagtcagacttgttggaaaaaatcaaagtggcccaactagaagatcctgaattacttaagattcgggaagatgtcttagcaggtaaagctaaggacttttcgatctctgatagtggaatgctgctgtttaaagtacgagtgtgtgtccctgataacactgaacttaagaaagaaattatggatgaagctcacactaccccttactcattgcatccaggaaccaccaagatgtatcaagatttgaagccatatttctggtggtatgggatgaaaagggatgtggtagattatgttaataagtgcttaacctgccagcaaattaaagcagaacatcaacaacctgctgggttacttcaaccattatcacttccagaatggaagtgggaagacattgcgatggattttgtggttggtttgcccataaccacaggaatgtacgactcagt

SEQ ID NO: 141320 - DNA, 991 bp, Cannabis sativa
  modified_base (515)..(520): a, c, t, g, unknown or other
  modified_base (802)..(809): a, c, t, g, unknown or other
tactaaaatttaggttaatttttaaacaaaattgtcacatgaaaattcttttaaaaatattatatttttataaaataatggtagaatacaaaacagaacaactaaaaacagaagtagagcaactaaaaaataactgtagaataacagtaaaaacttaacacagttcacagtatggataagatgaaaaatacctcttttttgaatccattaatcaaaaataccctcaaattatatttcattaaaatatacccacttttatgagtgggttgcccaatacgaatggaatgaaataaaatttaaaatgcacaaaaaaaaaaaattgataaaaaaattattaaattttttctcaccatgcattggaatggtctttccttccatttcacaaaatagaattgtcattccaccaaaatggtggaaaggcaacattctaacactttaatatgcaactttcctttcaaaaaaaacaaaggaatagaatggagattgtttcctttcctttccattccatttcattnnnnnnaaccaaacgccacctaagagtataatggagacatcatctataaaagtgagtatattttaaaaattatagaaataaaggtaaaaattaaaacatctaaaataaaatgggtatacaatctaattttccaaacttacacagtatttttaaaaataattccatcccatagtaaaaaagtaaagaaattagaaatttcagtatgtggtgtaaataatcatacatttaattgagtatttttattggcactagtggtgtctacaattggctagcgatacttcttaaaannnnnnnnattaaactatatgagacccgatacttagttggaccaatagcgatattaatatgtaggaaggtattaggggaaaaaaaagtagaaattacactatatatgggaaaattataagagtttacttttttatgtcataaataaataatgctaaggggttgtgagttttttgttttttacatctatat

SEQ ID NO: 141321 - DNA, 808 bp, Cannabis sativa
atcaaaaagatcgttgatcctaggtaaaggatatttattcttgattgttagcttattcagttcctggtagtcaatgcacattcgtacgatccatctttttttttaacaaatagtactagagctccccagggtgacacactaggccgagaaaaccctatcacaagcaaaccctggagttgaattttcagttccttaagttctgcttgagccattctataagcagccttagaaacttgttctgctccaggtgccaagtcaataacaaaatcaatttctcccaggggtggtaaacccccaagttcatcaagaaaaacatctagaaattcctgaaccaccttcatgtcttctggccaaacagagtcaggcccaatggtgtccaataccacggccaaaaaccctagacatccatctcgtagcaattctctagctgttggtaatgaaattaccgggatccgagatccctgaaccgaaccgacaaaaacaaacggttcttcaccttcaggttggaagattaccatcttcctcttacaataaatactggctgagcacttggacaagaaatccattcccagtataatatcaaaatccactaaattcatctcaatcaaatcagcactcaactctctatcctctattctgattggcatagacctaatccaccttttggagataactatctctccgccaggcagtagggttccaaaccttatttcataactatcatgcagtctatccaattcactaaaaattctggccgacacataagaatgagttgttgggttttgtgccctaaataaaaccctttaca

SEQ ID NO: 141322 - DNA, 1169 bp, Cannabis sativa
acgtaaaaatccttctctcactttcttacagctcaatagtataatcatattttattagttgccgaaaacctcggtcaacaataaatataacactattaaatttgaccaatttatatagtatttttttaggtctttttatgatatttgatacaccatatatatgtaaattaggttttcaaatctcttatttaatgtttttatatgtttaggtagttttatttgtcactaatgctagaaaagtcgccggagtttattgctggtactagaaaaatcactgaagtagctgtcagtgccgaaaaagtcgtcggagttgctgccgacgctggaaaattcatcggaattggtattgttgccaggaaaaatcactgaaaaaatactaaaaaattgatttcttgatgaagaaaccactttcttggtgatttttccggtgacaatgccaattctgacgacttttctgacattggcagctactccagcaacttttccgacaccgacaacaaacttcagaaaagtcttcggaattggcatagtcgctggaaaaattaccaagaaactgacttttctggcgttggcagcaactctgacgacttttccgacaccgtcagctactccggcgacattttcggtaccgactgaaaattccagaaaattcgtcggaattgacattatcgtcagaaaaatcaccaagaaactagtttcttcattaagaaaccaatttcttgatgagggaaccagtttcttggtattttttttttttttgcgataatgccgattccgatgactttaaaccggcggggagcagctctcgtgactttcccggtgccgaaagcaactccagcaatgtggtttttattgtgattttcgagaattggacttgcaaatatagcatctattgcatctggtgttgagattgtgcgaaagatggttagtttttttaatcttttttttttctattggttttttgatttgttttagtgttgttttacagttgttttgtcatgatttatttatttgacgtcgatattactgttcttgctctatctcgccggaattaattgttatttttcgggtgttctcgtgttgttgtggtggatctatctgtaggtgtggaagatggaggctatatatacatttcttcttctttttctatggttatttttgtggttttt

SEQ ID NO: 141323 - DNA, 531 bp, Cannabis sativa
gcatatatagttcatatggtgcttttacatgcacccattaatagttgtagttttagttttgtaaggccaatgtgactagctttgttttacacagtcattgtggatagttttgattttgtaaaaagccaatatgactagttttggttatgtaaagtcagtatgactaattttggttttgttcaactagtattgctagttttagttttgtaaagctagtatgactatagttttagttttgtaaggtcaatatgactaatttttattttgtaagattagtttggtcattttggtctaataaaaacacatcagttatactatagacactttcaactaggggtgtacgtcggtcggtttggtcagtttacgttatattttattcaactaatgtaaagatcgagttacaaaaatttaagtgcgactgacccaatataatataaccaacttgaagacaatttttaatacgtacagatacagaaaatgtaaatagttttgtcataacacttttcgatcgaattataattatattttatt

SEQ ID NO: 141324 - DNA, 1133 bp, Cannabis sativa
actggtggcagtggtctcccgttaaggtttcagacattgaagagagtttttgggtcttgagacctccaaaatatgactcaccatcaaaaaataagtcaaaacacacctcgaggggtccgagaacatgcacagacaagtactgccatttggcaatgttagtgctcgcaaacggtacaagtcagcataaattgccttcagtaaaatggacatatatgtctcaatttttatcaaactgacttggttaaacttgcattggaacgataatttcaagaatgatcaaagtgtgtatcataaccatggatcaattctgaggttatcgggtccaaaatttggtcacaaggcagactggtacattttactcgagaatttagtaatgtggttaagtgagagttgttggaggacactggcatagcccacgtggcattgtatgcaagcattgacactccaaaacacattttttcagtactcatcaccaatatcattcatttctaggcaagaggtaacatcccatcactctatttcaaattggtgcattctcaaccaaaaataataacttttccaatgtttgtgggatttttttcctagaaacaaggatatttttataggtatatatttttctgtaatattttattcattaaaaagagtggtatacgagatttgttagtgagataccccgacatgtgggggatcactaacaaaccatatagcctatataaggaaaatgaagaggctgaagtagggaccttctttttggatcttcttttagactctcttggagtttttctctaaaacctttctcttgagactcacttgacggtagccaagaacataacacttattcctctatcatctccattgagtccatcatactcagtcgacaccagaccttaaaacacaaatgatacacattttttcatagactttattggtttattgatcccaagaactttacaatcactaatttagatcatatttatgaatatcaagtctcccatgagtcttatattcattaatctcgattaagattttaccttaaaatcttttgctgtatttttatccacacactcttgagaacataactctggtgtgtcggatctaatcaataaaactaaaagtagacgtagccccattac

SEQ ID NO: 141325 - DNA, 549 bp, Cannabis sativa
aatcactttgtggtgattgagaaatcggctaacccaacttcttcttgccgattacaagaactgccagacaatgctcacactagcgatgtggattttcgttttggggcttcggagacttgcccgcaaaagtctctacaatctccatgaaaatcctcgcttggaacagtcgtggtcttgggagttccacgacagttcgtcaactgacggctctcatctgtcagcatcaacccgatatgcttctcatctctggagctcgcattccacaaagtaagttcactgtaatttgtaataagctgcattttactgggattcattatatccctcctattggtttatctgggggccttggtttatgttggttaaaagggatccaatgcaaaattctatcagcaaataagtttgttattgttggagaaattagttctgatcccctaggagaaaattggctggtcttgggtacctacggccccccctcatgccacggacaaagaggaattctagcgttcaataggagacatggttctactagcaacaaccccaatacttatt

SEQ ID NO: 141326 - DNA, 931 bp, Cannabis sativa
  modified_base (37)..(37): a, c, t, g, unknown or other
aaaatggtgttaacccgaagatctcaagagcgacctnacgaagagatggaaagtgcccaccaagttccatcagcaagcaaccttgctggaaacaatggagaacgaccattgcgtcctggaacggcggcacgaccaccaccggtcaaactgcagtcgctggacagacaactactaggcgtaccaccaatgccactgcggcaagaggcgacgctattgatggcgccactggaagaggtaatactagaaattttgtcccacctactgacggtgcgggccaagtttagactggtcgcggccctggcgtctttatgctgcggaacgaaccccatgttgacatcgacggaattgaccccaagatggatcagctgcgagatgcaataggccagatgcaaggccaattcaaaaatgtgcaccaagagccaaatcaagctcgagtggatttgactgaaagtctcgctaaccaaaggagaaaattccaatcttggctggaagatcatgctcgtgagatgaggaggcgccaagacaactgatatcgtcgcacccaagaggctgcagacttaatacgaagttactttaaccaaaaaaatcaagggatgggtactgaggcccacaatcaacagatacctcaaacctatcctcgagaggtccctatgccaaggaaccaaagagagagggtggtctatggacctgaagagcgcccaaggaaccaagagaggactaggagtcacccctccaacaaggttccccgcaataataatcgactacctctgatcgatgagcaagtcctacccggtgataatatgggacgcgatgactcccacaatgtccgtctaaggcagagtggtggaggaaactctagaaacaacattggtgaccgtggcagaaatagtggaaggacgccccaacgtagggagtgttgggttttatgccc

SEQ ID NO: 141327 - DNA, 518 bp, Cannabis sativa
ccaggactgggactgggatctaagattaaaccccggtcttggtcccggacccagacccagacacagacatgggtagggacccagaatttagatcttcaccacgacccaacactacaaactaactcgtagtcggtgtctagatcttggaatcgtaccaagacccgaacctggaaccatttccaagacccagacctaaacttgaacctagacttgggctaggacctgcgacctaggacccgtggcttaggaccttgacaagacccaaactagcaccgagacctgaacctaaacttggacaagtactcgattgggacccaagaccaggacctgagaaccgaaccgtgattgataccccgacaacgtcaagacctgagataaggactagtacggaacatggatcgggacatgcactcagactgggaaggtaacccagaccgggacctaggaccctgaccttaatcgtggacatggaccaatgactgaggacccaagacccaaacctagacccaaaccttgac

SEQ ID NO: 141328 - DNA, 882 bp, Cannabis sativa
  modified_base (30)..(40): a, c, t, g, unknown or other
aaacccaataattaaatccaaaaaattaannnnnnnnnnnttaaattaaaaaaaaaaaatcatcttagccacatatctctaacaaactatttgttttcacatcttcgccctcttgaaggtcagttttgctacaactcttgtatgtttgagttgttttgtgggattatggaaagtaagaaagaaaatacgtatattggaaactaactaatttttcgtttagtttctgagaaagtaagctaggaaattaatgtgaatttttgtactttgacacactaaacgattttccttgtgaaaaggtatttgtgataaatttgtctctgaatttaaaaattgcaaataaagtgttatcagattgtgtacttattacttatcaaaaaaaaaaaaaaaattgtgtacttatttcacttctgtagtactgttgatgtgatctttgtatttataggtttgtgttcttattatattaatatatgtacatatatgaatgcgttgaatcatataattgcattattatgttctgcaatctatactatttttttttttgaaataacattgttgacattttttctctttctgttttgtttatttcaattttttcagagcttccgatccgaacatcttcatcaaaatgtctgggtaagttggttttttttttttttttttgtgtgtggcaattgattattgtattgtattggcatctcctaagctctttatcatcgtaaagacctttattttttttgcttctattatcaataataggcattgtctaaatgggtttaaattctaatatttggcttactgtaaattagtatttcttttgtcattagaaagaaatgctatcctatgttcctattgaatttaatcaagccgatttgcaggcataac

SEQ ID NO: 141329 - DNA, 616 bp, Cannabis sativa
tgactttgaagtgaagggcagaaaggctggattcagactgttcaagatcaaactcacttgagttgtctgatctataacagctccatgattctcagcatcctggaagtaactagtcatctggagaaggtgatcacacacactctgatgaggtttaatcagtgcattaatgaaattcttagtcgcttcaaagcaagcttgaatcgataccatcccgaatagttcaattaactggttcaggatttctgcagccgtgagagtgttttcaaaccttgttttcaaggtgtcaaccatgctatacaacataaagtatcgagctttgttgttggcattctgccaacactcgaacttttctttaacgccttagttgcattctaacctggctgctcatgagcctcttcagtcaacacaaacatggcatttttaccaatgagagcaatgctaatgttctctctccatttgataaagttagctccattgagtttattatcagtcaatagtaaaaccatgggattggtcatagtcatgttggatactacaaatagtaataaatagaaatcaaataaggtttaacacaaaatcatattcagaaatgattagcacttagcaagtaggaatg

SEQ ID NO: 141330 - DNA, 1680 bp, Cannabis sativa
caaccacgtaaaaatccttctcgtcatttcttacagctctttaatcttttattattttattggttgccgaaaacctctgtcaacactttataattgtaatcgctcattatatagttcaaatgtatgcagctcatttgtacaactaaataccaaccttgtagtatatggtaaattttagtttattcatactacacctattcatatcacatgtttattattttgcttttccagattgtatactatgagcaaatttttactgtatacaaaacttaataccaataaactaaaaatttacgaaaaaaatcacgcaagaatatggatgttagaacagtgattcttttttacaatgaaacttggattgacaaaacaacatacgttgactatgaagttcaaggtatactaattccatctgattgtttacattatgaactttctcccataatatacgaagctttgaagttggacaaaaacaagtataagattgatctccaatttcaagtaagagaagacatacctccaataagaattaaagatgatggtggatgcaagttttatgaacaaatacgaagaaaaattgatgatgaaactaaatatcctattttggttaacatctcaacatcaacaacagaacacaatgttagaatcaactatacttatattggggaaactagttgacaaacaagggaactgctaccaacaagaacagaatatgcaacaaagatggcagaatatatgattgaacaaactcaaaaatcaatggaagaaagctacgaaccaaatcaactgatttcaaatcctcatgttgctgaaatacacattggccaagtgtttgcaaacaaggaaactcttaaacaagcaataagccttcactcaacaaaatacaatcaacctttcaaggtaaaaagatctccaaaacttgactataaactagtctattttgatgatgactacaactggactttcttagcatcaaaacatggcaagattgacatgtttatcataagaaaaatagagcatactcatacatgttcattggacattacttttggagacaatcctcaagctacaagcaacctagttggaaatgtaataaaaaataagtttgtgaacccaaaaagagattacactccaacagaaattgtggataacatggtagatgactacagtgtctcgatatcttaccaaaaaacatggagagctagagaaaaggcaattgtggatgctcgtcgctgcccacaagaatcatatagtgaaatactattgattttatacaatgatgcaaatatccaacctaggtaataagatagtttgtctacataaagtaataaataagaaatttgatatgaataaatataataattggctgcatagtgacacgtggcactccgaattaagttattttaattgtatttttatccccatgcaatttgtaataagtttaattacacattagtcctttaaccttctaatagaagcttaggattttagaatttagttatagtttcagtttcagacagaaaaatccagagaaaacgctcagagcgctcagtgttagtttaccgctttcatagttaattttcttataagtttctaagttcccatattattaaggcggacgatgaaacctagtgtatttaattaagtatttatttttattttgattctcaatacaatatatgc

SEQ ID NO: 141331 - DNA, 572 bp, Cannabis sativa
tatataataaattaaaaataaatggcttggaccaattatataatgccacatgtgtgtcaattgtcatttaacagagaacttaacgtgaggtacctcatttgcaacaaaatattgacagaaggtattattaccgcaaaaaaataagttaggtatttatctgcaactgggagtttaacttaagtgtttacgccacaaattactcttatttgtataagtgtatcttgatattaaaaaatagttaacttaaattaatttttaaaaattattttaatatttttttgaaatttctttttcatattattttctttcaatatcaatatttacttttatttcatgttcacaattttttttttatttttttaataaaatttcatataattttttatttaaaatttttgtgtcttaatataaaataaattttatttttattttataggtaaatttcttaagagggaagaatttttttttaaaaaattggtacaaattaaagatatataatttctataaaataaaaaatattaaaatggggtgcacttattactttatagggtgcaaataaaactccctatcct

SEQ ID NO: 141332 - DNA, 569 bp, Cannabis sativa
ttattatttaatacaatacgacctttatacggtgtaccaaacgagcccttagtcttttatcttatatttataaacaatcaggactcattctaggttgcattgcatatagttagaaacttagaggaagcttttattttttcacataaaagacatatatgtaatgaaaaatttggtttaaaacataaatttggtttaattaaatttctacttttatttatagttgaaaatataaaataaatataagttttaatttatttttatcgataattattatatgaagattttttttgatgaaaaatattttttaaaatgtttagatattattaaaaaataatttttttttttgagtaaattaagaattatgtaaattattttaattttaaaaatagcttctcaaaaatacttgtgggagaagttataaatcctaactaattccaaaagaatttttaaattaaaaaaaactttttattttcatccaacaccgctaaaagaacttttttaattctaaaagttaaaaaagagcttatagaagctaagccaaacgggactattgtaacgccctaatgcta

SEQ ID NO: 141333 - DNA, 904 bp, Cannabis sativa
  modified_base (658)..(658): a, c, t, g, unknown or other
acgaaactaaaattcaaccagaaattcaatttaatttgcataaaactaatgtcctgacttcaattttcagatccatgaaacgttgatttcaaaaagttgaactagagttcccaaacaatccagttcaagtataatccaaaaaaaattacatcaatactatagtaaaatatttatcctggtgtattttcgttgttttccaaattcaaatagtgaatttgttcatattaaatcataaagagacatgtagatagagttacatttttaatgtttcataacaattgcattacagttgtataaaagtttcgctaaaattatttcgtctgattgaaaccttcttctgatgcaaccttcggccaaccatataacaaccttcgtttgattgaaaccttcgtctgatgcaacctttggccaactaccatgcaactatcgtctgattgaaaccttcgtctgatgcaactatcgcgtaaccacactgctagtttgattgtgtaagtgatagtgtaaaatgtattttgataattaaaatcacataaaaagtataaatgttatccataccttatggaggtatttttgtaaataaagtgtcaatttatattttctatgtaataatttcataaacaaatatacatctcaaataaaaaaaaaaaaattacacaantaccacttacacacacctttaacccaggatccaagatagtcataacgtatctatatcttggaacatatagaacttttatataattaagagtgcaattccgaatctatagtggcccaaggagaaattaataagttagagaatttactttgtaaattctagatctacttatcggaagcttgattatacagggccatggttcccacactagttgagaaaatactaattgcagactcagtcaattgattt

SEQ ID NO: 141334 - DNA, 557 bp, Cannabis sativa
  modified_base (39)..(71): a, c, t, g, unknown or other
  modified_base (431)..(449): a, c, t, g, unknown or other
aaactttatatgtatttatttacattgttttagaaattnnnnnnnnnnnnnnnnnnnnnnnnnnnnnnnnntaaatctagatcttggtaaaacacattccaacagcagcctccttgatagagttttcttggccatgtgcaaggtctgggcgaggcgcctaggcgggatcgtgtccgagtgcagccctgcccgtgtctttagacacaagatttgtcccctctccgcgcacgtcagaaggtcttatccgaagctctggagcgtgcgagcaccaagcttcgacacccatggcatctgatttttaaacaaccgtaactttctcgttttttatcagcaatgagtttcgtaaaaactaaaattgcttaatttttcacaaggaaccaaataaattattttcatttaaaaattatgtaattcacatacattcatcaaannnnnnnnnnnnnnnnnnnaacacatccaaatcaacacaaataacatattcatcgttttaaatccatattacatgaaagtaaatcattaccatggctctgaggccaattgctgggaatattttacca

SEQ ID NO: 141335 - DNA, 569 bp, Cannabis sativa
catactagctacttgcccgggacccttcctgctcagggcatcggccactacattggccttccccggatgataaaggatctcacaagcgtattccttgactaactccaaccaacacctctgtctcatattcaaatctttttgagtaaagaaatatttgagactattatggtcggtaaaaatttcacatttttctccataaagataatgccgccaaattttcaaagcaaacaataccgcagccaattctaggtcatgagttgaatatcgttgttcataatcttttaactgacgggaggcataagcgataacccaatcggcttgcatcagcaggcatcccagaccttgtctggatgcatcacaataaaccacgaacttttccttgtcagaaggcaaagctagcactggagctgtattgaacctctgtttcagctcctgaaaacttgcctcacatttgtctgaccatatgaaacgctgattctttttggtgagctcggttgagggtgttgagattttagaaaacccttctacaaacccttctcaactgatgatagcccgatcagagatcaatc

SEQ ID NO: 141336 - DNA, 896 bp, Cannabis sativa
gagttaggttaatttttataatttgtcattcacattaagaaagagaatagtaattagcattaacaattgggtaattaaatcaacaggattcttttccctaatttctcatccttgtttaaaccactttattgctttctttaattttcttgtttttctttatttcaaaatctatcaaaactatttatctaccaaatagaatcataagtctaatttagtggtattcagttcaattccctgtggttcaacctcacctgcgtgagtttactacttaattatgtgcacttgcgtattgcctataaatttcgtaacaataatctcatccaataatcaactaaaacttgcaatttcacaaccaaaaccaaccaagtcaagagctaaatctcctattatgcaaaactaaacacaacatcacttttccagaaataatttcagtagtaaacaaagatcaaaacccataaaaattacctcaaactcaaaccaagagcaagcttaagattcaacaataataaagctccaaaacaatccaagaatcaagcttttcttccaaaaaatcaagtgtgaataagaatagggttttgagagagagagagaggggtcgggtgagagggagattaaaccagaattttcctttccattatctcaaaattcaacttttaataaaataaatcaattaaggtcaaaagaccattttgcccctaggggcaattttcacctattcacacatccaagggtattcatgtcatttcatactcataaatttccaaataaaattcaaatttcacattatcaaataaaataccaaataattcaattctatttgcatttccggcccgaacccggttcggcccgaaatacccgattgtgactataccgcgccaacctgtcagaacacacct

SEQ ID NO: 141337 - DNA, 877 bp, Cannabis sativa
aagcttatcttgccactaaacatagactaccagaatatttgttacctagagaaccaaaattagagaagtctgctcttagagatccagtttggaatggtttaatgtctacagaaatttgtgcactcaaagctcaaggaacctggaccttagtgccctatgaacctcacatgattttgatagatacgtctgatgggtgtatagagtgaagttgaatgcagatgggactttggataaatgcaaatccagacttgtttcctgtgaatacttatagtagccaggaatcgattttgaggacacctttagtcctgtggtgaaaccagtcattgttagattggttctcaccttagcagtcacatataattgggaagtaaggaaacttgatgtctccaatgccttttttaatggagaacttagtgagacaatttacatgactcaacctaaaggatttgaagaccctcaagatcctaatcatgtatgtaaattgaacaaagcaatctatggattgaagcaggcaccacgagcttggaatgacaaactcaaaaccactttatttagttagggatttaaggcttcaagggctgatacatcattgttcttacatgactctggttcaagtcaactcattctacttatatatgtagatgatattctcattacagggggcctagtactactcttattcaacaacttattagccatctcaatgctatttttctcttaaagatatgggggctgttcattatttccttgaagtggaaatacacagagactcaaatagcatgtagttgtctcaaagaaagtacatttcgggaacatggtagtacatacatatagaatctataacttctataggtatttagaagtgacacgatgattt

SEQ ID NO: 141338 - DNA, 558 bp, Cannabis sativa
cttgaagcggggacgttacaattctgttgttgctgtgttattttcaaacattgctatgttgttttcaagcttttgccacattttcttgatattgtgttgttgtggatgtgatatttgggattacagcaggtgttgtgttgttgctctgtccgttcccaacgaagaaggaggcgtcgtttgtcccttgttactgttcacagtacaaaagaaaaaaaaaagtgcctggacagtataaaaagtaaaaaaaaaaatgtgcttggaaagtataaaagaaatttctcccatgtgacagtatttttgtaaagattagggaaaaaattagtatttttgtaagtttcccaataggatagctgatagtaggtagatgtggacccatagttaatgttcttttatatttgacttgttcatatttttgctatattttaatttcagtttgagaatggctaaaataaatgaaatcaagtttcaagtaaattattttctgtgtaaaaaaaacttaaattattttcaatataaaaattgtaatgaccgctttagtaatttggattagtaaaggca

SEQ ID NO: 141339 - DNA, 790 bp, Cannabis sativa
cagagttttggccttttaggttgttatcccccttcgtatgggaatagaaggttatttataggctaagggcgggtatggacatgcccataaaccgcctagggtttctgcagaaaacccactaacagggtaaaatacatgcaaaaagagagctgactattgggacccttggaaagacttgtgctcgtgcgttgcagcagctggacaattaggaatcattatacactatggacacgtgtcactaaggtttaacctttaaaagtagaggtccaaaataaccgtgtgataaaaagttatatgaggtgcgcgcactaccatattcttgcacagggtaaaagatctgattctgtatcaaaaaaaagtgtaactattgctaggctatctggattgcatcaaaggtaaacatccgcgacactcttgggcgatcattgtctgtgttaggcccttcaagtacccatgcgggtatcagttgagcagactctacatttagaccacttcaggtcctagagagacaatatgtctttcgtagcaccaattgtgcttcactttctttaatgcaacgtaggagaagagtgttaaaacctctcttgtataaaactccatcaatcaagacatatttggtttcctaatacacaatcatttatgcctcttttttatccgaaggcaatgttccttcttggatatatttgatgtaaggcatcatcctagaggtttcttcattccctattgtgatattttgcacacgcaagtgtacgtgtcttgacaagtagtaaactcaccaagagtaaggtcg

SEQ ID NO: 141340 - DNA, 509 bp, Cannabis sativa
taaatcctaaaacctaaaaaaaccttaaaccctatacccaatacactaaaccaaaaaacctaaattctaaaccctaaaccctaaaaaatatacaataaactcgaatcctctaaatcctaaagtcaaaaccctaaaccttaaaccctaaaaccctaaaccccaaaccctataccttataccctaaaccctaaacgctaaatccttaaccctaaacccaaacccaaaccattaacctgaaaccctcagccctaaccatatcctgaaaccctaaaccctaaaccttaaatcatcctctctaaacccttaacgctaataaactctaaacctaaaccataaactctataccctaaaccctatacccaaaactgtaaaacctaaaccctgaatgtcgaaccctgaaacctaaaccctaaaccagtaatccctaaacccaaatcactaaatcccaaaccctaagcacttaagccctaaaccctctaccgtaaacactaaaccctaacccctaaccc

SEQ ID NO: 141341 - DNA, 744 bp, Cannabis sativa
  modified_base (135)..(148): a, c, t, g, unknown or other
agatatggagatgaagcacaaaagaatcaatatcaataattaaaataagaagtacaaaagctacactctaacctcaccaatattactactctagtttactcgtttttgttactaaaataagtaaactaaaataannnnnnnnnnnnnnacaaaatgacaaagtgtatttttcactctaaaaatctgatgctttttttacactggttttgttctctatttatagagaaaatattattcataaaggtagaattttcgtgcatagtataatgggaaaagtggcttgaaaaacggaggagatgggagacgtgatagacacttgttgtgaggagttgtggaatatgtaaacagttggacgcaggtgagatagtgggatcatagctattttttcatttggagcaactgaatacttgaagcccaagtgtagagtcttacatcttatatgatctagtccatatattgagcacatagaaagccacaacaaagtagaatcaaatgaatccagtttcttgactagagatataataattgggcttgcatcctttgcttcatttttgcaaaaataccatccattgagttggattttcaggctccaaacatgctactattttattgactcaaatctgaaaaataacattaaaatcagttaaatatttccaattaaaataattttataattaaaatcatgaaaatatttaattaaattaattttatatacacaattaaagacttaaaatgtacaaattt

SEQ ID NO: 141342 - DNA, 505 bp, Cannabis sativa
aatatatcataataaatcaatattgaacaatatactatatgacattaaacttcagattctataaacttcaggtttaagttcagattagaaaattttatcttgattaaaagtgtgtctgtactacaagtacgtgaccactattattccacttcacatatgatatatagatttcatgcactttgattgtgtgttgtagtttccaattttttttaaaaatatttaagtactaaataatgtcattgattatttaaaattattacatccacttcaggaaatgacattgaacaagtagaacattattataaatttttaaaaaatttattaaatgttcatccataaaaatataagaaatcattcaacaatttcttttacaatactttaaagaatatatgaatataatttttgcataattttcaagatgtatgcaaaatttgatctttaatatatgtcatgcaataatttctaatatagacattgtaagtaataacaatgcataataacatga

SEQ ID NO: 141343 - DNA, 770 bp, Cannabis sativa
aatgtccttcgctagaggaaggtggactagaacaaagatgaggatgattctcgtgcagaagttgaagcaggtcctagtcaatccgatgtccgatttcccaagactcacctgagttcccagacccagacccagaaccagacccaaaccaagactcgaacgttgacctagacacggaccgaaaccccaacccagaccaagacccggactcaaactcggacatagagccatactcgtaccagaaatcaaacttgaacccaggactcggactcaaacctaggaatcggacccagaccgagatcaagactaggacccagaccgagactaggatcgagccctaaacctggattgggactagaaccagaattgggactgggacccgggacttgggacccaagactcggacctgggacttgagaaccgaaccgtgacctagatgggggacttgggccctgaacccgaacttagacccagacctaaaccaaggatctcgacctagatgggggacttggacccaaacctaggccccagaaccgggaccgagacccgaaacttgaccctagactcatgatagagaacctgcccttggacccagaacctaggacctaactactgggacccaaccccaaacccgaacccaatcccaaacttaagactcagcccgggacccgggacctaaactgaaataagatagggatccaagaccgagatcctaatctggacctgaggcttcgaccatacccgtagtcagtgtttgaatccaagacccgaac

SEQ ID NO: 141344 - DNA, 575 bp, Cannabis sativa
tttcctctcacacgcctatcactgctggtttcccctttggtatccctgccagttctgctttcaactcccccatcccgattgttactcaaactgtgtcctcaccaaccgtacaagcttttacacatccatccccaaatactctctgcaacttgcactcccctccactattttccaacagcagccttttaccatctcaccctcctctttcggttacaactagccttcctatgagttagcctatgcatccgaaccatgattttaaaggtaagcaaaaattattacctgatgatcatcagaaatcactcaatgtgcccaagtcctctgccactaaaactcaagtttcggctagtatacctgtcacagacctcactcacatttatgtgcccgatgtccactcttccacttttgcaacctatccaccagttctcacccctatcaccatgaactctcactcccattcaacctttctcaccttgcctatgcaacacaataccactcacttttccactaatattacttctgcaaaagaaaaccaggcgccacattccacttttaaaagggccaatgactctttg

SEQ ID NO: 141345 - DNA, 626 bp, Cannabis sativa
attgagtcatattatcaaaggctataaattactatccctatcaatatgtattttatccaattcctactgtaatagtctccttatataatatactttaattataatttataaattatacgaaatggttatacacatacatacttcatgaaataatttaaaaattatagttaaataacttattgtcatctatataatatatttaaattattatttgaaatatactatgatcgcacagagtcacatagactaatattagaatatactttgaaatatactacggtcgcatatagtcgcacatggtcgcatagaccaatattagaataaaattttaaatatactatggttgcacatggtcgcacagggtcacatagactaatattaggatacactttaaaatatactatggtcgtatagaccaatattagaatacacttttgaatatactatcgtcgcacatagtcacatagggtcgtatagaaatatattaggatatacattgaaatatatttggtcacatatagtcgcacaaagtcgcacaagatccataataagtactttaattagcataaatttcacaaatagatataaataaaagtttgcatatatcaaacacaagaaacattaaa

SEQ ID NO: 141346 - DNA, 652 bp, Cannabis sativa
  modified_base (70)..(78): a, c, t, g, unknown or other
  modified_base (142)..(157): a, c, t, g, unknown or other
catgttgatctatgtgtttattgacgattgattggtgtttgcaaaatgtttacataaaataattggaatnnnnnnnnngaattatttttattgaatagtatgaaaaaattaagcaattcacttttttacagaacttaatttnnnnnnnnnnnnnnnnagttatgaatttttgaaaataaaaaaaaaatgaggaggtgtcacacctccatgcgcgcgcggatgcacgtgacacacggagtcacccgtgttaagataggggttgtccgaagtttcacacccaggatgtctgaatcccacccttctgcacgcggaaatcctactgtgcagagtccatgtgcggcaaatcacggctacttccccttcgtgcgcacgcagatggtatgcagttgcggatggtatgcattgcataacatccgcaccaaatgtaatttttttcaaattttttcatttttttcatgctttttcatgaaattaatttcgaatttttcgtgtagttctgtatttcgatttttcgaatttcaaatctaagtattagaattaaattaattaatttttttaaaattaatttaagttattagcagtttttgaaccttgaaaataggtaaaaatctatctttttgcttagttggttatcttattttaaaatttgatt

SEQ ID NO: 141347 - DNA, 576 bp, Cannabis sativa
  modified_base (320)..(325): a, c, t, g, unknown or other
gcggggacccgcccttaatggggtgggaatttcccgtctaaatggggagcagggcagagacgggaattaccttttgtcctcgaatgttaaacggggcggaaatggggatcacactccttgtcccgacggggatccatttagtattttactttatatttgtaataataatttataatttataatttatgtttgtatttttttagtatattagtattctttttatgaattttaagttgtgttttggataataattagtttattaaataataattaatgtgtaatattttaatttttatgtagtttaatatttttatatattnnnnnntttattataaattttatttttttattaggggatttctcatcccatccccgtccctattaggagattctccatcccattcttgatggagaataagcggggacaaaaattaaaatctttaatagggataaagacgggggagcactccccgctaatttcccactccgtgtacatccctagataagttaccatgcattcgagctatttcatgtatattataagggaaatttgattttctatacttagaaaatcaa

SEQ ID NO: 141348 - DNA, 982 bp, Cannabis sativa
ttgttttctactacttgtcatcctcaaaccgatggtcaaacagaagtagttaatagaactttatccactttattgagggctatcataagtaaaaatattaagactagggaggattgttgaccacatgttgaatttgcttataatcgttctatgcattttgctactaaattttcaccatttgaaattttttatggttttaatccttggactactttagatctatcacctttacctgtttttgagcatttgaatttagatggcaaaaagaaagcagaatttgtgaagcaaatccatgagagggcacgactcaacatagaaagaaggaccaatcaatacataaagtaagctaacaagggtcatcacaagcaggtttttcagcccagtgattgggtatggttacacatgaggaaagaacgattcccagcccaaagacgttccaaatttctaccttgaggagatggtccgtttcaagtgcttgaaaggatcaatgataatgcctatcgactcggtttacctggagaatataatgttagtgctacttttaatgtttttgatttgagcccttttgatgcaagtgaagatttgaagacaaatccttttcaagagggggggaatgatgagaacactaaggctaaagatataagtaaagttccagttgcctcagtgatgagggcgcgagccaagagattcaaagaagaactcaacaacttagtcaacagagttttaaaacaagaggagaccgtagtcaacactgaagaagaacaaagatttgtgcttctcatcaaagtagactcaatttagacccaaagagtttatcacgtttttcaaggcatttggcagctttcctttttaatgttgtttcctctattttttctttgttttattcggaaaattttgtctttcttttagtttccttttttcttggttgtaagtgttgggttttatgccctaaattaaactccatttcaatgtaatctatttt

SEQ ID NO: 141349 - DNA, 675 bp, Cannabis sativa
gccaaaaatggaattaacaataaacaaagaaaaactgaacagaatgcaatgtaatgcattctcacataacatataatcaacctatacacataatcgtaccccaaaacatatataatttgcatattacatatgtatgaattaatactgtaaattcttatatgcaatggattgaaaaaaaaacagaacgttgaccattcagttgtgatcagtaaaacaaaaaacaaaaaagaaacaatatacatgcatcacatatatctcgcagcaacaatagattactttacactttatatatatattacattaaatcgaaaaactttcaatcgcattatatacataaaaaacaacttcaatcacaatatatattaaccagcgattgaaacccgaaacaaatttcaagcgctgggacatatatatatatatatagcatgattaactaaatattccaaatgcaaaaaataataatttagtggaagatcaatactactataaattctcaagaactaatttatggatgctcttgataccacattaaggaataggaaaagcgtattggagtccatagaatcgattttgtaatctttaattggtatgatcttccaattttgcagtgagttctttctctgtaacctttgtctcttgatgatggggtttcaagaaaatgaaaagatacgatac

SEQ ID NO: 141350 - DNA, 760 bp, Cannabis sativa
aaggccaagccttggctgactttgtggtagaatgcacaggcaaaaaagaaagcataccagaaagcaaccccgagccaacacctcagtcaagtaacaatgaatataaaccgacctggaaactacatgtggatgggtcggctacagatcaactatctggtgcagggattgccctcgtcacacctggttggcaacacctgcacgctgcagtcaagttcagattcaaggcatctaacaacaaagtcgaatacgaagctctgatcgctaaactaaaactagcccgggagatgaaggccgaacacattgaaatctgcagtgattcacagctagtggtaaatcatgtatctggagaatacgaggctcgagaagaaaagatgatagcatatctgacaaaatacacaatctacttgcacaattcaaaagctatggtctcagacaaattccaagagaagaaaacacaactgcagacgcgttagctcgattggcaagaaggaatgtaagtgacaaggcaaacttggcacggaagaaatcaaaatgattgatgtgtcccaaaactggatgacgccaatagcagcctacctcaactttggggaactcccagataaccgaaatgaagctcggaaaatgagaaggaaggcagcacgatatatcatagtaaagggagtcgtgtacagaagaggattcttgatgccattactcagatgtgtcactcaagacgaagctgcacgactcctatctaaagttcacgacacattctgtggaa

SEQ ID NO: 141351 - DNA, 619 bp, Cannabis sativa
tcctatccaagaaccataagctttgactctttcttgttgattcctacaaaaacaagttcatttgttggcttttggtacccacataatttttggtcctttcttgttattatagaaccctttggtacccatttagtgttgcctagacattcatatttcttcacatgacaataggaaatagtatggccatcttagttacaatatgagtatgtaaagtgaggtacactagatgatttcacaaaaaagtttcttaagaacttttattttgtactaggatcataaccaatgccactttttgaaaaaccacatgattggcttcctagcataagatcataaccttctttacctctagtgaaagtatatatgtcattctttaggcttttcacttatgcatttaaatgaacaatttttttcttatatgaagcacatgtagcacattgagacatacctaaaagttcctctcatttattttcaaaatcttaatttcttttagaatcatgttggtcttctctctaagagttttgtttttaacaaacgatttaccaaaatcattaaatagttccttaaatgaattagacaactcatcatataacatatctaggttatcatcatcatttttact

SEQ ID NO: 141352 - DNA, 667 bp, Cannabis sativa
caaaacacaagccataagcaatccatacaaaatactagcatgtccaatacataaataataactcccactgagcttaacaagctaggctcccaacaatcccattcaggcaatatgttctaaaaataaacatatgggtaagcctttcattagtgggtctgttaaaatgccagtgctaggcgtgtattcaatggaaataagagactctgtaactctctttgacaaaatagtactttatgtcaatgtgtttagagcggaaagtacttctaacattttagagaaagctactgctgcgaaattatcacaatactatttcagcggcctcgtgataaagtttacaacatctagtgctgaaatgaaattccgcagccataatgcttgacaagtagcctcatagcctcataacacgccatatactctgcctccattgtggatgaagctgtgagtgtctgcttgacacttttcctcaatacagctcctccagccatcatataaatgtagcctgaagtggaaccttttatcgtccacgcatcccacataatcggcgtcactgaacccaactatatccaaagtgtcaactcgccgataggtcaacatatgatccttggtaccctgaagatactgcatgaccttcttagtgttggagtatgttttaccaggatctagattt

SEQ ID NO: 141353 - DNA, 558 bp, Cannabis sativa
agtacaaggtcatgaaaggtcacctttggaagttcaaatacaaacacaggtaaggagttgcttgttgccgtgagctttggactagcagcttttgaagcagtagctaatagaagatcttcatcccaaatgaggcggtgggaagcttatgcaaggctatataaaaaggttgatttcgatataactttaaattattacccgatttgaaagtcgtcgttaattgcagctttgcatgtttttcgcttccagtgaccgatgagtggtggtgtgaaccaggacatggtgattggtgtacttgcctagaaaaatacacactctctcgagacggtatgtaccacaaggtatattctatcatgtcatattcctcaaaaaacaaaacaactattaatttttgtcggtgaaaagtgatcaaaatattgtctttcccatgcaacaagatcaatttgggcgcttgttgccgacctttctacaggtcattgatttgacagacgatgaagagtctgactactgggttgttgtgtccgatgttttcgatggtaaacagctcgattattatacatc

SEQ ID NO: 141354 - DNA, 749 bp, Cannabis sativa
tatgatattttttataataacaattaaaaaataacaaaaattaattctttatgtcattgtactttagtctacttctaaacaatgtatgttatgaaatgtgtttgatttttatatgatattgtcaaagacggagcgagaaattcggttcagtgagggcttgaatagagtgttacatatatgcttagaaaaaaaaatgttgattgtttttttttttttttttttaatttagtgttaaattttagtggtattacctttaaattgggtaggaacaaattgagtgagggcttaatacacatttatagtaaataaaaatttaaatacatatatgtaacataaaagttttttatatattataaaattgagtgagggcttaagcctacacaatggcttaagtctctccgtccctgggtattgttctttgatttatttttaagatagaaaataaagtaaaatagtaataatgaaaaagttgactactttgtgaattggttaaatttttttagttttggcttttgtatttcactaaagtcattgaaggttatttattttagattgtatattgttatttttttggttttttttttttaagaaaataaatatttaaaaatattaggtttaaatatatcttgaatattaagtttgcaattacattatcataatttcttcaattatattaaattattaaaactaacatattgcaatcagtatttattttagattgcaataccatcatttaaattatttgaata

SEQ ID NO: 141355 - DNA, 588 bp, Cannabis sativa
gaacccttgagcatgtttttgaagctttttctttaggttgaatgtgtgaattttgtgaaatgggggctgttagggttacgtttatttaaggtttgattttctaagttcatttgagttgaatatggcattgagcagctggtttttatgtttggatttagttttgtgcaagtttaagctttgagttcaaagctttaatctctaatggcataatttgattcattgggtttttctgtaaaatacttgttggaaaatattgtctacgcattgtttaggtactctagaaagtttggtggcatttggtggaaaattgagcaggaggtgaagggtttggggtgaactggtgcaaaccggctagccgattttgccagacctctaaaaccggctagggcaggatcccccaaacacttcattttcttgattttcgtccattttagtgtcgtggttgggtgtttccctaattcctgaatttgtgtaacctatatagagtataatagaacctaggattgttggttcgggtttctcgggattagggtttttgatcatgtaacttacccggtttcataagtggttagggcatccatctagcac

SEQ ID NO: 141356 - DNA, 521 bp, Cannabis sativa
ttttggtgcggtaaggtccttgaccaatcgggttaactcgtccaaccgagcctggatcaccggatctgtggttgtttgaggttgagcaatattgacaccagcattttcttggtcctcttggactggctcaagtgggttcactatgttggaaccacgattgtctctatttctgttgagggagtctcgtaggtctctaccccctcgggggcctacccgttcaaaaactgacccggttcttagccttcctccagtgttctgactgtcagcccttccatcagccgggggtggtacttggtcattcctaccccttaggggtggattttcaagttgatgttgcctattaggggcatacggccctctggcttgataaccccccagctcaggatttggttggttgttagcccgactttcagcttcatcaccaccatgaccattatggtagtttggatggtagtcactgttgacctcagggtcttctcttctccccctggacctactatttcttgggcgatcattgccat

SEQ ID NO: 141357 - DNA, 885 bp, Cannabis sativa
  modified_base (78)..(80): a, c, t, g, unknown or other
  modified_base (586)..(588): a, c, t, g, unknown or other
  modified_base (676)..(693): a, c, t, g, unknown or other
gtgaagcttgtaaaattctggtgcatgaatctttgattttgttttttatattcaagcttaaatcaagataaaatcaannnaaatatgaaaaagataggttagacaagaacttggggttaacaatctctatttggaatttaaaatttaaagtcaaagcgttaaatttataccaaatatacatgagtaattattctttcttggaccaccactactaatctaactctaggtctaaattgcctatagtaagcatataaaagtaggagatttttaagatagaagatttatatcattttgggatagaatgtcgggaatagagtcatctgcgccattcaatttcataagataaattagaatgacatcataagcagatgatttataaactattcatccaatgatatactatttaagcaaattcgaaatgaaaaagctaagaggaaactaataaaggataatttcaatttaaaataagaatccaacgatgtctcggtaggcgagagtcaaagttattcttattttaataatctttcactgtttcatatgcaaatactagtctaagctgtcatctttggatgtacaactagatgtnnnatttacaaatacttatctattgagatccaacactattatgtttgtctaatggataacaatcctttgggatttgtcccattaaaaacannnnnnnnnnnnnnnnnnacaatgaagattcaaaattaaactgcaataattaataacaaaaaacagcatggttcaatataaattcatacacattcagaaatcgtcatacaattaacaagtaagaaagacatgtgaaaatacaaaacaagcacatcttaaataattttcaaggtttctaacaaactgatacagtatctcggtaggcgagag

SEQ ID NO: 141358 - DNA, 532 bp, Cannabis sativa
actggtcggtctttgtccttctggattgatggttgtgaattgaccatcaatctaattgtattgcaactgtctgattttgacagaatcctgggaatggattttttgtctgagtatggcgcaacgatcgactgcaaatggaagatggtggtgtttgagcccgatagtgctaaccaagcagtgttcgtgggtgaggttcagggggcacgtttaccaagaataacattgtcgaaagctaaggacctgatgagcagaggttgtttgggattcatagtcactatagtggataccagtcaacctgtgacatcagggcctgggaatacaagattggtatgcgagttccttgatgtctttcgggaagatttaccaggattgcctcctacccgggagattgagtttgttattgagttggtttcggcagcagatacagtagcaaaagcactgtatcgaatggctccaacgaaattgaaagaattgaagatacaattacaagaattattgaatctgggatctactcaccttggggtgctccggt

SEQ ID NO: 141359 - DNA, 681 bp, Cannabis sativa
tctttatatcaaacttattgttgtttttactataaaacctaattcatatcataatgatgattaatagtagattgacctaaatgttgagtagtaatgaactcatgttcattttattagttttttttcttattcacacgttaaagtttctcagagaaaatgattcttacaactttgtttgggaatctataatatggatgattgggaacatgatatacaattatgaaatcccgactttcctaacggatcgaatgttggtttcctaagtgttaattttggaattaaaaagttgtgcacaaatttagattggatttaaattatactttcactagtgtattaacggtaccaaaggataaaaaattaattagataattctatcaatagttcaacatctatcaattcgtctttcaaagatttggttgaggatgttcaaattcaattatcctatctccttacaatttgtttttctcacattcgtcgtgatgttaatttaggcgcttatagattagcaaaacaagctttagcgttagataatataatatttgtattaggttagagaaaattttcacggctactttcttagttattgtaaatggctctcttaagttataataacaaattacactctataccatttttataatgtcctcttttatttttaccttcttttttaaaatctatcat

SEQ ID NO: 141360 - DNA, 990 bp, Cannabis sativa
tgttcacttcggcagataaggtctcgatggtctcttcaagtcagtcagaagcctcgagatccttagtcaactcagttattttcttctgggcggtaaaaaagattcttgttgacttcacctagctccatgcgaacagctccaagttccaccctggcgtcatcagtgtccttcctagccaagtccacctccgccctcatggtgttggacagagtcgcgttcttggaggcagcagacttagcccaagagtatgtgtaggccaacttcagactggcctacacagagaaaaaactttagaatttgagccaagtaaagaggattaaaggaaattgtcaagaaagacttacccttgtgaattccttcaagactccacccatcaacagctctagctagagaagagtcgttgttagcgctggccagttgctcactaaccttaggaactaatcggttcatatagtgggcaagcatttccttgcctttcttggcctctggaagcactaacaaaggttgagtaggggcccgcatctgctcgggtccactcttgatcagctcagtcccacctttcggttgttcggtcctgtctgaacttcctcctcgagactccttagacctagcgactttggagtagaggggtttgcaaccgttagctcctcagaaagatcaatgacgtccccggcaggcgtcttttccttagaagatgtcccctcactgcctctagatttcttggctagaggagacgcactggagctccctccaatcctcttcttcagagcatcaagcatcttttgagacatgtttgcacggaacaaaaacaacatgcttagagaaaacagacatcagaaacataaagcataatagtcaagaagctttaaaacaagacggagtagtgtgcaagatgattgcctgagcaaggctcgaaagtccatcatcacctgacaagcctcttattttagacataacaactttccattttccgagcacaggagaaggcgg

SEQ ID NO: 141361 - DNA, 794 bp, Cannabis sativa
  modified_base (769)..(769): a, c, t, g, unknown or other
tctgctcaaactgatacctttaatgtcccctttaatcagggcatcctgtaggagtcgtaaaagaatatcagcaacccagatgaaaatgtaaggagataggggatctccttgtcataaaccacattccgggacaaagctactaatctttctaccatttagaagcaggttgaaagaagtcgtagttaggcattgtcggatccacagacggaacttctcaggagctctgaagcttaaatgaacatgatcaataaaagaccagcttaacttgtcatatgcttttaccaggtcaattttaatcgtaaaaaaaccttcttttcctttcttcctcttaaaggactggataatttcctggattaaaacattattatcctgaatgctcctccctggaacaaaagcagcttgggtagggcagatcaatctcggtagcacaggtttaattctgtttgcaataattttggagattaccttataaacaacattgcacaaggaaatcagcctaaattgggacactttcttagggttcaccaatttagggatgagggtgacattcgtaacattaaagccattgtgtaaattcaccgattggaagaagtcatccaccacatcacagaaatctttcccaagatttatactttatatcaaaattatatttgttatcaaaatttctacataggttgacgtgccatctacatagacgggaaaacaagattcattgtctcacattaaatactgtaaaatgtaaatggacttactgttgggttttatgccntaaataaaactctgtttcaatgtaa

SEQ ID NO: 141362 - DNA, 714 bp, Cannabis sativa
aattaataatagttaaaaagagactgtgttatatatattggaaacttgggtgattaatatttatataagataaaaataaatatgggaaagagaaaaaagatgcatctaataataatcgatggcattatgtgattttttttactactttaaaaagaaaaaaaaaacatgagtatgtataagtatgaataatatcaaaaactttttcttttgagaacttataaataataaaataaaaaaaacagagagaaaaaaataaatatttataaatgatgaatatgtatagaatagtttataagttgttattattatttggatatacttaccgtaagtatagtttatatatagagttttttttaaaaaaaaaaataataattggagaaaaaaatatttacaaatgataaatatgtataggatggtttataaatgatgaatatgtataagatggtttataaattattattattatttagatatactatggtacgagtaagtgtagtttatagaggtgttttcttaaaaaataaataatcagttaatgttagatattttataaaaatttatcaaaacaatagtaaaatattaagttatagatttaaacactaataaaatatgggccaagttgcaaaatggtcttaaatctaacaattaagttaataaaggacccttttttaaaaaaaaattaacaaaatgtccttttagttaaaaatttgatga

SEQ ID NO: 141363 - DNA, 694 bp, Cannabis sativa
ttatatacgaatctaggtatttccatctttttagtttttaatctttttttctaaattttaaaatatttatttatgccataaaaaagtaaactcttataatttttctttgtgtaatttctactttttaaatgtaagatcattttgcagagtaaaatgaggaaattacattatacacccactttacctaacatgttttaatttttacctttatttttatatttttttaagatatacccacatttatagatgatgtctctattataccttttaggttaatgcaaattatatactagatttaagtagaatgtgaaagtatattgggcaaccctctcacaaaaatgagtatatttcaatgaaatataatataaatatatttttaattaatagagtattactcaacttatcccactaaaattaaattgtaggaaattacatggtatacccactttactttacttgttttaatttttacctctatttttatattctttaagatatacacacttttatagatgatgtccccattagatcccttaggttaatgtaaattatatgctacacttaagtagagagtgagggtgtattggacaattcactcaaaaaagtagatatatattaataaaatataatataaaggtatttttgattaatggatacaaaaaaaaagtggtatttttcaacttattccaataaa

SEQ ID NO: 141364 - DNA, 538 bp, Cannabis sativa
agtatatgtttggtcattttgccccattgatattttgtcctttagtggacttagcattatgtgactatgtgtttatttggctgaattacttgggaaaaacctctctttagctcattttactcaaaattagaaatttggaaaaattaaagaagttcatcctctcaaagctctctctctctctttcggccctctttgagcagcaagaaaagtggtgttttccttggtaattcaagctggttttagcataaatcttgacctcaagttgttggtaagactcttgtaactccttcttaagtttcttgggttttaaagattagaaattttgcatactatggagtttttacttgctgcaatggtagtttgtatttgatgttgtgttcttggttttataaatgtttaatggagtaaaatagggtagattttgaagcatgctatttgcttttgttcaagtttagaattttcgctcaaaaactatgatttctatggaaaattgatgagttttgttgctgtgcttgttggggttgatttctgttgtttg

SEQ ID NO: 141365 - DNA, 1219 bp, Cannabis sativa
  modified_base (424)..(425): a, c, t, g, unknown or other
  modified_base (569)..(569): a, c, t, g, unknown or other
  modified_base (865)..(870): a, c, t, g, unknown or other
tttaggacataaaacccaacatcttcagtgtccactttctccaccagtacgtcccgtcttgccacatattccctaataacgtggtatttcttctctatgtgcttgcttcacttgtggcttcgaggctctttactgttggctatagctccagtgttgtcacaaagtaaaaccagtggtttttccattccaagaacaagatcaagtcttgagaaaaactttctaagacaaacaagttccttagcagcctcagcgcagctatgtactcagcctccatggtagagtctgatattacagtttgcttagcacttctgcaaacaagtactccacccccaagagtaaaaaaccatcctagatgtagacttcttgtcatcaagacaagcttggaaatctaagttggtctagcctacgggatttaaagcaccanncttgtagactaacacataatgcctaatacttttcaaatattttagaatatgcttaactacagtccaatgttcctctcctaggtttgtctgataccttctcacaatttttactacatagaaaatgtcaggtctagtgcataacantgcatacattagacttccaactccttaagcataaggaacccttctcatgtcctctatctcttgaagattagtgggagactattccttagatagacggataccaggtctagaaggcatcactgcccctttggtatttatcattgagaatatctctagcacctttttaatgtaagttgtttgagagagagcaagggatctgttcttccaatttctaatgatctaaatacaaagagcataagcagcttcacccaaatcatttatttcgaattgcgtgtcaagccattccttgatgtcannnnnnttcttgatattgttgccaataataaaaatttcatcaacataaaggaccaagaatactaccacttgattattcttgagttggtaaacacaaggttcatctttgttttggcaaaagccgtaggttttgattatttcattaaaccttttgttccaagaatgagaaggttttgattatagtcaacaccttctctttgggtataaccctttgcaacagtctagctttaaaagttttgacgtcgctaccagcacctcttttcttcttgtaaaaccaattacatccaattggatgataatcatcaggtgcatctacatattcctagactttgtctttttcatggaatccattttta

SEQ ID NO: 141366 - DNA, 665 bp, Cannabis sativa
gtatcagggtacgtttctacttttaaccttaattacccctagatcaatcttaaataactctctcatctgacggctgccgtacatcacgggataaaatcatatctctatttaaatattaaatagttcatgatatcatgacatttaaatagtttgtgacattgcttttttatatttatttattttattttgatgaagtcaataatagactttttattttttaggaaattatattgtatacccactttattttacttgtgactcttttattttatacgtgtgtgaaataaactgtttaaacacaatttctatattataaattattttaaatttttcaaaattttataaaatatcataaataactataacgtatacgactacaaaaaaaaattagactaaatttttttcctagatactgaaacaaataaaaagtgcattgtatattttttttttcaagagagcattatagaatcacataaaaaaattgactttataaataataaaaattgtaattatatgctaagggacaccttaaaataataagcatgtaacatattattattaatgcattttaatattaaatcttatttaattcaatttaataaataatacaaaaaattactaattaattataaaatatcacatattaaacatcttaaaatatcaaa

SEQ ID NO: 141367 - DNA, 742 bp, Cannabis sativa
agaggctgatccgaacaacttcactggcgtctggagagaatactttagagttcgagtgcggatcaacattactattccgttgaaacggaggatgaaatttagacgcagggggaatgattcgttcttttatgccagtttcaaatctgagaaggttcccacattttgctttatttgtggattgcttggacactcagaaaacttctgctctaagctctatgatacacctgcgcatgagattgtgaagccgtatgggttgtggatgaaggctcctaatcggcgacaaaattttttgacagcctcaccgtggctgcgatcggggaagacggctactcagaccagcaatgaggtgcctgctgatgaagctatcaacattaactctccttcccaatttgcgcctgaatcaaagaacaaatcgcatcatatggaatcagatcgtgatatatccgtgaatgaaggtacagtggttattttaaaggaaagtggtgttaaattctcttctgacttggaatttgaaatatcagaagggaagaggaaaagaatggactctctcttcaatgggcctattaataataatagtgggccggtggaatcaagtattactcttgctactttgaaaaataccacaaatattgagggcagttcaaaaaacgtttcaatggtgggtactggtgtccaggtccaccaatcattatgaatactctaagttggaattgccgtgggcttgggaacccacgggcccaac

SEQ ID NO: 141368 - DNA, 558 bp, Cannabis sativa
  modified_base (108)..(111): a, c, t, g, unknown or other
gtagccgctgccattttatggcagcttattgtattttttttgagtttttgcttttgccgtaacttttgactcgggactccgtttgggatgttctttatatcgttggannnntcgttccgagctctatgtgaatatatataatatcaatgccaattttatatattgtgaaaatagatttagggattagccctatacttgtgtatcccgagattatgactaggattaccaatacttggtcaggagcattcggggatttggaatcttcatattgccaagacatcatgtaagacagtagctagcacatagagttgtgcacggtggcacttatatggaatatgatatatatgagtaactagaaaccgggattagagttattactctaaagtgagcggtttattggcctagaattattaccctagtgaattgttaataagtattgatatggcatgatatatgcatgtatattgagattatgaattgtgcgtttaaggtataaataagttagacttggtaaactagtaccttgagtttaattaaatgtggtctagggttattacc

SEQ ID NO: 141369 - DNA, 1135 bp, Cannabis sativa
  modified_base (536)..(539): a, c, t, g, unknown or other
  modified_base (666)..(669): a, c, t, g, unknown or other
taatagcgttataatgaataaaaataaataacataaaataaaatcaaactggttataactaaaatagaaccagttatataacataatgaatgtatatttttgggggaaatatggtatgtgtgtgattatttggtgagttggagcatggttgaatggatatttttgtttgagttactttatttaactggttttttgtgtgagtttttatcttagttgctttacggaatcagttttttatctcaaatttttaactagttgataaatataaaccagtttctttatattaaatttgagttattgtatgtttttctttgtgtttatttatttttttatggaaccgattcttttcatatttatgccttaatattttttggaattgatccccattattatttttaaaaaaaattataatcgattttatggggtattatgtgttataaaatattttgttgtggaactagttttgtttttaaattatatttcagtattttaggaactaattttctctttgttttttaattgtaatcggtttgagnnnntgcgtgttacttatttatattcataatgttatattttagttataaatagttcgagttatttcgtgttatttatttttattcattataacactgttatagatcaagttctattttaattataactggnnnnagttattttgtgttatttttttattcattatgttacagaatcggatatatttcaattacaatcggtttgagttatttgttttattcattatattatagaactggttttatttttagttatatctgagacatcttcttaaggtgattttttcagtgacttttctggcgatagtgacttttctagcgactatgactttttcggcgacactaactttcccggtaccgacaatttttccggcggaacttattaatacaagttttattaaatttatttattatttttttctcatattttaatctttaattattttttaatcccatattttttttgtattaattatttatgttataaaaaaaaagtaaactataccctcaatttctatatttatgaaaattctcctatgaattgctatatagatttgagttacgatttaaattactcaattagttagggaaatttgatttta

SEQ ID NO: 141370 - DNA, 1105 bp, Cannabis sativa
aaaaaaaaaaaaacaattatgtagaatatggatttttttttttcctaaagtttgataaatgtggaaaaattataattttacttaatttatggctttttttttaattaagttagttgtgtggaattatattttcatatttttaagtttttatgaaataaagccatatcttatttgtcaacttagatttgtattatgtttttgaaaaatttattattttatcttaattattattattgaatttataatttaatatttatatatatttatgtttcacaagttagttttttttttaattgagaaaaataaatatttgacctattatttaaattattttattctactttaactttttgatactaaccttactagaaaaacaaattattgaaagattattgtaaatacttgtaaataaaggttctttatatgaattaattattactactaaaatcaaaagtaaaagcatcaggttattctttaaagtaaaaataatgtctaaaattcaacaaccaagttacttttttaaattaacatgttactttgtgcaaccatagcacaacgtacattacatgtaccatgttacttttagaaagaaaaaaattaaagttgaaaattcaactactaagttgctttttcaaaatgacaactttatttgaatatcacaactcaacacactcaaccatattgattgatatagatattagattacttacaaactaacatgttactttatgcaaaataaaattaaaattaacaaactacacaaaaatcataggtaaaagtaccaatttactatttgaagcaacaacaatgtctaaaattcatcagttatgttagtttatgcaaaaatgtaattaaaactcaacaaagtataccaaaatccaaaataaaaaaatcaagttactttttgaagttctaatatataaacaagtaggttacttttcaaattaacatgttattcaattagatatattattaatacatatgtcatgatttattttgtaaataaacatattactttcttcgtaaaattctatcataactcaacaaattcaacaaaattcaatttgcaaggtagcaagttacttctattatttacaacttaact

SEQ ID NO: 141371 - DNA, 660 bp, Cannabis sativa
taatttattagatttggctattttcttaatttttttaaaaagtggatatttattaacttagttaccaaatttaggatcattttacatctcaatcctataaaaaacttgtctacactattttgttctcaaaatatgaaagcctaaaaaattagtaaaaatagaagaaaaaacatgtagaataccacctaacactctatatattttcctttatataaatatcacccaaaatggttcataaaccatgtgggattttttttaaaacaaacatcatattataaaaaacttgtccacactattttgttctcaaaatatgaaaacctaaaagattagtaaaaatagaaaaaaaacacatatagaatgccacctaccactctatatatttttctttatataaatatatagatacgtatatatatatatatgtatatatattaactaaatcatgacattttatcaatatatatatactatatatacaattacttacccaatcatggcagtgttgttaatgcactacaagaaatgtcacttttgccagcacaaaaatacaatttacttgtgaggtgttggtaaaagggggttgacaaatcagtgttggtattagaacttttgccagcataaaataaaaagcgctggcaaaaatgacttttcccagcgcgt

SEQ ID NO: 141372 - DNA, 752 bp, Cannabis sativa
  modified_base (212)..(219): a, c, t, g, unknown or other
gagcctcgaagccacaagaggagtaaacacattgagagaaaatacgacatcatcagagaatatgtggcaagaagagacgtgctatcaggaaaagttgatactgaagataacctagccaacccattcaccaagactttgacagagactgcatttgaaaagcacagagaaaatctaagattaactgaaatatactgattgttttatgttagtgnnnnnnnnagtttgttgggttttgtgccataactaaaactctatttcaatgttatcttgaatattcatttatcaataaaagaacgtaattattttattacttgtttaatacattgcttagttcacatgtttgcttcatgatcatttgtttaatttataaattcatttaaatccttatcacattattatttatgattatagtattttctacacagtggaaagtaatcaaaattatgtgattaaactttagtctcataatttatcagtacacatgatttttactgatatgataatcaacaatgtggtttacttacacttagatagtggtatgtcttttccaatgcattggtaaagtaagcttgtattggatatattattattcatcagactggaccgatattcacatagaaaaagatatcttaaacttaccatattatctttctaagtgaatattacttagttaatcttagatcaatgatcttaatcctgagatggttaggttctgattcaattgtattatttatgttctttgacttatttgt

SEQ ID NO: 141373 - DNA, 870 bp, Cannabis sativa
ctagaataaaactctattgcaacttctaatcaactactcggaaaccaaatctcaaaaaataaaaaatataaaaaagcaacataccttgatttttgcaataaccttcaaagaaggcaaaaacaacttgatcttcatcaatctcaagctggcttaagcccttgaagaaatcatctccctttaaatcaacttctttgcccttgacattatcaacatccttggacatatcgccttcactcccggcaacaacatcaccttgttcctcaccaataatagaagcattagaaccaatcttaccatcaaactcatcatcatcatcatcatcaaaaccatcaccacaatcttcacccgactcatcaccatcataagactcatttttaatattttgtgattctggtaatcctttttcgccatcatcatcaaaattagggtcatcaatatcatcagatgtctttacctatttaacaactgtaaagcaactaaacaaaacatgaaagaaaccaaccctaacataacaataatttaaaaaataaaataagccaaaactatataaaaaataatatacctcaacagaagggcagtcgtaaatgacaataatttttttctgaatatcttgaacaacagacaacaaagacttgaagttaaggtcaacaaaagacctcagggcaataaaatcattggccaacaattcctgactcgatataacttcttccaacttatattttaacatatctagatcgtcagattcaatttttttggaagaagaaccagactcaaaggttatcttgattagagcacggtcatcaatagattcatctacaaataagtcatttaatttgagagttttcctttcttcatcagtaggacaaatgt

SEQ ID NO: 141374 - DNA, 703 bp, Cannabis sativa
  modified_base (574)..(574): a, c, t, g, unknown or other
gccatgtggaatcctttgggcattcctttatatatatatatatattgattattaacattatattcattctccatatagaaagagaagctctgttcgaaaatttaaatgacaaagcctctctttccttattttttccagttagtttaaatttcttcaaattttttttgataaattatcgtgatttctcccaaaaggtgatgaaatatttttctctcatccatttattcgatttcttcgttggatctaatcatttccccttaattcctcacaatcgaaagcgacgaagctctgctcattttcttgttcttctaattttttatcggtggtatatacattttgtattatggtatatatattttctataatatggtataccattaaaaaaaaaaataaaaaagcttagattgtatattaattttattgtataggatacatatatttttaatcaaagaataccaatgtttagttttttatttctctctttattttattcgtatgtatttattcaaaaagtcattattttttaagttttttctttattttttttgtttgatatacatcagtacataaaaangatatatttgtaaattaaatgaatatcccatagtgtaaaatgaatataccacgagcttaaattttttataagtttcttttttgtttgtcttttatttgttttttgaatgagataatataatgcataata

SEQ ID NO: 141375 - DNA, 662 bp, Cannabis sativa
aatgttcatcactatcatcatcatgttctttattttttcccaaaaagtttacccaaatcacaccaaatatataaatctcattcatttttaatataaagagtggattaagataacccatagcctacattgctaagtttcattcatagattctaaaaattacaagccaaatttcacaacattagaaaaaagcaaatatgtaaaaagagagttttataaaaaagtctaaagaacactatgatattcattctttctatgaattttaacatgggaaatagaattaaatagtgaatggatgggagaaacttactcaatagtgatgcccaagtttaaatcccctccaataatctttagtttccactttgagcattcctttgaaatggttcttggaactatttgagaggatttttagaagagctattatttttgatagagtgaagagtagaatgggttgtaaagaaaagagaggacctatttaaaggctataagggttaatttttttttttttttttttattatttcacttgtattgtttgtgtccaaagatgcttaaaaatattggtggtcttctacatgtctacactcaacagtacctgttagagattttattacaatggaagaaaatcaagatattacaactctattgtaatacaatacaaggacca

SEQ ID NO: 141376 - DNA, 646 bp, Cannabis sativa
  modified_base (299)..(299): a, c, t, g, unknown or other
  modified_base (336)..(340): a, c, t, g, unknown or other
attaacaaattaatttttaactttaatctaattttcaaaattgaaaatttttgaaatatgcatttaaaataaataaaagtaattcaaaattaggtgggaaaatgattattaaaataaattaaaatatattctgaaaattaatctaatttaagttgatctgaaattgaaaaaaaaaatccaacttaaatataattttctatttaattaattcattaaaatagaaataattaagtatcttgaataaaatcaacttacttattaattctaatttaaatactaagaaaatattctaatttaanttggtccaaaattaaataattaatttttaacttaaannnnntttctaatttaattaaatttcatgaaatagaaacaaataattgagtatctttaataaaatcaacttaattattaattctatttaagttttaagttctaagaaaaataatctaatttaagttggtctaaaattaattaattaattaattttcaacttaaatatatttttctacttaatttaatattagaagatataaatagttactaaaaatttttatctagaatattttattaaactaagtgtatttatctaaattaattttaataatccaatgaaaaatttatttcatttattttaaaattaatt

SEQ ID NO: 141377 - DNA, 1085 bp, Cannabis sativa
  modified_base (547)..(555): a, c, t, g, unknown or other
tataatttatttttgtttgatagatatatattttaagaatataaattaaacaaaaaaactaatataattaaatatatatttttatataaaatcaaattattaaaattatatggaaataaaaatcttccaacaaaaaatataaataggggtacttgtacatttttgtttgcaaataaaacttcctcttcaatattatccttgatttcttcttcaattgttttcacctgaaaaccttaattttcgcgaattgttcatacttgaatcgagtaaaagaaaagatgcatcgcgaatctcaccaggctcagcagatcttcgttcatgttcgaattcactcggacaagggctgtcttaagcccctcctgaccgagttttgtcccccatgaggctgctagcgtagcccttccgtcacccatttgcagcctattgtgcgcatggggagtatgcatttgcatactcccctagtgcaatcttgttttggtgatatcttttgattcaaaaatcgttttttattgaaacaaaattcaattttggtagaattttgtgtagnnnnnnnnntttcaattaaaaatctaattatcagaataaaattaatttttcttaattttttaattaattaaaattagttttagatgttagtaggttttgatttttgaaaatttgatttttcacaaaaatagcattatggtaaattttgaaattttagattattttattgatttaattataagatcagatattacattttttttattattaaaatttgaatgatcttattttgatattaaaatattatctttgaaaataatctagttcaaatttcaaaatttgctaaccatatattttttgtaaaatttgttatttttgaaatattttattaaattaaaattataagatttgataaatgttagttttaacattttatcttattagaaatttgaaaaattgattagtttaggtttgaatagaaattttagggtttctaaacataaaaattttcaaacttattttattttttaataaaattggtaatatcctaaccataaaatatcttatttttcaaattgtttattttgtaatatttaatt

SEQ ID NO: 141378 - DNA, 596 bp, Cannabis sativa
taagataaatgaccatagtctctacaaaaacaaaaagataaatgaccatagtgacttggtgtatgagctggttgattgtcacccctccaaacaatataatctttatatgaatcaaaaattaatatccaataaagaattttttttttctctttaagggatgttgaacttatattttctttaagttttatgttaagaagttttatggtttgtgtgcttctcatgttcatgttgttattccctatttatctcttttctactgcaatataaagtagcttgtgctctagctgatccaactttcattcctccagctgttgttcctggcccatgtgaaccttggaagttccctactagaggagacctgaagcttaacgttgatgcagctattaatattgctggtagaatttcaggtgtcggagctattgtttggagtgaatttggccacatggttgttgctttttccaaacctctcacagggtgttataaggctcatgagatggaagccttggctctttttcacagtctcctttgggcttcacagttgcagttgcctattaatgaaatagaaataaatgcgcttaaagtttccatggcaatca

SEQ ID NO: 141379 - DNA, 508 bp, Cannabis sativa
cttggtcaagaagtaggaaaaatcctgctgcactcaaagaacgaattgactggtgttttgtcaattcggtgtggcttgataatttgacaccaccaactgtcacacatgaagattactatggttctgaccatagagcactttctgtagtgcttagttttgctactcaacatactgttgaaaggaggaaatcaagatttcggtttgaacgtatgtggttgaattctcctgactgttctcgattgattgctgattcttggaaggccgactcttttgctactgattgtgttgatcaattgaccgtgagcctagctgattgtgctcaatctttgcagcagtggcataataataccttcgggcatatgagaaaggatatcaaagaagctcagaaaaaagttcagcagttccataatgacacaacttcagcaactgatttttcacaaaaaattacctcggcagaagctattttagatgaactgctagctaatgaggaacaatattggcaacaacg

SEQ ID NO: 141380 - DNA, 1168 bp, Cannabis sativa
  modified_base (262)..(268): a, c, t, g, unknown or other
  modified_base (736)..(736): a, c, t, g, unknown or other
aggataagtaccagaaatacctcttcaagaaggaacaggagcgggcttataataaggcccaggtggccgccggaagacccctttgtattgggagtccggtggagtgaaggacccccagaccaacgcctgtggtcccagtgccgaatacgggggctcccgatgccagcactttgggttctggtaagtcccctttaatgctacactacgtccctcctgtccgtgagtatgctagccttaggcctatagggttcgatgaacgtcnnnnnnngtttaggatgccttccactcggtgcgggaatcatgccaaagagtattatttctctcacttaggcgattatttaggtcggtcccggatgggttctggaccttcggtgcacattctcttggacccttcaacctatttatcttctagttggttccgtccctcggacagctatctcggcgatgatgcagctagtgttaagattcgggactttgctagggccgaattagagagtcagggtagggctagcttgattgcttttcgttaagtgtacgttgctttcacagatattctaacacttaaccttttctcttgttgcagaagccgttcccatggacgaaatcttggccactcttgctggagcccatagtcttgatgtttcccctcctcctacttcctctcagttggtcactttgggaatgcttcctccagcgccccttcgggcactattgtcttagtggacgaggaggaggnacttattgaggaagctgaagaaggtgaagaagagcaagaggttgctcttgtgcgcaagcgcaagggccagatggtagaagaggagccttctaaatgcccccggagggtggacactccggcctcgagtcatgactccgggatcccctccgaggcagaggaatacacagtgcctctcggcatagtgttgactccaattcctggagacgaggagaggcaaaatcttcggatagccatgcacaactatgccctcaatgaatacacccaggggcatgccgaagtggaggccttgaagagagtcctacgaaaggagcagcaaaacgtcctcaacgtggatgacttccggaattcatgggacctgaatatggatccgctgacggactggtttaaccgcttcctggggcccaccttggctccttttgcctcggagatgac

SEQ ID NO: 141381 - DNA, 841 bp, Cannabis sativa
acattgcctatgtcgtgggattgttatgcaagtttaccagtagacctattatagggcattaacatgctattaagaaggtcatgagataccttaaaagaaccatgagtcttggattatattatcagaagtttccagctgtcctaaaaggatacaacgatactgactggaatactttatcaaatggctccaaagcaactagtggctatatttttagtatgactggtggagctgtttcttggaaatcaaagaaacaaactattttggcacagtccaccacgaagtttgaaatgatagcactagcaactactagtgaagaagcaggttggttgaggagcctgctagctgagatccctttatgggaaagaccgataccagcagtgttgatccactgcgatagtaccgtgactattgcaaaagttcagaaccgttattacaacgataagagacaacaaatatgtcgtaaacatagtactgttagagagttcctctctattggagcagtaagagtggatcatgtacgcactaatgaaaacttagccgatcctttgacgaaaggattagctacagagaaagttcttaaaacctcaaaaggtatgggactattgtccatagaataaaagactcactcataatggtaacccgacctataagactggagatcctaagaaataggttcattgggttataacaagttatgatgtgataaggaatgagatcatgctatgtaaaacatgaaatcctgaagcgatataaggtcgagataatagaaactcttaatgagatctatactctatgtagagtggagtaccgagctacaagagtactcttgatagactcacct

SEQ ID NO: 141382 - DNA, 860 bp, Cannabis sativa
taaaaaaaaaaaagagagaattaacgagaaaaaaaaaggaaaattatatttacaccccataaaactataattacaccccattactaaatttatcctattttttaattaaaatattatttttttataattacaccccattttgtgtaccaaaagggtatcttatgaatgcaccccaaaactttaatttacttgaaaaaagaaaaaaaaaaacattcagaagtcattaatggcttctacacattgattgtccaagtaaatctaataaaataaataataaaaaaaaattaaagtcattgatttgtaaaaaaaattaaatggtatgttaagaaaaatcagaaaatagtagcagttttggaattgttttgaggaaaaaaataaagtaactgaatattttttaattttttttctggtctaatatttctaagtgctgtatatcactaaattcatcaaatatgtatttatttgtttttcatgagaaacgaaaacacatacatatatacataaatttattttgtatcgattcctccattgatgaatcttaaaaataaatctttatgtttaataattttggagtgaaaaatatatatatcgatctgtttataaatttataattatatagaaatttaaatagtgtagtgtttattagaaaaaatagtgtggtatacttattcaaaattaaattaataaactaaatatagatgtgaagatatctattttagtcatttcacaaaagggcaaatatgtaattataattttgggatgtttatatcatgggaaattttatttacaccccaaaattttctaaaggcaccccattttaataatttttattttatgtaaaatttatatctttaattgta

SEQ ID NO: 141383 - DNA, 601 bp, Cannabis sativa
gtttctaggttcgaaactggttttttacttatcttttatttttagattattgttgtgcattgtgtgttgttttaattatatttgtgagcatttttttagtgtactttttttttttcatttggttgagtgattatatattttttatgttttgttttcataatcttcattgctattgtgtgatgaaactggtttttatttggtttcataatgttcatttgttgttgtatgatgaaacttatttcgatttatttgttatgcttttattcaaatagaagctaattcctttagtaaaaatacaataaaagatgttgctaaaaattttaagtgttcactatgagaagaaacttcgtccaattaaaattaaaattcgtaagaaggttatcaagaagaaaataaaaagtaaatctgatctaagttgtaaggattcatttttggtatgttttttttatttctttttgaagtatgttaattttttttaaattatcctctcgtaaatttatatgtttatttgtagtttttgaaactgttttttttttaatgtaattaaggtttaagttttttttttttttttgctatcttaagaaactagtttcattgttca

SEQ ID NO: 141384 - DNA, 863 bp, Cannabis sativa
atcgggcggtcgattccatagggaaggaagaggaagaaatggaccaatcctgagctgccatttgtcttgcgtgtggagagagatttgcgccaactaggcgctgcgttggacagttgaaggaatagggatacgccaactgttgatgacgaggattgcggagcccaaaagagaactaggcctattgggctgggcttctctttttctttctcttcattctttctgggctgccctttttcatctttcttttttcaaatttgctcattcttatctttttttcctttgctttctcatttttcttgtagacttgcttctttcaattttactacttttatttctcttcctcaacaaaaatacactttacttcctacaaaataacaataaattatatccaaataaaatatttttaatatcaaaatatctcattaatttaatgaaaatattaatttaaatttaatttatttcaaactttaagatcaagaaatgtgcatctttcaccattaatcacttacatatccatgtcttagactaatatgtctagacttcccattatatactccactatatgctctagccaatgttgcttggctatcacaatgtattgatattgtagatacatcctctttaataattggaatctcaattaagagatctctcaaacattcggcctctttcccagtggcagctagagctataaactctgcttccattgtggaatgagaaatgcaagtttgtttcttgaacccccaagaaactgccccttcacctagggtaaatacccaaccagttgtggacaaattatccccaaggttggctatccaacttgcatcagtatatccttccaaaattgaaagaaatttggagta

SEQ ID NO: 141385 - DNA, 1058 bp, Cannabis sativa
  modified_base (798)..(799): a, c, t, g, unknown or other
atcaaaggaaactcgaagagcgtaagggggtatggccagtagaactctcgcaagttttatggtcatataacacaaccccccgatccacgactggtgaatctcctttctcgctctcgtatggatgcgacgctatgataccagtcgaggttggggcaggttccctacgaagagatgttttcaacattttccagaatgaagaaaaacaattgctccaccttgaccttttagaagaaaaacacaaccaggctcacctgaaaagtgcggcttatcagcagcgtactgcgcgatattttaactctaaggtcaagaaagaattttgcaagtaggggattttgttctgcaaaaagtcatgccaaacacgaaaaacccagcgcatggggttttcggagaaaactgggaaggaccatacctcatcggtgaagaaattggtaacgcaacatatcaacttgcagaactcgatggaactgcaattcgaagagtctggaatggcgaaagcttgaatttttattatcaatagtactcgcagtgtatcatttgtactagttatgaatttatacttagtcaatttatctacataaatattctaaatgtagggggtatataacccactaactttgtactattgattaatttgtttcttataataagagttatgaactttctcgcactttcaaagttttcctaccttagtattttttacaccaagctgtaattaaaccgcaatcgagatgataaacaaaagacaccagtacccgtgtattgtgaaaagagtatataataacataagtaaatatcccnnaagggatatatgttgttcaaaaggcaataataataaatttgtctaagtacaaaacgcgagtccgtgtactgcttaaaaagtttggcaaaagtaatattaaagtaaaaagctaaacattgggagcagtagaggcagttggagtagtggattcatctgcgactttactggcagcctcgtcagcgacttcttcagtatttgcaacatcaccgtcgttgggaaaaagatttcccccacctccttgggtctgcgtgggtgacat

SEQ ID NO: 141386 - DNA, 1230 bp, Cannabis sativa
  modified_base (1112)..(1134): a, c, t, g, unknown or other
  modified_base (1195)..(1199): a, c, t, g, unknown or other
aaaccataagcatgaaaaactcatgcaaacataaatcacttcaaatttcttagattgataactaatcagattgcaatgggttttatttagggcacaaaacccaacaacagcccctctcctcatcacaagagaaaaccgtctgtgattggagagtcgaaagacgtctacaaagctgttttaattttttgtcacagaagccaaagtgattccagttccacaccttcaaagctttcgttgttctgctgattttttgtggcaccctgtatttttgatgagccaagcaagattcattccaaataccctcaatgagttcaccgcacgtcgggtcagtggtccaaacctcaagaaacctaaaaggaggcttcaatttttgttgtctcaagcatgtgtccaatatgaccggggcaagatccaagctcaagattggatgatgtgtgtggcctgtcggtgggaattgggtacaccaattcgcacttctgattgctctgtcgagcctttaacatactcgatcccttaggctacgacaatttgaccaagtgaatgctgatccaatatagccaacgtcaataccctctgtttctaacatgaactcctaaagaaaacacccttcatttcttccaactttcttgcctccccgtttctcattttcttcaagaattgcattcaaatcccctatcacggcccaggttgtgcaactattttgaacaaatcccgttaaatctttccaaaactttcctttgtgtcttgagtagggagtcccatagatgcagaaaatataccaagattctaacccgtatcccagatttcccaaaagtttgaaccatgtatcatagatatcttaaatattaacatttatcccccatctccaagcatcacaaaatccacccaccaaaccaactgctgggatacaaaacgagtgaacataacccagcctatttaaaattgaaaccatacttccctcatcaacctttttctccgccaaaaaaaccaaatccactctatctcttttagagagacctcgtaaggtcctctcagtcgtcggccgtcgaaggccacgacaattccacgagaggcacctcatgatgacggtggtgttgggttttatgccctannnnnnnnnnnnnnnnnnnnnnnagatttacttattaataaagctcataaataacatttaatgttgcatgtttcacatgatttnnnnnatgattatatatacataatgtatgagttcat

SEQ ID NO: 141387 - DNA, 597 bp, Cannabis sativa
agaatcaataatccaaatagatttgtcattccctaaaacacatgattcaaaaactgaagcattactattgttcttagtgttgagaagtctaggtcattttggtttaaaatgtcccttcagttcactatgagaacattgaataatatgtatacttaattgttcttgtattgttcgaattgatggttcaatctcttgtgaaatataatctgaagaagtgaaatcactttctctattcttcttaactgagcctgaagtagtaggattgtcagaggaatcattctcaatatctttagctttctttttgcccttatttgcagtactagagagcaacctccttgcaagtgacaatgtcctttcataagcacgtagttcagcgttcaccttgtctatgtcagacgagttctaatagttagtcataaaagatacaacaaattggttaaactctagtgataagctgttgacaacaaaatgaactcttttctcttttgataaatcaattctcaacagatttgctttttagaacttcaggttcatcatgagtaagtgtgaattgatgctcttaccaggagacatcttcacactatagagttcatttgc

SEQ ID NO: 141388 - DNA, 1156 bp, Cannabis sativa
ctgtggtctagccacggctgagaaacttttcacaattctgtgctggttacagaagtaggtgaagtgatcactatcaaataactttccattatctgagacaatcttgtatggaagtctgaagcgacatactatatttttgatgaaaaaatctagggctttcttggaggggactgtattcacgggctccgcttctacctatttggtgaagtagtcaacatcgactatggcatatacttgagtcctccctttctagtaggaagggatcccacctggaaaaattaaaaaaataattataaactaatagagaatgctccggtggactgtacacacttattttttataagctgatgtatttatattttattttactttttcatttataactttattaattttagctaaagtcaatgcatttttatcttttataattttacacacccacatgtcaatttcgtctgttttttcctcaccgattggtatcatttatcatctccataaaattttttaatggttatctacctttacagtaaataaaatacaaaaaataaatatgtagactattattttttttctttcatttctttaagtgctctctcaattcaaattgttagccgccaataaagattatccaagatccatacccacaacgctactagatcactaagatcgggaaagaatagatccatttattagtttcactttatcacatataatataaatataaatattgaatttgttatttgttttgagcgaaaaaatattaatcttattctttttttaatttttctcaaatgaagagattttttattgttttaatatttatattttttattttttaattaattaaatttctttttttttattgtattaatattttttaatttatttatttacaaactgtaaatacatatttggtaccttatgtttagtactctttatttacaaatcatacacacttggtactttatatttgactgtggtggacctaactgtcgactagattatctatcttttaaatattaattttatttagttttaatattatatgaattaatattattttcaaaaaaaaaaaaaagcctatacgattctttgttttatctaagtcacattttccatgcgaagcgcgggttgtttactaatttattttaaaaag

SEQ ID NO: 141389 - DNA, 800 bp, Cannabis sativa
agagagagaaagagagagagaaggctctatcttaatctgacaaatttgattgaaaggcttaatgctatacttttgcttgtcaagtttaaagtctatcactctctatttataggaattccgtaggtttaggtttaaattatatggcattaaaaatgataaataaatggctaaatacaacttaagtggctgaccataggatgtgggtcccactagttacaattttgtcattttattcaacaatttatcctttcttccacacataccatattttccaatttcaatcatttaaatgtcaaaactatttatttaataattaaaatttattatcaaataaaatttccatttaacttatttattaattagacttaataaagtctcttaattacaaataaaccttaaaacctattttcttcaaaattaagcccttgcttagtaaaaaatcataaataagacatagtctaaatttataattataattgattaattagaacaaattaactgagtcttacaagtagtattgtctcaacaagtataggatccatgggcctatataaccaagcttccaataagcaaatctagaatttacgaagtaaattctctaacttattaattccttcttgcaccactatagatttgaaattgcactcttaattatatagagcactctatgtgttacacgatacagatacgctacgaaattatccatcattctaatcccaatatttaaagatcctctatagatgatttacattaagtagggataaatttaccgttcaaccaatcaatgtattttatcctta

SEQ ID NO: 141390 - DNA, 834 bp, Cannabis sativa
  modified_base (628)..(631): a, c, t, g, unknown or other
  modified_base (785)..(801): a, c, t, g, unknown or other
cgagctacacagcccactccaaaccgcccctcttgttcaaataaagccccatcaacattaactttaatcttgtttaacacaggtgcagtccaactctcacagttccgcccccatcattcaaaggagacaatgaaaggcccttccttccctgagcaaatttgtattgatcaagcatgattctcgctgatgttacaatatttgaagtaagccaactcttattttgccaaacaaagtcattccccgcagccaaatagcccaactcaccattgccacttcctccacttcaacttcgtgccccctggtgaaaattcccaacaaccagctgctgaatgttacagccccagccccgacgtccactatgttgcgatgccaagcaacctttgcaaatgagcattccaccaatgcatggtgaatagtttcaaaactagagttgcacaaagggcagtcagcattgacaggaacatgacatttttggagttgaaaacacgttggaagcacacccgaagcagctcgccaaaaaaaaattactgatcttaggaggaatctttaaagaccaaagccacttccaaaaatcagtatttgcatctcggcaccaagcacccttagattcttgcaagaatttatatgnnnntttaaccgaataattcccacaagtctcaagtcgccgactccaaccatgattagcggccgaatcactaagctgaatagacaaaataagatcctgatcacggccaacaaacaagtccctcacaactgttggcattattttaccaggatcttagatnnnnnnnnnnnnnnnnnatttaacaacctaaatatgaactcctaaaacga

SEQ ID NO: 141391 - DNA, 1136 bp, Cannabis sativa
aaagctcagaaaaaaccctcatttcttttgaagaaaaatcacctccttcatggctgaaaatccaaaaaatgttaataccccacatgaggaaagccatcatcgtcctgggaaagagcccatgggatccagaagatctaccaaccggtagtccagacggaccacctgttctaggaggactcaaactgggtgtggccccaccactcgggccacacgttcccggaggacccaacctgacgttggtcctagtacgcgaacaacacgctcgaggagaactcagcgtgggagtgactagaaccctaggacaagggatgaaaagcccaatcgtggaggtacccagcctatgggagaaagtacttatgaaacggaaaactaccgcctaagacgccgtctggaagaggcgcagcggcggaacgctaaattagaacgtgatgcagccgcggccagggcggcacaggggacaaatgctcaaaatcaacctgaacttggagtgagaaaactgtaaggcaggcctcgtggctcacgaactaggagatagaaaaatgcccaggaagaacaacccagggaaaatgagatgcctcctgaaaatcagaatgatcagctagaaaccctctcaccgaaatgagaatgggaggcaactgaaaaactgatgaacaagaaattcctcatgacaatgaggaggatcttgggactcaacttggagaacgtaggtcacctacgagaaatcaccagcattcttcccgaacccataaaagtgagggcttgtacagaccctaatgggggaaatacgacaaaccgaactcagggggaaagaacagagcgtgaagaagcaagtgtgacctcaaaacggtcaaggactcacagtcgatcaactcgaaggggagagagtactcaacgagctaatgatcgagaaaacgtgggaaccagtaaatccgcaagtcactcaaagacgaggtccatgagcaggacgaagtctatgagtaggacacaatctgtgagtaagacgaggactgtcagcaattactcccaaccggatttgtaagagcacttgaatcgaaagaaacctgaccttcgccaacaacttggtccaaagcaagaggatctcatctaattgcgaatagacgagttggaggacaagt

SEQ ID NO: 141392 - DNA, 536 bp, Cannabis sativa
ataatagccagaaaagacctagacatagcttctataggggccacgtaccgagctacgactaaggcagagatccttacaggatctgagccatgtgaagtcttaagttgaatattcgactataatagactcaccattaagcttcatacagtgtttctaaggaaaccacgcatgaggataaggttgtatatgcctacagaatcaaactcttgccgaagtcacaagaggacagaaaactggatacccacttggaactaaggcccatgccagccaaggcccatcctaaatgtcgtcccatctaaatctatgtccaaaactcctttaaaactatggaatggtcgtatgcctaacttacgtcattagagaatttgggatgaatagagtatgtaaaaccagaaaacgattaaggtagaaaacaacgaaaaataacaccatgatatatactggttcaagtccgatagatcgatgtaatttatggctctactcagttctagaacaccaccacatcctctttattgattgagcaagaaccggtacaa

SEQ ID NO: 141393 - DNA, 521 bp, Cannabis sativa
atttatggtgagatttctttgtgttaataaaccgattttctcacctttataatatgttttcaatgcttttttctatcataggaaagaatcttatttagctatccattttttaagtttggaaacttcttgtaagaaaagaaattcttttatggaaagttggctttatatggaaactttgaccatggttatttctccttaatgagtttgattgtgtcttgataagatcagatcaatcacactgattttagcaggtatcaagtccaaatacatgtttggacactattttggcaagtttctttttctgatctggtttgctgctacatatgctgtctctaatgctgcaaaataggattttcttttaggaacgtttgtaatgttgggaatattttaccattatcaagatttactaataaatatgttgtattaacatcctaaatatgaattctctaaattaatgaaaataaacacataagggtttaagaaaaccttacattgattgtaacggaataatatgactcctt

SEQ ID NO: 141394 - DNA, 1198 bp, Cannabis sativa
  modified_base (296)..(301): a, c, t, g, unknown or other
ttataaacattgggtacttatgccactaaaaaaaatcattgggtttatgccgcttacaaacctaaaactttgggtacttatgccactatttacccataatttaatgactatttaagtaccaaattatttaattaactaatgaattgaaatgttaatataacttttcaaacagagcatacgaatatatagggacatcaaatgcgtaccttgggtcgtggctaggaatttcactagcaacttgtccaagacaacctaaaaaaccaaaaatatggtttttatgttttaaaatacatgannnnnntcgtcgcacgtgcaaaccccaaccgttacatacaagatcaaaaagctgtaaattttagttattgattatagtatttcttataataacaaataataatatgtataaactaatataaatttttatatttttgtacagtttggagacaagcaggaatacaatccaaaaaccaattattaccagtataaccacagtggatagaacgactgatggcggtgattcaccaagacttggacgattgatgctgaaaggcctaagaatttttcttccctagcttatttttttaggttaacttgtagttagatttattaacttgttaatacttgaactaattttacaatattagtgtaatatgtaattttaatttatttaattgcttctatgaaatgaaattaggtatattggctacataaaattaatttaaataatatttaatttaccaattaaaaaaatatttaatttaaatttaaattaaataatataatatttaaataaattaaattaattaaaataaactgaaaaaaataatccttagggcttttggcgtcggttcctaggggtacatatggcgtcaattattggctaggaaccgacgccatataacccatatgacgtcggttcctagaaagtaactgacgtcatatgtccccctatggcgtcggttattttagaccttacatcgttaccttgatcagcgtcgatagcgaattttgccaaaaccgacgctgaaaggccttaaaaactgcctctacaggatgttttagtagtagtgtaggtatgttatattttttttttggagctcatacatatcacatatatgtaagttcgctactgcgctggtaaaagtaactttttccagcgcatttcgcaaactgcgctgacaaaaaggtcaaagtttta

SEQ ID NO: 141395 - DNA, 1083 bp, Cannabis sativa
tcagggtggtcatcctgtaaatccaccacaggctcctccagattgggagtagaggtttgcggaaatgcaagattgaatccaccaacaagaagaataaattctgaggttaaggaagcaggttcctcctaccgtgcctccgcatcaagctcaggctgttgtagctccagcggtgccagcagaacaacctgttgctggcaactgtatggagccgttatatgaaagattccataagcaaacacctccagtgtttctgggaggtcaagatgtgatgaaggctgagcagtggcttacagtgattgagcgaattcttaattttatgggggtggttggaaatgatcgggtgacctgcgccacatttcagttccaagaggacgctctcgtgtggtgggagttgataaccctcactcgggatgtcactgttatgacctgggaagagtttcgagagctatttaattgcaaatattacaaggaagtcgtccgcagtgctaagcggaaagagttcactgaactagtacaaactgaggggatgtcaattacagaatatactacaaagtttgatcgattggcaagctcactgtgggtattgtgccaatagatttcagcaagaaagaaaagtacttggccggtttgaatgtgaacattagacatgatctggtgatcactactaacgaagcaactacttatgcaaaaatggtagagaaagccctgcgagccgagggtgcagtaaaattccttcaggagcctcgagtgactcaaagtattggtgggtcccccacccttcctactcctgtttatggtagggatggtggttattccaccactgatcagaagaggaaagttaccccgacatctagtggctcgaggcagagcaagcggtttcgtgggaaccaaggtagaggtggacgccagggttattcttaccctgagtgccatgttgtaagaaacatcatccgggagagtgcaagcggaagacatgtattctgtgcggcatggtggggcatttcaagaaagatttccctcaggcaaagaaggaagaaccgaaagcagaggcaaaacctatacctgcttgggtgtttgctatca

SEQ ID NO: 141396 - DNA, 922 bp, Cannabis sativa
ggctctctagccaagatactcgcactgtccatagaatcaaactatgataaggcaactcccaacaccgacgctcaccttatcactcgtgagcaaggtagcgtgtgtggcaagattccaacaccaagttaacgtgccaacacttctatcatgccccatttgatattgtccgaacaatctccctcgtcacctaaggactcccaatacgtccatggaccgatcctcagaacgtcatgcctccacgcatgttggtagaccctcgagacaagccataaaaatagttgcatacattagacctttgtccctttccagcatggtgcaaccgtcccatgcgtgaatgcgaactagcccacgaatgactacccatgtcatctcgtgttgagactcatggccaaggcacaccacaacgtctctaagaggtttaggccacgtcctgtgcaagcagcataccagcaagccaatggaaacgtactcgttaacctctggtagcttcttaaatgcactaccgggttagcccaataatgtccatgagtactccaactcatggagacatataagtcccatagtggtcctcatatgcccgccctactagtcccactaactagtagtagctcacttagcacaaaggtgtcagggggtagtggagagctgacaccagagtaccctcttaaagagcattctgagcttttaaccttctaccaggaacatacatgattttggctctgttgacatatgaccaaaccgtaaaccaaatcacatagcttcaccaatccaattgcaccattctatttgtagatccaaataagtggcgaatactaaaccccgtcccaatccagacagtattgaagatatttacgaaaatgccactgccatacaaactaagcatcagcatgcacctcaacatgtgccaccacttgaccaccac

SEQ ID NO: 141397 - DNA, 711 bp, Cannabis sativa
aaaggatagttgttctgctattccttggtgagtttgtgtgtctttgagattacttttatgtgaagaaaattccaaagtgaagaacataaagaataaccttcagaagaaaattcatccaaattttgcttcgggaggaagcaagcaccgttatctttggagaagatttctaagaagcttactttgggaggaagtaagcaccgctatcttcgagagaagatttctacaagtcttgcttcgggaggaagcaagcaccgctatcttcgtgagaagatttctacaagtcttgaatcagaaggaatcaagcattcatcaagtaatttgaagggagttcaaaccttggtgtcttaaggagattcattcagcaaagaagagtatatcaagcttgcggcaaaattattagagggagtctatgtttcgtttaagtcaattactttgcacgtgttgaaatttgacaaatgaatcttatctctgggcgtggcccgtggactagttacaatctgcaaggattgttgataccacgtacaaaatatcgtgtgtcattttaatttctgcaagtttactttctgtagtattattctgatctatgaggttcgatttttgatagaacagattttaattttgttcaaacaattttatgacagttccgcatcaattgaattgtttgctaatttcactcggtaatattaaaaacgaaatttcaattttgaatct

SEQ ID NO: 141398 - DNA, 591 bp, Cannabis sativa
ggtttggagagaaactaagttcaccattgatcatacacatgcccataatatgtacaatggtgattacttaatccatttatccaccctacattctaagcaagatttcgaattaattgtttgtaccatgtgggctatatggcacgaaagaaatagggtcattcatggggtgtgtcgaaaactagtcatgtcattgctacatttgcaagttcacatcttgaaaaatatggtcgggctagaacaagaaaccagcagcagtatgtaacctgcaataacaaaaccagtctcgtccttgtgccagcaacaaatcagcaagaaataaacaatgttccatggacaccaccgaacacttcaggattaaaagtgaaagtggatgctactgtaaacaaggaactgaagatcttgggggtcggtgcaattgtaagagaccatcaaggcaatgtcattggtgttatatccaaaccagtacaaggatgctttcgatcagatgaaatggaggccaaagcacttttccatagtcttaattgggcactgcaattgcaattacaaattacacatatcaacactgacgcattgcgagtatcctcgactatt

SEQ ID NO: 141399 - DNA, 680 bp, Cannabis sativa
taatcaatattttagactctaaccagacccggattcgaatccccccatggccctggcgctgaactcggcctctgacctgaatccgaattcgaccccagacctagaccaattttgtgaaaattatgtacgcaagtatacgtagtcaaacaagtactaaaatgataagtaaattcatctccatagggattgcaaacaaaaacatgttgtaaaacacactaattacaacttaaagtaaaagaaaaaaaataaaaatggttgagcaatgattcaagattaaaatgacagtaattaaactcgctaaaattaatgctattgttgctagaaaaatgctttaaaaaagtgtaatatggtaaaaagtggcttgaataactaatccctcctatgctggtttttcccagatgttataacattacctcagcattcctatcagtatttttatgtatttatgagaattttccaaaactcacaatttaagttctactctagattcacatattcctatatcaaactagattagagaacactaattatgcatcaattcttaagttatgcaaggtaaatgaaatattcctatttcatgtacacaaaaaaacctaaatctaggatttctcttgcttaggggtgaaaatcgatcggttatggtcggtttttaaaattttataactgactggtcggttacg

SEQ ID NO: 141400 - DNA, 522 bp, Cannabis sativa
ttgttccttcaggccattcaatgggttcttcaaggaccctcaacaacttctgttgtatcagtagagatcttattttcctcctccatattctgtaatcacctgatccatcaaacttatcgatatcagttttaagaatactcaaattgtatttgctaaaaatcaaattacataaaggtttagaatgtcatccaaatctccaatatctaattccttttcttgatttccatccttgtgttcttgaagatcaaattcttcttgtccttgactttcaatatctttcagactttcttcttgaatgtattaatttgaatctttcttgcggaaattaattggcgctgataccactgttggaattttgttttgacaaacacacaaaagtgatatttttcaaaatttattaccactgttgtgcatccacaacagtagatgttattattgtaaaatctcacaaatgaaaatttatgtttcaggcccaacaaccaagagcccaatatgaaacaaaacaaagagtcaaagactctt

SEQ ID NO: 141401 - DNA, 896 bp, Cannabis sativa
actttaatcaagatttactagctaaacaagcgtggccttttgttaaaaatccagattcactcctcaggcaattactcaaaagcagatactttcctcataactccttcctagaagcaagtatgggccagtctccttcgttaacttggcaaggtattaagtggggtcgtaatctattgaccaaagggttgagatagaaaattggtgagggtcgttctgttagatgtggctcagatccttggattcctggttatactactttccttccaacaagatacattggctcttcaaatggtgttgtagcaaatttcattactgaggaacggcagtggaatgtctccatgttgcaactggttttttttccacttgatgttgagaaaatcctcactatacctttgagctacttcagcaccaatgataaacttatatggcatcatcataattcggggatatatacggttcaaagtggctatcatctagcaacctccctagaagaagaagaccttagctccagctcctcctcatctttgtcatggtggaaattcttttggtccctaaaaattcctcaaaaagtcaagatctttgtctggtgtgtcattcatgatgctctacctgtggctacttcccttgttcgaaggaagatcattactgattccacatgctccatttgtagacaagcttggaaaacaacggggcatgctctatttagctaaaaatatgctaaggctgtttggagagctcaaaacttaaggttcgattggcacgcgtgtacatcgatgcgtaatgagactacctgctacatctttcaacaatctacaccaaattggagatggaacaacttttttgtacactttgggctatttggactgaacgtaactgtggtgtaattcatagaaaac

SEQ ID NO: 141402 - DNA, 517 bp, Cannabis sativa
atctgtttaatacagatctacattgcatgaatctagattttcgattctggagggagttattttgaacgattaaaaccgaaatcaaacgttgaatttcagtttcttcccagtttttctggttttttttcataattttctgtttagatcattgcagttcttcttttccaattaatttttgtcagaatttatggttgtattaccatcgttttaatttcattctggttgtgttgcagatttgaacgatggaggtatgttcatcttcttcgttcattccgtgcggcttaaggtatagaccaggtggtatttttgtaatttttttattctgggctgtataaatgttgaatgggccgacccgtagtaattttgtaattttttaccctttttggaattttcctatttttttttccctattattttttacaaaataaataattactatttttgttgggttttttgtcctaaataaaatccatttcaatataatcaaatttactaattaataaaaaataaaaaatta

SEQ ID NO: 141403 - DNA, 727 bp, Cannabis sativa
cgtaacgggccctatgtaaattagacaaaaattatgaatggcattattatatatgtgatatgtttattataattgttaatagtatttactgtctttctgggcttggctcacgagtgctctactgtgcaggaaagggtaaattggtttgtgatcaaccatgagtgcgggagcttagcgattcttgtacatgttcgggcgacactagaccaagcgggttgggtctaccagtgatgtacttttgtaactctgatttaccgcttaggtcggctagtgaaaaggacttgtaatattttgtaaatatttttgggatcccaaattatgtctcttttgtttgtaaagtttaaagttattacaagttttattttctttctgttttagataaaagtttaaatttaccgcgcttatgtatcttgtaatcctgttttagaggattaggtttttattattgattagcgtagcatgcctaatagttagggcgttacatttagggtttgatgtttggggttttggggtttggggttttgaggttttggggtttaagggttttggggtttgggatttggggtttaaggtttggggttttgggttttgcaattttggcgtttggggttttggggtttggagaatcgttatgggaatgggaataggaattagaattggaatgggaatgggcatgggtcggggaatgggaatgggaatgggaatggggattgggaatgggaatggg

SEQ ID NO: 141404 - DNA, 1239 bp, Cannabis sativa
  modified_base (859)..(859): a, c, t, g, unknown or other
agatcctggtaaaatatttccaccacgaccttgtaagtaatcccacaactcgcctcttgcggtcaatggatcaatagagatccccgcctaatgggctgtaagttgtgtgttatcatccaaattcctaaccctagccgcagccgtgctaaaatgacttatgtacgccttaagtatctcaccgggctgctgctttatatttgttagcgaggctacttcgggtcgtctatccctagcagcgtggaactgtttcttgaaatccttagacagttgctcctaggaggttattgaatgatgagtaaacttgttaaaccagctactcactgctccaacaagcgaggttgggaacaaaatacagcataaattaattgtcacattactcgctcgcattattgtgttaaagttattcaaatgcgagactggatcagtggttccgtcatatgacgtgacatgcgggtttttgaatcctgaaagaaaaggggtattcattaaatctggatgatatggctcaagctcctcgtctgagtcgtatccagattgtttctctagttcccccacttgatatctcctgaacttgtcttccagctcgtttatccacaattggatgggatcctcttgctttggaccaagatgttggcgaacgtcaggtttcttccgattgctctcgcagatccgattgggagtaattgttggcaaacctcgtcttactcatagattgcgtcctactcatagactgtctttgagtgactcgtggatttactggttcccatactttctcgatcattagctcgttgagtactttttcctcatcgagttgatcgactgtgggttcttgaccgcctcgaggtcacacttgcttctncacgctctgttctttccccctgagagcggtttgtcgtatttctcccattagggtctatacgagtcctcgctctatgggtttgggaagaaagttggtgatttctagcaggtgacctacgttctcccagttgagtccctagatcctcctcattgtgatgagggatttctcgttcattagtttccagttgtctcccatctagctgttcgttctgattttcagggggtacctcattttccctgggttgttcttcccaggcattttcctgtctcctagtttgtaagccacggggtctgccttgtggtcttctaactccaggttctggttgattttgagcattcatcccctgtgccaccctggtcgaggctgcatcacgctctaac

SEQ ID NO: 141405 - DNA, 683 bp, Cannabis sativa
cactacaaaaaaactcattttcaacgactaattttttagtccttaaaactcaataattagtcaccaacaattttttacgactaattatttttagtcgccatttggtcgctgaaagtcggtcgtagaagaaatttaacgactattatatttagtcagaaaaaatattattttctatgactaaaatttagttacgaaatatattaaatttagtcacaatataattgatatattggtcacataaataccaatgtgcactttcaacaaccaaaaaattaatcttcaacaactaaaatttagtcatgaaagggctaatattttgtgactaaatattttagttggtaataataaataaaaattatattaattaattatttagtgactaatatttagccttcaaaactaatttattttcatttaaattatataacaaaaacaaattattcaaagttatatttaaataatattaaacacatttcataaaaattacaatgtcaatcataaaaaattcaattacataatccttgcttgaattatattgtctatgaactacaacaacaaactccataaatcagagttgctaacagggaaaacagaaaaaatttacctcaatacaaactaaactaaatgaacaaaaaaaataacactaaattagacaaacaaacaaacataaaaaagaatgtgaa

SEQ ID NO: 141406 - DNA, 1009 bp, Cannabis sativa
tccagggttttttccatgatagtttagcaagagcatcaacgctctcttgctcctccgaatgctatggctgctgctgcttctttaagcctccctcctccatcccaaaacaacagcggcaatccttctcggagcaagaaacctcgccctacttgttcccactgcctcaaacctagacatttggttgagaaatgttactttctccatggttttcccccctgactatggtgataaacgcaagcaagattctgccaagtccaactaagcttcgactaccattgttacgggacaagacaccacttcacagctacaactcagccgaccattgatccaacttttgagtcagcaactccagcagccttctacttctagtgatgccgctgcgggtgcctctaatgggtttggtaaccctaatttttactctattttttagattgttgatagtggtgctactcaccacatacgcaataacattagatgctttactgactttgatcataatattattgcttctttagtcactttgcctaatggccaacaaattaaagtcaccacctctggtgtggttcagcttaacagagatattaggttgaaaaatattctctttattcctgaatttaggttcaatttattttcagtgaatgagtttttagaaaataacactaacttgctgttgttttctgaatctcgttgtgtcattcaggacccctctcggaatttgacgattgagacagctaagaaagttgggaagctcttcttctttgagcaagaaattcgctttttttacttttgatgatttgatttcagcaaataatacttgtactaatgatgatccttggcattttcgtcttggacatccttctatgtacatttctcgttcaataaataataattgcaattttctttgaaaccgaatgactctcattgtgctatttgtcactttgctaagcaaaaacgtcttccttttcattctcaaaacaatatgactgctgccccttttgatttgatacat

SEQ ID NO: 141407 - DNA, 551 bp, Cannabis sativa
tccttaaataaattatgcaaaccatgcaatataaaattattcctgatcttttattaattagtaaatctaattatattgaaataggttttatttagggcacaaaacctaacatggatacatacaatggaatttgatggtgcagtaattaagtataatgtgttagattctattaataggtacataaagaatgagtgtttgttagaagatctgatatgaagactacatgagcacaacatgcagccgagctaacaatgttaaaataaagcaaacttatgtaagtttttcttacccttttctttttattttgcattaattttatttgattgagccttgaggacaatgcttatattaagtgtgggggagattaactttcgtgtctatccagtttttttttcttagttgtttagttatttatttttattattttttagtttatattagtttttcttgcattaattttagtgagtgtgggttgaacaaaattctgttgacaatgactgctcgtgtttgatatatgtttttttttactttaatgtcttatgcatggtctt

SEQ ID NO: 141408 - DNA, 539 bp, Cannabis sativa
tctccaatagtatagtatctcaatgttttgccacataatatatccacctcactaaacatcctctaaaattttaccattagagatgctctaagtatttcaacatttctaataatcacacaaacaaaatattagattaaatcacatatattgtagttgtaccaccaaattagagaattgctattagctgatcctcaaccccataacaattggtgatagttagcaatttttttataaaagttattaaatttaaaatatataggatcagctctaatattaatattacaactacctaatcagatctccaaaattagtagtggtaaaagacaatttggggtaaaaaaaataatctggattattcatcatacaattactctttcttttcttgttaataaatatttatgtaaatttgtaggagagcaacgaagtagaaatttaagttggagtgaaaggcataatataataatggggacagcaagaggtctagcttacctacatgaggaattccatgtgtgtataatacatagagacattaaaacaag

SEQ ID NO: 141409 - DNA, 586 bp, Cannabis sativa
  modified_base (555)..(560): a, c, t, g, unknown or other
atactttctggggtgaatatccctcttaaccaatacagtgcatgtaatgccgaactgacacaatggttgtaccgctatgaaatcacctaaaacacatacaatcacaaacacaacatgcatatataatacgttctatgctagtgttatctcattttcgaattcaagtgagttagccgacttgaacggaaaacttctgtaatacctcacacttaatcttcattaatatatattatgtaattatatatgaatacataaatggtatttgaattattttggtgtaaataattttcttaataagtataaaaaaaagtatatcctttatattttattggctaatagtggttattgagttttgatagtgtgctaatggtataggtgattatagtgtttgtattggtttgttcactgatagggtttattattagaaattaattaaaatgcatagatgcattgtgagtggtccacgtgtggttatacaaaaatttacaaaaattgataacaaatttatatataaccaaatagagaaaagataggatagttttttttttttttttnnnnnnttttttttttttttaaatttgttttt

SEQ ID NO: 141410 - DNA, 508 bp, Cannabis sativa
agtggcgccagaatcatggcggacgtggcttggtcaaattgacctcccaagtagagttttaaccactgcccgttaactttaaaagtctcggggctttcacctttcagttctatccctccataaggaaacgccttgaccattgtaaatggtcctgaccaccttcactttagcttaccaggaaacaatttcaatcttgaattgaaaagtaaaacttgctgcccaggttgaaactccttcctcactaagctttgctcgtggcacttctttgttctttccttgtagatctttgcattctcgtatgcctcatttctaaactcctccagttcattcagctgtagcaatcttttctctcctgtagctttcaagtccatgttgagggtcttcatagctgaaaaggccttatgttccaattccaccggcagatgacaagctttcccaaacaccaaccgatacggtgacatcccgatcggtgtcttaaatgctgttctataagcccatagtgcatcat

SEQ ID NO: 141411 - DNA, 651 bp, Cannabis sativa
tgttgagaaggaaatattagaatttcatagattaatttttggcaaaattagctaaagtttcaacaaccgcaatgtactattttcataaattttttttggtattttagaattcgagcaatttttagaaactacaaatcacttaatcttaagattctgcaagcacaaaatttgttgccctatgtcgtatacacctcaatgaaaaatttcgtcaagttttgaaatgtgtggaaggagatatgagtagaatgaggcacaatatgtgattatgtcaaaaaaattcatgagtaatatgccatgaaattcgtcaaaattttcaatttaagaaaaatctttattcctacactaattaaagtatttttgcgatagaaattattaagaaagaaattagagttgtgtaaattaatttttgacaaaattaattaaagttttaaccactacaatgtactgtttttatattttttttttatgaattgttgaattcgaacaatttttacaaactataaattacttaatcttaagatttttcttaataatgtaagtaacttaaaaagaatttttagtatgaacaattacaaataatgtaattagtttcctcataataactaagattattattaattttatttttataaaatattataggagaattac

SEQ ID NO: 141412 - DNA, 570 bp, Cannabis sativa
ctcgattggttctaaatcacaacttgagtctatgtgacctgccctatcttccatggtacgatattgctcgggtatacaataaaatgactcgtgacagttgatctggacatggaatctagggtaccaactatcaaacttatgagcaatgcggtccacgagaatggaattacaagtataaaattaagacgtgagtcttggaaggtaactaatgtattacgctcagcccttagaacagtaggtgacaagccacattgattacctcgagatgctccttcaccgaattcccgaggggtagtgctttgaaggtattgtgcttaggctgagcgatcccaggcttggtcttcgggtggaacaattatttgctgccaagaagtatacttggaatcttgtaatcgcaactgtattctttgtcagggagaaggcccgctgatcgcaagtttacttcgttcaaaaggaattttcatgatcgaagaacgtaagggagagtcatcaagcgcctgtgcctactaaccatctcggaggtaggggtaggtctcgccagaagagctgtcaaaacaaacaacacattag

SEQ ID NO: 141413 - DNA, 526 bp, Cannabis sativa
cggttatatttttagttatatataagacatttactttggtgacttttccagtgacttttccagcgatgttgacttttccggcgacgttgactttccgacgacttttccgctaacttttcagatgacttttccgctaacttttcagacgacttttccggcgactgtgatttttccggcgacttttcaagtgccaacaactttttcggcaaaacttattgttggtttacaaatatgggatttctatattttttttttacaaaaatatggaataaaaaaacccatataaatgtaaaaaaaataaaaaaaaatccataaccctatagtgttatttatttatgccataaaaaagtaaactataccctcaatttccatatttatgaaaattctccttttgaaatgaaaatggagtgtaaatatttttcgtatggataattagtaatttttcccccgaactttgacatgtactaaatcgtgtctcctaaattttttttgccgttagaaatttcccccgaactattgagattgt

SEQ ID NO: 141414 - DNA, 833 bp, Cannabis sativa
gtaattcccctattaaatttatttaaaaatttaaattattatgaaaaaaatatttcatactttattttatttataaacacacatatcttaaaaaatcaaactaaaattattaaaaatccaataaataatttaagaaactaagttttttttaaaaaaaatcaagcttattaaaatttataaattcatatcttaaaaaataaagaaaaataattgaaaattcaataaaaacataaatttattttaaaaaaaaaaggttagaaattaaacttaaaaaaaatgttatatttacttaaacaaatttagaattttcgagaaaaaaaatatattcaaactcattcccataaaatttagcttttacaaatatttaatatatttttttaatatctaatagatttttaataaaaaataaataattttttaaatctctttattagttttaaaattttaatttcttttttaagttttttaatcattcaaaataaattttttaagatctaaattaatttattgagatttaataattatcaaaatttagggagcaaggttgctagtttacaaatacacatcagtgttgattattttttaattattaatatagatatggtgaatggtgtaaatatgcatgttagatgagaaattttgattttaaaaattattaaaaaaaaacataataaaaatattaaaaaaattaacaaatattaagtttacttaaaaaacttaaattactttgaaaaaaaaaaaatttcatattttattttatttataaacacatatcttaaaaaatcaaaccaaaattattaaaaatcccgtaaataatttaaacaaactaagat

SEQ ID NO: 141415 - DNA, 918 bp, Cannabis sativa
gattattgatattgaaaaagaattgattgtttgttttggttattgaaatacataatttataatatcaattttttttttaagtttctcatctttttggagtcaaattaatgtgtatggaacatattatttcttagaaaatacttcttcctattataccttaaattttagagaagtacatatatattgtgttttactaataacagtttatatgatttttttttttttaattgtatgtctgtctccaatttacgattgagtttcttgattttagtttcctacgattatcttattagttttatttcaaagatggtaacagttttcaaatgttctaaaatcactttattactataattaagttagttacaatttcataattccatgagttgtttacaattcataaattgctaatatatgtctattgtcattgttataacatatcttgacactttacatgtgaaaggaaaagaaagaatctaaatttataatgaaaaataaaatgtacattttcaattctatttattttctttatatgaaagcaaatcaattaaaattgatttcatatgcaacctatttttaaaaactaaagtagattcaatttattttttatgttgaaaataataatattatgataacaagaatccacatcatagtcaatgacattactttttatttctaatttgttctccccaatgtaaaaccaaaaaacaaaaataaaatagaattatatagtaaaaaagaaacgttttgagttccatatgcaatttaaagattaattattttacaaaatgtaacagataaatataataaagattttatgattttgtaacttagtaattaatacttaatcatggtaggaccattattattaagcaccataaggtgtttagcactacttaaggtgacactctataatttact

SEQ ID NO: 141416 - DNA, 714 bp, Cannabis sativa
agaatgcacaggcaaggaagaaagaatataaaaaagcaaccccgagccagtagaaatgccttagccaagtaacagtaaagagaagctgacttggaaactacatgtggacgggtcggctacatatcaactatctggtgcaggaatcgcccttgtcacacctggggggcaacacctgcacgctacagtcaagtttggatttaaagcatccaataatgaggtcgaatatgaatctttgatcgctggtctaaaagtagcccgagagatgaaggcctgacatattgaaatctgcagtgatttacaactggtgttaaatcacgtatctggagaatacgaggctcagggagaaaagatgatagcatatttgagaaaaatacatgatctgctcgcacagtccaaaagctacgctctcagacaaattccaagagaagaaaacacgactgttgacgcattagcttgacttgcgagtagtaatataagtcatagagaaaatctggttcctattcagtttctcgaagaacctagcatcactggcacggaggagatcaagaggattgatacatccccaaactggatgacgtaaattgcaacctacctcaacactggggaactcccaaataatcgaattgcagctcgaaacatgagaaggaaggctgcacggtacatcatagtaaagggaattatgtaaagatgaggattctccatgccactgctcag

SEQ ID NO: 141417 - DNA, 783 bp, Cannabis sativa
aattatccccgaagaccccgtgtgttggcttcttggtattcgacattactcttcgaaggaccaagtctcctactcacatgacttttgccttgaccttggaattgaaatatcttgcggttcgtcgctggtaagtcgcgttttttaggtgagcctgatcgcgcttttcttccagaaggtcgaggtagagggactgtttttcttcgttttgtgaaacggtgaaaacgtctcttcgtaaggagcctgccccaatttcgactggtaccatggcctcgcatccataggagagcgagaaaggagtctcgccagtcgtggatcggggagtcgtgttgtatgaccatagaacttgcagaagctcgtctagccatacccctttacgctcttcgagttttcctttgatggtgtgttttattattttattgactggttcaatttgtccattgttttgcgggtaagcaattgcagagaatgcttttttaattcccaagtcgtcgcataattgtcgcatctccgtacaatcgaactgctttccattatctgaaatgagcttgtaagggacgccaaaccgacaaattatggagttgtagacaaactcgcgcaacttagtcgctgtaatagttgcgagtgctttggcttcagcccattttgtaaaatagtctactgcgacaactgcatacttggctccaccttttcctataggtagttcgcctattaagtcgatcccccacactgcgaaaggccaaggacttgtgatgtaatgcaagtttcttggaggttgatggacat

SEQ ID NO: 141418 - DNA, 1044 bp, Cannabis sativa
  modified_base (400)..(403): a, c, t, g, unknown or other
  modified_base (1002)..(1007): a, c, t, g, unknown or other
tgtttctttggtatttcaagcagattttgagtacaattcaagctctaggtatagctcttactctttccctctttagtttcttgaaaatcaagtaagaaaatggttgcctgcttagtttttggatgttgtgcttgctgctatgtgttgttgttgtttttagaagttttgatgggtttatttgagtgaattcatgctagttttgttgttacttcttgggttttagccttgtgttgagattttaaactcaaaattgtgatttttatggtaaaatgaggaattggttgctgtgattgttaattgtgcttgggtttggtttctggggttataatatggttgtttatggtgaattaaagcaggtttgatgcatgtttattacatttaaccaagtttgagttttgannnnaaagcttggagctttaatggtagtttgtgtatttttgcatgaagctttgttttgttgctttagaaatgtttattagggtctaattagcaggtctggaaagtttggttgagtttggaaatgttttggttggggatttgatttttgtaggttttctgggtaaaaccggttttacactgcctgcaaaatcggttacccggattttgcagcagggtgtgaaaaccggtttttctcaacttgtcgtttcgtgctagtttcaggttttcaagcagtttgttccctgctagtttggggtatttttgtattaagttgcagtaggttaagtttggttttaaaacctttgtcccggttgtgatttagtgagtcacttaagtgttgtgattgttatggtttaggagcctgtaaatcgtcgtgcagttcgttctactcaggttgaccggcacacctgaatttggaattgaggtaagaatagtataatagtatgcatatgtatttacatatttagcgtgcatgttaggaagcctattagattacataagatatgcatgttggctttgtaccatccggcagtatcacatcggtaaagctagagtatgactagnnnnnngagtatgaccagtgtaccgagtttaggctgatattat

SEQ ID NO: 141419 - DNA, 2289 bp, Cannabis sativa
  modified_base (987)..(993): a, c, t, g, unknown or other
taggaataaaaccaagggtagcttcgtcatttcccaaaccccgctaaattctctaaaacatataaaatacgactctctaaaggcccgacgtcactttccacagcttccgaacacaatcacagaaattgagaaatttacatatagcatatttaacatatattacaattaaataatagcttttttcaccaatatgcaatattatagataataaataaatctcatgcataaccctaattatttaataatccaaagtattaattatatgcggccattacaattatccccccgttaaaaggatttcgttctaaaaatgtaacctggacagctctggaagtcgagtctctatatcagactctaattcccaagtagcttcttccactttactatttctccagagtactttaactaatgttatgattttgcttcgaaggaccttctctttcctatctagaatttgaactggctgttcatcataagacaggtccagttgtaattccagtgcttcataactcaggatatgcattggatccgacacgtactttctcaacatagaaacatagaatacattatgcacagctgacaatgatggaggtaaggctaaccggtaagcaacctgtccgaccttctcaagcatttcaaaaggtcctaaaaatctaggacttagcttgcctttctttccaaaatgcctgattcctttcattggtgacacacgcaggaagaaatgatctcccagctaaattgtaatatcccggcgcttgggatctgcataactcttctgcctgctctgagaagcaagcattcgagctttaatcttgtctattgcttcatttgtcctctggaccaactcagggcctagatatttatgttctcctatcgtcccaatgaattggggaacgacactttctaccatagagcagctcataaggagccattcctatagtactttgatagctattattgtaggagaaatcaatcagaggcaaatannnnnnncacgaccctccaaaatccatgacacaagctcgtaacaggtcttcaagtatctgaatagttcgctcagattgcccgtctgtttgagggtgaaaggtcgtgctgaacttcaaactcgtacccacggccttttgcaaactcacccagaactttgaggtaaatttagggtctctatctgaaacaatagactttggtactccatgaagacgaataatctctttcacatacaagtcagcatactaatccactgtgtaggttaccttaacaggcaagaaatgtgctgactttgtaaaacgatccaccacgacccaaactgagtcgtacattcctatggttctgggcaaactaaccacaaaatccatcacaatgtcttcccacttccattctggaagtgatagcggttgaagtaatcctgctggtcgctgatgtttcgctttaatttgctggcaagttaagcactcagtgacacggtctaccacatcccttttcatcgcataccaccagaaatagggtttcaaatcttgatacattttggtggttcctaggtgcagtgagtaaggggtagtgtgagcttcatccagaatctctttcttaagctcagtgttatccgggacacacactcgtgctttgaacagtagcattccactgtcagagattgaaaagtccttagctttgcttgctaagacatcttctcgaatctcaaacagttcaggatcgtctagttgtgccactttgattctttccaacaagtctgactaacgtgtcagattatgcaatctcccaatcacaaactcaatgtttgccctagacatctctgaggctaattgacgagaaatcattaccatattgaaaatctgatcaggtcctttccggcttaaagcatctgccacaacatttgcctttccaggatgatacaggatttcacagtcatagtccttcactagctctaaccacctcctttgtctcatgttcagatccttctgagtgaaaacgtacttaagacttttgtggtcggtatagatctcacaccgctcaccatataagtagtgtcgccaaattttcagggcaaacaccactgctgcaagctccaagtcatgagttgggtaacgctgctcataatctttcaattgtcgggaagcataagctatgactttatctgcttgcattagcacacaacccaaaccctgcctttatgcatcgcaatacaccacaaatttctcttgatcagacgacaaggctaaaacaggagctgtaattagtcgttgcttcaactcctgaaagcttttctcacacttatct

SEQ ID NO: 141420 - DNA, 646 bp, Cannabis sativa
cccgccaacccgctaactcgacccttattggggtacgggttcagtttcgtttttttaaacccaatacccgtgaacccaaaattgcgaacctgaaacctggtaaacccactcaatgtgtttggttgcattttaaagtattgagatgtcattccaatggaatgcctttacaccatattggtggaatgactattctattttgaaatggaaggaaagatcattccaatgtaacatgagaaaaaatttaatgtttttttatcaattttttatgcattttaaattttatattattcccattcacattcctattcccctgaaccccaaaccaaaaactctaaaccctaaatcctaaacacagaaacccaaaccccaaaccctaaccccaacatccaacaccctgaaccctgacccttgaacacagacccttagatggcgtttggttagaggtaatgaaatgcaatggacaagaaataaatttcattccattctcttgattagttgcattttaaagtattagaatgtcattccaatgaaatgccctttcaaccactttgctggaatgaatattctattttgaaatgaaaggaaagaccattccaatgtaacatgagaaaaaatttaatgattttttttatcaatttccttacaa

SEQ ID NO: 141421 - DNA, 610 bp, Cannabis sativa
agagaattaatatggtaaaagcagttaagaggttattctctaccactaaacactcatctaaacaattaaaatagtattaattctaatttcctatcaaattactaacagtaaataacacgaactcattattatcctaaatatatattcaagttaattaattaaagcgactgctcttaattaattatatcccctaaacaacttaaagaaaatctcatatagatttaatttagtacaacatatattaagcacaatgaagatagattaatttaagctactgttgcgaattttataatgtatatgcttgtaagtgacaagtaataatagtagtcaaaagactcatatcattctacagagattaaaaataattaaaaaaaaattaatcatatcgtctaatattttcaagaacctagagcaatattgtatctctataccctagtgtcatataaaaaaatgtgtaagtgaataataatctatatctctatattatcattataccttcccttcattaaatctcactctaaaaataatcctaaatattacacctctcgatttcacaatttaaaaccattcggttacctagttcaatgcttatctctcgatctcacaccac

SEQ ID NO: 141422 - DNA, 547 bp, Cannabis sativa
tatcttaaatagttataacgtacatgaatatgaaaaaaaattagactaaattttttttcttgatgccgaaacaagttaagggagcatcagtacatcccttttaagggagtgcattgtagaatcaccctataatattttgtaactcacattatatttatatatatacatatgttttaaatcatcaattaccttaattgtttcatagattaattatcatttattttgaatttatcttattgttttgataattcttatatagaaaacatttgagaaataattcataccactaactatttttattttttatttttatgtcattatcatcacaaaaatatatcaaaagacaacaataatgtgatcggattcataacatatgaattttttttttttcaaataaacaaaaatatatatgaaactctcacaaattttttaaagctaaaatagagtgttacttagatttatttaggctttcatatctattctatataaagtgtgtctatataacagaattttgggtttatgagaaattcatgagtgactttttatt

SEQ ID NO: 141423 - DNA, 664 bp, Cannabis sativa
  modified_base (261)..(262): a, c, t, g, unknown or other
agtaacatgatagggtccatccatctgtgtgagcctatatgtttgctgttgggcttaaatacatataggaagtctgtttaagttttattatttaaatacactagattgctaaaataaaaatatcaccttgatagttttatttaggcccaattaggattagacttattcatttaatgacaattatttaattaatggtgaaattcctctccttttggcgttgtgtgagagttaggggggcatagtagtgggtacgacatactnnacccagccctccctcacatgaatcacctcaattgtgaaggcccatttaccttatttaaataaatgtattaggctaattatattagtttaatctaattaaaattaagtagcagcataattaattttaaattaaatgaatttaattttttattagattattttaaaattaatttagaataacacacttagtttaatgaaatatattctagatagttatttctagtacctaaattatattttctaatatttaatgagatagaaaagcatatttaagttgaaaattaattttaattaatttaacgccaagttaaattagaatattttttttagatattaaattagaattaataattaagttgattttgttaacgcatattttcgttaactatatttaagcctaaat

SEQ ID NO: 141424 - DNA, 677 bp, Cannabis sativa
gatttcaatctcttctagttctttcactagtccactagtccaacagtccaacattattgtttggtgtttgggtctgggtccccggtccccaagtccccaagtcaaggatccacatcttcatccccgccttgggtggttccctatttcgcaaagttttttccctggtccgtactctggctagaggatacctcctttttagccttggttagggcaaggctgtaacattcccgagcaacctgttagtttcatctcaagcaccccaccccattctttgttggaaacttaaggcatgaatggaatatcgacgtaacaacctttaagtcaataaggctggttggggcctaacatgacattaaatgttgatggaacgtccaatactaaaaattgtgccattatagttatactcttcggagcttgccctatagtgaggggtaggaaaattttccctagaggtgcaacgctttggccagagaaaccatacacgggctggagacaggggttaagtctttgagttggagccccatcttttcatatagtgtcttgaataagatgttcgtagaggctccattatctgtcatggtttgggccaccatcttgttggctatctggactaccaagaccaacgggtcgttgtgcgggaaactaatcttgacagcatcttcatcactaaatgttat

SEQ ID NO: 141425 - DNA, 509 bp, Cannabis sativa
tatctatgtgagatcaagtgaaaacttgacggatccatttacgaagccaccagctagagatctaatggaaaatacttttaaagggatgggactaaaactctataaagtggtttacaattgagagtaacctatcttaatactaataactttactagtgttaggtttaattgataaaaacaaatcaatatgtgaacaaatgtgataagtactaattgtcccatcttacaattaccaatttaagagttagacttctaaagtctttagtagaattcagtttggaaaataagtattttgataacaattactgtaagaattctacctacattgacctaagggtagtgttgccctatataagaattggggagtatatatatttccttaaaacctcaatgaatagcacttcaaaaaaatcttacttttagtcacaacaaaacttgtgactaaaagtaagaaaattgtgaataattataaatcattattcttatggttgtgactaaaaggtccgtggc

SEQ ID NO: 141426 - DNA, 764 bp, Cannabis sativa
cagctcgaagaactccaacgccgaggaagacggagatggcactgaataccgctgcaacaggggtacaccgaccacgacaccttcgattggtggaggaaattgggcgtgttctagatcagagcacagatgggagatgagaatcgtggtcgcgccggatagcagaagttcatcggaggagtgtggtcactgccggacgaagggacgcgtgggcacgccggatcgcagaaaataagttggaagagagtccatgacgtctatatgtttactgattttttgaaatatatacatacatgtatatatatatatcaacctagttattactaagaagaatcgtggtcaaagattgaagactatggaagaagaactgagggagatcttactagctgttcatggcttcaaaaaaaaaaaaaagtggctgcaagattgaagacgacatatcaagtatcttaggctttactattgatttgggcctagtacacaaatgggttaagagagctataatctattgggctaaaaacattttgggctgaaattagtttttatctcttatattttgtgcttacttattgtattttgatttttaattttaccaccttgaggacaaggtgattttgaagggtgggaaagtgttacactatgaaatagtgtagggtatattagtaatttgctaagggtgtgaatcactataaatatgtaattgtatagctattatgggatatgaattgagtaaatagaactttggttcaattggagtttggcactga

SEQ ID NO: 141427 - DNA, 596 bp, Cannabis sativa
  modified_base (549)..(550): a, c, t, g, unknown or other
aataaaaatgtcatagtttttttattttgaaaaattttggtttaataataaatttttttaattttttaagtatataaaatcaaattgccctttggtaatcataattgtttataattctttggttcgatcacagttttgaaattcttggtcgtggttccaaatcgcttaattattgatatatacttaatatgttgtttttgttattgaatattgatatttagaagagtaatttgtagcataaatatctaagttgaactctcaatagttgtaaataaatacctaagtttaatgtaagaaatttagctttgatacatagaaattaacctttataattccaacttcaagatcacacttaaacaaataaaagttaaatcaaaacaaaaaaatcaagaacaaaaaaccagcaaacacattgaaccataaaaatataacacagatgaatctaaatggctgttagacacaataacagaagagatttatactggtaccgatcctaaattcaatgtgaacttagtcatactcgcgtttgaaagcattgccaccaatctnnattgataatgagaataagagatatcaatctcaggagctacaaggaa

SEQ ID NO: 141428 - DNA, 978 bp, Cannabis sativa
tttttttttcattctcttatttatttaatattttttttatcatcactattaagtaaattaattgtactcatatttttaattctcatagaaaactcaaaagacatgttatcatttagtgtatacaatgtatatacaatcatgtctcttgatatattcaaatattatgaataattaagtatttaaatatattaatatatgctacgaaattataattttgttgtgtagaccattctttttctttttcaataaaatataacacaaaagagaatttaataaatgcattaataagaatattataattatatacataatttaaaaaataattaatctttatatccttaattttttttttcaatatattcaaaaattatttatcttgctatttttaaatcaatatcataaaattatttctagaatttttgtatacgatcaatgttatatatatatattttttttgttaaatattattagttcacattttttttttaaattcattctattatcatttatggatactttttttttgttaaatattaatagtaaatatctttttgttcagttataaaattatgagttatcattcatttttttctccattctctatttaatatttttattattttttatcatcactattaagtaaattaattgtacccatatttttaattttcatagaaaattcaaaaaacatgttgtcattagtgtatacaatatatatacaatcacgtctcttgatatatttaaatattatgaattaagtatttagatatattaatatatgttatgaaattttaaaagttattacaaaggacatagtttacatgagaagttctctttgcataaatatatagtatatttagcatcaacatatcaatatatataaaggaaagaataagagagattatgtggcaacttataggagtgtttttgcctattctttattttctctatttttctaatttacctaatattttcatt

SEQ ID NO: 141429 - DNA, 842 bp, Cannabis sativa
gtctccacaggaattgcaaacaaagtttgatgtaaaacaaactaattacaacttaaagcaagaggaaataacatgcgaatggttaagtaatgattcaaaataaaaaatgtcatgaattaaacttgctaacattaatactactacttctagaaaaattatttgcaagatgaaaaatgtaatatggcaaaaatggcttaaatagctaattccttctactcaggtttttttcccgatgttacaacattggttcagcattactccagcattctacacagagataacaaaaattcctctaggcttgtgagaattttccaacactcacaaatttcagtctaccacttaactcaatatattcctatatcaaaccaacaagcagaacactattcaaacattaattttataagttatgcaaggtaaatgaaatattcttattccacttacataaaaaaacctaaatctaggttttccacttgctccattcaagttgaagtactagatctagcccttctggtacaagatctagcttagcaaattgttattcatggccaagaaacaacaatctagtaaaatgaaactcacttgaatgaacaaaggaaaaaatgctaaagtaagtttaaaaattaatcatacccaacataaaagttcataaccattcaagcctccaaagtctagctcatattcaagtaaaagattaacatccaaattcgaaatagtttaaccatggttgcagcctctttttagttcaataagtttcttctaattgctaagtacaaacacaaagaaaagagaagagaaagaacaatattaagagaaggtaaaagaaaattcaaacgcaaaaggtt

SEQ ID NO: 141430 - DNA, 557 bp, Cannabis sativa
ttctttcttgaggtcttcccaagtctcaatggtgcacttaccactctgaatgtcatcatacttcgtcctccatcacaacttggtgtctccagacaaatacatggtagttgttgctacctttgcttcttcagagtcggtccgcacgaccctaaactattgttccatgtcaaacaaaaagttttggagctccttcgcatccctcacctctctatagcatttgggctcgggtgctctcggtcggccatactccatacctccgtgccccccagtatttgcacgctctgttgctatcatggtaagatttctcttagttgacattccttctaactcttctcgatatgctatgacacacacatgacaatccactatcgtatcattgagggagtcttgtaatgtagcatgctcattttgtagcacaatgatagcagcctacatgtctgttgttgcttgttctaatgccctgatgtgatcctccatctgaggcgcacttaatgtttcggtagcggcgtctctcctcttgatcgcagctaccctagccaacaagttagcatagtctt

SEQ ID NO: 141431 - DNA, 528 bp, Cannabis sativa
tatgattttatgtaaaaatatttttaaatgtgtacattgtaacaattaatttttcttgcacattttttgtaattaattaagaaaatgtatacatttatgtaaaatgctcatttgtttattatattttgattaatttaatccctcaattctgcctaaaaatatggtgttggaagaccatttcaaaatatctcttcaccccctaaacatttttacatctcatcatctcaagcacccttcactcttccctttcaccatttatctcatacaccatttcactcacatttctactatttttatattttaaagagcatgtcaagcatgtcattttgtaatttttacttcaatctagttatgagcttctaatcttttttcaagattattaagataatgatgaagcaaaatgtaactagacatcgtttatttttgtatgttgatttcctatttgtgctacaaagttcatggatttttctatcaaaaatatgtcttttttcatcttcaatatcgtgtattttttattgttaaagcata

SEQ ID NO: 141432 - DNA, 1073 bp, Cannabis sativa
tatctttttgttgttttataattactttcatgttatttgttaagttattttagggttattttattttattttattgaaacatagtatttttctaattttaaaaccttaacacaacatttttgaaaacttgatacagtaaaaatgtgtaaaaaaaaaaaagagtgacaataaaaatgataaaaaaaaaaataagtatttttataagatccccaaaataaaaagaaaaaaaaaaggctattttaaaaaatttaggaaaaaagagataagttttgatatatatgacataacaatttaattatactaaatatgacatttaaaaaaaaaaacttaaaatatggaaaaatgtcattttatatagatagaaatgccataaaaaactttaaatttgtatttttcttaaataatcaaacactaaaataaataaaaaataatctcaactgtagatactattttttttgtagaaattaaatctatttttttagctactgtttgttttttattttatttttgtttttgtttttttagaaactgattattttattaaaagcagctgggaaaaaaaacaaatttcattaacatcatcctgaaaaaaaaaataatataaaaaattataatctaaaaatgatacaaactttaaaaatcaatttcattaacattaagaaactaataattcattaaaagaattcaaaaaaaaaaaaatagtttcatcaacaagataatgaaaaaaaaattatattctaaaaacggtactaactttaaaaactatctttatcaagaaactaaaatttttattaaaagaagaaaaaaacaattttatcaacaacataatgaaaaatacacaatgcctaataaccaaacttttagaaaggatactaaatttaaaaatcaatttcaaacatataaattttatatcaatacctaatgactaaacttctaacttcattttctattttagcatttaagttttttatttgcttgctcaaaaattagagttgatttaagcatacaatatgcagcaaatagaacaaagagaatcataaactaaaatcaaatagaaaaaaaaaaaaaagaga

SEQ ID NO: 141433 - DNA, 502 bp, Cannabis sativa
agggggtagcttctcaatcatcacagccacttggaaggtctcactaagaatcattccctcagaatgtatctcatgtaagatcacttgaaattcctgaacttgactaatcacagttttggaatctaccattttaaaatcaaggaaacgaccaacaacaaatttctttgtgccagcatcctcagttttatattttcgatctaaagactcccacagttccttagccgtattctttgtaagatatacttcatacagattattttctaagctattcataatataattacgacatagaaaatcatctttcttccaagctttaacagcgttgatgacgttagtgtctttttcatcttctttgagcacttgttcgtcatcagtgactaattttgcaagattcatggtagtcagatagaagagcatcttctgctgccacctcttgaaatttggtcctgtgaatttttccggtttttccccaacactcagaagttggttcattggaacagat

SEQ ID NO: 141434 - DNA, 521 bp, Cannabis sativa
gtaaaacacaacatcgtcatcgagctccccctaggcaacactaacaaagacaaaatacaacccgaacataaaacaaagagacaaacaacaacaactaaaacagaaaaaacaagaacacaaacagtaaagacaagtgaaatataaatactaaagctgaaagaaagagtactccctttgtctatccctcggggtcatcctccgaagagctagagtcttcctgagttcctggatcagtccatcgagcaaacacttcttgtgggaacactgggaagtcaactattggcctcggcgcaattcgcttcagagatttagctatgcagtatcacgcgccgaaaccaaacatacaagcaacacccaaacttggcatacagaaattaaggggttggtactagcaattcatctatgcttccttgacccaactttccacctggtttttctcaacaagcctttcaacaaagacaacaacaaggtgtccaaacaagttctcttgagagtatgatgcgtgatttcatggccaagac

SEQ ID NO: 141435 - DNA, 852 bp, Cannabis sativa
  modified_base (76)..(89): a, c, t, g, unknown or other
  modified_base (170)..(199): a, c, t, g, unknown or other
  modified_base (275)..(294): a, c, t, g, unknown or other
  modified_base (474)..(474): a, c, t, g, unknown or other
  modified_base (807)..(810): a, c, t, g, unknown or other
attagtttattgaaatatcatttgtaggtagctaagtgttttaaggataacatacattgaagggtagaacggtaannnnnnnnnnnnnnaatgtagatcatctataaaggattcttgattattaggattgtattaatggataatcataatgtatctatatcgtggtacannnnnnnnnnnnnnnnnnnnnnnnnnnnnnttcaattccaaatctatagtggagaaaggcggcactattaagttggaaattcacttggtgaattctagatctactnnnnnnnnnnnnnnnnnnnnaggcccatggtcccctcactagttcagataatacaatttgcagactcagttaattgattttaactaatcaattataattctaaaattagactatgtcttatttatgacttttcactaagcaagggcttaatcgtgaagaaaaggtgttttggggtcaacttgttaattaagagactttgnatggtctaattaataaattgcataaatgaaaattttatttagtaattaattataattatataataaatagttttggcatttgtacggttgaatcggaaaatattgtattattgaaaagaagaataagtggttcaaaaaagtggcaaaattgtaattaggatgttgtccatttaatatgtacggccatgaagttattttgcccatttttttaatcaatataattcaaccctaagccctagttgaaacaatatataagaaacatgatactctcatctcatccacttgacactttttaaaatttttgtcatcttgactattcaaccaacctagatnnnngagttccttccttagtgattttaacctccttcattgttcttc

SEQ ID NO: 141436 - DNA, 839 bp, Cannabis sativa
atgggtggggatcatttggtggcctgggaggaggtgtgtagacctaaacatgagggaggtctcgctatcgggaggttagacatgagaaataaagggttacttatgaaatggctttggcgatttcctttagaatcaaactcactttggcataaagtgatcaaaagccgttatgggagagcagaaaattgttgggatactaaataggtcatagactatctccaagaggtccttggaaggatatttcagatctttatggtaaatttttgaaattggtaaaattcaaagtgggcagtggcacaactattcggttttgggaagatatatggattggagatacaacattaaagagtcgttttctaacctggcagtggtatcaaaggcaaaaaattcaagtataaaagatcttgttgccattgaaggagaggtaggaaattgtgttgcaagctggaattttaagtttagaagaaacttgatggagagggaaatgcctaatctaattgttttattgcaactactggaacatattaggctgctcaacatattagaggatatcagattatggaaaccagatcctagtggaattttctcttgtaagtcaacattcaactggtttacttcagaccaaaattttggtgatttgttttggacgaagactttatggaaaagcacgtgtcctattaaagttaaagtctttggatggttggtggcattaggaaaaattaatgtgcatcctatgatgcaaaaaaagtcgaccatttatctgcttgtccccggggtggtgtgtttgttgtaagaaaagtagtgaagaagtggcacatttgttcttggggtgttgtctt

SEQ ID NO: 141437 - DNA, 562 bp, Cannabis sativa
tgaatagtcttatgcgagacaaaaatatacaaactgttgtcttgggcatcaacgagaaaccgtgtaactttaggtgtataagacgaggcactaaccttgattacgtggatgagatatattgactgtgaagacacttagcttataatgtacagtatagaaactaagtataacagacgggtgaaccaaagcaagtgatagtgaggcatcgacctcgccataggaagacatgcacacgaaaaagatcatctcgtcatcagaaactgcagttgtcagatagaatgttatgtttccagagtaaaagcgacgagatttgcattatcaaccttggaaagaaatatgacgaactccagctcgctatcaagattgcctctgctctattcccaacgagacaatataaaataatacagtttacaatatatgtaatacacgcttattttgacccagtaaaaatgggatattcacagctgcgtgatattcaaataataaccctatttatttaacgtgatatgtaatcagaccccatgattttaggggataatcgtgtttggttttatgccctaaa

SEQ ID NO: 141438 - DNA, 747 bp, Cannabis sativa
aggtggttatgaaaatccacgacaggctctgttagatttggagcaaacgttcgtttagatggaagctaggattcaacgtcaagatgagaagattcaaaggttgagacaacaaggatcttctatcgtacatgttgggaatattttatcaggatctagatatactaacaagtatgttgaattaacatcctaaatataaatatctcaaaaacaatgaaattaaacacataagagtttagaaaacctgacattgattgcagcggaatattatgactccttccgctcagatctctaacccttgttcctttctattgcagagtattatcaagatctgagcctggatctctttctctctttcgggtttggtgaccattgtcttctgcactatgattgagtacttgacctgatatttgagggcatggcactctatcactaaggctcgaatatgatgaagaataatgaagaaggttttgaaatcaatatagagggtgtctctcatctactagttgtttgacagagttagaaactagatttggcaggttgaaaagtgttggatacgatgagagcatcaagttccttatatattgtttcaactagggcttaggcttgaattatgtggattaaaataatatataatattaggcaaaaatcactagagtggccggccacttaatggaccattttctagctacaattttgccactttatttcaaacacttattcttcttttcaataataccatattttcca

SEQ ID NO: 141439 - DNA, 789 bp, Cannabis sativa
gcgtgtagacttcattcgagcctggatggggacacatgtcaagcgcgtctgtctgagtctcgatgttaggctaacagggcatcccttcagttttcggctaataaatgctctaacaattaatatttagaaatctgtttttctctctccacagttaacggttgcacttgattatttttgatttcccatattcgcttttaagagggaaccgaagcgtctgagtttattttgaaatgattaccccttttttccgtgacttgcctataaatatcaaccagcattggcacacaagctcatcttcaccatcttcctttgctaagagattccagagcaaaaagagaagtttttagcttcaagttttctgaagtgccttcatccaaactgcttgttggattgacgttgtctgaatccggatatctgactcttgagtaagttctcgatttcctttatgctcatttttgcatgtttacttttcgcatgtaccttcgagttttctgcagagaatgcataggaaaccctaggttcagaaactctgtgattcttctttgtcatggtttcatgcaattttacagtccataatgcctgttttccgaactacataatgccgattcttcatcatgcttattctaagcttcatgaattttttttgccctacctcaagaaaatttcaaacttcttgagtcttgacttttctttgagcattcttgttcttttaatccgttgagtactcctggtcgacatatttgcttgtttatcgttggatattctaaccaaacactcatcttgtgtgtt

SEQ ID NO: 141440 - DNA, 588 bp, Cannabis sativa
  modified_base (554)..(560): a, c, t, g, unknown or other
catcctcaagctaatttgttgttgggaaatacgcctgatcagccacctctccttcttcctcttgttgagcagtgtttttcttttatttaagggattggattttggcttttaatttatcattctccttctgttgctgagccacaacattagaaacttcccttttctttctgtcgaacagtttagatgccctggtcaggaacctgtaaatcatgaaaaaaaattagctctaattttttttgtataactaaggaaacaacatttcaagtactagcatacacagcagccctaacacgtctaggatgctctggtgtccttagcgcctgcatcaggatatcgttttggccatggacctgaatttgtccctgagtaagttgctcctctaattgagcgtaatgaacatattcaggaaattagtatatgaatcatatatgctaactcattagtagtactcaattaaagatgaatatatacttaccatcttttcggcaattttcttgtcgtaatcagtgacaagttttgttctcttggcctttgtgttggaatttattttaccnnnnnnntagatctactaacaagtatgttgtttaa

SEQ ID NO: 141441 - DNA, 1475 bp, Cannabis sativa
tataactcataactcgtgcataaaattgaatgttaacggttcgcgcgagctaggaaggtgctaaacgagacattaagacgtcttgataaaagcacttgaacctagaaaatggatagacaatctaactattcatatgagcaaattaaaaatatacaaagtgataaaatcattaaaagtatattcaagtttgcttaaggcagattataactgccatagcgaggcaaaattgacaacagctcaaaaatcagaaagtttggtagataactaactacttaaacaggaagattacaagcaatggaagaacccaaaaatactttacatttgatcaaaatatagttgtttacattgtgaataaaaatgcaagcaaacacagttgtattaagttcaaatgaaaagagtacaaggcatttaagataaaaaaaaaaccccaagaagggctacaaacttatctttaccaaaatgccataggggcaaaccattaaagtcatcttcctaaaacaaaagaatgagggatccgtaaactcgagaaagaccgtcttcatatagctcggagaaagcccgtcttcatatagctcagaaaaagaccgtctacatgtagaaggtctcgacctttgcattgacctcattctccacatcagaggatcccatttcctgcaactgagacctcatttccagcctcatgaaatttctcgataccagaaagaggttggcacaaaggtcttctagtgcaggtttgggccttgggttggtgggattatttgataaaaaccatgccaactttcttcctagattaacctgaaaccacgccaactttcctctttgattcctcgttagcctgtggaggacccctaggatcgctcgtaaggtttatgtccatttctataaaaaaaacaaaaataagggattaatggagcgaaaaaaaatccagttcaaaccgccatttacaagggatattgcttactctcaacaatcacttgtgaggatcggccataacaatcaacggggttccctctgtttggattgatcggaagctcctcaaccttggaatccttcatttccaattcaaattgagattcgaagttcctaggaacgtatagaaaagagaggtagttggcaaattatggtgttatgaatctagaggaataaatttctaaacttagatgagacatcttgacgagagaataacgatccaatctcaaaatggatctcatcaaaaaaaaaaatagaagtgtgtggaatatggcaagcttaagccaccattttatacacgaagtccagtgactaaaaggccaaaggttgggaaatctaacggttgggagtggggcagaagatgagaagatggctcataatgaccctcaaaaccgtacaaccgccagaatcaaaggacgcgtctttccgaaaagggactatgacaaaaattccctctgtaattattaaaaagcactttttacaaaaaaaaaagaactttttaagag

SEQ ID NO: 141442 - DNA, 676 bp, Cannabis sativa
  modified_base (35)..(51): a, c, t, g, unknown or other
ttaacaaaacacagagtccaattggtaacttttgnnnnnnnnnnnnnnnnnaatagtatttaccctatatataattcattttttataaaagagttttatatataattatttagtaaggatttaaatatgtttgggttttcttcctaaaaaaataataaatattatgttatatatattttttaaggagcaaataatatgtttattacataattttttagaaataactctaagtgcaattaaaagaataaaaaaaatattgcaataataataaataaattaaatattttaaaaaaataattaacaagaatattatagcttaaacatttaatggcaacattatagcaaataataacaatattataacttaaataaaaagtatatttattaattattatgtatcttcttaaatttatacaacttttaacatatattaaaaaataattaacataatttttacatactattgatttattttttatgttaacttatgtggtgagaaaaattatttatcatatggagataaaatagttaaattatattgtgtcaaaatttaaataataaataatattttaaagcataatataaagagcgttctatataattgagagtgcgattccaaatctatagtgatgaaaggaggaattaataagttagagaatttacttgttaaattcta

SEQ ID NO: 141443 - DNA, 901 bp, Cannabis sativa
gcagaagcagagcgacaacagttactgtgttagtcagtgtgtatacatctagatttatcgttactacatagatttgtaaatgtatttagattattataattagagttaactcaactatagatttttaaatatatttagattatattaattagcgttagttcaattattgtgactatacagaattttaaatatatttagataataatagcgttagtttaattgttgtggctattcagatttgtacaaaatttataaattaatgcagggaaaaaattacagaaaatctatttttttccctatttttgaaatgtaatgactaaaaaaaaactattgctaaaaaaattaaaaaaaaatgtaatcaaactataaggcacggtttaaaaccgtcaggaaacccacattagcgacggttttgaaccgttgcctattctgcccgttttatgacggtcgaataggcaacggttatagaaactgacgaaaatactttaaaaaactgtataaaaatgtcggcaaaacttatttttgtagtagtgaatctaacttactgtactatatctacgtgactctataggccaaacatcgcattccactgttattgggcataaaaatatgaaaaacataacattttacataagccataattaatacacctagaattcaaataaatcattataattatgaaaataataattaaaagtctaattctaaaattaaactctaattatctactaattctcaaaataaaattaagcggtcattacagacattcttggaaaatgtgccaaaatgctcgaggtttacatacatcaacctgggtgcctaaaatgacgcctagtgccaccttggatgtgttgggctttgtgccctaaataaaattctatttcaatgtaatcttttctat

SEQ ID NO: 141444 - DNA, 619 bp, Cannabis sativa
ttttagtatattaatattcttttttgtaaattttaagttatattttggataataattaatttattgaataacaattaacgtgaaatattttaatttttatctagtttaatatttttatatatttataatttgattgtaaattttatttttttattaagggattctctccaccctgatcctgtcctatccccgatgggaaataagcgggatgaaaattaaaatttttaacggcgatggagacgaaggactactccccaccaattctccgccctgtgtgcatctcgtccccattaagtgatttcctaccctatccccgatgggaaataagcgggatgagaattaaaattcttaacggcgatggagacgggggattactccccactaattttccgccttgtgtgcatccctaaacacaacgattatctatatactcttaaattttaatatttactaaattatactcgtgaactttaaatttttaatagttcaaaaaaataaattaacgacttaacaaattttaattatacaatttgatacatgtcaaaattcggagctcaaaaatcctaactatcctatttttttccaattaaaattataacaaaattttgtgtcggtgaat

SEQ ID NO: 141445 - DNA, 672 bp, Cannabis sativa
  modified_base (533)..(534): a, c, t, g, unknown or other
  modified_base (636)..(644): a, c, t, g, unknown or other
tcttatgatttaaggtcatttgctatatttttttaaaaagaggacataaactaacatactcctatgatttggggccatttactataatttcccctttactaacatgtggatccacgatgctgttttagcatggaccgatccaaaaccgtaaagggaaaaaatattggtagaaattacacagcatatgaaaaaattataagagtttacctttttttttgtcataataaataatagtatgggattataggtttttttaaaaatttatttttacatttatatgagcttttttattttcgtaagaaaagatagaaatcgcatatttgtaaaacaataataagtttctcctaaaaattcatcggcgcctaaaaatttaccagtgccggaaaagtcgtcggaaaagttagtatcatcaaaaaagtcgtcgaaaaagtcagaacagtcatcgaaaaagtcaccgtggccggaaaacgtcaccagaagtagatgtctctaacatatataaaaataaaactagttctataacataatgaatnnaaataaataacacaaaataactcacacaaaataacacaaaataaccggttttgtaacataatgaataaaaataaattacacaaaataactcaaaccagttannnnnnnnntagaaccagttctataacaatgttataa

SEQ ID NO: 141446 - DNA, 584 bp, Cannabis sativa
  modified_base (210)..(212): a, c, t, g, unknown or other
accaatacgatggtgcaaactcgtcaaggcctgactgatccagcaaattcacagatgctggattctgcatcgcagaacccaagaaacacatgggttttgcaagctgttaatcctggacaactagagaatgtggggaatggtgtgacagttcctataaataaaatcgcgcctggtgtgcaagagaatgggaataacagttccgcacccaannngggcattcataacacaactgtttcacctgaaaccaacgcccagacgaccatcagagatgccacagaattacaaaatctccgtgactctctcggactcatgcagggtcataacaataccctacgtcatgatcaggacgaactgctcgctgcagtaaatctcgcgttcaacgaacaaaggcgtatgttcgccgaatggagagatagagagatggaggcattaagggctcaccatgcagagattgaaaatcgtagtcggcaggctactgtgctgatactagcaaactgtaggtcagcaaccgccgaacgtcattcccttggatgagacagacgaagatccagcgatgaatgcttctcagaccgcaaatggtcagc

SEQ ID NO: 141447 - DNA, 733 bp, Cannabis sativa
  modified_base (253)..(255): a, c, t, g, unknown or other
tttcgaccaataaatgaataaagatagttatttcaaaattcaaattgagtcgaaattatcagcatgtttctaatttaccatccagtgcgtacaaaagtgtaggtcaaacccaaaacaccgaacagataaaaaatatacttgtaaaaagcaagtgaccaagagtcgtacatctgctcggtcacttggtggcacctatacctatacaaagcattggtaaaaataaaaattacacgatgattataaacagagaatnnnattcattaaagataacaaaagcatataatactgggattaaaaactccccggtcagcctgttgtctgtaaaatgaaaaataattccaagtttaaagaccgcttggtcggtcatgatgtcttagaaaaggccttattgccgaataagatatataaaaataaaaggataaaagtagaagtgtttaaatagctggagtcccatgctctttgttcgggtcttctgggccagtaggagctggaggatttgttgtttgaacgggaggtacatcagcattttggccggaggtaaaagcagcctcctcggtttcaccataaaccacttgggaagcgcaaaacttgaggtacatgtcgttggcatcaccaaagtagtcgaagcttgcctgaggattagccttccaaaagtcatagaagagctcaagaccggttgtctccagagcatgaactttctctttcaacttcgtcacctcgaccgtaagctcct

SEQ ID NO: 141448 - DNA, 989 bp, Cannabis sativa
  modified_base (257)..(260): a, c, t, g, unknown or other
  modified_base (935)..(937): a, c, t, g, unknown or other
tgaatgcatagcaatcttaccataaaaagaaaaaattattttgtcaactaactttccaaaaaaagactttacaggttgaatcgagtatatgaatttatgaattcgggtatattaatcattgaaaaattttatttacactccaaaaatttctaaagacatcctattttaataatttttattttatataaaatctatatctttaactgtactaattttttttaatttttttcttccaatttatattcttaaaaaatatnnnnatcaaataaaaataaattatattaaaataaaaaattacataaaattttcatagaaaaaataaaaatatatacatgatttagaataaaatcaaaataagtactgaaattaaataaaataatgtgaggaaaaaattaaaaaaatatattaagagtaatattaaaaaattatttaagtttattttttaataatggagtgtacttatcatttgatgggatgcaaattaaactccccttaatcatttctttctatattttttttcttcatttgaatttattattttaatttgttgttagagatataaaagaacaataatttattttgttttgttgttagttatgtaaaaaaaatattttttataaatattgaatagcttattaagaagtaaccaatccaaagtaattgatctaatccgcatgtttacaaattagattagattggatatgaattattgtacggattagattggataaaaaatataaaatctgcacttagtgcggatcggatgcactatgagcaaaataatacggattggattggatgaacacccctagtccaactcattattcttctaaacctcaagcatccctccttttttattttgcataaattatcccatgctacattaccaagaccattgaaatcaacaaaccctttccataaaaaaaaaaaaaaannnaaaaaaaaaaaaaaacccccaaaatttaaaaacacaaaaaaaaaaagaaaaa

SEQ ID NO: 141449 - DNA, 529 bp, Cannabis sativa
tttgaaactgaaagcatgtaaactggctaagattaatttagaattaacttggtagtttaaaatttacctattaatttaaaatagtttaaaattatgaattaaagagttaattcatatttaataattgtgtcgggaaatttatttatataatttgaggcttttattataaataaactaattataattattaaagtgattaatattaaggttgtacataaatttttgtaaaccgcccaaaccgaataacccgtccaaacaaaatcgagataacccgacgaaaaatataaccgctcaatctttatattgggcgggttgaaaataataccaactcgcccaatcaacccgagctaacccgatcaacccgattaagagagttttttttttcttaatatatatatatgtttataagtttttatcatatatatttatatatcatatatatttatatatcatataatttatatgactatttaaaatatttaaagttgaaactaatatattttttttattgtggttgatttgaacttta

SEQ ID NO: 141450 - DNA, 594 bp, Cannabis sativa
tcagcaatgcttaaccttcctgcacatacatttctcatccaaacacccaacttctattatcttagcagtagacctcacaattctactcttaacaatttcttttgttcatatttcacaatcatggaatcggcactctttccaacttcccaacttccccgttcagcggcggaaccacgtctgggagcggcgcctccctgtttgggttcacgatggcggatgtagcccgtcgaaccgagcaaaaatgagagagagagaaagatgagcgagagagaaggtcgggacaatgcgtgttgggtgttttgggttcttggaatggaggcaaatggatttgtggcttcggtgcaaaaacaaagagatggtgagaagtcgagcgagagagaaggtcggggtcatggctccgttgagaaaatagagagagggtgagaggtcgtggctccggtgcaaaaacagagagaggcagggatgagaggcctcttgcggctgcgatgttggctgttagaaactttagggttttttttttgtgtttaatagagaggggaaagagataagggttgttagattagggttttggtttgagaagagagagagagagag

SEQ ID NO: 141451 - DNA, 537 bp, Cannabis sativa
catgatgagaatgtcaagatgaagttatctcagtattaccatgtcccagtgagtcaacaaaaaacaaaaaaaaaagaacttttttatactgttgtttcaaatcacttgaaatattaattaatactttgtatttgattttgttacagaaagataacatcatactctgtatgacatttcaaacatttggcatattcctctactcctaagggttagtgggttttttttttctttctttctaatttcttcttatgtaccatgtaccatgtgcaacttcagatgatggttttattttgttatactcatgaattaggatcagaaggctcatgaagccatcttccaagttctgaaccttcaaatgtttgtttcaatgttttagcatcatcttttttgtttattttagcaataattgccttacacacacaagaaatatatctgttggcctacgaaagaaggtttttgtggattgggttgcagccactgatttagaggatgcaacagctaaagaggtgactaattagaacatgctcacttgtattt

SEQ ID NO: 141452 - DNA, 638 bp, Cannabis sativa
ccctggctgtttgggttattgggcagactggactggttgtatttgtggccctgtcttttcacgtactgtttaaagtgacctcgagtgatgagaatttctatcttgtctttcaattgccgacattcgtcggttgtgtgtccaatatccttatggaatttacaatacctattaggatctctttggatcatcgcattcctcatgggctcgggcttgccgaaggtaacctttttctcatgtgtgaggtaaatattctcttgagtttcattaagctcgatataaattgtatacactggcacatacttatcgttctttttctgtttctttttatcctttgacggttccttagaaccgtcctttctctttgaatcagaagcccccgagttatcaattcttgtggaaacaatatttgttgaaatgttcctgggtttgcttcccgagcttattttcaacaaattcatttcctctcaagcttcttcgttctgaacaaatacctgagccctttcgttgaactcagtgatgtttcttattagaaaaccttgtaagtcgtcccacagctcgccccctacggttaatggatcagtagagatccctgcctgaagggctgtaagttgtgtactgtcatccaaattcctaaccct

SEQ ID NO: 141453 - DNA, 656 bp, Cannabis sativa
  modified_base (366)..(368): a, c, t, g, unknown or other
tagtggaggtaatccttgttcaagtttttccttggtttcttgaagtttaagaaaaaatgagttaatgcatgcttgttgaattgtggttgtggttgttattattgtttatagttgttttcctaagatttaaaatggttaattgagtgaaatggaactgatttggatgcatgcttagttgattttaagcaagtttggagttttgagctaaatcttgattttaatggtgaaatgatgaaatctgttgttgtgctggttgtagttgattgctgttgttttcagaggttataatatgcatatttgagtagatttaaacaggttgtgttgcatgttagtgagattttgtcaagcttgagttttgaactcaannnttggagctcacatggtggtttttgatttagtgcatgaagcttggttttcttgctttggttatgttccttagggtctaaatagtaggtctggaagttttggtatgaattggggttgaattgcttgagatgtgattttttgaaagtttcatgcactgaaccggaattccggttcagtgtagcctgtgggaaccgaaattccggttggtgttctgggtttcccccagaaccggaattctggttgtagaaccggtctaccggttgggacatttttgggaaccctagttcttc

SEQ ID NO: 141454 - DNA, 949 bp, Cannabis sativa
  modified_base (911)..(923): a, c, t, g, unknown or other
gtgtcaaatttcacgtgtaccctatgtcgtcggttattctataacaaccgacggcatagggtcacacaaccaaaccctatgtcgtttgattctataccgcctctaaatggtataatccaattttatatctacggtttttataaaaaaaaaacgcctctaaaggtaaattttcaataggcgggtattttcagaccttttagcttccctttttataaaatgggttgaaaaaagggaagctaaagacccattttatagtagtggggaaagacattcatcacttctagacgttcttcacaaatataggataaatttacaagagaaactctccaattgtatgatcaataaatttaacacacaattatacgtattgttttaacaagtaatatctaaataagtaagattattctcacaaaaattatagctaagtatcaattaattgaatttttaattttatttagcaatcaaatgaaagtatctttaaactaagcaatctaaataaaaattaaataacaaaataaataagtaaagcaattaattaagatgagatcatgattaaagtttaaggtaattaatttcaattgaatctattttacctaatttaacataatttaattcttaaagtccaattttcaagtgatagcagatttactaaagaaatttttattcaggctaaaacatataaatctcaaactatatgcaaattttttactttcgtgataatctttattattacacaaattatataggtactctcgtcctatatcgaaatttgtgtctattttactatagcataatcaatacttacttctcaaatttcgtatttatatcataaataattaattgatggtgagacaattaaaaaaagttaagtacgaatgaaatagatgcatgtgacagtcagtagtcccgtnnnnnnnnnnnnnaaataccgggtaagctgtgcaatccc

SEQ ID NO: 141455 - DNA, 736 bp, Cannabis sativa
atcattacacaattgttcttgacactaaaggttttttttttttttggaaaatattttatgaactaaattgtatgcaatttttttagcctaaaggataaaagtctaaaactaacctaaaaaaatataagtgtctaatcctaaaagtaaaaagggtacaaaatgaaataatataaaaaataaaaaaaaactaacaccctaatatagtagcaaaataataaatacaactagaaaataaactaaaaaaaaaaattaaaccacttgtttttttttaaaataaaagagtaaagaaggaaaaaaaaaatattttttttgaatctatatatataactataaaagaaaaactaaattatactatattaactacaaaatttttttttttttttttgatataaacaaataaagagacataaaaatatatatatatatagatactaaacaaataataaataaataaactactatacaaacctcttgtagcacagtaacttccctagcaacggcgccaaaaattgatgtcgcccaattagttacactgtggtcgcaaatagtaaacgggctatatgtcgtatccacatggaggaaaaatacactcaaaaagacagttagtaattttacgagaacaaaataagaatcttgaatatgagaatattgagaaaataatttttaaaaattaaacaagtaattaaaatgagaagtgatcagaaaatgattatggaagacacaagcttcgtacatg

SEQ ID NO: 141456 - DNA, 774 bp, Cannabis sativa
agaaaccatttcgcgtcagaagacacaatcataaggatgacatcaagaatgcatagcgagacatcaacttcgctacgtataaaaaggtgttgacaagatatgggggttgttagaacacttagcgtataatatacattatactaactaagtataacaacttgaagaatttgagtgccggatagcgaggcatccatctcgctataggaaggcatacacctagtaccttcactaatcagctccaaacatttttcaaggagattcactactccgtcgagccagctctctcagaaagaagctgacattcaaatgatgttgactactaaagttcaccttatcaccaagaactacgattatcagatggaatgttatgtcttcaatcacataaactacgggatttacattatcaaccccataaaaacatggaaaaagctctagctcgctgctaggattattgttgttattcaagttcccagcgagatacactttgcagcgtatctaaatttacgtcagcattgacccattaaaagcaaataaatcacaactgtgtgatttttaaataataaccacatttatttacatggtgcgtacttaaggcgcacgatttcagagaaacattgttgtgggattcgtatctgattgtaattaactgccatcctatgtcactaaaaataggggcatgtcatcctatgtcactataaaaagggacggaaaatccttgacagaaaaaactctagtttgtatcagaataatctgaataagattgactcatggact

SEQ ID NO: 141457 - DNA, 508 bp, Cannabis sativa
aaataatcttacataattaattacataataatataatttctcatttataattaatcaatttaattagggttgcaaattacatactaatcctaggatattacacttgagctctgtctctcgatcccaagcgagttcaattcttcctattatcctcggtctttctttttgttttagtaaaatgatgcattttattcttctcctgtcatgtcatcaattagttattttttaaattatttttatacccttcagattgtaagatattttgaaaaattaagtttttgcaaatgccaataagatatacgaaaatataaaaatgtatacgtctacagaagcagaatgttgtaattctgttactgcagaaaccaattttgcaacgacaaaacagtacagatatatagaatataaaaatatttgcaaaaaattaaataacttgacacaagagatttgtacgtggtatcagtattctttcgaacactcttagtctacggggccatgcctagagaatgaa

SEQ ID NO: 141458 - DNA, 1685 bp, Cannabis sativa
  modified_base (32)..(35): a, c, t, g, unknown or other
aataatctggattacattgaaatagagttttnnnnagggcataaaacccaacaggtccctgatcctgatccaagttctggtcctagttcgggggctaaattcctaggtctgggtcccccatctatgttcgggtcctaggtccatgttcggcccgagtctaggtcccggtttgggttcttgtccgagttcgggtgctagtccaagtctgggtttgggtttcgggtgccatgtccgagtcttgttcttgggtcttgggttcggccccggtttttgtgtctcggtctagatcctggtcccggtttgggtccaggtccaagtctgggtccaggtcccggtcttggtttagttcccttgtcacaagtcctggttagggtccatgtcccagtatgggttctggtctgagtttgggtttagcttcgagtcttgttacagtcccattcctagtcttattccggttccaggtccggtatcatgtcggacctgaccctgggacctaatccaagacccagactcggacttagacatggatctagatacaaacctagactcgaaccaagacgcggacccatacccagaccgggatcgaaacgtgggacctggatctggagcgagaccaagacacaaacctggacccgtacctaagacttggactaggacctggacccaaacctagacccagatcgggatccgaatatggacccagacccaacacaaaactcggaccaggactcagaccccaacctagactcggacccatacccgaagccaaacacgaaatcgaaatgagaattgggactaggacccgaactgaaacccaaacatggaccctgactcggaccaaggacccgtacctggacggggaccttgacccgggcctcggaacctggaccaagatggacaccttagactaagacccggactaggatctggactggaatccaaaactcgaacctagatctggagcagaaccgagattggaaacccgaacctgaactcggactaggaattgaaccctgaccgggtcctagactcagactgggacctaggacccaggtctggatggggaaccaagacccgggacccgggcttcagaactggcactgagaccctagacctgaccccagacccacaccctgatctaggacccagaccagaacctttgatccgaagtggaactagactaggacccgagaccaggatcctgatttcaacccgaagcttggacctgacccatagtcgatatttggatctgggaccaacacctagactcaaacccaaacccggactcggacccaaacccagatccagacctgaacctgtacctcgtgactcgaaactagaagcggaccgggacctgggaacaagactagaggactaggacccgatctcggacccggaactggaatctgtctaggacccagacccaaacacagactgagatgtggactcaaataaaaaatcggatctagactcggacgtaggacctggactgggattggagactcaaacctggacccaggacttggaatgggacccaagacccgaccccggtctctgtcccaaacccaaacacggacatggacacggactgagacccaggattcgaatcggaacgagaccaggacccaagattgggatccggatcttgacccatgacccggtgcttagacccaacccgtagtcgg

SEQ ID NO: 141459 - DNA, 1008 bp, Cannabis sativa
  modified_base (977)..(979): a, c, t, g, unknown or other
tcattgtcgttggctaaaagcgaagtcaatattttggtgctttcattaagataaggatcacaaatcgatctttattcgatactcaaccgccaccacgatggtgcaaactcgtagaggtcagtctgacctagaagaaaattcaaagacgcttgatgatcatcctacattacaggacccagggagttcaagggttccgcctgctgttaatcccagacagacgggtagcatggtgaatggtgaaacaattcctattactggagttgtgcctggtgtgcaagagactgggagtaacagttctgcacccaagcagggcattcataatacgactattccgcttcgaaccaatgcccagacgaccatcggagacgcaaccgaattgcaaaatctccgtgacgcgctcggactcatgcaggttcataacaacactctacatcatgatcaggatgaactacgcgatgcagtaaatattgcatttgatgaacaaaggcgtatgttcgctgaatggagagataaagagatggaggcattaagggctcaccatgaagagatcgaagatcatagtcggcaagccaccgtgctgatacgaagagcctaccaaactgtaggtcagcaatcgccaaacgtcattcccctaggagaaaccgaagaggacccaacgatgaatacttcctagactactaatggtcagccgcccaatccccagttacgagttccgctcgtgggccaagtggtaggcgagcagaccttgttcggtaattcatcaggaggagtcatacctgacggttccaaccagactaatggtgctattccacctgtcaaccaagtgaatcaatcactaaggcaacccggctcttctgtgttcgaaaagttgggagcaactcatgacctaaggaacgatctaaatagaagaaggggaacagacgaatagaataataaaatgatcgtgcagcctagagcccatactcaaatccccgctnnnaaagacgctgacgtaatccaaatcgacca

SEQ ID NO: 141460 - DNA, 772 bp, Cannabis sativa
atgatcttaacaaactaatcacaagagatgacacacatagaacaatgttaacagaattttttcgaatgaacattacaaatgaaaaggctaaaacattattgtataaacaatttcctcaacattttttatgggataaacaataaagctttggatgcctagaaagaaaggtaatgttgttggaagaattgttgtagccaatcctatagaaggggagagatattacttacgattgctcttaaatcatatacgaggagcaacatcatttgataacttaaaaactgtcaataatgtttatgtttcaacatttcgtgaagctgcacttttgtatggattactaaacggaaaagataattgtaaacattgcttagaagaggcatgcaagtaccaaatgccatactcactgcgtcgattgtttgctacaatactatctttatgttctcctgatgaacccaggagattgtggaatcaatttaaagagtttatgtgtgaagattacatgaaagatggtatgaacttatctggtgcagaacttaaagcattacaatttataaattctttgttagaacaaataggaaagagtgttaatgactatggaattgttgattatgatataaatcttagagaagaagaaatgttagcaaaaataatggatgaagaattggggataattgtctctgatgttgaattatcatatgcaaataatttaaacaaagaacaaaaatctgcatatgatatgattttggacaaagttttttccaatgaaggggcaatg

SEQ ID NO: 141461 - DNA, 565 bp, Cannabis sativa
gtcagtccaagaagatggccatatatatgcactccatatccttccaagatggcatgaattggagtggatccccatgaacaagttctaagatggactcattccaaacaaagccagcgtggttagtattttccttccaactgttccatcgacccttcaacgatgaagtaaaccaagatggcatgacagtacacttacgtggatacaactctggaaagaagtgttatcgcctcctcatcatatggaaagccgcatccaaatgctgcacaactcatacaaataagtcagcacgagcacattagaacattaaaaaaataaaataaataacagcagcaaataacaacaaataatacttagttaagaaacttacattatcagaaagcctttcccttttagtaagtagcttttggaaccaagccacaccatgtacaatagtgaaaacgtccctcggatacttgtttctaatggttcccactaaccaatttcagaaactatgtagtagcttctaatcaacgggccgaagtgggtcaacattcacatgagctatcgatggtttcatcttcttctt

SEQ ID NO: 141462 - DNA, 663 bp, Cannabis sativa
gattaagcggggttatggtttttgatcattttacccatagactttatttttgcttaagttgtaagtaagggggcattttggtcatttaaggagatgattaggtggcttccttttggtcttggcagctgtccatttgattgtttcagctggccattttgtgtagaaattaaaaaggaagtatcaattatgagaaataaagaaaaaaatcaaaaaaattagaaaaccctctcccttttcctctttccccttcgagtctagcaagaacagccaaggacttgggactttggattgaaattggggtggtgtttagctgaattcaagtggtgataatcaaaggtaaccttagaactctaaaccttgtgtaatatgaagctttgaattttagtttgtttatgctagttggtgatttaagggctgttaaggtttgggtgaagtataattcaatttttaggtttaaattgggtttatttgatgatttagtagctggttgtggtctgtgggattggtttgagcaagcttgaactttgaaactcaagtttaggtctttaatggcataatttgttttagtgttttttttctatgaattactggttggagtatgttgtgtatgcactatctaggtactctggaaattttggtagcatttggtggaaaattgagcaa

SEQ ID NO: 141463 - DNA, 1026 bp, Cannabis sativa
tatattttgatcaaatatacaacacttttgggtttctccattgctcgtaatcttcttgtttaagtagttagtaatctaccgaactttatgatttttgagcgttgtcaattctgcctcgtaattgcagttataatctgccttaagcaaacttaaatatactttaaggattttatcactttgtatattttcaattttctcgtatgaatagttatattatctatctattttctaggtttaagtatttttatcaaggcgtcgtgatgcctcgtttaatactttcctagctcgcgagaaccgttagtatttagttttatacgcgagttataacttttgattttcctccctcgtcagataggttataaatcaaaaattatagttgtttgatcccttcttcgtcaaaaaggtttgatcaaggtgttataaagattcgacccctttctcgtcaaaaaggtttggttagggagttataacggttcgactccacttttgtcaaagaggtttagtcgagaacctttgaattaaaaaaaaaattgaaatgacgggttttcattatacaatgtatttccaaataatttccagttagtcatacaaaaatgccccttaagtaatttaaagaatgatactttataattacttaatataaatgattctctttattgataactgaagtttaaagtttacatcagtaatgcaagttaaatcatttatttattgatagtagggtcgcaaatgttttacgttccagtagttctttattagtgagccatcaagtcgagccaatttatagactccgactccaactactgcttcaatgacatatggaccctcctagttcgggttgaacactcctgctaatgcatctcttgtatttgcaaagactcgtcttaacaccaagtctccaacattaaatagtctttagcttgacttttttttttttgaagtatcttatgactcggtgttggaatgcggcgttagtgatttgcgactcggttcgtttttcctcaagtagatccaaggacaatttta

SEQ ID NO: 141464 - DNA, 649 bp, Cannabis sativa
agaaaagcataatcaataacataagaattaactccggattataatcaggccaattacccccaaccataaccctattcccgtgttaaacacggtgttgagttaagaacgttcaaatgacagtactagtgaccataatatcagcctatactcggtacgttagtcgtactctagtcgtaccgatgtgatactatcaagtagtacagtactattgaccataatatcaacctatactcagtatgctagtcatactctagtcgtaccaatgtgatactgtcgaatagaacttaagtgttgtaaaaattatatacccaagtatacatagtcaaacaagtaataaagtgatatgtaagatcgtctccactgggattgcaaacaaaatatgatgtaaaacaaactaattatagctcaaagtaagaggaaataacatgaaattgattgagcaatgattcaaaattaaaaatgacatgaattaaacttgctaaaattaatactactgctcctagaaaaattgcttgcaagaaaaaaaaataatttggtaaaagtggcttgaatagctgattcctcctagttaggttttctcccaggtgttacagcatcagttcagcattaattctccaacattttccacagagataacataaattcctct

SEQ ID NO: 141465 - DNA, 555 bp, Cannabis sativa
aaatacattaatgtattttcaaaacaaaaaaataaagaaaattattccatatactatttttttaacttttttttttttaaatttacggtttgggtttctaaggtggtttctccgatggtttctatgtgggttgctatatgtattttgattgcgatttaggttgctccgttagttgcaataggagtttttatgtcaaattccgtaaaaatacaaaaaagaaaatgttttgaagtgtaaaaatgaaaaaaaaatattactaaaaaaaatattaattatagaaagctaatatgcttataaaatataagctacattagtcatacttttctaagtactatttgatttttatttgctaatgaggtgcattagttagttgaatggaacatgctcaatatgtgcttcctaataaatatttcttccaatttttttagaaaagacataattaataaaacactttctaatttatattaggggtatttattggatcacatctaatggatttagacccattcgatccaatccaattatttattggatattggatttttccatccgatc

SEQ ID NO: 141466 - DNA, 1484 bp, Cannabis sativa
  modified_base (368)..(369): a, c, t, g, unknown or other
taggatgttaataaaacatacttagtagtaaatctagatcctgttaaaatatttccaacataagtcccattcatgggggaggagagccttgaaatgacgccatcatgctgtagcaaactctgcagtgtactccgggccagttttcccagcctcgacaagcagagtttcaagggcttggctcgaggaggcgaaagcttgagtcattttggggataggctcatcaatacgtgtgggggccagaggaggggttggatcctgagtctcagttttaggtacctcgagattagcagcctgggaggctcacttcttattagcagtagtcttcttgggccttttttggggctccacgtcgacatctgatggagccnncgagatggtcaacctcttctttccctttttgtgaaagagaccctcgagattcatttctacgatacaagataaaatgttagcatttattgaaaaacaagttaagggggaaattggggcagaaattctgcctaaggaatttaccataatcataagaagacaaagatgaaggaccataatatcaactaaaatccctacatcctgtgatcctgaatatatcatagggataaattggttctaaatctcagctcgcatctaagtggcttgccctatccagcatggtcccgtactgctcagttattccatagtatgagtcagtacaactaatttggacatggaactttgggtaccgactatcaaacctatgtgcaatgcgatctacgagaaggggattctaagtgtaaaaattgtactgactatcgcgaaatgacactaaggtgttacgctcggccctaagcactatgggtgaccaaccacattgattacctcgggatgctccttcttcagcttcctgaggggcgatgttccgaagataatgcgcccgagccacgcagtcctgagcttcctcctcggttgggacaggaacctactgcgaagaagaatacttgggatatttataatcacaagtaaactccttgtcagttaggagacccacggacctcaagttaacctcgttcaaaagaaagtcacatgaccgaaggccaaatggaggacccaacaggagcctacgccgctcgaccatctcaggagttcgaactagtcttttcgagacaggtgtcgaaaacaaaggcaaaattaaagttagcaaaccaagagtaaaaatacatggaataatttaaccaagtcttaagtaaaaattacttacgtattatgcgaaaggtggttgtgccgattggggatagaccagtcctcgagaagaatttgtctttaaagggagttttattcggcaaatccacaatgatcttacgatcacttgtgtgagtcccaaggtagtaaaaaccccctgctacattattccttgcaggaacagccttgacagagtagagaaactctatttcctggggagtggggcactcccagttcaaaattttatacagaaccttcaaacttgcgaggat

SEQ ID NO: 141467 - DNA, 1015 bp, Cannabis sativa
gactactgactgtcacaaaaaaaaaaaaggttttttttcttcagttttaaccaaaaaatgtaacagtattacaaaaatatttccagccggccaaataaacaaatatacaactcaaataaaaaaaaaattacacaaatacttcttacacacaccttcaacccactatccatgcttcctgggattgaaaacttcgtctaatgcaacttttgggcaaccacctagcaacccaaaacaaccaaaacgaaatccaactagaaagagaaccaccattaattctagcgacttcacctgagaagaggaccgaaatcaatcaaaatagggattgtttcgaattcatgaaaaaaaaaatgcaaaaaaactactacgaaactaaaattcaactagaaatccagtttaatttgcataaaactaatattctgacttcaattttgagatccatgatatgcatatcttaaaaagttgaactcgagttcccaaacaatccaactcaagtatactccaaaaaaattatatcaatattatagtaaaatatttatcgtggtgtatttttgttgttttctaaatttctaatggtgaatttgttcatattaaatcacgaagagacatgtagatagagttacgtacgtgaaaacaatgttctgatttttaatgtttcataacaattgcattacagttacatgaatattttgctaacaattatttctccacatattactataagggtacaagtaataatcgaataatcgagcagtgacaaaaaaaatattgacaaatagtttcttacatatacacattcacatttaacatttttagttgtaattaagttgcacgttagttgaataatagttttgctactacaatatcatagtattataaaaacagggctcggaattgtcaaatacgcgacctgaacagaaaaaacacgagtgttgtaataattttttgtattaaatatgtggaattattagttgttttgtggttttatgttagttggctcgcaacagatataactgtt

SEQ ID NO: 141468 - DNA, 569 bp, Cannabis sativa
ttattactcatttgatggttgctttttgatgtaatatgtcattttgatgagcaggtacagtgaaaggggatgggtttggcgtgaggagaggagaagtcagcagcagaggcgcacgtgggctgaagagaaatgagagggagaagctaggaaagcagatccaattaggtgactccatgtggcaggcactgctggaggaaagaaaggccacacaagcgctgactgggacgggttggactaatagaatggtgtcgtttggagctgactggggaggcagacccactgggcggctgggcttggaaaagagattggattaggccttgctttgggatcttttttctttgtagaaatcacacgatataaataaataatgggaaacttacaaaaatactgtttgtttaccaaatgttttcaaaaatacttggacacgacaaactttacatttttactgtccaaacccatttttatgtcttttatattgtccatgcccaatatatttacttttatactgtacacagtaacaaaacacaaacagcacctttccttcgtggttggggacagacaaatcaaca

SEQ ID NO: 141469 - DNA, 611 bp, Cannabis sativa
  modified_base (51)..(67): a, c, t, g, unknown or other
  modified_base (348)..(354): a, c, t, g, unknown or other
  modified_base (567)..(567): a, c, t, g, unknown or other
acttaatatggcgttccaaacgagcccattagtattatttaatacaatacnnnnnnnnnnnnnnnnntgtattaatagattgtgttatattatattgtattagtattatttaattcggaacccggtcccgggtcggggtccgagtccaggtctaggtcggatttcgggttcgagtccggatccgagttcaggttcggatgcgtatccgagtccgggttcgggtctaggtcagggtcagggttcgggtcgtggtctgagtcctaggtccggattagagattggtgttgaccccgaatcctttataaatattataatacaagctaatacggaccatttgttatgtattannnnnnncaacatacattgtattaaaaaaatagtcataataattaatacaatacattgctttatccaaacatagtgttatttattatttaatacaatacgacccttatacggcataccaaacgagcccttcgataacaaaaagtgctctaaatttagattggataaataccattttggatcttgtgttttgtaaaagttactaattggaccctctatttngttaaatgacaaaatagactctgtgttttctaaaattgtacaaa

SEQ ID NO: 141470 - DNA, 529 bp, Cannabis sativa
  modified_base (111)..(111): a, c, t, g, unknown or other
  modified_base (230)..(231): a, c, t, g, unknown or other
  modified_base (460)..(474): a, c, t, g, unknown or other
gtaagccttattaaagtcgccaccattagggtgatccatactaaaataaaacgctgacaaagagtacttatccttcaagattttaagacgctaacttgctaatgaacgttnctccattagggaggattactcattaaaacaataactatgtaaaaccaacaacggagattgaatatcctaataataataaaactcattatttaaaaatttattttcttctaatatttatnntaatctatttttttaaatatatatatttatttagttaaaatttccaatttagaataaaattcgaattaaaattttagtttaatatttataagaattatacttagatggatatgaaaataaaatgaattatttcgatcttagtaataatttttcaataaagattaagaaaattatttaatttctgttgtattaatttaaataaaattgcaactcaaatttaattttctannnnnnnnnnnnnnntttcgaaaaattaaagtatataattatacaattttcgaaatgctttaaaataaaa

SEQ ID NO: 141471 - DNA, 653 bp, Cannabis sativa
  modified_base (37)..(42): a, c, t, g, unknown or other
gttttattttcattctgtttattataaaagtttaaannnnnngctattttgattagtaatcccaattaggggattaggatttcatagttattttgggtagcgtgcctttacacatattccccttaccatgacacgagtcctccactgaaatggcaaccgaattttgggtataacagttatgattatccattgttacaatcgtaatagtcaaagatcctctatagatgacctacactgaatagggataaatttatcgttctaccctttaatgtattttatttttaaaacacttagctacctataaatgatacttcagtaaactaatataaatacggaaatggtaaattgcggcataaatacttaatgttttagattttatatacttaaatactttatctttatttttagaggcaaaaatacccaattttataattctcttacactcattagtactacttccgttaattcatacatatagacacgtggagggtccagatgcattaaatttattttttttattttaaaacataatagtcttaatatcagagactaaatgttacttgtttaaaaaaaaaaccagttctcataataattttcacatgtactgcactagttcactcagttatgacaatttagttttgcatatctcctat

SEQ ID NO: 141472 - DNA, 901 bp, Cannabis sativa
  modified_base (844)..(847): a, c, t, g, unknown or other
tgttgttggttacaaaaaaaaaaatatcacaaattatattattattattattattgtcttaggtaagtatgtttcaataatacaatcactagtgtgtggtcttatcaatagtactatatatttttattttagttaatataacctacaactttatgtagtatataactttttgctttgctttaaacacaataagaacaaagtgacatgcatgcaagaattgattagtctttgaatgacattaaaatataaataaaaaataaaataaaaacggtcatcatctcttcgcagaaacaaaatcactttatataatttattgttttggtaaaacattgagtcttagacaaagaattaaattcttaacatgggcatccctctctcctctaataaatttgtcatgcattacatactttttatacataagtaatatactcacgtcagtgagtgaatatatactatgaataagaaatatagatattattagataaacatagtctataccttagcaaatattaaattatctaatatattacttttaaaaaaaaaactaaaataacctacaactttatctgatataatatatgagttatgagttattagtatttggtctaccctggttaagtttatcattgagcaacacaataagaagtgcgtagccttatcaatagtactacatcctaatttaagcaaatataacctacaactttatgtactatatatcattttactttacattaaacacaacaaaagcaaagtgacatgcatgtaagagttgattggtttattttgggttttggtaccaacacaatgactaatgcatattagtcttatctaatggtaaaaaagnnnnaaagagattaatataaataggtgtgttttactttaagaaagccacatttttctt

SEQ ID NO: 141473 - DNA, 1192 bp, Cannabis sativa
tggattctctgatagaaaccatgccaacttccttcctggattcatttgaaactatgccaactgtcctctggaattctttatcagcctaaggaggacctttaagatcgctcacaagatctatgccctcaaggatcacttgtgaggatcgcccatggtgggctacgggcttccgctagtttggattggtcggaagctcctcaaccttgtaatccatcatttctggctccaattgaggcttgaagtccttgggaacaaatggaaaatggttggtgcatcctggtattatgagtttgggagggtgaacttctgaactctaaagggacattctagcaggaaagaaatgatccattctaaaaatggatctcactaaaaagccagaggtttgtgaaaaatgacaagcttgagccgcccttttatacacaaagtcaagtgacaagaaagctaaagattgggaaatccaacagttgggagtcgggcaaaatatgaagagatgattcataatgaccctcgaaattgtacaaccgccagaatcacaggatgcattttttccaagaggggatcttgatgaaaatgccctctgtaatattaaaaatctctttttactaaaatagaactttttatggggcaattgttatacccataattcggctaccatttcagtgaaggacacgcgtcacgctaaggggaatatggatcgatgcaatcgccttacatggaataactcattaattacgtgagtatcagagtatatttgtaacatgtagactgtaaggtcttgggcgaggaactaatatacaaactggtacttagcatattagcaaaaaaccatatgtcgctgaatgcgaattgcaaggcatcaaggacaatacacattggaagacgaaagcgacatatatcaattgcaaaagtccttagagtacaaactaagtgttatagatagatcggctcaagaataagtaaagcgaggtgtccatctcgttatgggaagacctcatataacttcatcccattagcgtcagcgaggctcataacccaggcaagtcagaagctaacattcaaatgagttttgaagaattcactgtacataaaaaccgcgatcgacatcagacatgcatcgtcgacctcagaaggaaaaattgccccagctcgctattgagatcactagaaccaagcttttgtcgagacaactcca

SEQ ID NO: 141474 - DNA, 501 bp, Cannabis sativa
gatgaactataagtctagattcaaattgttgatgttgcttgtctatttattcatgcacacatttgaagtcatctgttggtgtgggctcaaaattttgttttgtggacttgcttgttgtcgttccatatatatagctgttgtgtattttttgtatatatatgcgccttctttcccatgctaaattacttactatgagaatgagattgagattatagtaataatttattgtaatgttaaggtaatgtacctaactgcttagctcttttctaattggtttaaatactctttatcttgataaaattactaaatcaatcattcatttttttattatgtttttggtcacaccacaatattcgtgtaattcacccgatcaagcttggttttagtgtttttttagcttctttaacccggtcaatttggagaggagaagggagtgtttaattatgttttatgggtttagagatctgtattttgaggaatttttcttgtgagaatttggag

SEQ ID NO: 141475 - DNA, 689 bp, Cannabis sativa
cgttgtcgctgctggcgtggatgtttctctaactcgggggccagccgttttagggaataggttgagaggtctgacattacctgtccctacttcgccattaatgacatccacaggtggcgttctaactccagataatcgaacgttcatcattccgatgttgatggattcgttgttaacaccttcgtttgcttggtttcaagccatgatgattttccttcctgaatttagtaagaatgtacttcttggttcccacagacggcgccaaatgttgtcgagcaaaattcgcaacaccgaaagtatataataatactaataataagaggaaattatttgaagagcaattgcgagtattcaacctaaaatggcgagtactcgagctgggaatgtaaatacttaacagaaaactggaaataacaagaagacaaaggattatagtggtttagtcagatcacggtctgctttgtccactgtagcaagagtttcgtaggtctcatttcatggtggatcactcctttatatacaaagcaagtgtccagttagttacacaaggattgcattcattgtcaatccgtttgcatattgatttatagtaattacactaaaaacgtaaacatcaataaatgaataatagtttctattcactaaatacagcaacgtatgcgtcttctaatatgcgagttgactgttca

SEQ ID NO: 141476 - DNA, 576 bp, Cannabis sativa
taaaactcttttcccgccaaacgatccaacatttggtcaataaatggcatcaggaaatgatccttccgagtagcattgtttaacttctgatagtcaatgcacaccctccaaccagtcacggttcgagtaggaatcaactcattgttctcattacactacaagaaacccaacttttgccggcgcatttttgcaccggaaaaagtacactgaatgcgccgttaaagctttgccgacgcaatactgcgccggcaaagcatgtctgagaagcttggtcggtaaaagacttttgaccggcgcatagactaaatgcgccggtaaaactgtgtttcgccgaccagaaatcacgccggtaaaagggaaacgccggtgttaaaagatctccttatccgctatgaaccttctttgttaaccttttgccggtacaatagtgcaccggcaaaactgttagcgccaatcctcaaattggcgccaatagttttagcgccggcaaaactattggcgccaatctgaggattggcgcgtacatttttgggccaccttttaccggcgtagtaatgcgccgacaaaagtatttat

SEQ ID NO: 141477 - DNA, 1458 bp, Cannabis sativa
tgtgacttatttatagtcattgcaaaactcaatctaattgggaattgcgttcgtttgaatggaaaactactattttcatccacatttggcaggaatggtattcttggaataaacactcttttttcgatatggtatcccatggaaatttcaacatctatgacattttggtctaatgtcctacatattaaacgtgttccattacataaacctttagaaggattaatgttactaagcagcatgatgggacaattctttttgagttttaattcatgtgagggaagtcttccattaccgattgctcagtattatctaccgcctcatccctactgtaatagaggtggacttctcctgggaaccgtccaattaacaacgaatttatgtcattgacaaagatgttctttggtgttattattgcacgattcatcatggtagacacattttctggatattgctgaatgttgcggaaaacattttctatcaagatatttaaagaactgatgtcatcattgtatggtacaagcatttcatttggaatttcgatgttgtcattgattgtgtggtggcatgccattgcccactgacaacacatagtccaaaaataacggatccaacctggctctcatattttgaattagtcgaaatttagtcaaggtaggccacatgtatgaataaaccaagctggaatgtatctgctcttgtctcgttcctttttgtaccacaggtaaaacctgtcaaaaatctcctccaaaaacaattaccttttcgtcaaatggtaaggttgtatcgttgatgtcttgtagtattttatctaacacttctatgtgctgctttcgagtcatttgggcctcgtcccatataattaattttgctgcacaaagtagttttgcaagtgcactctatttgctgacacatcatgtgctttttccatcgacattgagtgggagcttaaaacgtgagtgagttgtacgacctccaggcataatagatgttgccactagaggtgagcataaaatctagaaaactgaaaaaattgttcaaaccgacctaccaaacatcgttggaaccgaaactgacaaaatcgaaaaaccgaaaaaactactaacagttaaaactgccatagaatggtcggtttttttctaggtaataaaccgaccaaaagaactgaaaccgaccgttatacatatttattaatttattaagttttttttgtatgtattatagttactaataatatataaaaaataatatattaatttttttattaatattaaagttaaaataataagataattagttttgaacaattaatttgtatgtttgtagtcgtaaaatgtagaataatgtatttatagagtaaattggatcattttttaaaaaaaaaaaaagagtttggtttgggcggttcaaactgaccaaattgaggttcaaaacggtcgattttaagataggttctggatt

SEQ ID NO: 141478 - DNA, 846 bp, Cannabis sativa
tgtgaaaaatcttttcaagagctaaaaatgcaactcgcaaaacctctcgtactctcaaaacctctggatggagaagaacttgggatatacctggctatcatggagcatgatttaagtctcgtactgatcagagaggaaaacaacatccaacactcggtctattacatcagtaaaagactcattgaggctgaaggccgatatccactgatagaaaagctcacttactgcctgatcctagcaacaacaaagctaagaccctattttcaagcttatcctattcgggtatacattgaccaaccgttgcaccaaatattgctaaaactgtatgcctctggacggctactcaaggggacagtaggattgggtcagtacgagatcacctttcaaccccgaacaacaattaaaggtcaggctttagctgattttgtagttgaatgtacgagtaaggaagaaagtgtatcaaaaaacaaccccgagctaaaacaaatatctcagccaagtaacagtgaatacaagtcgacttggaaacaacatgtggacgagtcggctacagataaattatccagtgcaggaatcgcccttgtcacacctgggggcaacacctacacgctgcagtcaaatttggatttaaggcatccaataatgaggtcgaatatgaagctttgattgctggtttaaaactagcccaggaaatgaaggccgagcacattgggatctgcagtgattcatagtcggtggtaaatcatatacctggagaatacgaggctcgaggagaaaaaggtgatagcgtatttgagtaaaatacacaattttcttgcacaatttaaaagctatgctctcagacaa

SEQ ID NO: 141479 - DNA, 851 bp, Cannabis sativa
  modified_base (167)..(172): a, c, t, g, unknown or other
  modified_base (789)..(789): a, c, t, g, unknown or other
ccaatattaaaatatctaaccgtataattaaataatatataaatattaaggaaattaacaaatttttaaaatatggccctaatttaaaaaaaataatttttaaatttaaacttctaaatatcaaaaactaataataatctattaaaaaaattaaatattattaattnnnnnntgatatttaagtttaaatatttttaaaataatatttaattttgaattttagtgtgaaaattggaaaattcaaaaaaagtggaaaaaatccaaaaatttcgaattttggtgcatggtgcacctgctgggcacgaggagcctcctacgcgcaacaggtagaaggtgcaacctcccagtgccgaggaatcctggcaattgcaggatgtccgcacgagagcccctgtccgaaggagggaagctgagcgagcattcagacaaaatgtgtctgagatctgcgcgcacagcctcgttttgtccgactgcctgtgcgtgcgatgctcgacccctcacattcaatggaccccaattttcaaattgccatatctccttcgtttttcattggaatcgagttccgtaaaaatgaaaattgcttaatttttcacaaggaatccaaataaaaatattttcagaaagaaaataaaattattttgatagaaaaattccgtaattcacatacattcatcaaataatcagataaaacaacatgaacacatccaaatcaacacacaaacaatattcatcattttaaatccatattcatgaaaacaaatcaatatcatggctctgaggccagttgtngggaatattttaccaagatctagatttactaacaagtatgctgattaacatcctaaatatga

SEQ ID NO: 141480 - DNA, 636 bp, Cannabis sativa
  modified_base (291)..(295): a, c, t, g, unknown or other
caccttgggttttattggaatgattatttagctttaaagatcgctctagacgatgaaattaggaaacctaggaatcttaacaattttattttttaaaatcattgtgtaacgccctaacaattaggcacgttacccaaggtgattaaaaaaccctaaccccctaaactggattactataaacgtaaacacgggtaatctcaactttaatcgaaaacagattgaaaataaagcctgaaataaactttactttgtaataaaaaataacatgtttcgggatcccaaaaatatttnnnnnaatattacaagtcttttcactagccgacttaggcggcaatatcagagtttcaaaagtacatcactggtagaccccaactcgctcggtcgagtgtggcccgaacatctacatacatcgcccagctcccacactcatggcagaccagagacaaatttaccatttcctgcacagtagaggtcccgtgagccaagcccaacaagatagtataattatcaataatcataattgacacatcacataaatattaatgctattttcacatttgtctgtatgacacaaacccgcgtgtaatacttacatgcctatttatgtctatgtggaatagacctacgtgttacgct

SEQ ID NO: 141481 - DNA, 1621 bp, Cannabis sativa
  modified_base (1130)..(1139): a, c, t, g, unknown or other
taggttaattttaaatttataatttataattatataatttatcatataagataattttaatataatatttcaaattaaaagaataatgctatcatttaatttaaaatatgttcaatattaaaatatctaatcttacaattaaataattagtaaattttaacaaattacaatttttttaaaatataaccataatttaaaaaataaataattaatttttaaatttaaaccttaaaatatcaaaattaataataatctatgaaaaaacttaaatattattaatttgtaaatttgatatttaagtttaaatgttaaaaattatattttatttaaatatttgggattctaaaagggaaaaatccccaaaaaaatcgaattttaggttgaaaccaccctggctgcctagaataggctgctggcagcatgatgcgcgcgcatgagggtgattgcagcctccctaactgagttttctcaacatttgtagggttcctgggcatgatgggtgttgtctgagcagggggcatcagcaaattcagacaggaattgtccccattttgcgcgcgcagatcctccttgttcgagggtctgtgtgtgcgattggtgcatccatcgacaccattggactcgaaacttcaaactcacatatctttttcaatttttatcggaatcgagttccgtaaaaaccaaaattacttaatttttcacaagaaatccaaataaattattttcatgaaaaattttgtaatatacatacaatcatcaaatcacacatacacaaatatgaacacatccaaatcatcacaatcatcgttttaaatccatatttaataaaagtaattcataacttgctttgagaacagtttttcagatttattttaccaggatctagatttactaacatgtatgtttttaaccccctaaatatgaattctctaatacgatgaaattaaacacataagagttcaaaaaaccttacattgatggcagcgaaataatatgactccttccactcagatccctaacccttgttcctttctatcgcaaagtaataacaagatctgagcctagatcttcttctctccttcgggttggttaccactgtctttcatactatgattgagtacttgacttgnnnnnnnnnngcatgacactctatcactatgggtgaattggtgaagaacagtcaatgagggttcaagatcactatagaaggtgtcgctcatctactagttgtcaaagaatgaaaactagatttggttagatttaagtggattgttggatgagatgagaacatcatgttccttttatagtatttcaactaggatttaggattgaattatatggataaaaaaaataatgggcaaaaatcacacatagtggccggccactaatgggcctcactaattacaattttgtcactttatttcaaccatttattcttcttttaataataccatatttttcaatttcaatcctataaatgccaaaactatgtatttaataattgtaattaattattaaataaaattttcatgtattttatttattaattaggcttaacaaaatctcttaattaacaaataaatcccaaaacctcttttattcacaattaagcccttgctta

SEQ ID NO: 141482 - DNA, 1345 bp, Cannabis sativa
aatggcttcataaagttggaagaagctatccaacaagcccaaataagagggcaggagaatgacaaacaaacacatggccttatagcacctcaaacactatttagcataccaactagcgcaaacgatctctattaattctcaaacaatgagaatggtggaggcaagcacaacaatgatggctctgaccaatataatggcaaaaaagggaaactcaatgattcctttttgccatgaagtataagggagaaggaggagaagtgtgtatgcttcattctcctatcgaaactcccaaaaaaaatcatgccaagacgtcctagcaaggcgagtcagcaacagacagtctgaaggctggcctccatatccaaaggctggcctcctcttggtaaagccatagtacctataggatcttggcaggtacatgacctaccaggtcctggcaggaccatggtcggctaggattaacctggcaggaccatggccggccaggattgccaccatgattggccagacctcccctgtaggtctatgggcggccaggattaacctagcaggactctatgaacagcctaaaacatggacaacaagctacctataaattgggcccttaatagcccaacaaactgatggaaaatatctattttcaagaggtagtatagtcttttgtatttaatcaatttaatatgtaaatatctgatggttttattgtaaattaaggttttaggctttctatataaaggtcttaactctaacctagaaaacctaagtcactaaacctaaccgtagtctctctttctctctctttgctacacgcccccaaggcacctctctcttcctctctcacacgcctctaaggctattcatctctctcattagagatctgcctatttgatctatgttttgtatcttgatagagagctatatcagatcctacctatagtgatctgaatagtattatctttaggtataaatacaactaaaaggggagtaggtcattaccccctatcacaggggaccgaacctttataacaaatatgtgtgttttatactttttcattctatttgtgtaacacgtggcaagcatcagatctatacgaccccactgtgagttgatcacttttgaggtcaacaggtatatttggagttgaacctgtgatggttctcgaagctccttaattaaatccaaagattcttgaagtagagtgcggtttcgagttgggtcgtaggtatctctcctatgtataggcatggtagattcaactgggattactacttcgcatctatatgtcatggagtacggagtgttgatctgatagagatgagtttagtcgaattcgatattatttta

SEQ ID NO: 141483 - DNA, 576 bp, Cannabis sativa
taaaaatcacgtaatacgtctatgttagttagggtgttacacggcacaaacgcactttgaaatgaagaaattagaggagataaggtacctttcaatcttagagccacagccttcgccacaatcttatacatcacactacaaagactaataggcccatactccttgacaaacgacggcttagtgatttttggaatcaacaccacattcgacttattaaactttctgacagattggtgaccattcaaaatcgcaaggcacacagctgaaacccgtggaccaacaatatcccaatatttctggaagaaaatagcatgaaacccatccggcccaggagccttagtagccccaatagccttaaccgcacacaacacatcctcataagtgaagggcgtttcaagcttagcacactcttcctgagaaattgtagcaccgatattggcgatcccattctccacttgttgcagcgtaggagatgtcgaggaaaaaatagtaccaaagtaatgctcaatctcacccacaatatcctcttccgtagttaactttctgccatcttccgtcataatttccacaatcgca

SEQ ID NO: 141484 - DNA, 619 bp, Cannabis sativa
ctttcttgtacaaagtgtcatgagaagtggtaatcttcaagtcccgtctgattgtggcattcagtcctctcacatacttctatttcctggtgaaatcctttggcaccagatcaccagcaaacttagacagccgatcaaactctagggtgtattcggccaatgacatctttccctgactaaaattcacaaaatcctccatgtgtgaagttctcacagcgatttgtaaaacttttcttcaaacaaacttttaaattctttctaggtcattacactgacatcccgggtttgccccaagatatcccaccagacgcgggcatgatcttgtaacatgaaggctgcacagttcactctttaagttcccatcaccctccccaaattctcgaggatacgggtaatagtgctcatccactgctcgacctttattatatcaatacctcccagaaaggtcagaggttgcaacttcacaaactgctcaaataccgaatctctatgcggcaaaataaacccctggttatccaccattggcacaggtgttggtggtaacacttgatcagcaggggcagccggttgccttaatcgtcgcaactcttcttcttgacgaagtatgacacttcgcatt

SEQ ID NO: 141485 - DNA, 604 bp, Cannabis sativa
aagaaaaataataaaagagcaggtgattcacatatattcaagtgcatgtagaattttgaattaaattccaaaagcctcaagagaatcccaccatagattggaaaaaagcatgcacactgatacaaatttacaaacgcagtaattattcttgaggatatatatggtgtaatagttataaatatgtcatatatataacatatacacatgtcactgcatcaattaagatccatatacacacgtgttcgactttgtgaggaggagacaaacctaaatcatgcactatactatatttatgtatcatgatatggagtcataaataagagaaagaggcttaccctgtatggccaattgactatgcaatgatacaaagaaaaagtcttacttgttgtatgctgacgactgttgtatatattgatatattttacaaactgcaaaataattaggcagagttacacttcatgttccaattatataattcgaatgaaaaattaaatttgaattataaatatgttagatattatcttaaattataagtgagccacttaaatttaaatttgagataatatctaataaaagataaatttttattccttaaattttggaa

SEQ ID NO: 141486 - DNA, 669 bp, Cannabis sativa
gtactatatattaaacaagatatttttatgtatattacatgtttcgcaaattaattattagataattctatagtacattctattaaagggtcgtttcagtacaccctatagctttttcttccatctaggagagattttttataccaaataatttttattattatgtacattctagttattcggaatcatttgtaaaattttagaaaaatctaatttgtttataatgctaaaaataaggttaaaaaatttaattgtatgtgtgattttttttttatacgcgtgataagtaattttgtgaattttattttaagcattataaattatttaaattttttaaaaaagttacaagtggtctgtgaaaattgtcatgtacgcgataataaaaaaaaaatattagattgaaaagctttcctagttgccaaaattgataggaaatatattgaaaagatttttagtgaagggatgaaaaaataattaatagttggcccccttagtaattaagttctggctccgcccctgattatgatctactctttaaaatgattatttcgatacagaaaagcatatgttttttcgctagccgaaatcaaaggtaaattttaatttctttcagattttttttttcaaaagtttttttatatttagtttaccaacaagtaaacaatattc

SEQ ID NO: 141487 - DNA, 581 bp, Cannabis sativa
  modified_base (52)..(54): a, c, t, g, unknown or other
tctgtttctttattgataattgaatggtaaagattacattgaaatagagttnnntttagggcacaaagcccaacagcactttgggcatactaagcttccgactccatcagttgctaaggcacaaagagctcctcagctaccaaattacctcaaggacctcattagcacgaattgacccaattggcacccgtcgtgtgcccatgaccattcaccattcgggtccgctaaatgcgagaggcacgtgctcttaaacctgttctgaaaatatagtcaaaaaatgataagggaagagatatttattgtaatgccctaatactaaggcacgctacaatgctttttcaaatacagtgctctctttgctaatcaaagagttttcttgaaaaacgtgtcaaattaaaaattttatattaattaataaactttataatgtacaaaactatttacaagtaccgggatcccgtttataaacttttaaaacatattattcaaaatacatataatccaggtcgcacaacgactacaaaatataaccctagatgtcccgagaccgaacactctaggtcgcgctgctttgacatgta

SEQ ID NO: 141488 - DNA, 1005 bp, Cannabis sativa
tattgcatatgattgatcatgtcaaaataattcaaataatcattttgtgattctttatctgtaaagaccgcatacgattactattttagattattaaataattaaggtttattcatgagatttaaatattatttataatatgcatattgtggaaatttatttaagttaatatatgcttattatgtaaatttcgtaaattctaaggttgtgttcggaagctgtggaaaacgacgttgggcctttagagaatcacattttatatgttttagaatattgtagtcgggttattattgcaagggattggaggtgttagaattctcggggtttggaatgactaaactacccttcaattgtttaaaaccttggtttaaattaaagggcaaataggtcttttcctttaattgtttatttggcttttagagaattctaaaaggtgaattctttgaagtagataggtattaattaatttaaggaaaaagaaatagtgagaaagcaaaaacctagaagcaagttatcattctctacacctctctctctcactgtccttcgaaccaccaaacatagcaagaaaagaagaatttccttgctgtaattttcagagttctagcaagattttgacacttcaatcaaggtataaacccctagtaatttaattcaagttttagttaagtttaagtggtatattgcttgattttggggttatgttgctatatggttagtttaggtttgaagatgtgttctgaggttaaagtgggtttgtttttgctgaattatgattggtatcatgattgtggtgttgttttggcaaagtttgagattgagaactcaaactttgacctataatggtgaattgaatttctgggtttaaaactgagatttattgcttgatttgggcttagtatgatgattacatgtattctagaagttattgcacagtttgggtttgatttgagttgtggggagaatttttcgggttcccaacacagaaccggtcgaccggttctg

SEQ ID NO: 141489 - DNA, 690 bp, Cannabis sativa
ttagggcaaaaatttcacgaagctttgaataagcaaggtgaaagacaaacattgtgcagttaaaaagtaagcatcatgaatagtgaagtcgcataactcaatgcaaagaaaaatcgtagagtttctgaacctagggttttctacctatcttctacagcaaggttaagatcgcattcaggaattaaatgtgcaaaataaaaggagaaagaattgagaacttactcattgatcgacgtctagattcactctacacgaagctgttcgaattgttcttgtaaaaatttcacggcaaactcgaagcgaaaaacgtctctttttgctctgaaccttcttaatggagaagttggtgaaaatgagtttgtgaacaatgctcggtcatatttataggcagaaaaacaaaaaagggtaatcatttcaaatgtctcagatgcctcggttccccccaaaagcgaatattggaaatcaaaagtaatcaagtgtaaccgtcaaatgtggtgagagaaaattggatttcgaagcattaattgcgtcagagcatttattagccaaaaatcgaagagacgcctagtcagcctcacatcgaatcgcgaatagatgcaatgacacgtgtcacccatccaaacgcaaagacagctcggatgaagcctacacgcaacttcggaagtcccgtacagacttggggggcaaatg

SEQ ID NO: 141490 - DNA, 767 bp, Cannabis sativa
cttgattttctgctctaactgcgccaagtgctgcccaaaggtaattactttccacatattcattcgattttgattagggatgttcaaaaagcttgtgtttatgacagtaaaattttgatttataatttttttttgggggtttcgcaagtatggttcttcctttctcagccactctttattctgcaatttctattttgttaattcaattttcgctatggaggtatttgcctttttttttttggtacaatttcattgattagatttcaattaaaggatttgttacatgtgtatcaatcgttaaattaagagcttttttattaaattgacaatgctcattcttttcttcactttttgatcaattacattctgtgttagaggcaataatcttgaagtttgaccagacacatgaagcctttgtggcatttcatgctatagttcatttcaactgtataatttttaataatttgaatattactaagaaaaattcaatctgttagtgctaagaaatttgaattttgtatggaaagttatggtataatagcgagcatatatagtttttattcttcatcatctttattcttatgtctcaactcatattacagttttttcattcttcatgccctgccaatctaaaacccatattgtgaatttgtctctacttgactacatgaatttggtcagctcaagagagtttcggatctctccctcacttttaattaattattcgtataattgcaggttttgaattcgataccgagaccctcact

SEQ ID NO: 141491 - DNA, 589 bp, Cannabis sativa
  modified_base (532)..(546): a, c, t, g, unknown or other
ccagttatatttttagttatacatgagatatttacttctggtgacttttccagtgacttttccggcgacattgacttttccggcgacgatgacttttttcagcgacaacaattttttcggcgacttttccggcgactttttcggtgccggtgacttttctggcaaaacttattgttgttttacaaaaataggatttctactcttttttacaaaaatatggcataaaaaaacccatacaaatgtaataataataataaaaaaaaaaatcaaaaccctatagtgttatttatttattccataaaaaataaattataccctcaatttccatatttatgaaaattctccattttttttggataattacataaggtagcattttttgtaaaaaaattatatttttacgtttacagaaaatttttttttacattttttacgattttccatagaaataacacgaaaacaacaagaaaacaacatcaaagtaacaaaaaaataaaatctaaatatcatcaaaacaataacaaaaaataannnnnnnnnnnnnnnaaatcaacaacaaattaacaagagtacaacataaaaagaccgt

SEQ ID NO: 141492 - DNA, 645 bp, Cannabis sativa
tgacagtatttttgtaaaaaattagcaaaagttagtataccatgtaaatttccctttttaaaaagtgctaaaaatcttatgtcattcgaaaatataatattttattttatttctcttccacattatttttgacactcttaattttaaaaacactctaatagtataacacccttcaagaatgctataattataatttcacatattattatttaatatattaaatattttaattataaatattgtcacactacttatttatatttaatttttttattattttcttaaaaaaaatagcatcaatgctatgtagtgacatcaacacaattttctataatagcatctatttatctccaatagtatagtatttttgtatttggccaaataagcaatccacataaacaagtatcctctaaaatttaaccattggagatgctcttatataaaaaactcccatagcacatttaaggacagcaatacacttgtgaaaattaaatattttaaactaatattagaatcattaagtataaccggctacatatgtaaaaatctaatttcttaacttagagtaggcccatattatgacatattttcagaaaaaaaaatactgtaatatgtactaatttgtagaagtttaacattatatat

SEQ ID NO: 141493 - DNA, 784 bp, Cannabis sativa
cattttcattattctcatttttggtaaaatagggaaaatcaaaggaaacaccaaaaagataaaactctttctctctttctctctttcggctggggcaaaatcagaggagaatcacctcacttcaaccctttttttggaatttcagtaggcattcaaaggttcttgaacccaaggtaagccctagtagcacccttctttaatttctaagtttttacttggtttgattgtgtgattttgctagtaaggggctgttaggtttatgtatgcttagggttcgaattctatgcttagtttgagttaagattagttcctagcagctggttttgatgtttggatttagctttgtgcaagtttaagctttgagttcaaagctttgatcattaatggcaagttgagtttctttgggtttttctgtgaaatattggttgaaaaatattgtctatgcattgtttaggtgctctggaaagtttggatgtacttggatgagttttgagcaagttggggcttctttggggaaacctggtgcaaactggctagccggtttgccaggcctgtaaaacccgctagccagttttggcaggattctcgaacaaaccattttctcaattttcgtccattttagtgttgtggttgggtgtttccctaattccagagtttgagtaacctctagggggcataacagaacatagggttaaggttttggatttctcgggattagggttttgatcatgtaacttacccgatttcaaaatgtgattagggcatccatctagcacgagacttt

SEQ ID NO: 141494 - DNA, 1589 bp, Cannabis sativa
  modified_base (1192)..(1193): a, c, t, g, unknown or other
tcataatgtctacttaaaaaagggggactcctggaaccacaaggcctctatccatagcagctggtattggaggaagcttgtggaaatgaaagatgaagtgtggaaattatggattctttacaatcttccactctatgattgggtgcttgacttgatatgagtcggcatttactcttcactatggttcgaattgaatgaagaagaagaaggaatggattttgaaattctataaaaggaggctctcaacttctagttgtttgacaaagaataaaatttaggttatgagagattgatgagaatgggagtcatcttattccttttatagtatttcaactagagtttatgatttaaattatatggaataaaaaggataaagtaatggctgaaaatagcttaagtggccggccatacataatggacctcactagttacaattttgctattttattcaacaatttatatttctttcactaatgccatattttccaatttcaatcctgtaaatgtcaaaattatttatttaataattataaataattatcaaataaaattgtgaagatttttagagacagaagtctaatatatgcaactagtttggtgccttatctcgagggcctgccaacatgcatggaggcatgatgccttgaggattgaaccatggacgtatgggagtccttgggcaatgagggagactgttcggacaatatcgaatgaggcatgaggagaagcattagcacgtcaacttggtgttggcatcttgccagacaagctaccttggtcacaagtgactaggtgagcgacagtgttagaatttgccttatcatagtgagaacctatgggcagtgcgactatcttggctagagagcctcgatgcatggatgcactcatggatacttgcgagcatgactcgacgagagttattcgagagatgaaagtgtgcacgaggcacacggtcgcgcaaaaaatgagcccattgttactcgaatggttggaaggctaacattggcttaaagaagtcaaggtgccgcacgggtattccgctgcctgaaaaggtgagcccgtggcacaaagcatttgaatgctattgagagggtcatgagatacctcaaaagaacattgacccttggattgcattattagatgtttttggctgtccttgaagggtatagtgatgttgattggaacactttannagatgactccaaggcaaccagtggctatatttttagcataactcgtggagctatttcatggaagtctaagaaacagactattttagctcaatctataatggagtctgaaatgattgtactagctactgctaatgaagaagcaggctggctaatagaagcctgctagctgagattcatgtatgggaaagacctattccaatagtgttgatccattgcaataatactgcggctaatgcaaaagtttagaattgttattacaactgtaagacacgacaaatacatcataagcatatcagtgttagagagtttctctcaacaggagctgtaagagtggatcatgtacgcactgatgataacttggctgatcctttgacgaaaggtttagctagagagaaa

SEQ ID NO: 141495 - DNA, 539 bp, Cannabis sativa
cgacccgacttattcggatcagatttgatctgacccgacttattcggatcggatctgatccgaaccgactctttttttttttaagaattttaatattaatttataattttatatctattttaattttgtattagtattatttaatacaaataatatgtttgatattgacatgtattaatagattgtgtaaagataatatattttcaataaactctaccccaacaacaactacgggtcaggttcgggtccaattttgggtttgggtcctagtttgggttcgaatcagtgtcctaagttttggttcgggtctcgattcgggtccaagtttgggtctagatccgagtctgggtcccaatctcggtctcaggtcccgggtctggtcatggtcttgggtctcgagtccggttctgggtctcgatctgggttcgagaccaagtcaggtctaggtttaggtccaggtccgggtcctggtcctggtctcaggtcttaggtcccagtctcggtccgggtctcggtccgggtccctgtctctgatccag

SEQ ID NO: 141496 - DNA, 1400 bp, Cannabis sativa
tatggaaccagcaactgtggctgacttccacggctgtacagaaaagcaaacaacttagtttgctaaggattaaagctttccctcctagaaaagcaaaggatgaagacatagattggattatgagaacataaagtgtatataatcaaagttagtgacagaaaaatagcttgttgagatgtaaattgctgtgatgtaatgtttggtttgagcaataaaatctcttattcataaaaaaaaaaaaattcacaaatattagaaaatttataaaaaaaaattattaaagaaaaaaatttattttaagaaacttttttttgaaatgaacaaacttaaattttattatttatattaagttaattatattttttaattttttaaataatatgttaattaaattatttctttaatatatttatgtaattattaaattgatatgtttatttaaaaataaattgtgtatgtgtataatagtattgtatattaattttaatagataaattgtaaataaaaattcataaataaaaatcatgaaataataaataaataaataaataattttatgaataatatttcataaaattgcttaagattttaattatttcataatgtttttaaaatataattaacatacgtatacatgcaaataaattctaaaaccaaataaaattttaaacaaagttggtcaacacttgttttacagtattctaaagtgataaaattttcttaacttataaaaataaataattaattgaatttacaaataaaattttataaaatagcataagattttaattagtttactcacgttgttaaaactcataaaacttttaaactcttttagatgacgattgataagtcttggacttcttgaagaaaacgtggtaaagaatattgggagtgtctacaagcctttttggcgatggcttcagattataaaaattctgatagaaaaattagatgtccttgtgttagatgcttaaatacttgatttgagcctttgcacattgtggaaacgcatatatttgattggggttttgataatggttatcaaaagttaatttaccacggggagtcagaaatagaagttgttgcacgaacgaaagttgttgagcaaattttagatgatgaagatgatgagatgattcccattgttgaagatttcattcgaccaacaattgaaaatgttcaaaacaactccgactcttcaatattacgacgagttatttgaagagattgaagctgaattgtatcatggatgccattggatttcttcacttaactttctagcaaagttattgcatttgaaagttcgtggaaaaattcctatcagcgtatttgatgaattattgaaattgttgaatcttgctttttcgaaaggaaataaaattctatcaacgtactac

SEQ ID NO: 141497 - DNA, 831 bp, Cannabis sativa
gttaaattttcatgtggtagacttttgcttacgcatggaaaggctaaagtttcataaaaattaaagcgatgagttcactttaaaagagaaaatggtgaaacatcgctgggcgtgtgaaggactttaagcagtccttcccttccaaaaaagagggtttaagacatatcatgtccctattgatctttcacgcacgagaaaactacatccatgcgagagtcatgttgaatttttatgtggcaggctttggcttccgcgaggaaaggctaaagttgcataaaaattcaagcgatgacgtcactttaaaagacctaagggtgaaacatcattgacgtgtgtcagacttaaaacagtccttcactttggggaaggagggttgaagacgtatcgtaaatccaatgatctttcacgcttgaaaaaactacgtgcatgcaagggtcatgttgaatttttatgtggcagacttcgacttctgcaaggaaagaacaacgttgcataaaaatccaagcaatgacttcacgttaaaagacccaaggttaaaacatcattgggcgtgtgacagacttcaagcaaaccttctcttccgagaaggagggttgaagtcgtgtcatacccccagtgatctttcatgcacaaaaaagtgtcgtccatgcaagagttatgttgaatttttaaatggtagacttcgtcttccacgatgaaagcctaaagttgcataaaaactcaagcgatgacttcgctttaaaagaccaaatggcaaaacatcactgggcttgtgacagacttcaagtagtccttctcttctgggaaggagtttgaagacgtatcataccc

SEQ ID NO: 141498 - DNA, 678 bp, Cannabis sativa
ttttggtttggctcccaaaaaattgttacgtttcttggttttgatttgagatttaataatgcttaaagatttagcaattaattaactggaaaaataatattgaaccaaattatgtattgattttgacggattaatttacatatgtagtagataaatatgtttacatatacattatgtatgtatagatgtaaaagtgaaatatatataccggtacttgtattaataactgtaatgagtgtataaaatgtgctaattgaatattccaggtaaacaaaactagtaatactgctgagttgttcgagaaggtttcacagaatgtgaaagtgaagcgttacagtgagtttcagaagccttttcatcgggcatcaattcttcgacagctatgaattagcttgttggatctaattttgttttaagttttctttttgttccaatggtctattttaagttttctttttgttttatttaggcctaataaattttaatagtgtttgttgaatcacttgttgaattagtgagccatgtacatattaagattgagattttttttctaatatttgaatcattgtcccctaatgtatattttttgatgagtgattcagttaaaaaaaagtttatagtttattgttttgattaaattatttgaaattctatattttaatattcccagtttaatta

SEQ ID NO: 141499 - DNA, 513 bp, Cannabis sativa
ttttacaaatttacacatttaaaacttttaagtaatatatattatatatataatatatatatgatatttattattatatacaaatttacatatttaaaacattttaacaatacattatatatattactatatatacacactaaaaatctaaacttttataaatttacatatttataatttttttaacaatatattatatatacatataatataatatatacacggtttaaaaattatatatatatatgtttatacatataatatataatatattgtttaaaaattatacatttgcataaaacacatatatataatatcatacatacacatacacaaaattatatatttacacatacacaaaaaaattactaaacatttgcataaaaaaaactaaacacaaaattatatatttacacataaatttgcataaaaatttacaaatacacacatatatataaatgcaatataccaattactaaacattcaaatatagaaaaaataaatctaataaaa

SEQ ID NO: 141500 - DNA, 653 bp, Cannabis sativa
ggatgcctctggacggttgctcaaatgggcagtggagttaggccaatatgagattatcttccaaccccgaacaacaattatgggacaggctttagcagactttgtagtagaatgcacaggcaaggaagaaagcatatcagaaaataaccccgagccagtacaaatacctcagccaagtaacagtgaagacaagccagcttggaaactacatgtggacgggtcggctacagatcaattatccagcgtaggaattgcccttgtcacacctgtggggcaacacctggacgctgcagtctagtttgggtttaaagcatccaataatgaggcaaaatatgaagctttgatcgctggtctaaaaccatcccgggagatgaaggccgaacatattgaaatctgtagtgattcacaactggtggtaagccacgaatctggagaatacgaggcccagggaaaagatgatagcgtatctgagcaaaatacacgatctgctcgcacagttcaaaagttatgctctcaggcaaattctaagggaagaaaacacaactactgacgcattagctcgacttgcgtgtagtaatgtcagtgatagagaaaatttggttcctattcagtttcttgaagaacctaacatcactggcacggaagagatcgaa

SEQ ID NO: 141501 - DNA, 546 bp, Cannabis sativa
ttgttggtaacctactctagcaagtcactaaattgccacctcatcaatttttttagtacccattaatgggtattacccattaaaaaataatccatataaacatatgatttttggggttgagcaatggtcagtttagtaggttttaattaatataaaaatcaaaaattcaattttcgatttagattggtataattcgaaaaccgtccgaccaatccagaacctatcactgttttgaatcttggtttggacggtttaaaacgctcaaacagaactttttttctttaaaatataatccaatttattgtataagcacattattctatatcctacaactataaccatacgaattaattgttcaaaaactaattgttttatttttttaactttaatattaataaaataataatatattattatatattattggtaaatataatacatacagcaaaaaaaaacttaataaattaatattatgtattagggctgtacaaaaaaatttgtaaaccgcccaaaccgaacgaaaaaaccgataaaaattacaaaccg

SEQ ID NO: 141502 - DNA, 1179 bp, Cannabis sativa
  modified_base (39)..(49): a, c, t, g, unknown or other
  modified_base (275)..(277): a, c, t, g, unknown or other
ccggcccactcctattcccattcccattccccagcccannnnnnnnnnnattcctattcccattcccattgccatttccattcccttttgcattcgcattcctattctcattcccattcccattcccattcacattcccattcctatttccaatccctagcccattccaatttctattcccattcccattcccattcccattcttattgctattcacattcccattcccattcccattccctaacccattcctattcccattcccattccaattnnnatccccattcccaatcccattcccattcccattctcattcccattccctggcccattccgattcccattccctttgcattcccattcccattccccgacccactcctattcccattcccattccccagcccattcccattcctattcccatttgcattcgcatccatattcccattcccattcccattcccattcaaatttccattcccattcccattccctagcccattcccatttatattcccatttccattcctcgacccattcccattcccattccccgacccattcccatttccattctcattcccaatcccattccctggcccattcccattcccaatccccattcccattccaatttccattcctattcccgtttccatttcccagcacattcccatatcgattcccaaaccccaaaaccccaaacgctaatactacaaaaccccaaaccccaaaccctaaaacccaaatcccaaaccccaaaccccaaaaccctaaaccgtaaaatctcaaaatcccaaacatcaaaccctaaaccccaaaccctaatccaaaaaacaacaaacctaaaaaccccaaacacgaaaacaccataccccaaatcccaaaccccaaacccaaaccccataccctaaaaccaaaacaccaaaccccagacttaaaacctcataccccaaatactagatccacgatcctaaactctagaccctagtcataaaaccccaaaccctaaacctcaaacccaaaaaacccaaaagccaaagactctaaacaccaaaccccaaacccaagaaccgtaaatcccaaacctaaaaacccaaaaccccaaactcaaaaccctaaacccaaaccccaaacacctaatttaaaacaacttaaccccaaacccccaaacc

SEQ ID NO: 141503 - DNA, 1190 bp, Cannabis sativa
atggttgaatacctcttgtttttgttgtgaatccttgactatttttcataactgactttattcaagtacggtcgtttgcgtttgtccaatccatctggttcagccatgtgggattcgaattgcttttctgtataggcttttactgctccaaagaaatgcaggctgtacttggtagcatgttgtttgaaggttattttgaggttgctcaacaagtgatacccgcagtatctgtgtgtaatttttgaacatatttctcttgctgctttgatgaggctctcattcttgtctgaaattagacactaattttctcggaatccatacgtttcttttaattttttgaaaaaccatttccaagattggtcattctcagaatcggcgaaacaaaacgctaggaaaaatatgacctgctacatcttctgtgcatgcacacaacaatgttcctccataagctgctttgaggaatgtaccatcaaccactacaatcgatctacatgcttcccacccttttatcgatgcatccaaagccataaaaaataaagagcaagttgttgtcttcagctgttttcatatcaacaatcgatcctgggtttgtttttccaccatgtgcaagaaactcgatagtaggctgtatgagtcactagcgtttcctcttaagtcatttactacatgctccttacttctccaagctttcatatatttcatcttgatgcgaaacatgtatttcaactctccttttatatccaacggtgttgcttttgtctttatgttcagaaacttcggtttgatgcattctccaatcaattttgacatcgcttgactttggtcttcatacctaatatttgttgggcagatgtgtatttttgagaacctcctgattatgaatgtatttgtcggccaatttttggatgctcgtagagacaaattatagctttcgtaaacacatttcagactgtattcttgagagcacgacttccacactttgtattggaagttgtttttgattgcgtagtagctgagggcattcttcagtgtttacttgtccttgtatgcctgacctttttcaacttctggttggtgtttttttgttatttgcttcacgttgttgatgtcgatttctggatgtagttttttactattgtttttaagtttttctaccatttcttcaccaaccagattcgcatagtcaacta

SEQ ID NO: 141504 - DNA, 615 bp, Cannabis sativa
gtatgaaacttataaaaaaacacactaaaaaagtaaaaaataatgcctgacagtatttttgtaaaaaattagcaaaagttagtataccatgtaaatttcatttttttcttttactcaatcttacatactaaaaaaaaagggtcttttactctcattgtaggaaaactacggccttctgatattagttagtaatttatttataatttttattaaaaattataccaataataatattacactttacaatagtattaaacactgtatgtgcctttaacatttctcattaaaaaaaattgtttggcaatcccttcaaaataaatctacccgtccactattaatttttggcacatgtacgattatatatatttttaatgaaaaaaaatcgaatgagatactatcacaacaagcaagtcttccaaaaaaactaagcataatctcccttaagatagtctatgctaggattcgaacccttatcaatactctgcacaacacatggttggcacatgtaccattattatatcaattttttttcatcaaatagttgttttttaaacataatctttaaggaaattaccctatatactatttttttaactttttttttaaaaaaattta

SEQ ID NO: 141505 - DNA, 575 bp, Cannabis sativa
  modified_base (58)..(61): a, c, t, g, unknown or other
  modified_base (138)..(144): a, c, t, g, unknown or other
taatcttggttcagattacggatgtagtatgacatcaaagtgaaggtattgtatatannnnagattatatatgacaaggaccgatatgaataaagtaatttttatctaacattttgtttactataaagacctaattcnnnnnnnaatgatgatcaatagtagatcggcataaattctgagtaatcatgaactcctgctcatcatattagtttcattgattcactcattaaagtttctcagagaagatgattcttataatttctattttgggaatctaagaatgtggatgattgagaacatgatctacaattatgaaattctaactttcctaacggatcgactcttggttccctttaagtgttaattctaaaactggaatgttgcgcacaaatttagaggggatctaaattataattctactattgagttattggtactaggataaaaattaattagaagggtaaaatagtaatttagccaaaactaattacaaactaacatatggagggctaatcactgaaattgattatatcaatggacactgtagtaaaactcagtaaatataattctacaat

SEQ ID NO: 141506 - DNA, 834 bp, Cannabis sativa
  modified_base (692)..(692): a, c, t, g, unknown or other
cttatgtaattatccctattttttatatataaatatatgggtgactacttaatggttacatttttattgtaaccatcatggttacatttttcttttacctattatagcatgtaaccaataggttaaacttctttttttagaatcaattaattataactaattattttcttaaaataattaattaaatatttaacaagacattttttagcaattaataattataatgaactttttttttttatataaatccctactataattattttaatagttaagacatttagttataatatttacaatgaagttttattttatttttttttcttacaaaaattagacttctttttatacaaattagaattctctccttgtatttttaaatgatattaaattatttttatataactagaagaactaagtatgagtttttttctattcgagtttgaggttgtttcgttttctgggagagcttgacttttttttttgactctggtttaattttttgagtaaatgactccttatcaaaaaaaaaaatgaaggagtttagctattttatttgaaaaatacattcaacatatttcactttttaatttttaatattttaataaaaaaaaactaaataattaagtgtaataattttaaattaaagttataagtataattaaattttaattatgaaattatatgtgtanaattttaaattataaagaattttgttataaaaatgttagtaatttaagggtaaaaaaaattgttaaaagacccttatttaataataaaattcaaaaaattaattaataattagaattaatttaattttaaaatataattaat

SEQ ID NO: 141507 - DNA, 732 bp, Cannabis sativa
tacatcacaaaaataaatatgaacatgtacaagaacatgaaaaacataacaagaacattcaagggagaaggtttagaaaacttacctcttaaaaggctccctctaacacttcaagccccacttcaccaagagcttcaacaaatgtgagcaacagtggaaatgagtctctatattaataggcaaaaggagacactagattggtgacaaatgttctcatctgatctaaaaaaaaattacataaaaaataaataataataagtagtacttgtaagagtaccatgagctcatacctctacaacttacctatcttctttttatgtgatgagatgtattaatcaagacatatatatacatatatatgctcctacgacacacaaacgtgcatgccatacgcccaggagagttgtagccatcacctttatatatatacatattacttgcatattggtccacatcaaccctttttatgtgatgtgatgtattgaccaagacatatatatatatatataaaagctcctatgacacaaagtcatacgccaacccattctctacgctagccctcccttctatcgatatatacaacctattacagttggctttaatgccaagcacacatcagtaagttaaaaaatatatatattacactacttgtcatatacgcatatgtctatctcctcacaacacttaatgtatgtctgtctacctccttctattatttatatacatgtctat

SEQ ID NO: 141508 - DNA, 836 bp, Cannabis sativa
cttcggagccgacacaaccatcagggccggcacatcaatcatcgccaacacatccatcagaccaggcagagccattacagacgatacatccatcacccccaagagatgatgatgatgatgatgtctacctagaagattggcaacccaacatagatgaggttccttctactcctcaaacgccattatgatttcccagggtgatacagaatctcaggatgtggaagagttgaacgggccaccagctaagggtggacttctgtagggttaggcgaaagcggaagccagttttcttgaaggactacacaccagggaagaagaaacaacgagttgggcccgtagaagtagacacaataaaaccggcggactcccggctgttaaaatttttccaaaagtggatcacttatgctagggacaacggccgtcctacggatgttcacactggcgtagccactcgatcctggttcgtaaaattgatggtgtagggagaatggctcaacgatgctgtaagttatttcttaacagaattaatttattgtgtttttaaatgtttgtgcgacttatatgcaatttatatgcgatatttgtctaactactttctgttaaatctttatatgcgacatttatgcgatgtttgtgtgatgtttgtgcgattattcactaatttatgtattatttttgcgaatcatgtgcgattaatatgcaatttttgtgcgattaatgaaacaatttttgtatttttcttgtgcgatttcctgcgatatttgtgcgacatttatgcgatacctatcttactgttttcttttgaaacacagcaaattgatgccatggcgcactta

SEQ ID NO: 141509 - DNA, 565 bp, Cannabis sativa
agcaacgattgctgcttttgtgggcttactcgtgagagtcctatccacctttttgctagatgttccttcgcctcagccctgtggttcgggtgccctttccctgttcgaatagatagcattcaagataacaatattgctggtttgctggttaatttgtgtaatggagttgaagaggaattaaggtgcaaaatgctcagttgtttcgcaatcttgtttgatacaatatggaacacgaggaacagaattgctcacgagagaaacttcatctggagtgtcgatcaagcccgaagagatatttataagcgcttctctgaattctctactggtgtagtgtcttcctcttcggatcctggtgaagtttctacccctgctgtgtgtattcccatcagaaccaacatggtgattgtcgtggatggatccttctccaatggtagttacggatgtgcagctcttgccctttgcaacgactctgtcgactggttttttcgttcttctttcggtgtgtgcgccaatgctctggctgctgaattggaggctattcgactcggcttctgctgggcaaagg

SEQ ID NO: 141510 - DNA, 709 bp, Cannabis sativa
gatagacacgacagttaatctctctctcccccgacacttaatataagcattgtcctcaaggctcaatcaaataaaatcaatgtaaaataaaaagaaaaaggtaagaaaaactctcataagttttctttatttagcatcgttagctcgactgtatgttgtgctcatgtggtcttcacgtcgggttttctaacaaaactcattccttatgtatttatcaatggaatctaacacattatacttaattactgcaccattaaattccattgtaggtatccatgctttcatatccaacttcttagtagtgagtaagaagggtctcccaaatagaattgatgtaggattgagatcacccttatcttccatctcaattatgtaagaatcacttggagtgatatgtccattagccttcacaaaaatatcttcaactatccctaaaggataagcattagtatgattagtcaattgaattaaaacttatgtttctcttaatggaccaagttttaaagaagtaaaattagaataaaagatcatattaataatttctcttaaatctatcacaatgttcaaacctgattttaccaattatgcattgaattgtacttgttttaggtaataactttctttggagaacaacagcaaccttctcccccacacttactttctcaccaacatttaactttttcttatttggatacaactccttaagaat

SEQ ID NO: 141511 - DNA, 604 bp, Cannabis sativa
cactaaaatcgatcgtgttaaggcggttttaaccgaaggcggttttttcggttttcaattttttcggtgttcagacggtcggtgtactcagtttggtcggtttcttggatattttgctcacccttattaagagatgttctttgaccataaagcctcgcagactggacaatcgtgtcctgcatattttcaagttgttacacttagttattgtaatgtggaaaatacggtaagtgtttaacaactgattcgactcgtcaatatttcttatgaatagcgaggtgaatgtctcgctatatattttcggacgttgctttgagtaattttacttattctttttaaaataaacgaatcttgtccttggatatgtgtattgtgaggtaggttagtgtctcgttaatataggtattaatatttttgtatccttgtcttgtttaagactatacagtcagggagttatgaatatactttattaattctttatttaatgggttatttctctttccattaaatgatacaactttatgataccaagtggttcatattccactaactaacacgtgtcatcctctgaagtgtagtgaaatttcgggtataacaattgccc

SEQ ID NO: 141512 - DNA, 767 bp, Cannabis sativa
gatccttttatttatatcacaaaatacttatttaaacgtaatgggttaactcctatattaataagaaaatatcagtaacaaaatgaagaccactcatcaatatagaataacaataatatccccacagttatgtaatcaccgaatagatagatttaatatgtcaataaaataccaaaataatacctagcatccatcattcttcatttctaactagtacatagctaacttaagtcatccagaccatccatttcagcttaaatacaaaatcagtttcattagaagattaaagagtagaataagactaaactaataacaactttctttctcaacggtaccatcctcatccaccagtgtcaaactgagtttctagagtgggagaaaataggggtgagtttataaatcccactaggaaagcaactaacatcaaaggacctcttggtttaataaaattactgaatgtttagctttgtaaaaataaaatatctcaacaccagtatcaaaatatataaatagcatagagagaccacaaagaatcataaaatcaagtgtcaaatgcatatcaaatcgtctgctagacccgtagctctcaacaccaatcatagaaaacgacatccaaaactgagtagttgcacctgatatccaccacgatattgggacttagatttaattcacttcctgtatagattctaggtctttcacctacaggtgagtgcacacctaatctacctatgatgacatagagattaggtcgtgaaacaacaatatgc

SEQ ID NO: 141513 - DNA, 755 bp, Cannabis sativa
cactactaaaaaaatattcgtcggttttacactgtcggccaaagaattcccgacagtctataaaaccgtcgcctatacgagcgtcgcggatagtgagtagaattgacgatagttgaaaactgtcgggaaaatagtatgggttacaattaaaaaccgtgacctatagtgttcattataggcgacagtttaaaaccgtaccctatagtgatgacagtttaaaaccgtggcctataatgttcgctataggcaacagtttaaaaccgtggcctatactataggccacagtttaaaactgtcgcctatagtgttttaggcacagttttaaacagtggcctatagtaaacttttcagtctaaatataattttcgtatttatcagcgacggtttttgccggtcattagattgcaaaaaaaaggaaaaaatagttaggataaagtatatatattgtcactagtgaaactaaaacaaaaactagattatgccgcaaattactctagtaaatatccagttaactgtcacttgtgcttaatgtgaattgtttgttgaactaactcagagatgcagtagttgacatgtaatttagtaccttcattatctgaaaagaatttaggtggtttttataatctgtcatcacataggaggaagaagaatagttaattaatattaacaattaggtaatcaaagcaattgaaatcagttcccttcacatctatttattgaacccttttattgcttattttatttttctgcattct

SEQ ID NO: 141514 - DNA, 673 bp, Cannabis sativa
tctttatgttcattagtatatcatgaaagaaagaaaaagaaaaaaaaaatgtggaatattaaattaagtttttagtatactgatagtgatgtgtcatagtgatgtctcttattatttgtattatttatagaattctttatatatagccaatagaatatatcatcaaattggatatgggtattgatcatttaactcgtgtaagaaaaataaaaagcactagagttttaaacgaaaatgttgatatatactccttccctattaaggtggagaaagaatttatctcttttatttaatgtaatatattatttattgataatttagtttgatttatggaatttgttcaaaataaatactatttttctataattttatagatctaacaaaatcttgcttccttttatttgtatgggtgttttactagtcttccagcattctaaggttatagatattttagggaaacttacaaaaatactgtattttgacctaattcttacaaaaatactgccacacggtaaaaataacttttatactgttttgggatattttttttttcttttacactgtaaacaccgaaaataaaaaacgagggtccatcttctacacccacacacagaaagcttaagttgtctactgttcttcttcttcctctgtattgttctttttgaagatattc

SEQ ID NO: 141515 - DNA, 684 bp, Cannabis sativa
gcacccggggatttggaatctcctcttttgcgggacattaggtaagacagtagttagctcgtagagttatgtactgtggcacttatactagaaatggtatatgtgagtatttagtaactcgggattagggttactaccctaaagtgaatggttatttggtctagggttattaccctagtagtcaaaagatgttgaatgtttggccatgttaaatatgttggaataaagagttatgcgtctaaggcataattaagttagactcgataaactagtaccttgagtttaattttaatgcggtctagggtcattaccctagaatgttatgaaggtacgaaagcgttaatgtatggtaatattattaatccagttaaaacatgagttagggttaatactcttagtaaattttatttgagtatatagtaatgtattatatgagtaattacttagtatgcaagttagggttattaccctaagattttatatgttatggtaaatattgaatacacgcatgtatgttaagagttatgtgtataagacataactgggttagacctagtatatatcaccaggataaaccaccaaaagaatgtaatgtatggattacgtatatataaatgaacaagattatgcgagcaaggcataatcaggttaggctcggtaaccaaaactgaggtaaaccctact

SEQ ID NO: 141516 - DNA, 1777 bp, Cannabis sativa
  modified_base (376)..(376): a, c, t, g, unknown or other
acaggtgctttatggtgcaagtaaggggaaagcaaaggttgagcaaccatgagttcgaggtcgtagcagcaatgtacatatcagccgcagtgactcggcctagtgaataggatactccgttttgatagtattttggagttgcaaagtttatgttgtaaaagtactaataaactagtttgtaatattttgaaaacaggggatccccgtagttctcattacttatcttttactataaaggagtttttatatgcttgattttaattatcaaaaatttaattacccacacttttggtacaattatatagtacttaaataagaattttataaaaacacacacatgcggcgtccctattggacagggcgttacaacatggtntcagagcgccaaggtttttagatcctgaagactgatttgatatgtacattggctgcgaggactcgttcgactcatggtttagtaagcttttagtaaatggtaatttgttaattatctgaatgcctgattatatgaattgtgctaatattggtaatgtgtgggaaggactatgatatatggaaatacttatcagtattgttattacctggaatgtgactgcaggtgtatagattatgcacctgaggcagactggtaggggtaaccgcgagctagctgggctcagggttgctggtgagggcgagaaccctctagcaccaccaaactgggaagaattatatgccgctatgtaagagactatccagcaacagggtgaacaaattagagaattgagggagcaacgagctcagcttgctctaaaccctaatcctgatcctccggcacctctgatagtgccaccggatacaaggaatcatttggaaccgttgtatgagtggttcaggaagcagaacccgccggtgtttgagggtggtactgatccactcaaggcagagcaatggatgagtatgataacatgcatttttgattttatgcgggtcgaggataatgatcgggtcaggtgtgctatctttatgctgcgagatgatgcccgtatttggtgggagattgtgtctcacggtcatgacctgaataacatgacctgggatgccttccgaaccttgttttatgagaagtattatacaattgactcagggcaacatgacaatgacagagtatgccactaagtttgatcgactgggagagttttcttcagatgaggtggctgctgaagctgctgaagctgctagaaaagtaaattttattcgagggttggatgaacatatcacacgggatgtgattgttgcttctaaacaacctgcgtttgctcagacttatggccagatagtttaactggccctagtttcttagggtgcagaagatcagatacgaaagaaaagtatttcgagaagatattcgtggaagaaaatgtcaggtgttggttctggtaggggtactgatcccggtgaccgcaagaaaaggcctagtgaatcattagatgcaggcccaaacaaaaggttccagggtaaccaaggcttccgtcgtggtggaaatgaaaactggcagacttttcctgaatgcccgagatgtaaaaggcgccaccagggcgagtgtcaggctaaggcctgtttccactatggggtagtgggtcacatgaagaggaattgcccacagctactacaaccagagctaaagaaggatgatacacctgctcctgcccaggtgtttgccttgactcaggctgaggctgatgctggtccttccactgtgacaggtcagctttctgttgctggtactttattgact

SEQ ID NO: 141517 - DNA, 638 bp, Cannabis sativa
aaacaccaagcatgcaaacatttacttccttaaactacaagaaactaaaaaggaggtgcaagagctataccttggcttggatttactacacaagtagctgagaaagattaaatttctgtagaaagatccaaccctaacagcccaagaaaaccgaaagagagagagagagcttgaaagagagagaattttccaaacttttctaattttcctattttttgaataaatgaaataaaaattggttttactacattactttcagccaaagcaatataaaaaaaatgattaaacttatttaattaaatccacaaaaggacaaaaatttatggggaaaaatgaccattttgcccctcccacactatgaatcatgaaatggctctaaagggtattttgggaaattataaattcctgactgatcccgacattctcaatgtctaacaataccgtcccgctatactaaaatactaagacgtgattctactgagccatacaccgcgttctaatgttgccgggcactgatcaagaaaaaatatgagatttcactatatgccatataatatgcattctgaattcaaataaatcatcataaataaataatttaatattaataaataattttcataattaaacactaattatct

SEQ ID NO: 141518 - DNA, 521 bp, Cannabis sativa
ctctttagtatttttttattctttatactatacatatacttgtgttagtttaatttattgacttggatacacatctttaaggctttattagtagatgattttttattttttgtcttaattactattggttttatattacctttatgaattaagagagacaattttaacttttgtgatatgcacctttttatttttatttattatgatttttaatgagtgtgcaacgtgataagagcaaaaaactataaaaggaggctcttgcccttattctagggtcaatgacctttaatatgtaagtttctaatgaattttttttttgaacaactctaataaactatttggataatcacttttatgattttaaaaatagttgagttgggcagactaaaatataaagggtcagagtagaattttaattttttgttatttttagccaagatatagggttaaaatatagttgttgaccgaggttttcggcaactattaaaatatgtttataataatgagctgtaagaaagcga

SEQ ID NO: 141519 - DNA, 764 bp, Cannabis sativa
tatatataaaagagaagaatgaggtggtgacgtggcggtctaaaatctctccaaagctatttttcttttttctccttaattctctcatttttagtattttattataacataattgtatattaatattaaattaaataattattaaattatttatatatacgtatttataattatatatattatatatgtgaagtgtgaagattttttttttactttgcagaatataggaagagtgcttttttgttttatagaaggaatatattatgaatcaaacattatgaattgaacaaaaaaaagcaggtgtgagattatgtagaagaaacaggtgtgagattataattcaaactttttcataatgtattatttttatatcccgattatataaagttgatgccatcattatagttcatattgatatcctcaaatttttaaacttaacactcaatttaacattctcttagttgatcaataaagtgccacatgtaaatatagtattggccaaactaataacccttatagaaaaaaaaatttaaaaaataaaaatgaattaaaacaaattcatattattcaaaaaagaaaaaaaaatattacatacacaataaacgaaataaaaatcaattatttactatttttcatctttttccagctatattatttatacagattaacaatagacttgttttttaggagattaacaataaactttgtgttgacctcgcttttagccaacgacaacgagtctgatttagtaagcgataagtgat

SEQ ID NO: 141520 - DNA, 518 bp, Cannabis sativa
  modified_base (300)..(307): a, c, t, g, unknown or other
atattatctcaaaaaaaaaaattatatcccacacgaattcaactttaaaatttttatttctaaactatacacacaatatatacacacattatatacacacatattcaataaaatatacaaatacgtatatatactatatattgaggtttaaatttttacctaacaaccgcaatccgacgagcaattccattaaaaattcggccactatacacatacaacacaacaatattactaataaaattaaaaaacccaaaaaataatttacaaaaactaaaaataaaataatgtacattataaaannnnnnnnaaactatatttataccttaaaggaggttgagattcaatgttttctcaacaaaaaatggtagccggattttaaacccaaaattttctatttgggttccgatgacaatcaaagatggtaaaaaatgaacactttttaggtgtatgtgattaagtatcgaaaatggaagatttaaaaaaaaatgggctcaaatggttgagaaatgggggaaaaa

SEQ ID NO: 141521 - DNA, 542 bp, Cannabis sativa
aggattcttcatcgtcctataggtgcgaattgcaacttctaatgatggtttgcaatcgcataaccatcgtctcattgtcactttcgagctttcaacaatagtcgaaaagttttgcctaagttttttaagtttaggttatataatatatatatattttgaaaggatttttatttttgttttaaaagggtttaattaattttaggttattactttaggttctaggatgtatgatatgatattagttaattttgagtggtaggagtgatgtgacatttattttaatgacgtgtcacgctatccggtatattacaaggcaaaaaatgaagatgcacttacagaagttccataccattaacagaatatatttttacggccaaaaatacgacttcgatacttctcagctactcgaaataaaatttaagtatttttaccgtaatttattgttacatctaataatgataggaaaacttacaaaaatactggaattactgtcacacgaattttttttttcaaaaatactgtgtttttataaaatacctgta

SEQ ID NO: 141522 - DNA, 523 bp, Cannabis sativa
gtgaagcacaagctttaaccgattagcaataattttggaaagacatttatagaaagtgttgcaaagactaatcggtcgaaaatcacggacattcttggggtttttctttttagggatgaggacaatgatggtttgattgatggaagagatatccccctgatggttaaggatatgaagcatggctttagtgaaatcagtgccaagagtggaccagttgcgtttgtaaaagagcgagttaaggccatcgggccccggagctttgtccacagagaggctaaataacgcatttttaacttccacttctgtataaggcttggccagaaaatcaacctgatgagttgagagcctattggggatcccttgaagaagagcattgacagcgacttcacaaactccttgagaggtgaagagggagttgaaaaagtgaaagaattgggcagttatagtggcttgatcatgagatatagatccatcagcaagggtaatgaggcgaatgaagttgttccttttacgagtggaggca

SEQ ID NO: 141523 - DNA, 1007 bp, Cannabis sativa
atctcggggatgatgaagccagtgtcatgattcgagactttgctagggctgaattagagagtcagggtaggactagttttattgcttttctgctaagtgtatgatgttctcgtgaatgtcctaacacttattattttttattgcagcagccaggcccatggacgatctcttggcgactcttgctgaggcctacagttctaacgcttctccacctccggctgcttcccagttggttactcccgggaggtcttcctccaacgccccttcaggcacaatcgtcttggtggacgaggaggaggaagttgaagaaggtgaagtggaggattcagccgcccttgagcgcaagcgaaagggcaagatggtggaggtggagcaatctaagcggacccggagtggggacactcctgcgccaagcaacgactccgggattccttccgaggcggaggaatacactgtgcctcacgacatagagttgactgtggttcttgtggatgaggagaggcagaatctctgagtggccaaacacaattacgcccacgacgagtacagtcaggggcatgctgaggtggaggccttgaagaagattcttcgggaggagcagcagaatactctccaggaggaagccttccggaattcgtgggacttgaacatggatctgttgacggactggttcaactgctttgttgggcccaccttggctccttttgcctcggagatgaccaaccagtttgtctcccacttggcgcaattcccgcctaaaagatatgctgcttgcgcctctctgaactctatctaccaggtccaagacatcagctctgccatggccgcagtgagtacttcgtatcttactccatcccttaatattttatctaaggcatctggtctcacacttgtctcttttttcagattgctgctgataccggccgcctctccaagactttaattgaccatggcttcgtcatgtccgaattcgagggcatagatgaggccatgaggatccttcggga

SEQ ID NO: 141524 - DNA, 674 bp, Cannabis sativa
gggagatacagagttgagaatccatgatataacaaggctattgcacctgatccaagactcgtagtcttcatcttcttcattgggttctggtaatttaccattgatgaacttgattttgtttctcgccattaaagccaccatcatggatctatgccaagaactataattctctgcaccagtgagaatcttaggaacaagtgaagaagaagcattatcgctagtagacaagaaataagggcttcgtggatcattgataggcagcttactaccatcatccaaagctgaaaatcaattggaaccagcagcagctccattgttaacattgcttcgagtttgagttccacctcctcgagccatggaaagatgaaaacaagaaaggagaagaagaaggagaagagatgcggaagaagagccaaatgatcaaaatggctctaataccattttagttgcaaaagagaaacaattacagagaaacaaagtgaatgaaattcatctttcattattgcaaaacagaggaatgaacagagttatatatacaagctttagctgacttcagctctaactgcctaaccgaaatcctaaccaactaaatcaacaaaataacagaaagatgtaactaactcaacaccttataacaaatcattctaataattataataatactcaatgttaaa

SEQ ID NO: 141525 - DNA, 1003 bp, Cannabis sativa
  modified_base (344)..(345): a, c, t, g, unknown or other
taactattcatacaagaaaattaagaatacacaaagtgataaaatccttaaagtatatttaattttgcttaaggcatattataactgctatagcaaggcagaactgacaactgctcgaaaattaaacagtttggtagatcactaaatacttaaataggaagattacgagcaatggaaaaatccaaaagtactgtacattttatcaaaatgtagttgtttacattgtgagtaaaaacgcacccaaacacgattgtattaagttcaaatgaaaatagtacaaggcttttaagataagaaaaaacccaagttgggttacaaacttgtctttacaaaaatgccactannggaaaaccattaagtcatcttcctaaaacaaaggctgagaggggaagctattgaactccagaaagatcgtcttcatatagcctgagaaagactgtctacacgtagctcaaagaaagacagtctacacatagcttgagaaagaccggctacatgtagagagccttgatctctgcacagacctcattctcctcatcatcagaagatcccatttcctgaagtcgagatctctttcccagcctcaagaaattcctctataccagaaagaggttgatgcaaaggtcttttggcgcaggtttggatcttgggttggctggattctctgatagaaatcacgccaacttccttcccagattcatctacaaccatgccaaccttcctctggaattctttatcagcctgaggagaaccttttaaatcacccacaagatctatgatcacttgagaggatcgaccatggcaggctacggggttcccctagtttggattggtcggaagctccaaagccttggaatccattgttttcggcaccgattgaggtttgaagtccttgggaacaaatggaaatgggttggtgagtttgggtattatgagtttgggaggatgaacttctgaactcagaagggatatttgggcaggaaagaaatgatccattctgaaa

SEQ ID NO: 141526 - DNA, 932 bp, Cannabis sativa
cttattttttagaatgtgtcaatttgtcactttttgtcatactcttagaaattattttttattaatttatgtattttgttgactctcaattttcttaatattttaaacttaataatttattaaaactttttttaaggaataaattattaaaaacttgaatccaaatttttttataagagggtctttggtgtaatttttgagtgtgtcttttgagttgaataaatttataatcaattataatttgtaatcaatcaataaaagaattatttaattttgtgatttcttaaaattttattttaatgtcaaataaaagaaattatttttattttattttaaaaacatgtccatgtaaacagctcattacaggataattttttagtttaaaataatctttaaacgttattatttaatttttatattactttaatttatgctctaataatatcaataaaattgagatatgttatttttaattaaaatataatttaaatgtaagatattgtgtggtgagtaatataaaattaaaaaatataaaatatacacaaatttaataaaataaatagagtgtaatttacagttacaaaatcaatgtgaatatatgtatttacttatagacataaaaaattaaacaaattgaataaatagaatgaatgaattataataattcttctcttactatttcaaaattaatatataaaactcttgatttttccttgaaagaaaaataataaaaaaaatttaattaaaagccttcttatatattaaattgatgtttaattcaaggactttatgatcatatatatacttaaaaatttatcacatgcatggatacttttatgaagagccactatatactacggatcttattgatatagactatctctatattgagcaaaagtttcctaagtatcagttaaatacaatctaaaagt

SEQ ID NO: 141527 - DNA, 849 bp, Cannabis sativa
  modified_base (721)..(735): a, c, t, g, unknown or other
tttgaaaaaaaaaagttaagaaaaaaagtatatgggataatttccctttattttatatataagaatttatgtttaatatcaatctgttttttttttttttcctagatttgtgttaattatttttttttacacgtcatatatcaattaaacagttaaataaaatgagttttttacactatatactgacttttccaatttttttttttatttttactgtagcacagatattattacaattttatagccttatttaaataatacgtacattttaaaaaaaaactttttctttgcattttttgttgctatgggtctcccaatacatttatattgcatgaaaaaagtataaaaataattgagatgatgggttatgtcacgtctgtggtattttttttttgtaaaaataatgatgattaaaactgatctttgcctctcttactcattttgcattttatatgtgtggatatattagtttttttttttattcttattttccattctccttccatgttcatcttcttcttcatttttctttttttattttcttatattttgtgtttataaaattacacatgtttctagtttttatttttggctaattaggatttttcctcccgaactttgacatgtaccaaatcatactccctgaactttcttggccgttaaaaattcccactaaactattgaaattgttagatttaatgacttttgtctaatttcattnnnnnnnnnnnnnnnagtgattgtttatgtactaaatcgtgctccccagagttttatatctaccaagtcatgcccctcaaactttgatatgttagtaatcatgccccgtgaactttcatccatgttaga

SEQ ID NO: 141528 - DNA, 1013 bp, Cannabis sativa
ttgaagtttttggaaagcagaaatggtggaataatggtttctgttcaattttataccttgagattgatcaccgttagagtaaaagaacaaagattcaacgactagaaacaagaaagaattggaaaagatgggaaataaatgctaatgatgtgtctcgaaatcatgaactgccaaaatttaaaagcatgcaattttttaaattgggttaagacaaatatacccttacaatcatttaaaaagctctttttattaaaaaaaatattttttaaggggcaattgttgttgctctagtttattcccaatatatgtggcagccgttgtgtgtgacatgtggctgacatggacacgtcactcggagatgagttgaagacttatctaaaccaccttaagaaagagagtacaattcgaagtgctagctcctggacatgagcaaaagccctagctaaggtacggatgggcttctccgggctagtaaggttggagttgaacagtcactttgcatttaatatgacatggaggaaacgtttgggaatgcccataagaggacgtgtaagacgtcataaacccgacttagggcgatttacgataaatcaagggagctagtgatggctctattatgaagaatcacatcaatcaggaagggatgaaggctaatctcacctatcacctacgtggcttactacgcaggttgtgcatgccctattttgtactttttgggaacttgtgcaagcccatagttaccacttaaagacaagttactccttttcttcttcccaccaatcgctataaatatccttcgtaaaaattaagagggggagaaaaaaaagaaaacacagaaacattctctgtaagaaatactctctcataattaacagagactcatggactaaaactcattaatacctgaaccacgtaaaacatacctacattaattatccctaagctctcattattacattattcaattggttgccgaaaatctcggtcaacaattgttatacctgaaattcggc

SEQ ID NO: 141529 - DNA, 1535 bp, Cannabis sativa
atcgtatttaatattaagttgagaatgcatttttctgttttcaaatttaataaattagcagctaatatgccatcttcggtaacaagaattgctaatggttcaattatctctttatattgtttatcaattttgttgtcacttatgtaattatcaactaagttataatcattgatatcttttcccattgaatatagaataaatttgatgtgatttagaacattagttcttattgtaggttgggtatccgtatagtataatagtcttcagacattggttgttcaaatttccgccataactctttagggttagtaggtttacagtatactaagatggtagcaaacaaacaatgtaagctatagggcatattaaatgatgaggcttctaataaacattgttctaaatttgtgtcagcttctaataatccactaagtaaagtagcttctcgaaaagaggttacatctttacctttaactgtctttaaatagtcaaatgaggttggcccacgaacatgatttaataataaacataaaagaatacctctcaccttctattgggttaactgtgacaagcctacctaaagtttcaatgcgctttctaatagtccaaattttatattgctggttccaaacaaaatgttctggaaactctttataaagtaatgttttagctttttcatcaattttattcatttgaaaaaaattctatcagcatagattttgatgtattattatctcttatgacattatttaaataatttgtatgcttaaatgtaagagaatgtttattttcaagatgaacctgtaacacttgtacatgtggatgcatctcatttcatgtaaatgcatatattctccatgtagcttcaggaggagagacccatctaccaagttggtagaaatctattttattaatatcattttgatcattttctgaattaatgtgaacaacaatacgatcatgtcctttgtagacatatttgtatagatatttgatagctttgatagtcaaaaaaattctacattaagatgacagttatattttgcaagtagataagaattataagggataacccaacgattatctagattgctacctcaaattttaactgatacgttagtatcttttcttctataatttggataagaatcgtttccataagttgtttgggggcaaaatcattttggataacgatttcgacatttttttatttctcatcatgcatacatttgatggattaagttgaccacaaggaccatgcatcatgtttaatgacaatggagaaaaggtattgatttatatatttattaggtaattcagcacagacaaatctgtcaaaggatgctggtgctataattttttattgtggttttaagataattagaaaatgtgcatgtggtaaacttctttttgaaattctatgacataaatatattcagctacaagtccaaatatctatcgtttaaatagatcaatttttaattcttctaattttgctctaaagatccttgcaactaaatctggtctattttgtactt

SEQ ID NO: 141530 - DNA, 657 bp, Cannabis sativa
  modified_base (327)..(327): a, c, t, g, unknown or other
gttggcaaagtctatctaaaaagatcattaaacaaggatattactggccaacgatcaataaggacacacatgagtttatcaagaaatgtgataagtgttagatcgtaaacagaacttagaatgatgacctcgccctacccattttctatatgggggatcgatctaattggggcattacccactgggcgaggtggagctaagtatgcggtaatagcagtcgacttcttcactaaatggacggaggtcgagcccctcgtctccataacctgcaagaaagtccttgactttatcgtcaagaacattatctgtaggtttggaattcccatnaagatggtatccgataatggaacccaattcgatggagacttgttcacggaattctgcgagaggaatagaattatcaaaagcttctcgtcagtatccaggcctcaggaaaatggacaagtagaagccatcaataaaaccctaaaggatactatcaagaagaagttagacgctgccaaaggcagatgggttggcgagctacctcagttacttagggcccatagaactacctagaagacagccacaaaacacactcctttctcgctagcatgtggctcgaaagcaatgctacctattgaagtgaacatatcgactcacagaagagagttttat

SEQ ID NO: 141531 - DNA, 968 bp, Cannabis sativa
gagagagagagagagcccttggggcgtgtagcagagggagagaaagagagactaaggtttctgacttagaataatttggaggctaaggattaggcttactaacttaggttttttagattagagttaagacttttatataggaagcctaaaatcctaatttacaatgaaacccttagatatttacatattaaactaattaaacaaaaaagactaaactacccctaaaaagtagatattttccatcaatttattgggccattaagggcccaattcccaagtagcttgttgtccacattttaagctgtatatagaatccaactaggttaatcctcgccgcccatagacctgtaggggaggtttggtcagccatggtcctgctaggacctggtaggtcatgtgtctgtcaggatcatgcaggtcaccatagctctaccaagagaaggccagccttttgatactagaggataactttgtacactgtttccttgtagagctcaggttcctttggtcgaacggaagctcccttggtccggaagtcactttttggccggccaagttatgcccagatcctggccggcctatatgctcaccttggccgccctataagctttccttggccagccagacatattggtacaactccttgatggctcgcttcactcctttcagttactacttgacgattttgccataccttgtatggagggtctgtcttgctattagcaaggttgtattctacctgtactctgtctttggcttacttagccatgccatgttaggtgaacaaaaatttgagataacgtttatatatataaaaaaatataataatatttaaaatttattgttaattataattttagtttaattactggaatacttttaattattttgaaatattatacatttttcttttattttttcaaataattaatatagaaattgttataaatattaataattatgtggat

SEQ ID NO: 141532 - DNA, 629 bp, Cannabis sativa
  modified_base (595)..(602): a, c, t, g, unknown or other
gatcgcacaattacacaaaggcaaaggaggagtgcaatacgcagtggttgcggttgattacttcactaagtggacggaagccgaaccactgacaactattatatctaaaaagttcaagactttgttgtgaagaacataatttgccagttcggattgccgtagaaaatagtttcggacaatggcaaacagtttgacaacaagtccttccttgatttttgtgcaaaccatggtataatcaaaagtttctctgtagtggcgcatccccgagcaaatggtcaagttgaagcagtcaacaagaccctgaaggatacactaatgaaaaaactcaaggatgctaaaggaaactagccggaggagcttcctgaagttctatggtcgtaccaaagaacagagaaaacggcaactagatagactccatttgccatgttatatggatatgaagctatgctccccgtagagttcgagccaccatcccacagaagattgacatacaaccaagaagcaaatcacgtactccttgccggatcacttgatgaaatcgttgagaaacgaaccacaacaaacttaaagttgatagcccatcaacaaaaagtannnnnnnntttcaacaaacaagtgaaggctcaaaa

SEQ ID NO: 141533 - DNA, 1260 bp, Cannabis sativa
gtctgggtcccggtttcgggtccgggtatcgtgtacgggtccgggtaagggtccaggtcccgggacgtgagtcccgatctgggtccgggtcctggtccgagttcgggtcccggtccgggtttgggtccgagtctgggtccgggtccgagtccaggtaccaaaggatccgattcttgggtctgagtcttgaattaaggtttttttttttttaaaaaaaataattgaaatcaagtcggatcagatccgatccataaaaaaattaggcggggcgaagcgaattttgatctaagatccaataagtatctgaatgtttcggatcagagttgatttgtcggatcgaagctccaatccgctccaactaaatggatctttttgacatgactaatactagttgaagtctaacatgcttcgcaacgtgagctcgtagttcaaatatattttttaaaaaaattataacttgtcgattttatgtcttggtctttattttagtttttggtattttttagaagtaaataatagcttaataatagtaaattaagagtctggttgttaaaaatttatacagaggctaactatgttagatagcactcaaaatgttatattattattgatacaattaaatatcctattcaacgtgatttaatataaattatataataatttttttcgttagattgatttaatataacaattattatacaatatcgttaacaattcttaagatgtcaccttatagtggtgttagatattattagtgtctaatagtaatctttttcaaaattatcaaacaatgaatagaggttaaagatttatgttggcttcgactattattagctatgttttctttaagaagaatctttctaatgttgttctaaaataaaagacacgttattcttaagtattacaccttagtctattctatttgagagagtgtccattcaaatatatttgaagaagggcttgtactttttttatttttagactgtcatgcagatttttgagtaataataaaaatttttcattaaaaagaaatactgctataattatattaattatttccataaaatttttattttgattttaaagtttagttagagtatatctaggccagatttatttttatttctttcttttttttttttgttggctttcgttttttacctttttcttttttataactttggataaacaagaaaaatacctattaaaatatatatatatatatatatatacaaaactgcttgcttgcaataattataa

SEQ ID NO: 141534 - DNA, 547 bp, Cannabis sativa
cgaacctacaatataaagaaatataacgaaattacaaaattaattatttcattacttataactagttataaaaaatagtaacaagttacttaattagttactaaattatacatccatatatatataatcaattattatctcaaaaaaaaaaattatatcccacactaattcaattttaaaatttttattcctaaactaattaaatacctccaatgtcattctcaatattcacaataaatatatatattacaaagaatatatacaattacaaattttatttacataaaaaaattacacacactatatacacataatatatatacatattcaataaaaaatacaaatacatatatatactctataatgaggtttaaatttttagctaataaacacaatccaatgagcaattccgtaaaaactccgggcactatacacatacagcacaacaatattactaataaaataaaaaaaccaataaataatttacaaaaactaaaaataaaacaatgtacattataaaaatgaatagaaactatatttatacctt

SEQ ID NO: 141535 - DNA, 682 bp, Cannabis sativa
  modified_base (611)..(611): a, c, t, g, unknown or other
ggacacgggcatcagaattgggaccgagacccaagacctgaccctagacccagaccctaacctagaacatggatcgggacctgggacctggaaccaaaagtggaactaaactggggccagagattgtgatccagatcttgactcggggcttggaactaacccgtagtcagtgtttgggtttgggacccagacctagactcggaccaaaacccaaacctagacctagacccgtaccccaaacctaggtccaagtcttagtctgggtttgagttcgggatctagaaatagattaggaccttagacccagacccagagtgagacgtgaacccaaatcaaacacataaagaaaattgaaactgtgactaggacccaaacacgaacatggacccagaccgggacctatgacccagacctggatgggggacctggacctgggcctcgaaacccagacccagatcaaaacttgggacttggacctcaacttggaactagactcgaaccctgatcttgacccagaccgagatcgtaacctgaatctagactcggataaagacttgaaccctgatcgggtcttgaactcggaccgagacctaggtctcagacctagaccngggacacgagcatcagaactgggactgagacccaggatatgaacttggacccggaccttgacctaggaccc

SEQ ID NO: 141536 - DNA, 514 bp, Cannabis sativa
ctttgattatagattaagtacaaaattactactcttgttataatacatgagtaacaagttttatgattgttgttaatttttatattatgtaattagtttatagttactgcttacgatatatatagaatttaagttttaggatcgtttctattaataattttagtattatgaaattagttaatagaatcgattactaattttatataagttttataaacgttcttttaactttttttgtattatgtatttactattatataaaattattctaaaatttgataatacacgtgagaaaaattacatgaaaatttgcaatttcccctcacgtacatttatgttttattttataaccgacacaataggtaataaaaatatttcagcaatttatgtgccatttttgaactaaaatgctacaaataaatttgcatcatttctaaactgacgcagaaaataaaatagaagaatgcatattttgtgtcggtttttaaatgaagataattattttttgcgtcat

SEQ ID NO: 141537 - DNA, 991 bp, Cannabis sativa
  modified_base (26)..(42): a, c, t, g, unknown or other
aggatgttaataaaacatacttggtnnnnnnnnnnnnnnnnngtaaaatatttccaacaataccatcatcacaatcattcttctcttatttaaaaaaacatatgagcactaaaaattggagataaaattaccatcagaaactaaatagttatttaaacttatccatcaaaatcaagtaagagatattgaaaatcctagcaagatgatagcagacgaggaggagggaggaagagagagatcgacatcggtcgtggtgcgcatcaaggttaatggtggttcatgggagcgactcaaccagtccgcgagccaaaaagtaaaggggttgggaggagagagatcgaataccagtgtagatggtgacccgccattaacgtcaaagagggactaccaacaaagagaaagtgacatgtaaaactaagagagagtatgatggagcccaaatttgtccatagtaaccatctaacaaactaatatctgttgggattgatgccctaaataaaacccatttcaatataatttgatttattatcaacagaagattagaagtcatttatgtttacatgtagtttttcatgtttatggtttaaagtatacaatttctattaagtccacaacatatagttattaacaattacactgatgtcaacacagtggaaggtaattgtgattatatgcttcaaaagataatgtcctatgattcatcagtgcattggatttatactgatgtgatcgtcagcgataaagcttacttataccttgaataagtgttatgttcttttcagaatattggcaaagtatgctagtatcgaatgtacggagtataaatttgactgggaccggtattgatcctggtaaaaagtattataatcttactgttgtatgtttctaagttaatatcaatggttaatcttaaatcaaaagatcttaatcctgacatggttaggttctatctcaagagtattatttgtgttctttaagttgttagtcaaag

SEQ ID NO: 141538 - DNA, 1048 bp, Cannabis sativa
ggcccgaaatgcaaattggattgatttaattggcatttaatctgaaattatttgtgagttatttatgcatgaaatgacaaaattacccttggttgggtgagtatgtgtgtatttaagccctaggggcaaaatggtcattcgaccatatttgagttacatttgattaaagctgatttttgaggaaaatggataagttttctggatttttctccctctcacccgaactctctctctccctttaacctatttgattttcaacttgaattgttgaagaaaagcttggttttggcttgatttgaagcttgagtttggaggaaagatcattgttcttgttttggtgtgaattaaggtagctttctatgatcttaaccttgttttaattgctgaaatattgtggaaaaagcatgaattatgtgatgttctcttgatatgcatgtgtttggatttgagtgtttttatgatattatatctttgatcatgcttgaaggttgttgtgggtgattttaggttgtgatattattggaaattatgagttagaatgattccttagttaatctttacagctgtgaaattggtgtagagattattcttcaattctagctcttgtatatgtgttcatggaggaattttgctcaaagtgttcagcttgtgtttatctttcttaatttgagtttttgatatgtttaattggtgaatttaatgcttaagttgtgaatttttgcttcctaatattctgctagcaactctatatgtgaaattgaaagtttggttgagaatttggggtgaaaagtttggtttggaagctaaattttcgagtatgaacttgctggtttctgggttctgcacccagattccgcggcatgctcccgcccctcttggtggaacttgggtttcgtcccaggtgtcgcggcatggcttgggcatgccgcggcccgccctcgtgatttttgggcagttttgtatcgaactttaaaaattcataacttttgattccgaactccgatttgggagttttttatatcgttagaaagctcgttccgagctctat

SEQ ID NO: 141539 - DNA, 620 bp, Cannabis sativa
  modified_base (514)..(521): a, c, t, g, unknown or other
acgtattttgggcaaaatcaggggcaacaaatattatattaaattatgcggcaaattttttttaattgtattataaaattatattatagcttttgtgttaattttaaaatagtaacgaacaaacaatggttagtgtggtaagatttaacaattttactaattattttaaattttatatttttgtcataaatttataacttaaaaatacaaaaaattgatcgtacaaaaaatacttaattcgtgctctgcttttgactatttaaaaatttaaattaaatttatgaaaaataaaaataataactaaaaaatatttaaatagataaataaatttgtaaaaatagtgatattatattctttaaaattctaatcatgaaaaaaataacaaagattgaaaaattaaaaaaaaaaaattaaggaatattcaaattacataattgttaaagctatataattatttatatattaaataaaatttaaaaaattatacataaatgagtaaatactattttggacnnnnnnnnttgcaaaagttaccaattagaccctcagttcgtttttcctcaagtagatccaaggacaattttaattattcttggttttcttcttgattataaaattct

SEQ ID NO: 141540 - DNA, 1299 bp, Cannabis sativa
  modified_base (51)..(51): a, c, t, g, unknown or other
ttgtcaaaattgaggaaggtgtaatgaaaattgcacaaggcacagaaactntgttgagaggaaggttgagtaatggattgtatttcctagatggaaagacaatattcggtagtgcagcacccgttatggactcaaccaaatacagtcaagcaaggttatggcacctcagattggggcatgtaagtcagagaggacttgaggaaatgaacaggcaaggactgttcaaggagaagctaacagaaagacttaaattatgtgatgaatgtgttttgggaaaggcttgtagattgaagttcaacaaggcagaacacaccaccacagaaaggttagcttatgtccattctgacctttggggaccatctaggattccagccaaaggtggagcacactactttatgagtattattgatgattacaacagaaaattctaggtgtatttgttgaaaagcaaagatgaggctctaggaacctttgatacatggaagaggctactagaaaaccagattgagaacgaaattaaggtactaagaactgacaatggtcttgagtactgcttaaatgagttcaagggattgtgtgccacaatgggaatcaagagacatagaactgtgatcaaaacccctcatcaaaacggtgttgctgagaggatgaatagaactttgattgagagggttaggtgcatgttactaggagctggtttagacaaatgcttttggcgagaagctcttaaaactgcctgttacctaatcaacatatcaccatctgtgccaaacaacttcaagaccccacaagagttatggacaggtaaacccccaaacttagatcacttgaaagtgtttggatgtattgctcttgtgcatgttagacaagataagttacaacctaaagcattgagatacatgtttctagtctaccatgaaggggttaagggatatagagtgtggtgtttagaacttggattcaagaagtgcttgattagtagagatgtggttttttaggaagatgaaatggccatgaaaccaagaccacttgcaaagacagtaaacctggtttagatgagaatgtctagattgaggtggagcatgttgctcctacaacaacaactaatgttgttccaaatggaactgaggcaacagaaagggaagacaatgaagatcagtaggaactcatcagctatcaattacctagagatagaaagagaagacagagaaaagcccctgatcattttgttatgctgaattcattgcatatgcacttatgattgcataagaggttgacagttcaaaacccactagcttt

SEQ ID NO: 141541 - DNA, 1304 bp, Cannabis sativa
tgtgatcctcaaaatactataaatcgaggtcttgggttcactttgtaagagaacaagtttctaatagaaacactataggcttgataaatccagaaagtcatttcattctttcttttccctaagtgcttgtggtagggggagataagcttttggacaaaggtgtaagaccttgttcaagttttgtgattcccctattatacacttgtggtgtatatggtgttgagattgctctcacatctcttatatatatatgctatttatatatatatatgttgtgttttatgtgtagcttattactttgagttgtaattcttctcttctcttcatattctctatattttatgtgtatattttgtttggtgttgtaacattatttaatttatatttttgtcctttgtattatttgttatagagttgtaattttattggtttggtatttctattggagcacaataattttctaacagaaatcagtatttatgtatgcatgtctattttattttatacgtaaaataaattattttgaatttcaattgatgctataaaatattcataaattcttgaaaacagaattacctattagaactatcatatggaacgtatgaaaaaaaattataattcactctcaaaagtataaaaacttgagaaatgccttactttaattaggatgcaaacaaaaaaaaaaaatgaaataacagtgatctaattaatatacagattaatgtatggtaggaccagtacatgtgaagtacctctaaatggaagacagccttattgttggattatatatacgcgctaaaatggattggttaatttattccaaatcatacattactttaaaaaaaaaatattaattaagcaaggatgttccagctacatattatttatggttgggtacgatcatttaatagatgcataattttggtcaaatatttgaaaaaaaaaaatatataaatatatatagggatattcattggatttgcagatcaatatgattgttaaattagctatactcatctatacgtagacattatatttacctttatgacctgtttactaatgaagattagaagttgtagtgtaatcactcaatttcttttgtttactttattgtagaaatacttttaacacttgttttgttttgagaacttaatctttgaatattattcccttagtaacatggttgtaatactttactagtttaaatgtgctacaatatttgttaaattattgtactcatttttgccaatcaaatagtttattcactactacaaaaattactattcccatcggttctcaaattg

SEQ ID NO: 141542 - DNA, 689 bp, Cannabis sativa
tttagtgtcccgctctgataccaattaaaaaactatgttttttaaaaatgccaataattatactaaatttcagtaaaaatgcaactgtaacagtagattgtaatcttgtcactgtagaacacagatttgcagaatcaaaagagaaccataaataaatagtgtaaaatttaaaaacttgacacaagagaattgtacgtggtatcagtgttctttcaaacactactcgtctatggggcctcacccagagaacaaaatcaattagcaaagtatcaaatattacaaaagcaattgacttaaacaaatttagactccctctaatgatttgccgcaactctttgtaatctaccttgttaatatgatctctgaaccatgccaagtagtgaactcctttcagctattgatgtgtgcttacttccttccaaagtaagacttaaataaatcttctcccggagatatatgctcactttctcccacaatgagacttagaaaagtcttctcccgaagacccacactttttcaaagcttctcttcaacttactctatgaataatatgggatcataataagaaaatcgaaatctagttgaacactctatgctttacaaatgaaacactcttctcacaaataaagatttgaaaatatgagactagaagagatgaaatcgtttggctgctctctaggtcttattta

SEQ ID NO: 141543 - DNA, 732 bp, Cannabis sativa
  modified_base (580)..(584): a, c, t, g, unknown or other
actaatgattctgacttaaatatttatttttatgttgtacccttattcttaccaacttttgcttcccttctcgatatatccattggattatggttgtttaagaggcacctcgtactcactcatgatgaatgggcgaattcaaggtcaatattaagggtgagaaaggtcttaaaaaaagaacctctccctttactctttatcttgatgatggagtatttgactcaccttatccaacaagctcctggaagaggaaattaagctgagaaggcctagaggttgcgtgataactcttgaataaatagttatttgtcatttttttagcttaatttgtgtgtattttatttatatttagttcttttcttcccattttgtgaaaatatatgttattttgtatttttatgttcttttgggtaatttggagttgttagtgagaattattaagttattgtgctaaaattagatatacgcaagtgcatgtagccacaaacaagtaatataatgataagtaaaagagtatcgtctccatagggattgattagaaattaattatgcaaaaattaatactaaacaatttgggtannnnnaaacaagaagtgatgatgatttgagctaggctaaaaactaagcaaaaaagtataaaaaccgagaaaggaaaatgagcaaagtgatgagctagaataatcaaatccacttagaatgcaaattcaatgtaaatgtcatagaggaatgcat

SEQ ID NO: 141544 - DNA, 538 bp, Cannabis sativa
ctagcatccatcattcctcatttttaacttgtacatagctaatttaagtcatccagaccatccattttagcttaagtacaaaatcagtttcattagaaaattaaagagtagaataagactaaactaataatgacttcctttcccaacggtaccatcctcatccgcatcaaactgagttcctggaatgagagaaaaatagggggtgggcttataaagcccagtaggaaaacaactaatatcaaaggacccttggtttaataaaattcctgcatggttagctttgtaaaaataaaatatctcatcaccagtatcaaaatatataaaaaaaatagagagatcacaaagagtcacaaaatcaagcatcaaatgcataacaccgtctactaaacccctagctctcaataccaatcatagaaaacgacatctaaagctgggtagtcacctctgatatccaccataataccggggctcagatttaattcactccctgtacagattctaggtctttcacctacaggtgagtgcacacctgatctac

SEQ ID NO: 141545 - DNA, 666 bp, Cannabis sativa
gcaaattgacttgttgtcctgaagccttttgaaaaatatgtaacatttctatcatattgatagcactatcctcgaaggctttacaaaacacataacaatcatcagcaaagaacatgtgtgataacacagaagcccctctagcaactttgcaaccccaaatctttcccaaccgttcatagtctcttattaaagctgaaattccttctgcacaaagaagaaaaggatagggtgaaaggagatcaccttgtcttaaacctcttataggaattataggcccaatttcatgaccgccagatgtgattgtgtaggagacagaactaacacaccgcatcatcaatttgaccacatgctcatcaaatcccaatctcctcaacatagcctgtagaaaggcccactcaacccagtcataagctttgctcatgtccaacttaagtgccataaactcctccttccccacttgcttccttttaaagtaatgcataaccttaaaagagattaagatcttgtcagttatcggtcttcaaggtaaaaaggcgctttgtgtttcaaaaataatacttgggagaataacttttaaacgattggccaacactttagatacaattttatagaccacattacacaaagcaattggtcttaatcactcatgctttcgggtttagactt

SEQ ID NO: 141546 - DNA, 716 bp, Cannabis sativa
atagctctggatattgagtcctcatgccagactctaactcccaggtggcttcctccaccttcgtgttctttcaaagcactttgaccaaaactatggtcttgtttcgaaaaactttttctttcatatcgaggatttgaactggctattcctcataggacaagtttgactgcagttctagggcttcataaatcaagatatgagtcgggtctgaaacatatttcctcaacattgaaatatgaaatatattatgaacatctgataatgctagtggtaaggctagccaatacgctacctgctcgaccttctcgagtatctcaaatggcccaataaacctacggcttaattttcccctctttgcaaagcgcctaatgccattcattagagaaactcgcaggaaaacatgttttcctgtctgaaatgtaatgtctctgcacttcagatcaacataacttctctgcctgctttgcgaagcaagcatccgagccttgatcttttctataacttcattggtcctttaaactaactcaggaaccaaatacttcctttctccaattttgttccaatggattagggaacgacccttcctaccatacatcatctcataaggagccattcctattatactctggtagctgttgttgcaggaaaaattctatcaaaggcaagtacttaatctatgaaccttcaaagtccatgacacaggctcgcaataagtc

SEQ ID NO: 141547 - DNA, 507 bp, Cannabis sativa
tagggcataaaacccaatagttggagcctcatcttttcatgtgttgattttgaaaagaatgttgagggaggctccattgtccgtatgtatcttgctgcagttatattcctaatttgtgtggtaatgacccaggggtcaatgtgtggaaaactctcttcggcaggatctcctttttgagaaagagatcgtgggctctccaagctttggttgcttagagccttgttctttgcctgccaggatgttgcttttgtgctcatgacggagtgttcgagcatagcgctctctgtctttgttggtctcacttgccatatggggtccgtcaatgacgacccctatgtgtcctgccatcgaaggtttggacagagttggtggtacctacctatgcgcctggccaaagatggaggccaaccttcggagatggaggctagccttcgaatatggaggccagccttcggagatggaggccagccttcggagatggaggccaaccttcagagatggaggcca

SEQ ID NO: 141548 - DNA, 512 bp, Cannabis sativa
tcaacaaatcattagtaacaaataataatcaaatattagttaatcatcaaaacaatctaaaagtttgagttaacaacaagttggtccaaggccattagactaacctgcctaacatcccatctcagcgcttcaaaatttatatgaagcccactacgaatcgggccgagcttttgatccagctgaagaaggtggatgcctacaaaaagcaaaggttggtggaggaacaaagtgtagtccagtctcagaccgaccgattgtctgcgatgaagagggctgagattaccaaagatattcgtagcccagggtacactgctcccatcacagacctcgcagttgtaaggaagcagttatttccttgcctaggcagagatttggaacctttcaatgctgaagctatagaagacatcacaattagcctgatggagctaactatggagaagtgggctattgggagtatttctgatcccgtgttcttagccaatgcttaaagacaacaagtagccagggtattg

SEQ ID NO: 141549 - DNA, 678 bp, Cannabis sativa
gctcaaatgctaaagttttttcttgtgcaggccagtctgaagttggcctacacatactcccgggctaagtctgccgcttccaggaacacagttctgtccaacaccatgatggcggaggtggacttggccaagaaggacgctaacgatgctagggcagaacttggagctattcggatggagctgggtgaagccaacaagaagctatttaccgtccagaagaagataactgagctgactaaggatctcaaggtttctgaccgtcgtgaggagaccatcgagaccttatatgctgagtgaacagtcttcagggtgagaggacttctctttgagcatttcttcatcgagtggaggaggagaagaagactaaggaggaggagcttttgggcgagctggtgaggttgaaagagaaggttaatgctctagagacagtcggtcttgagctcttcttcgacttttggaaggctaatcctcaggccaactttgactacttaggtgatgctaaggacatgtaccttgagttctgcgcgtcccaagtggcctatggtgaaactgacgcagctgcttcaaccttcggccagattgttgatgtacctcccattcaaacaacaaatcctccagctccaactggcccagaagaaccgaaccaagagcctagaactccagctgtttaaacacttc

SEQ ID NO: 141550 - DNA, 1224 bp, Cannabis sativa
  modified_base (27)..(37): a, c, t, g, unknown or other
atatttttaacgtaaaacatgaactcnnnnnnnnnnnttttacgtgaaattttactaaaatgctatttattaacaaaatatacaattatgtatttattaatcaaaatcagaagctagcatatttcttaaccatttatatagatcataaaacatattcaatctgcttaggaatatgtatgaaatactatccatgattatgtataaatttattgttaaaaacaaataaaaccctaaataattaaccaaaaatagcaagacatatcaacatagtctcaaattaattccaaacattgtaattatattttaatattatattgaaggttcgccaaacagtgaacacaatttttgtactatttattctatttaaaactcaatccaatagttaattaatcacaaataattataataaatacctacagcaaccaatacattataaaactcttttgtttcataccatagataataaatagcattacaaaaatatattctactgttttagcatcacttaactatttttcataattattttaagtattaactagataaattcatgaaaaataaaaaaaaaatgatcaaaatctaaatctaaccattctaacacagtttataatctatactaagccctaaataattaacttttaattttctgaacaacctagggtatttttcataattaagtttagaaataacacaaataattaatgaaaaatacaaaattgactaaaattcaaatctatcaattttgtaacagtttataactcataaataatcatataaaataaacctagatttttctaagtaatctaagtatttttcctaattaatttaacacataaatcaaataattaataataaatcaaataattgcaagaaaattatgaaactttaccaaacaccctaaaataatatgtagaatcaaagtctacaaaaaaaatatgcgaaaaataccacggaactacccaaatcgtggtcgacggagttacgccggcgaacccctcttctccggcgacagtaagccccaactccttatacaattgcttttcacgcattattttgattggtgaagcttcctacaatgcttagaacctcaagccggccataaatcaccaaaaaatacgatcaaaagttgttgtcttcttcattgccggtgtaccgttaaaaatagagtccaacaatggcgatttttgtttagggccttaaagctttcattctttacgtccaaac

SEQ ID NO: 141551 - DNA, 1831 bp, Cannabis sativa
caatgtgatgtataaggttatttcgaagatcattgcaaatagattaaaacctattcttccatctcttatttgccctactcaagctgcgtttgtccccggaaggaatatccaagataacaatgttgtggtgcaagaaattattcattccttcaacaggaagaaagggaaagaaggattctttgcgatcaagattgatcttgttaaagcttacgataggttgagttggaaatttatcgatcatgttcttgggaatttcggcttccccctacaattctgcagttgggtttcccagtgtgtttcctcctcttctctcaatatatgcctcaacggtggtcctgttggtaagattattccttcttgcggccttcgacagggagacccgttatctccctatcttttcatctgtgccgcgtaagtgttgtccagacttttggaggaagagataggaaaaggaactattcatggtattaaattaagtagagggggcccggtgatttcccatgttttctttgctgatgacctaattttggttggtcgtgccaacttaaacgaggctaatagcttttggagttgtcttgaaaagttttgtgagtggtcagggcagaagatcaataaagtcaagacttctatattctttagcaagaatacccctgatggtatgaggagaggaatcaaggaagctctgggtatagcttcccctaaaggggttacaaagtacttggggttacccctgttctgatccagacagaaagatgctgattttcacttcattcttaacaatctcacgtccaagttgcaaggctggaaggccaaaactttatcaaaagctggccgggctacacttattaagtcggtaggcttgtctatgcctatttatgctatgcagactaccaaattgtcaaatcgccttgtgaatcggattgatggactagctcgtgatttctggtggggatttgagaaaggaaaccatggccttcaccttagagcttgggacaagctttgccttcccaaatcattgggaggcctgggttttcggaaaacaaaggaaatgaaccttgcttttttggctaagtggggttggaacttattaacgggcaagcagtcgttatgctcaaagattctggagactaagtaccttagagggaaagagtttctcaattgcaattataaagattctgactcctgattttggaaaaatgtagttaaagcacgctcaatccttcggaaaggggcttgtaaaagggtggcagatgggagagatactagaatctggtgggatccttggatcccccacttgaaaagtttcgttccaaaaccaaaagaaggtgtggtaaaggataacaagtgtgttgctgatctcataacacccacgggtgggtgggatatggggaaactccatagcctctttgaccgtgagaccatttcggctattctcaaggatagaattcctcatggtagtggcaaggatagctggttgtggactttggaaagtaatgggcgtttctcttgcaaatcggcttacctttcccaagcattggagagagcgccccactatgatattgcgcctgctctttggaataaactttggaatagtaacattatggagcgccaaaaggttctttggtggtgcatcctctccaatggcctgccggttagagcaatcatgagtaggagatttccaattgaagacactaattgtcctttttgtggaaggggagaggaaaccatggaacatctctttctaacatgtgatgtggcgatgcacttgtggcgctcatcaccttggggaatttttccagtgagtgacactggtattcgtgtttgggattgg

SEQ ID NO: 141552 - DNA, 551 bp, Cannabis sativa
  modified_base (40)..(49): a, c, t, g, unknown or other
  modified_base (302)..(316): a, c, t, g, unknown or other
aatggagatcaaatatctttttgattaaagctcattattnnnnnnnnnnttttatctaatcacttattttaatctatataatttaataagggatattggcagctgaaccacctgaactttacgttttgtaacacttaatcacaaaaaccaaaattttggcgacaaaacctactgaactcccattctgttttgctttgtacccctccgtccaaaaatcatagttaagtgccacggtggactatccacgtgtacatacttgtacaagtggcaaattttcagtggtccacgtaatattaattttnnnnnnnnnnnnnnnatattttaaaaaaaattaaaaataaaaaaaaatacaaatattttttttttactttttttttattcttctttcttctttcttcttctttttctatagaacccctcccagccctctctttctctctctcgtctcaccaccagagccgaagcacccagatcgaaggtggaggcagagttggtcaatgtcgcacaaaccctctctctctctctcgctctctctctttgtggtggtcgcc

SEQ ID NO: 141553 - DNA, 1005 bp, Cannabis sativa
caataactttaccaacaagacacagatccaatctcttctttccctcctcaatgccagctttattcagttcaagaaccggtccatcactctcatccaatcgcaagacttctgcaagccgattaaccaagtcgagatccatggacagcactcgcacaaacgccagaaaatacagcagaaaaacgatcgtaacagtcgactccacccttcccatgaagggactacgattcccaggtagtttcagaagctccgaaactaacgggagactaacacaaagtgatctttttcaactaccaaaatagtgaagattacacttaatagttttctaaccaatctatttgatcaattttgggtataaacaactaaacaattgtaaatcggattgaaacccattcaaaaatttaagaacgaaaaataacttgattgtgataattatatctcgtttattctaaaattaaatgtgtagaaatattgtaaaatatttttttaatgagatatgcataatcaattttagtttatagtcaatagaatcaaaaaattcaaaatcaattttataatataattatataaacactaaaattttgaacataatattctctctcaatactcaataaacttaagcgcatgtaatatatcaatagaaaaataatttcatgacgaataaaatccctaaatatttatgattgaagaaacaaaaattcaacctaaaataataacaaaattaacgtgcaattagtgaaaattaacgtgtacgtattaattgttacacaaattgtaggtcctaaatcatatacaattaacaatctgatattacatattagaaaaactaataaacccaaaatactaattttgtatataatttagaatacaataataatatataaaattaggtaataattcaatactatcaagtaagtctttttctctagatctctaaagcaaaagtaattttatttttttttaatataaaaaaatatataattgtgatgagacaatatgtatttatag

SEQ ID NO: 141554 - DNA, 799 bp, Cannabis sativa
ccttggaacatatttttcagttcgtctagctgtgcttgcacgactggactaactggctcgacattctggtcgatttgaatcacatcaatatctttctgagcgagaatttgagcacgagcttcgggctgtacgatcgtcgtgacaatctgatcgtctactcctctccttctgttcagatcactccttaggtcatgagtcatccctaacctatcaaatacagaagctcctggcactcttagtgattgatttgcttggttgacaagtggaatgacaccgttaacctggttggaactatcaagtatgaccacacctgatgaattactagaaaaggtctgcctgcctactgctaggcccacaagcagaacttctgactggtgatttggcggctgaccatttatagtctgggaagtattcatctctggatcttcgtctgtctcacccagggtgatgacactcggaggttgctgtttgacagtttagtaggcttttcgtataagcacagtagcttaccgactacgattttcaatctctgtatgatgagcccttaacgcttccatatctttgtctctccactcggcaaacatgtgcctttgttcctcaaatgcaagatttgccgcagcgcgaagttcttcctgatcatgatgtagggtatgatatgacttgcatgagtccaagagcagcacgaaggtttcagatctcaatatcatctccaatggttgtttgaatgttggtagcaggcggaatggttggttatgaatgccctggttgggtgctgaaccgttattcccagtctcttaca

SEQ ID NO: 141555 - DNA, 519 bp, Cannabis sativa
tagaaaatatacggtctattttgtcatttaacaaaacagagggtccaattaataatttttacaaaacacagggtccaaaataatatttactttttatttaattttgtggaactatattttaatgttttattttgtaattatcaaattaaaagatgtttcattttatttaactgtgatatttttttgtaatggttatagcgtattaaatgactctgtctctgaaacacttgacactagttcaagtggccataaaagggtatatgtgtgtgttaaaagtcctgggttcgagtcccaaattatgcaatgtaatatataaacgcttaaatcgaaaaaagaataagtctgtctctgatattaagtagcaatgctataataataataataaaaaaagatatgaacattgctattagatacctaagttataaataaatacttaagtttaattttttgtggtaataatatttaagttatatttttggaactctgtaagtacctgacagttaaatgttaagttattat

SEQ ID NO: 141556 - DNA, 570 bp, Cannabis sativa
tcgagatttgtaattactctagatcagtcaaatatctattcaaatatgttcatgaaagttctgatagagcaactgcaagaatagaatctattgatacttccgaagaaatagatgaaatcaaaatatatttagaatgtaggtatatatcagcaactgaagcttgctggagaatctttcaatttgacatacattatagacaaccatcagttgaaagattgccattccatttgcctggagagcatacagtaatattcggagaaaaagattatgttgatgatgttctttccaagactggaataagacaaacaaagttcactgaatggttggagacaaacaagaaaattgatgatgcacgagaactaacttattctgattttccttcatactgggtttggaatttaaaagaaaaaatatgggctaggagaaaaaatggtgtggctattggaagaatttacttcgcacatccttaacctggtgaatgcttctatatgagaatgttgcttaattttgtcaaaggatgcacttcgtacgaaaatattagaacaataaatgggatcaaatatcctactt

SEQ ID NO: 141557 - DNA, 559 bp, Cannabis sativa
  modified_base (476)..(495): a, c, t, g, unknown or other
ggggtatgatgatttggttactacataaagtttaagaagaggcaaaaatcataattagccttaataaaatattagacctcacgattgttacagaaaatattcataggaatagtaactacatcaagacacccaaagtggttatgggtaaaagcccatttggctatgttgtgagctataaagttacaggttctagcagtaatacaaaataaacaagtaataaaggaagaaacgattcttttacgaaatacagagtagttttcattttatcatctagggtctaagccgttgagagtgttgatcactaccttaaaatcattttctaccaggataaacttatgccctttgtccttgacaacctcaagagccaaacaaactgctgcagcttcaccacagagagcataaaaaaagtgcagcttagccgtatacacccaaaccaccttactcaggtagtctctagctgttgggttttatgcccnnnnnnnnnnnnnnnnnnnnataatcagatttacttattagtatagatcagaaataacatttaatgttgttggaaattatttta

SEQ ID NO: 141558 - DNA, 580 bp, Cannabis sativa
agatagtgggatcttgttgtttaagaccagggtttgtgtttcgagtagtgcgaaacctagaaatgagattctcgaggaagctcatactactccatattcactgcaacctggcactaccaagatgtaccaagatacttcctaagtggaagtgggaggatatcaccatggactttgtggttgggttacctagaaccacgagaatgtacgattcaatttgggttgtggtagatcgatttacgaagtctgcatattttctaccggtaaaaacagcctttaaagtggatcagtatgtagatttgtatgtgaaagagatagtgaggttagatggcgttccaaagttcattattttggatagagatccgaagtttacttcgaagttctaacaaagtcttcagcggcctatggttaccgaactgaaattcagtacaaccttccatcgttaaactgatggactgtccaaaaggacaattcaaatactagaatacatgttaccagcttgtgtaatggatttcaagggctcttggagcaagtacctgccgctgatagaatttttgtacaataacaactaccagagtacaat

SEQ ID NO: 141559 - DNA, 728 bp, Cannabis sativa
  modified_base (594)..(603): a, c, t, g, unknown or other
cgcaccacaccacaccattttttgcagtgcagtttttgcggttttttagtttcacggtgcgggtgcggtttggaaaattagaaaaattgcatgtgcgggttggttcgaaaaaatggtcaaaaatcgtaccacccgcaccactgcaacgatctatgcatattagaaaatagaaattatatggtaaaattataagagtttacattcttatggcctaaataaataatatcataaagttatgggttttttattttttacatttacatggaattttttataccatatttttttacaaaaatatggaaataaaatatttttaaaacaataataagtttcgtcagaaaagtcactgaaaaaattagtgttgtcgaaaatctcaccggaaaagttaccattaccgaaataattaccgaaaaagtcattgtcgccgaaaaaaataccaaaaaagtcactgaaaaaatcaccagaagtagatgtctcagatataaacaaaaataaaatcggttctataatataatgattaaaaatagataatacaaaataactcaaattggttataattgaaatataactagttctgtaacataatgaataaannnnnnnnnnacaaaataactcaaactagttataattaaaatagaactagttctataacagcgtttttgtaatatcctgataagcctaatggtaaataattagggtttatatttatattatgtgttaatcaggta

SEQ ID NO: 141560 - DNA, 631 bp, Cannabis sativa
aatgcccaaggtgaaattgaaagatttaaagctcccaacaatttgggatagattacctaaaaacttttgcttcgggagcaaagtttaatactctaaaagtccttcttgcacttgctaccattaataattgacaattatatcaaatggacattaacaatactttcctccatggagatacaattgaggaagtttacatggaacttcccccaggctacaaacatcaaggagaactccctcctaatgttgtatgtaaactacataagagcatctatggcctcaaataagcctctcgataatggtatgccaaaagtagttccaccttggtaagtgaagggttcaaacaatcctcttcggatcactccttgtttattagatcttctaacaacatttttcttgttgttttagtttatgttgatgacatttttattgctagcaataactctagcgatgccggccgaattgtttaaaagacaaattcactccaaatttaaactcaaagatcttaggcctttaaggttttttcttggactagaggttgggaggcccccactaacaaaaatattatcttttaaaaatttaaatgtaatttttttttaatttgataatcataggttaaaatagtagaaaaacc

SEQ ID NO: 141561 - DNA, 862 bp, Cannabis sativa
ttatggttgtatataattttattaatatggtatatacaatatattattttattttttattgtaggtatatagtttttgttgtatggtatatagcttttgttgtctatattatatcatttatttatgatgatatttagtttttattttattatatataaatttttttgtgtatatacatattttaatagtagtatgtataattttattagcatgatatatttattcggttttgttacaatataataatatgtaatattaaaaaaattatatgacttcatttaattattatatattttttaaaaaataatttataataaatatattttttataatttttaatagccaatttattaattctttttttaaaaaaaaacatttactaatttaattttcaaaattaagattattttccatctcatcccataaatatttcgacatcatcatatcaatttatttcgaaagttaatatttaactaatgcatcacaaatattacatgccattttttttttgtagaatttaaataccattttcgatgctctaaatcccattattaaaacaaaaaaacttcagatttgattttgttgaagaaaaaaaaaacatagatttgatattatttatatgtaataaaatccaataaataatgacattaataaccctgcatctaatgcatgtcaccaccgacaaaaataaatatccacttatgttatttatttttaaaatgctattattttttttttataaatatttgtctacattaaacattattgggtgattctacaatgcaccccttgacctgtttcggtattcagaaatattttttattctattttttttttcatattcatgtacgttataaccatt

SEQ ID NO: 141562 - DNA, 501 bp, Cannabis sativa
cttagactacaccaaatcaactttgtagacttgcgttagtgctagaaagtctacttatgagatggtgattactctggggtggagcagagatttttgaaaaagtgtaaaaacttatctgaagtctctaactctaccagtgagatagaatgataaagtggcccaagaaggctactagataattattcagactatagaaaattctatacagattttggcattattccaatcatgaattaactagcagtgttacttcctgactaacatagatatagttgccaaatagtaaagaatctagtaccccaagaggagtagacatatcaaaaggaatttcacaatatcaagaattttgtgactaaggagatgtaatggtgaaggaaaggttgtattgaatacaacctgccagatcctattacaaatataatactagatagtacacttgatctggacatcaaggtgttgagattaattgaaatgtactttaattttatattagtgcaagtg

SEQ ID NO: 141563 - DNA, 549 bp, Cannabis sativa
cacacgaattttttcacaaaaatattatctttttataaaacatccgtaaaacaacgaaacagaacaattaaaaacaacagtagaacaactaaaaaataaccttaaaacattcgtgaaaacttaacacaatataaagtataaaacttacacagtatttttagaaaaaattctgccctgcagtaaaaaataataaaaaagttaaaaatttcggtatatagtgtaaaaacccctaaaatatattcctaccttcatccttgaccacaacaagtaaccaagcagaacaaaaggatatattgaaagcttttcccatgcaattacaatttacaactaagaaaaataaaataaaatcgtgatgaatgtagtaacgaatgagtttatacaacttcttcttctttttttttttaaataaaataaaattatatacaactttatcaatgatatatagagaaaattacattgtatacccactttattttacatattttaatttttacctttatttttatattctttgagatatactcacttttatagatgatgttctcatta

SEQ ID NO: 141564 - DNA, 1377 bp, Cannabis sativa
tttttttttcaaactattagttgtcattattatttccaattttataaaaaataaatataattttttttaaaaaaaaataattgttagaaacttgccataaaaggttattagattgttaacttattgatttttttagttcccaatgggtattacccattaaaaagtgttccatatatatacatatatgagaatttttcaataatatacgtcatttataaattaattacaataataacattacctaaaataattgaaacaattaacgtgacacctcaacttaaataaccaaaacaataaattaaagatgcctgaaaaaaaatcacgtcaaaaccatttttatcaaataaataaataaaaaaatttaaacctgataaaaattagccctgttctcccatatcaatccttattggcatcattagtaactatgttattttttttttctttatatatcaaaactattcaagaaattaataaattataagtaaaaaaaattacataatattttaattaaatttgtagacatctaagttatcaattaaatattttattacaatatgataataggctatataaaaagactactatgtaaacatcatatatgaaaatagtttatttcaatatgtcaaaataaactaataagtttatatggcatatacgagtatagacatatattatatgcgaaataaacttatgagcaaggaatttcatcatattcaaatctttgacaagtacatttattgttattcaggtttactatataagacatgttacagtcatgtgttttgtatacaactagatttgatgtctcaacttaaaaaaaaatagactaattagtttgttattttatagacacacattgtgtttgaaacaaaaaaaaaaattgttgttccaatatacacgaaaaatagactaataagtttcttggtgtgtatcattatgtttcattatagtttactatgtattacaaaaataaaatattgctcccaaacaaatgataaatagtaagtttattaatatatatatatatatatataattgtaggctatatgaaatgaaattaattgttgttccaatatacaaaaataaaaataaaatttatttcaatatgtcaaaataaactaatagatttattaacataactaatagtatgttttatgtattaattacttagtatgatttatgcttcttatgtatatcagttttgtaaaccaatatcatgaatatattcaatatttagtttgaaaataaaaagaaaattacaatatgtattaattacttagtatgatctgttggataaattcccatactattgtcccataaataaagttacaaggaaaataaattagacctctttataaagcctcaacagaccattat

SEQ ID NO: 141565 - DNA, 600 bp, Cannabis sativa
ttttgttagagtaggcatagaggattatttttttttattaattattattaatagacttattatattttttttctttagaaatatacatatccttttatatactagttaaaggttacgtgccgagacacgtaaatattagttttatttaaagtttagtgctttatttttatttagatttctgtaagatatgattatgcgaatgatttttttttattaaagtaatatttgtaccattatatttagttagtaaaatataattgggtatatataagtcataacaaaataatatttattatttacttatagaaaatttagaggaacaagatataagttttgcaaaatttaaaacaaacatgatgtaacaaaaattaaagaaaatgtgcgatcttaaaatagaaaaaaaaaattaaatgatgtaacatgagaaatgttggtctaatatttcatcgtctccaggtgcctacttaattgatacaaataacagaagtttacttgtgtcaactgataaaggcaagtccaagaaaaaagaatgtgtagaaagcttgtacaattaacacttctttaattcatggtgatatttataagtctaactaaaaatat

SEQ ID NO: 141566 - DNA, 1560 bp, Cannabis sativa
ccgcgtgagcattcttttccctggagattctttctactttatagtctgtgaactcgtggagcatttcccagactatcgccacatatgcggccattctttctccgcaggtctgatattcccccgacacctggtttactaccagttgggaatcgctgtagacttctaatcctttagcccccacggttttttgctaatctcagccctgctatcagggctttgtatttggcctcattgttaaaggctgggaagtcaaaccgtagggctgcttggagtcgaagtccgtacggggatatcattgtaacccccgctccggatccattctcgttagaggctccgtctacgataccttccacgtcgggactgatggtgtgggtatattaacggtagcttcagcttcgttgcactctgtgatgaagtctgctagcgcctgcccttttatggaaatgcgtggaaagtagtgcagatcaaaaattgactttgacttagccttagctccattgcccatttgaggagcctttcggatgcctctggcttctgtaaaacttgtcgaagcggatggttggttaataccttgattgggtgagcttggaagtagggtctcaactttctcgaggccatcaggaggcaaaaaactagcttttcaatcaccgggtatcgcgtctcggctcctatcatgcgcttgctaacatagtacacgggatgttgagttttctcctcttcccgtactagggctgcgctaatcgcattctcggagacaactaagtataggaacaagtcctctccaagaacgggctttgataggattggtggctcggccatgtgctctttcagttttttgaatgcctcctcgcactcgttggaccattcgaatttctgacatttcttcaggatgttaaagaagggaatgcatttgtctgtggaccgggagataaaacggctcagtgcggcaacctttccggctaagctctggacatctttgtgcttcttgggggaaggcatgctcaggagggcttggatttttttcggattcgcctcaattcccctctgactgacgatgaagcccaaaaacttccccgacttaatcccaaaagtgcatttcgttgggttgagtttcattccgtatctccgaaccacttcgaagcattcttctaagtcatccgcgtggctagtgcacgcctttgacttgaccagaatgtcatccacgtatacctctatatttcaccccaggaggcctttgaacatccggttcaccatcctttgataagttgcacaagcattctttagtccgaaaggcatgactaggtagcagtatacccctttatcggtcctgaagctagtgcactcttgatctgcgatgtgcatcttaatctggttgtaaccggcgtacgcatccatgaaggacagtagcttgaacccagaggtggcgtccaccatctagtcgatccttggaaaagggaaacaatcttttgggcaggctttgtttagatcggtgaagtctatacaaacccgccatgttccgttgggctttggcaccaatactggattggctagccattctgg

SEQ ID NO: 141567 - DNA, 1248 bp, Cannabis sativa
  modified_base (921)..(932): a, c, t, g, unknown or other
  modified_base (1199)..(1201): a, c, t, g, unknown or other
cccataatattcttcttacctttcgtttatttttattgaattatgttcgttcaaaggttctatttaattatttatttatttgtttgctttgattttttaggggtgaaaaagcattttgtagtgatgaatgtcgatatgaggagatgatgttggaagaaggagctgagaataaacattatgatagtgtttaagccaatcgcttctaaataaaagctctcttctcttcctctaaatatatgccatcaaactgattttgcttcaacgagccacgaacctagccaacttggcaacttgtcaagctcttataatcgatttatacatatgaaatcaaaggcagattaatatagaagtaaagatggtaatgaacttgaaaaataaaacacacatagagagagagataaggatatttttattttcgaaacctttttggggggccttatgccttaattactttcatcaactctcttcttcaagggtagagaaaaaagggagtaaaaaaaggctgggataatattttgtagagttatttttcttttccttttgaatttgacgagtagtagtagtaatccacagtttttgggttttcaagttttgtaatgatcttgactaagcctggcattatcttaagtttattttatagcaaaatacataatagatcatttttttcgtggtattgtattgttattagattatgtcaaaggtgcactctattaaattagtgtgaattatgcaaaactaaaatattattcacctacaaaaaaatatactccaataatataccaaaatatgatataaatttggtatataatatttattatgatgtcaaatatacattaccataaatataatatttttttaccatacttattattttattaatatatttaactattggtctatattttattattattattattnnnnnnnnnnnntattattataaaattaataataaaataatttattttctatatttttgataaaaatattaattaaacattaaaatttacataaaattttgttttgcttttgttgaagcacaataattttttgtgccaaatataatataattttggggaattaccccatatactattttttaaaacttttttttcaaatttacgatttgggtttctaaagtcgttgcagcgctacttgtactaggggtttctaaacgattttttgttgcaatttaagtnnnagcgctagttgcaataagagtttcatgtaaaatttcgtaaaaataca

SEQ ID NO: 141568 - DNA, 544 bp, Cannabis sativa
tattatatatatttttaaagaaaactatttttttagatcttaaaatctttacttctctattatattgttcaatacgttcacacataatattactaatttcatcagctcgaatagttaccatgaatatttcttaattttttttttctttcaaactaaaaaaaaaaaataatccttgcagtagaaggactaatccgttatttctttcatcattccaatcgaaacatgtcaatattagtactgatggtacgtaaatgtaactcgttgttcaaacaactattcagagttcctagagctccttgtaaggcttgttagaaaatcggttgtcgaatttggttaatcgctctttgttgttgaaaatgaatagtttcatttttgtaattttttaattgttccaaagtgtaacaccattaaatctcaaagtagcacgatctaattcaaaaattttagttaattgcatatgtttagcatattttttcacagtaataaaattattataactgattccactgagttcatcgccatagaattcaacagttacacttct

SEQ ID NO: 141569 - DNA, 1344 bp, Cannabis sativa
ctcttggtcggcatatttgcctgtgtaatgtttgatatcccaaccaaacactcatctcgcatgttgtcttttgtagatgaacccaggtgagttttggggaagcgaacaccgaatcggtcaggatttacttcaactcttggacaaggatcaccctcgtctttgttctagtccaccctcttcaagcgacggagattttaattcaatcttcccattcagccacaggatgatggctcacactaaagagacaatgcgtaaagtcaacgcgtctaaccctcatgtggcccagcaccgaagaggatccacctgtgcagaggagggggatcatgaaagggacactgaagtccaggagatagaggaacagggtgatgtctgtcctggtagtccccccgaggcggaggaagaggaggaggctacacccccaaactttgggggatacaacgattctagggagccagtagacgcggatggcgacgtcctggtgaaggagtggattacgtcactgaggaggttactactacagttcctcaaaggagacaaagtgccttgggtgccaggtgggtgagtcctccatccaaggacactaaagcacgtttacgggatcttgaccagggcggctatctgggcaagttggaatgttatgttcgcgcctcgaactaccgagcctccaatccaaagaacgggatgtgtgcctggtcgggtgctcattccaaacaaggggcactgctgcctttgcacccgtactttaggaaggtggcagactttttctgtctctgtctgacccagtttactcccaagcgcatcaagtatctatctgccctgttcgttttctatgccaccaagaagtgggatatgacttctcctcatgaggttagctggtaagtaatccagtgctagccgggctgagggagctcatcaggagaatgaactcatttaactcaagcatgaagctaatttgaagggagatgcgggagccaaccagtatgctcaggagcatcttgagcaggaagacgagattgaggaggagcaggtgacttcgctcaaaaggaagaagaaacttccagcagagcacaggcctgttgaacaagcaattcagatcagggagcacagtctacctgcttggccatccactcgtgtagtaggaaaggggaaagccatcctggaggagcaaagggacttttcagatgacgatgagccatcaggtcttgctcgggcaaacgcttcttccgaagtgcaagatactacgtcttgcctttaactttattaattatcatgctttcatacttctagtgcttttctctaaccatgttacttttatttcgagcagacatgtctcaaaaaatgctc

SEQ ID NO: 141570 - DNA, 894 bp, Cannabis sativa
tacttagtgaatatttattaaaggaaggatataaaaatgatcctattttcccatgtatttttctaaaaagttcaagttctgagtttgttatcattgttgtttgtgttgatgatttgactattattagaactcctaaaaaacttttagaagctatggaatatctaaacaaagagtttgaaatgaaagaaataggaaaaataaaattttatcttggtttacatatagagcatttaaaatgtggaattttcattgattagtgaacttatactgaaaagattttgtgacagttttatttggataaatcacacccattggttagctcaatggtagttagatcacttgatgtggataaagatcttgttcgacctaaagaagaacatgaagagctccttagtctagaagtaccatatcttagtgcaataggagcattgatgtatcttgctaactgtacaagacctgatatagctttctctatcaatttgttagcaagatttagttctgctccaacatatagacattagaaagggattaagcaaatacttcgctatctctagggtgctattcataaaggatcgttctattataataattgtgggtcacaacttattggctacgtagatgcaggatatttatctgatccatataaagccagatctcaagttgactatttgttcacttgcgatgacactgctatgtcttggctgttaataaagcaaactctggtggctacttcctcaaattattctgagatacttgcaattcatgatgcaactcgagaatgtgattggttaagatcaatgacacaacatatttgaggaatatgtggattaacatttaataaagaaataacaacaattctctatgaagataatgttgcttgcatcgctcaactta

SEQ ID NO: 141571 - DNA, 932 bp, Cannabis sativa
  modified_base (207)..(211): a, c, t, g, unknown or other
gccacttgaggatcagaagcgtcggccagacgcgtggttttcttcgtacgagccatcatcctatggctgggtacgaggtcagaaaagtttccttcattagaaggaggattagcacgaagacgaggatgaacttcgtgcagaagttgaagcaactcctggtcgatctgatgcccgagttgccaagactcacctgggttcatctacaannnnnaacacacaagatgagtgttggacagagtatcaaacggaaaacaagaaaatatgctgaccaagagtactcaacagattaaagaatgactatgtttaaaaaaaaaagtcaaaactcaagaagttagaaagttttcttgagttaggggaaaaagttcatgaagcttagaataagcaagatggaagacagacgcaatgcggttcaagaataagctctaaggctgaaagcccacacgaagacatggaaaagaagagtcgcagaggtttctaaccctagggtgtcctaaagcattctttctacagcatagttacattcaaagcgtaaacatgcaaagaaaagcattaagggaatcagaaacttactcaaagattcaaatgcccgagttcaagaaaaccagcaatcgtctgtaagcacttcgacaactttgaagccagaaaactctctcttttcgctctggagttttcttaacaatgaagggtgataaaatgagttatgtgccagtacgatgagtatttataggcaaaagggtacttgtatacaaaggaaccttagatgcctcaacttcccgcctcaaaagtgaatatgtgaaatcaaaagtaatcaagtgcaaccgtcagccgtggtgagagaaattttgattttcaaaatattaattgtcagagcattaattaactgaaaaccgaagggacacccagtcagcttcacatcgagtctcaaacggtca

SEQ ID NO: 141572 - DNA, 786 bp, Cannabis sativa
tgagacacaacgtctctttgtactgctatcaacgcctacttcaggaggatgtgatgaatctggatctaaaatatttttctatacgagccatacctatttcagatatatttgagaaattaaatttaatatatatactaacaacacaaaaatatgataataaataataaacataaaataaataaacacaaaactataaaatactttctgtaatttgaaagaaactaatttgatttttttttttttacaataactaacacttgattattaattcattatataaacaggaatttcaagcattttaatttaaaaactgtagaatttaaaatagtttattttattgcaatttgtaatcaagattcccaaacaataaaaaaatcgtatataaatctattatattaccttttgtaatttaatttttgaaaattattgttatttgttacacatacaatttttaattgtttcaattttaactctcaatcatcattccttagaaaaaaaaaattatttcacttctcttcaagtttttaataataggataatataacagtgaataataatattcttttaatataataatagaaacagattttaatttctacatgatataatatatataaataataaatatataataatattcatgaatttaccttgaaaaaatggtgttccttattccttaatatcttttctttattgtacactagggaatagatccgcgcttcgcgcggttttaataattttttaaaattttatattaaaaaattaatttttagttacgaataaaat

SEQ ID NO: 141573 - DNA, 962 bp, Cannabis sativa
gtttgtgaacttttctgtttaaaaagttatcttgtttgtggtttgtaagctttttcgtataaaaaaagttatttgattttatgtgttagagtgcttcatgcagggggagtattttgtatactcttttgtgtttgtttctaacacttgatgcatgttttctccaaataaaatgttttgtcaatgaaagtgccaaagggggagattgttaattctatttttgacatatttaattgacaaaaatattttattatttattgtatattttcgacttgagtatttaaattggtgtccatattttttgtatctaaatttggaaggaaagttgtgtagctttcctaattatggaaattgaggtaaaaatggtaagtttgattacacaatttattcttatctaaccagttggtatattctgatcttgtgtgagtttcccattttgttagatcagattttttgaggagaaaactggagctaaactttccttttctttaaaaggaaagtcgtacttactgcccacgattctgtaggtacagaaatggaaattcctgaactgattgaagatttatttagggaattttctagtgggctgggatcttgtttagactgtgtgtaagctgtcaataaggtgtatattgattataaatacaccttatagtagctaggtttagtatctctttcatacaccttgatttgtattcatatcttaaggaaagagtgtctttgttttgtagagaagagcttgttcaactcttactctatttatttgtattcttgtattgtcttgagtttgtattcaagtctacaaagaagaagaagaacagtgctaccttcgagagaaggttttacaaagctttcgggacattgcttttctagtcttgcatcgggacgaagcaagcactcttcaaggagattgaagggagttcgagcacttgaagtttcatcaagattcgattagaagatagaat

SEQ ID NO: 141574 - DNA, 516 bp, Cannabis sativa
aaagtaatcaagattatgtgattatatatattcttatgatttatcagtacacatggtttaactgataggataatctacaatgtagtttacttgaagctaaggcacaagaagcttcaacttcttcttctccttcgtgcaagcctagaaccagctaaccttggggaattttcttaagcaaatccttcttttcaagatgccttttaactccaagttaatctagaggtgttttgaggtaagttccttactctttggattgaaaactttaggttttgagttggttttaatgtagggttttgcatttctgtggctgtagggattagactaagattggggtgtatttagggtaggtctttgagtatgttggagattgttttaagtggtttttatggatgcttgaattgagtttggtttgataaagccaaagttgagttttcttcacttcaacgtgtgattttgattcaatgattgaattgttgtgttttgaagcttgggatatgttgtattatggttattata

SEQ ID NO: 141575 - DNA, 1006 bp, Cannabis sativa
ctctaccagttcagcatttaatgagttattctattttaatatcttctaatataattatcattatatttgttgatttgtactctcccattttgacatgtgtcctatttcgaagagccagctgaatttcgggtataacaattgccctttaaaaagatctttttaataaaaagtgctttttaaataattgcagagggtatatttgtcacaatcccttttgaaaaaatgcatatcctctggttttggcagttttgtggttttgaggtacatcagcatttaatgaccatcctttccacttctttttcaaattctacccgtaggatcaattatctccctgatctaacggagattaacccaagagtataaaatagagaaaggaaccacctttgcataaccttcaccaatttagaaactctaagaatttttcaagcttttctgcagaaaaaaccattctcagatttgcccgaaaccttgcatgccatcattgtcattaacatttttcctacgagtttcatccgatttgattttcgactacaagcattcgaagggatcttcgttccgtccgttgtttcgtagattgcaaagacgctcatcgtcccaaaaaccaacctcaaacagtaagtgaattttctccttattttcttacgtccttgttatgttgtatttctggatttaattactaatttcttagtcagcatctttgttatctcatttggttttagcaatttttagggtcgaattgtaactgggtaaatgttagggtttagacagaacgtaggttttcgagattctctaatttaccaacttctggtttgataaattccttccaggaatcgggattgctttctccttgtagcaatgtcccaatctgattcaaaagatttagaaattgagtatcctactgaatttgccattccatacaaactcaaaattccaaaacccaaatccatattggagataacggatgcgaaaattagggaacacctagtgaaatcccaccaagatgata

SEQ ID NO: 141576 - DNA, 851 bp, Cannabis sativa
  modified_base (32)..(41): a, c, t, g, unknown or other
tccatatttcgcccgatctggtctttaaacannnnnnnnnncaatctttggtatgttgctccagcatttttagaccaaacgacattactttgtagtaatatagacctatatctattcaaaaattgtatgttcttggtctggtggatgcattttgatctgattgtaccctgagtatgcatccatgaagcttaatatttcatgccctgctgttgcatccacgagttgatcgattcttggaagtggaaaacagtatttggggcatgctttgttgaggtcagtgaaatcaatgcacacttcccatttcttgttcagcttgggaaccagtatgggatttgcaacccaagcaggctagaaagcttcaattatgaaatcattgtttcgtagcttttctacttcttcttttagggctagtgctcgctctttgtccaatagccttcgtttttgtttaactggcggaaagttgggatcaatatttaggacgtgtgaaatgatagaaggatgaattccgaccatatccgcatgtgaccaggcaaaaacgtctaggtttgctctaaaaaattttatcaatgctgattttacttcgggcaacataccttttccgatctttagctttatggccgggatatctggatcgatctcgatctcttcttattcttccataggtccaacattggtgcttgggtccacatcttcatccccgccttgggaagctccctacttggaaatatttttttcccttgtttgtgcttcctctcagacaccctaccccattctttgttggaaacttcaggcacaagtggaatatcgatgtgacagcctttaagtcttacaaagctggacgacctagcatt

SEQ ID NO: 141577 - DNA, 712 bp, Cannabis sativa
tgaatttgatctccaaaattcgtactcccttgagtgcttctgatttccttctgaactgcttctcaaaaataactgaactccacttcttttatagccaataagggataaaaaagatagaaaagataaccccacgttgaaaactcctaatttgccttgaattagatgggcgagtcgcgacatgcacttcttatgtcgcgacctgtgtatgacatttctcacgtccccaggcttccattgacacgtgtcgcggcataaggtttccatgcctaggcatgacccccatttcgatacaattatcttttattttatctttttatctttcttttcatcttattccttcgatattttctaagcttcttctattttagatctgcaaaaataaaagataaaaatcgtaaaattgctccaaacaagagtaaaactaaataaaaaacacactaaaattaacctaaaaatagtactaataacatcctaacaaattctctcaaactaagcatttactcgtcctcgagtaaaatacgaaaacgaaaaacaaaagttaaacaagtcaatctccagaacatgagtaattttcaagtagacttaataacatgattatgaaaaatttacctatgcataataatccataatttcaattcaattacgtccttaacacacttcaatttgatttcattcagctcatgaaactatagaacgcaattaactaacaatt

SEQ ID NO: 141578 - DNA, 799 bp, Cannabis sativa
taccaaatctggggaatagctcaagggggacgtagccaatttgggtgaactttgggaaaaatttctggtgttttctaaacctttctaactctatttttttgtactttgtggaatagagtttctggtgaagatctgatctcgtgatcgtgtgtgtttagtgtttctggtgaagattaagctgaagcatcgagtttctttgagaaagaaactctttgctaggatttcgaaggtaaacctaaagcctaagggaattgatcgagaaggttcttgatcctttgttttgtcttggacaaaatggagtcgtattgactctgtttacttgataaagtcaagaaagggaaagattgaatttgaccttggtttaaaaactgataattgattgttggtgtagggcaatttggtaaaagataattcctacaataatgagtgagaataaatccaacaatcaaatacttaccatttatacattgtataataaattgaaaataactttcttcataatagataaaatatataattatatgaaaataagttattatccacatatattgtaataaaatataatgtatatatattattgtaaatttgccctttttaaaaatagcaaactgatttgttaacctaaggactaacggacttacgaaaattgcgaccctgaggacttttattgtcaatttttgaggttggggacttatttgaatcaaccctaaatttttgagaacttatgctgcaattatccctatatatttttattagaagttatttatttatttttatagaagtcttgttatattatatt

SEQ ID NO: 141579 - DNA, 915 bp, Cannabis sativa
  modified_base (686)..(687): a, c, t, g, unknown or other
  modified_base (842)..(851): a, c, t, g, unknown or other
caaaggcagcaatgccccttgcttagcatgagcacccgaccaagcacacatttcccttttagggtttgtggctcgattgttatacgcgggaatgtaataatctaactcgcccaggtagccgccctgatcgagatcccgtaagcgtgcctcagtgaccttggacggagggctcacccacctggcgcccaatgcactctgcctcctttggggaaccgcatcagtaagttccttagtggcgtaatccacaccctcgaccaagacatcgccatcaacatcaactgggtccccagcctcattgtatcccccaaagtttgggaatgcaacctcctcttcttcctcctcctcgaaaggactaccaggacggacatcgcctagctcctctatctcttgaacctcagcgtcaccttcatggtccccctcctcctgcacgggtggatcctgttcggcgctgggcaaggtagcgtgctgggccacgtgaggattagatgtgttggctttacgcattctttgtttaatacgagccatcattctttggttggacagtaaaattgaatcaaaatgtccgtcgcttgaagagggcggactagagcaaagaagaggatgatcctcgtgtaaaagttgaagcatgtcctggtcgatttggtgttcgcttccccaaaaatcacctgggttcatctacaaaagannacacacaagatgagtgtttggtcaggatattgaacattaaacaggtaaatatgctgaccaggactactcaacatattaaagaataaaaatatttaatggaaagccaaaactcagaagttcgaagtttttcgtgagttagggcaaaaaatttcatnnnnnnnnnnataagcaagatgaaagacagacattatgcagttcaaaaaacaagcattatgaacgatgaagtcg

SEQ ID NO: 141580 - DNA, 949 bp, Cannabis sativa
ctaatggaggcttgaagcggggatgttacaaaaaagtaacgaataacagaatgttagggagagtagtggtatcactaaggtaaagaagattacctaaattactcatggtgatacagtaatgatggagaatacttttatatttgactagatggttaatctggtatacgaggtgaccattgaaatttcaagaaaagattgtcttattaagtaatgatgaaaatgtatgctcacctagaatgggaaaaacttataaatcgagatgcaatttaatgggcatgtattcaagtggtttgtgaatgttggatcacaaagtaggttgtttattaaacaacaaactatataattgaatgtaatataagttttaaagtggttaaccaagtatgaagatagtgatgattgcaaggaagcaatagtaacttatgaaccagggagtgaaacctcagtggtaatgataaaaaaagaacacgagagtctcagatattgatgaattagcatcatcaacaggagactcactatatgttggtatggtaattcataccaaggggttatcaataaaacaaagaatatacttgatgtatgtatgtttctagatgtgtttgaaaagattatcaagatttctaccaaacacaaaaaagaaaatttaggatcaaggaatgatctttgattaattgtattagttgagaattagagaaataggtatttccagtatagttgtgggtacctggtatgagcagtgttgccttatgtataggtttaattaatttactttataacagtggttaaccataaatgattaggaaatttaaaagttgtgtcagtttaaggaaaattgatacgagttaaaataagtagagatgaacgagattcttgttgacaataaaatgaaaattccttaagtttaagtgatcaaaagcgatgaggaattgtaagatgctaatgaagggagtga

SEQ ID NO: 141581 - DNA, 616 bp, Cannabis sativa
aatttcaaattaccattagaggtcaaggtttgagttcataaactcaaaccttgctacaacctttcaaccacaataaaaacaatccaaatccatctaaaaaaacctcaagcaatctccagaattcaaattaaaacaacaactatattcacagctccataaatcttataaccttacttcaaaacctaacctaggcttaagaattactaaagaaaagaaaggttagatcataatacctcaaatacaagcttcaactcccttgtttgcttctgaattcagttatgaaaatctggatttgggtgagaaagagtgaggttcgaaggagagagagagaaagatgaagagctaaggtattttctaggtttttcctccttttttcccttttttttttcccttttaattaattttcccttaaattaaaaacaacttaaccaaatatagtcagccccctcactcactacaagacaaacaaatcctagagaaaagacctttttacccttaagacaaattaaaaagaataaaaacctccaagggcaaattggtcaaaactaaacctgaaaattcaatacttaacaaaataccccgaacaaataacatacaatatatgactctctaaagg

SEQ ID NO: 141582 - DNA, 730 bp, Cannabis sativa
tattagtgataaatgttgtagtgatatgtgaacactttattgacacgtgtgcacctatgccgtcggttctttgctagtaactgacggcatagagtttatataaacagccctatgtcaccttcttcttccccactttttcttcttcacacgataactagcagccactagaccccctgaaaacccacgaaaccctcaccgaccacgattaaaaaccaccctatctccctcatttcttcaccatttcatcccatttttgtctttaaattttctatttttaatatctaatctcatacactaaaaaagttttgttttttcacccatttacactgtacccgaacctattttaaaaaaaggtagtggtataactccggctatcgattttagcggagaaaacgttgaatgccaacgtctattaatgtataaatatgctttctattcattttattaatgtacattaatattatttccttttttttaaattttttttggaattttttcattttattaatattatattgtgtgtgctataggtgacccgatttttgtcgtaatttatcgctgaattacgtttataaggtaaatatttataacttgatatatataataatatatatgtatatattttgtgttttattattgaatatgtatttttatatatattgtgtatatactatttgtgtatattttgtgtaaatgtattgtatatatatatttgttgtgaatgagaatg

SEQ ID NO: 141583 - DNA, 549 bp, Cannabis sativa
  modified_base (58)..(58): a, c, t, g, unknown or other
gaaccatgcaacagaaaataatttctaatctttcattaattagtaaatctgattatantgaaatgagttttatttagggcagacaacccaataaactccaacttgcactagtataaaataaaagtgtatttcaatcaatctcaacactttaatatcccgatcaagtgtaaatgtactattatctttgtaacaggatctgacaagtttgtttagtacaacttttctctaccattacatttccttaatcacaaaatccttgatattatgaaatttatctctatatgtctactactcaagggatattagattctttagtttttggcaactacatatgtgttagtcaggaagtaacactagtagttaattcattattggtacaatgccaaaaactgtatagaaatttccaaaggctgaataagtatctttcttgcaactttaacattcagtctcactggcagagttagagactccagattgattttaacacttctcgaaaatcactactccaccccagagtaatcaccatctcattgttggaaattattttac

SEQ ID NO: 141584 - DNA, 1147 bp, Cannabis sativa
aatttctttcggctaaatttttaggaacaatcaaatcagtgatgaaatactaatataaaaagatgcatggaagaataattgtagttctacaagaacaagtgatcagagtttgttaagggttaagagaagcttctttctgagattatagcgatctcttttttgcagtaatttattatttgttggattatttaaaaatttatttatctaattgaccccacccattaatcaactttcaattattttagttaattaactattcacaccatttaagtgaccagaaagatacatgtcggcttctttttacccatatatatgaactagtgaacatccatgctttgcgggcatatataaaatactttaaattatttataaaaaataagttgtttgttttaattaataataattacttaataaatttatattaaaatttgaattttattattgaaaaatttgtgacataaatacttaaaatattaaatttattgataataaataccgaaattcgaaaaatagtaatataaatcctcaattatggtttaatttttattctgatatgtgtgttaagttcttggttcaaattttattgtgtctgtttttaatgtttgagttttagtattttagtgggattctaatgtttgagtttatgtttatgaggaatgtttctatttatttatttatttatttttatagattttgagaacttgagatttgatgttgtttctattgattattgggattgaaaatttaattcttcatatgggaattaaagtttgcattttcgtttcattgattgaaaaatattagtagaaagtttatggaatgagaattttgaatatatgaaaatagaatttaaaaatagcatttgaatcgagaatcaaagtttattgttaatcttcatataaaaaaaaatattgttaatctgtaaagataatatgactggaagaagatagaaaaattaatttttatttcatttaatatgtatataatttttttttccgaataatatgtgttttttgttttttaaaattaaatttctaaaagaattattattttggtcaatgtactatatttacatatgacattttattgatcaactaacagaacgataaattgagtgtacgttaagtttagaaatttgaggatatca

SEQ ID NO: 141585 - DNA, 603 bp, Cannabis sativa
ctaattaagcgattttaaaaaaattatttatttattattaaaaaattcatttagataataaaaagaatgtattaaaaattcaatttttgtaagaactaaattttacgggaacaaacttgaatctatttggtttttctaaagaaaatgtaaatttgtttaagtaaatataatatttttttagtttaatttctaacattttttcaaaataattttatatttttattgaatttttaattatttatctttatttgttaagatatgagtttataaatataaataagtttgattttttttcaaaaaaatcttagtttgtttaaattattttattggattttcaataattttggtttgattttttaatatacttgtttataaataaaacaaagtttaaatatatttttttaataataatttattttttctaagtaaaattaataaatttttatcaagttttttaataatttttattatttttttagaattaatagaatattataatttttaatttttttttcaataaaagggagtaaaattttatattggtcaaagttcaggggataaaaatattaaattttaatggtaaaaaaaaaaaaaacagaatct

SEQ ID NO: 141586 - DNA, 1654 bp, Cannabis sativa
  modified_base (778)..(781): a, c, t, g, unknown or other
tcccaaatatggtaactttagctatatttgcccaaaatcaagctctgcgacaacaatcatttcctaatcacactcatgactctttgccaaaagtaggtttggagggagggagcgataaattttttcgtaattaaatatttttttttttgaatatttttaagtatagtaaacatagatttttttcgattattaatattctattattatttttaactttattattattattattattataaagttaagtgtttggaagatgagaattctttttgggctgcaaaatgattttaaatttgaaaactaagttagtaaatgtggtttttttaaaaaaattaagaaaataacaatatataataaattagttagtaaaaattataaaaatacttttattagatattatttttttaaaaatatataataattaaattaagttatataattttcttactattacatattactatcttataataagaacgaataaatatattagattattacatatatataacagtatttgatatatcgtatcattgaaaagtaccatagtagtaaaattatataccaaaaaaaattataacaatactaaattaatactcaaaaaatatatatcatataaaaaaatttatatataccattattaaaatatgtatacatacctgaaaatttgtatataataaaataaaaactaaatattatcttaaataaatgatatactatagataacaaaaactatataccatctaacaaaatatatatacttacaataaaaaataannnnaaataatataatattattataaaaaaaaattgtatgtaccatattaacaaaattatatacaaccataaaataattatagcatacttataatattatatatcacatttatatataataaaataaaaattaaacatgcatgatctaaaataaaataatatacaatacaataaaatttatataccatataacaaaaaatatatatcttacaatcgaaatatatataataacaacaaataaaaataaaattatatatcatgtcaataaaagtacaataagaaaatagaatttaaaattattatttaaaaaaaaatgatatatcgtataataaaaaaatacatataccatttaccaaaatatatatactattaataataataaaaatatatattactaatatatatatatatatctgtatacactaaccaaattacataccacaattaaaatatatatataccacgacaacaaaattatatacattatataccaccattgtatatcattgtatataaaaaaatataaaaaaatagaaactaattaaatattatttaaataaatatatctcacacaattaaaatatataaaataaataattaaatatatgtagcatgccaataaaattatatatatacattaaaatatttgtattatgctaataaatttatataccactactatacatagcaaaataaaaaataaatatcgtctaaaaataataatatattatacaaagaaaaataaaaatatactctacaacaaaatttatataccaacaactctcaaaaactaataaaaaaattgacataacttttaaataaaaaaaatttaaataaaactaatatagatatatcataatctttaagtaatttgctt

SEQ ID NO: 141587 - DNA, 557 bp, Cannabis sativa
agttctctccttcgcatctctgctcaagctctgatgaacatggtgatgggttgtttctttttttgaaggcacagagagagagagcgacagagaaagtttcacctggtaaaagttagggatttttttaattttaattttttattttattttaaaaaaattgttttaaaaagggttcatttttggtggccgattaacaacatcagcgctgaagtgcggctggttgggatcggttaagaatgctagcagtcgggatggatgtggttggagtcacggtggtggttcggttgaacttcgtggctagttaaagaagatgaaccagaaaaaaaataagaaaatatataataaaataaaataaatttataattttaaaatatattttttagttttttattttattttaaatttttttaatttaaattattatttggactaataaaaaattgatacgtggcactttatttgggtttaacggatccgttagaaaaaggaccaacgggcttacagaaaatgtcaccttagggactattaccgccaatttttgaggttgaggattaatc

SEQ ID NO: 141588 - DNA, 1157 bp, Cannabis sativa
tctgaatgcgatcttaactttgctatagaagatatgtagaaaaccctaggtttagaaactctgcgattttcctttgtaacgattcatgcgacttcatcgttcataatgcttgttttttgattacacaatgtttgtctttcatcttgcttattcaaagcttcatgaaattttttgccctaactcatgaaaatttcaaacttctgagttttgacttttcgtcgaatattttcattctttaatctgttgagtactcctagtcggcatatttgctctatttaatgttcgatatcccaaccaagcactcatctcgcgtgttgtcttttgtagatgaacccaagtgagttttagggaagcgaacactgaatcgactaggatttgcttcaactcttacacgaggatcaccctcgtctttgttctagtccgccctcttcaagcaatggacattttagttcaattttcccatccagccagaggatgatggctcgcactaaatagacaatgcataaaatcaatgcgtctgaccctcacgtggcccagcacgccacctttcccagcgtcgaacaggatccaccagtgcaggaggagggggatcctgaaggggacgctgaggtccagaagatcaaggaacaaggcgatgtccgtcctggtagtccttccgaggcggacgaagaggaggaggctgcacccccaaactttaggtgatacaatgaggctagggagccagttgacgcagatggcgatgtcctggtagaaggcgtggattatgccactgaggaacttactgccgtggttcctcacatgaggcagggtgcgttgggtgccaggtgggtgagccctccgtccaaagttacttaggcgcgttcacaggatctcgacaagggtggctatctgggcgagctggactgttatgttcccgcctccaacaaccgagcctcaaaccctcagagggggatgtgtgcctagtcttgtgctcatgctaaacaaggggcactgctgcctttgcacccgtactttaggaaggtggcagacttcttctgcctctgttcgacccaattcgctcccaagggcatcaggtatttgtatgccctgttcgttctctacgccacccagaagtgggatatgccttttgttggaatatttttaccaggatctagatt

SEQ ID NO: 141589 - DNA, 780 bp, Cannabis sativa
aagcataggctaaaaatagcctaacaaattcccccaaactgaatctttactcgcccttgagtaaaactaaaaacttagaaaacaacacaacgacacaacagataactgagcctccaaaaaattgaactaccactaccacctgtgcaacttcaatcaattgactaagccagaatttcaattcaaccactctaggaattacctttattgcataagttagaaacaattgttatgtatagatgcaaaatacttctttggaaaaacatatcacaatcagtctactcttaccaacattccaccaaccaatgttcaatatagttgcatgacatacctctctccacttatgtcaacaaccctttctcggaatcaaaaggtctttttcggttgaaatgtcatggcttaggtgaaaggtagataaaaaaatcatttaggctacattataccataagcagaatataccaaacaaacacccacaattatccatatttttatcccaaagaaacttgtaagagattgagaacttccactttataagcctaccgtcatcttttttttttcttctttcttttgatctattcttctctctttttttttatttcttttctttatttattaattattattattatttttttttgagaagaattagaaaatttatttatttctttttttctttctagagatgataaaaacacttccacataactttcctcaatctcctacttccaaaataatatccactcaaaacacttcattttttcccccaaacttaattaaaagcat

SEQ ID NO: 141590 - DNA, 528 bp, Cannabis sativa
tgttaatggtggaggcaatacctcttctgatccttaggcaacacatgcgaatccttatgcaaatccatggcgtcgaacttgtgaaacagagcatacttgaagtaggggtgagcaacggtcggtttggtcggttttttataccaaaaaaatctgaaatttagttttcgattttcatgattataatctaaaaaccgactgaccattatacaaatgtaaaaaaaaacctgccgttgtagtccaaaaccgaacttcattttttttttttaaaaaaataagtttttaaattttttataattatttgaaaactaaaaaagttaaagtattgtatcaaatatcatataatttaagaataaaacttcttagttaaataaataatgtaaaataatttttttaaaatttgttcaaattatttgtgctattaatatggtaataagttatattataaaacttgtattattttttaaatgtgtatatataatatgtaaatgcatcaaactataataaaataaagcaatgaataattgagac

SEQ ID NO: 141591 - DNA, 676 bp, Cannabis sativa
agatatgtagctagatacgtcaattgtaactcaatctcctcattagtggctgtcattatttctaatttaaaataaacttgtaaaaattaaagagtatatgaaatagccataaagtcttcatagcaaatgcaattcaaaaaaaataataataaagcatattcatattagtgataacaccaagtcttgagaacaaatacagttaaagaaataacataacaaacatatattaaagtcttgacaacaaatacaattaaagaaataacataacaaacatatattaaagtcataaaagaaagtttagaaaattaatgctactattttgagcgatttaagcattataattatatatcagagtatactcattctcaagtgtcccaataaattaaaaagtaaacaaagatgaaactaaaaatcaagaagaaaatatattcacacttataatccacaataatcaccactagttcactatcgttatttagatcctcataatttaagcatatgatatataacttcgactatggatgataattaaaatactatagtgacatatatactatacatactgttaacgcagattttcgttaaccaaaatttgagcctaaatgataaactcgcatagaaaaataaagatagtaaagaaaaaagtatgaacacaaaggattttttacgtggtttt

SEQ ID NO: 141592 - DNA, 502 bp, Cannabis sativa
aaaattagagtcggagttctccaatacagattgagggtattttgatttagtgttcttcgaagtaccagaacctagttttcttttagtaggaactggggaagtatgactagtaggattatctttcaaactcttcttgtccattgatgctcgtgtttttatttttttgaggttgttttggagactttttggcaaaatgggaggaagatcggttaacaaccattgttaatgaggaaaaataatatttatagaagaattccaacaaaaaaaaagtgggaaatgtatagagaagtttaagatgaaaaataaaaaaaatctactagaagaagatgatgaatagtagaacatggggggttggatttatgtaaaaaactaaaagatgaagatgaatagcgggacatgggggtgggatttttaaatatatttaaataaaaaaaagtaaaaaacatgtcacttttgtgacagcccacatcccatcagtcttttaatcaaaagataatataat

SEQ ID NO: 141593 - DNA, 869 bp, Cannabis sativa
aatcccgaacccaaacttggaccttgaacccaggaccagaaccagacctagacccgtgacagggatccagatattgactcggaatccagtaaatggggcttggaacatacccgtagtcggtgtatgaatctgggactcagacaaggacccgaacccagactaggacccaaacccgaacccagacctagacccaggacccgaaactagcacctaaacaagaactgtcggaccatgaccgtgtaacaagactaggaccctgaccaggacccagacccatacctagaaccgaactcggaccaagcccaagacccaaaccgagaccgaaactcaggcttagacatggtcgtgtacccagatcggaaccgagaattggattagacctaaatatgggacctaatcccaaacaaagactcggacctaagtagggatcaaggtatgaaccttgactcacacccagacccagaccaagatcaaaacttgggacctagatcaggacctagatccagacccaaacccaaacctggacccgtaccagggaccagaactcgaacctggaccgaactcaaacccaaatcgggatccacaccttgacccagacctagacctagactcgaacaaggactcaaaccccgacctagacccagaccaaaacccgaacccagacacagaatccgagtgtgggtctatgtctgagtccgcgccctggtccagttatagttatgggtttgggtccaggtcctggtcctgttcatgggtctcgacccgcttcttgttttggttctactttcaagtcatggggtacgggtcgagtccaagcatcgagtcctggatcctaagtctcggggtgggtcctaggtcaaggtttgggt

SEQ ID NO: 141594 - DNA, 1759 bp, Cannabis sativa
  modified_base (305)..(307): a, c, t, g, unknown or other
aaggacgtgtggaagacctcgtctggtactagagtgagtaaaagctttagccccagtgatcgaaagaggaaaccagatggaccactgattgtgggtccaaacagaaagtttcaaggtaactagggtttctgttgaggcagaaataaggtttggcagccttaccctaaattctcgaaatgcaagagacaccacttgggtgaatgccagtctagtgtttgctacccatgtggagtagcaggacatttcatgaacaactgcccacagccacagaagtccgaggctaagaaagagagtcctatggttcnnnctagggtgtttgctttgacccaagtagatgttgaggctgacccttcgattgttacaggtgagatatctattggtggtattatgtttactattttgattgattctggtgccagactttcatatatttctagtagaatcattgagaaattgagtagaccatgtgatatcatgtcttgtgaatttggtaccttattacctactagagaagtggtaatctccaagagatgggtatggtctctccagtgttagtagaagggagggaactgtcagtggttctaattgaattagacttagaagattttgatgcaatcctgggaatggattggttgactaagtacaatactaccatagatggtaagaggaagatggtgacttttgaaccagaggatgagaccccatttatttttatgggaaaggttaagggatcacgaattccaatgatatcggcacttaggactagggagttattgtaagaaggatgtatggggtacctggctagtgtgttggataccataaaagatatacttaagggatcggaaaaggtttgagtagtatgtgaatttctagatgtattcgcgaaggaattaccaggattagcaccaaagagagattaactttgagattgaattagtaccagcggttgagccagtttctaaggccccttatagaatggcaccgacagaattgaaggaattgaaagtccaattacataacctacttaatttgcgattcacaaggccgagtacctctccttggtgtgcaccaattttgtttgtcaagaagaaggacgagtcattacgtatgttcaattattatcaagaattgaataagtatagaataaagaataaatatcctttgccaaggatagatcatttgtttgatcagttacagggaaaaaccatcttctctaagattgaccttcgatctggttattaccatttgaggattcgagaagaggatattcccaaaactacttttcatactcaatatgggcactacgagtttatagtgatgtccttcggcttgactaatgcaccagcaacatttatggacttaatgaatagggtgtttaaagactttcttaacaactttgtaactatctttattgatgacattctagtctattctaaatcgaaagaagcccataaacaacaccttcgtatggtattacagcgtctctgagaacataagctttatgcaaagtttaagaagtgtgaattttggttgtcccaagtgagtttcttaggacacgtggtaagtaaggatgggattctggtagatccaatgaagattgaagctattcaggattggccaccaactaagacaacaattgaagttataagtttcttaggattggttgggtactataggagattcgtagaaggtttttctaagattgctactgttgggttttgtgccctaaataaagcccgtttcaatataatcaaattta

SEQ ID NO: 141595 - DNA, 505 bp, Cannabis sativa
cttaatcttctttgtatgtgtactgtaagccatttgctttattttaattaatttttttttttttatctttatctcttttttccaatttttttaaaaaattcagactatattaataattgtttgagattaaagttaaactgtggtgtctaacttttcaaaataataatttttattttatatgtaaaaaacatatatttttcaaagaaaatgacaaaattaaatacaatttattagcttttttttttcctatttggtaaacaaaaaagaaataatcaacctaagtaaaatttaatatagcaactaatttattatttatatatatatatatattctaactctttttctctcttcataataatttttttttaaaaaaaatagtttgtttaaatagtttagttactatttggttaacaaaatataaaataaactaaaaggatgatactttaatttaaaatattttttttatgatgaaaaaatatacatttttcacatattaaaataatat

SEQ ID NO: 141596 - DNA, 1570 bp, Cannabis sativa
aaaaaaaaaaagttaaaaaaataacatatggagtaattccctaataaaatatgcatgtttgttttatattacttttttttgttgtaaggaaaaatatgtatgtttattgtttatttatataagacttaaaaaaattaattaccttaaatagattatataaaaaattaaaattatatttatgtatttaatatagaatgtataattaaatgtaaataaattattttgtattatataatgtaataaaattatataattgttataaaataatataaaatagatgagaagaaagaagaagaagagagaaagaaaaagtgaatgagaatttctcaattatttattctaatgggtgaacccctatttatacaaatacaagagaatgaaatattaagaaactaaaaaaaagaaaaattaagaaaaaagaatgttgattacaattaacagtaataaataaaaaatttagacatctacataattattaaataattattaagcacataatttggaacaaagacatttatggtgtatatattatggcaagaattgtgtgacttatgagagagtccgtttgagcagggtctcagtctcagatgatctcgatcccaaaagactaggtgtgtacatatataagaaaattaagctcaaaataatatacatctatacaaatcaataaatataaataaattaagaattaattggtgggtgtgggtcatacggcgcgtccttcgcctctaaatatgtttatagcgatagggacagatgtaaaaaatttgattttgatgtaagaaatgcaatggaaagaggggctgaatgagaggtcatcatgggacccattgacgtgaaaaaagcaaacttgcacatatacaaattttggaaaagtcatacatattctataaacacattattctttttcttttaataactaatctatgcttatttgaactaacaaataaaattgggcgattatttgaactaataaataaaaattgggtgctttttgattcactaagattacatcaaatctcttcttttttatctttcttcaacattggttggtataataataattaagaagcattagtattatcttttagctaaacctaaattttcaaacattttacagtgactaaagcgggccatgtcaaaaacacgtggctgattaattattaatatttttttatgaaaggacaacatgaaacaataaaataaatgagttttagacaaaagaatgtgcacgcaatataaataacgtataaataactctacaaagccaaaaactaaacatttgaaagatcataaatacaaatgttaaaggtcgacacttatataatttaatatgataactgttatattattttataatatagtaaatatagattaaaatgttgtaatatatattattatgtgaataatatatattaagtgtttagtaaataaattgtgtaatatataatttatttaacctaaaattgtaaactacactttgtaatatggagaagagttacaagattaattatttttgtaacttcttttggttgatcatattttgtataataaaagagatgttacacaa

SEQ ID NO: 141597 - DNA, 521 bp, Cannabis sativa
tgggtggtaaacttttatattgctaaatgttcttgtgattattttatattgttttgaattgtgttttgttgttattaatatgtttgaatttatttgaaagcgttcaattatagccgttatgctgtcgaaatttcggtagaattaggataatatttgattttagtttctcttaactttgttgtttggattttatcggaagtgactttatcggaagtcaagtacataatttttggtataaggtatgctttctttaacttacttttataagaatattttttaatatatatttagataatccttaaatacttagagtaaatttagaataatattgacgtaatacataggatagctattgttgagtgttaagaatagatatagtaagctaaaaaaaaaaaagaaatacaaaaagtagtctattgagatttgaacttgtgaccaaaaagatagattgataagtctttactaatatacaaaaacacaatctttatataaattaactactatgattttatttaaatatt

SEQ ID NO: 141598 - DNA, 647 bp, Cannabis sativa
tttagaaacaggttcgactccaggtgccatatcaattacgaaatcaatttctcgttgtggcagcgcggcaaccccggcaactcctcggaaaatacgtcgagaaaatatttcaccgccctgactgcctcaggcccaatgtttcaggtctgctgaaattaattaccactgctagaaattctgctcagtcgctacatagtaaatctctagccctttatacaaagttaaccgagatccaagactcctggactgatccatcctaaacaaatggatcttcacctttgggctaaaaagtcaccattttctgcttacaatctatactggccgaacacttgaacagaaaatccattcccagtataatgtcaatctcagttaattccaattctataaggtcagtgctcaactccttatcttctatcctaaccgacatagacctaaagcgtctattagagataaccaacgccccactaggcattagggttccaaaccctctttctaaaatatcacaaggccttacccaaaaagattaattattcacatagctaaatatgaacgtgtatctcccaaatcaaacaacacgatataaaagaaatcgtttacatggagctgacctgccactacagaagagctcgctgcgtcatcagcttgaa

SEQ ID NO: 141599 - DNA, 1161 bp, Cannabis sativa
  modified_base (587)..(588): a, c, t, g, unknown or other
  modified_base (1120)..(1135): a, c, t, g, unknown or other
gctcgtaatgacttggtttggaataataaggccttgtcgttagagagggtggtgaattctgcaattacttaccttgattcttggaagaatgctcagctggagagtagactcacgtggacccgtttagaccgcagagacacaagagtagggagacaattggtaagatcccgccaaacaaaattcttcacctaaggcggcaacttcaagttcaaaaacatcctccaaaaacccgaattgtcctgagtattccacctaccattgttaacttgtaaggcatgattaaaaatatcaataatatttatattttaaatttatattaaaatttctttgtataaaatatttatataatttttatttttaaatatatatcataataataatataaaattaataaagaatattatgttaagtaataggatatcccgttaaagttaacgtagaaatcaaaaaatatcattaaactaaaaattccgttagatagctacattttatatagagtatatatatctttatatataaaatggggctacctaatttaaatttaataatgttagtatggttggttttataaatatatataaatattnntattatttattttaagttaattgaacttatactaattttaaattaatttaagtatataaatattaatatattatatgtaacaatattaattatttattgttatttttaatattagaattatgttcaattttaatattttaaaattttatatttattttcttcttcaaatttttaaaaatttaaatattgctcttttagaaaaaaaaaaattaataaattaataagtagttttctttaatttataaaaaaaaaatttaaaaatacacataacactattaaaacctaaaattataaccaagtataagttcaatatacataacaataaaaatatatatatataacagttacaagtcaacaaaaatataaccttcataattacaataaaaataaaaccattgagtaatgaccctaatatatatatatgatgttactttaattttgtatatttccattttttttgtaaggatatctttttaataaatataaaaacgaatgaatttagtttttctattagtcttgtcttttgacatgnnnnnnnnnnnnnnnnttttgacatgattttttagtcttttc

SEQ ID NO: 141600 - DNA, 906 bp, Cannabis sativa
ttgttagttatgtaaaaaaatatatttttttttaataaatatcaaataatttaatattgaaaagtaacaaattcaaaataaccgatctaatccgcacttttgtggattagattaatgctattgtgcaaattagattgaatcaaaatataaaattagcacagtgcagatcggatgcactatgagtaaaatagtgtggattgggttagatgaacacctttagtttttactaacatatttgtaatgccctactagattaggcacattatcgtattttctaattattgtacactcctttgctaatcaaaggatttattaaaaaacatgaataatttaaacttttgtaaataaacctaaacttaaaataaatatatacagatacatattttgggatcccgtttaaaaagttacatttgtttacaaaatacttgtactacaaaagttatcacctagcgactgccaaaataagacccaactgtctcgaacatctgaacactccaggtctaactgcctccatatgtacaatttttatctaggctgaactcactgctattcaacctttgtcttgcctttacctacacatataaacaatagctgtgagtcgacggactcaataagaaaaatataaacataaacatataattagattataactaggctccccatacacctaaccataatcctttctcagcactctagttgatgttctcggtactctagccgatgttctcgaacttggtgaaaccgtcaactctacttagaaactcttgaatggtgtatagatttgagtttcaagtctttccaggatggactctgtaagcccaagttcttgtctaacctagctttttcatatttagattgattttatcttgatttaagcttgaatataaaaagaacaaaatcaaagat

SEQ ID NO: 141601 - DNA, 713 bp, Cannabis sativa
  modified_base (640)..(646): a, c, t, g, unknown or other
catatataactttaaatttaaataaatgccatataagggtggtaaacttaaaaaagccatatttttcaaacttttttgtagaatcccatatttggtgtaattttcacatttttatattggttgggttgaaaataataccaacccactcattcaacccgaattaaactgaccaacccaattaagagagttttatatatatgtgtatatatgttttattatatatattaacatatcatataatttacataagcatttaaaaaatataaaattcaaactactatatttttttatggtagttgattcaaactttaaattcattctatatatatttttcttatcatcaaaattaattaaatataataattaaatgtaaaaaaacattagttgtcgatttgagcggttaaccgaccaaactcaccaatttcattagacgggttactattttttttttaattggatagattgcacctatatttttagaataaaatataaaataaactgacaaaaccgacgtgtagcatttagtatttataatagaaaatacatttctctaaaaaaaaatatatctattctatataaagtgtgcatatataactgaaatttatgagtaattcgtgggtgactttttatttttatttannnnnnnaataaaatattatttatattaataaaatataataaaacaaatactattaatatttgaactgatatta

SEQ ID NO: 141602 - DNA, 565 bp, Cannabis sativa
tgggactcaatcgggagaacggaggtcacctactagaaatcactagcgttcttcccaaacccatagagtgaggactcgtacagaccctaatgcgggaaatatgacaaaccgctcttagggggaaagaacagagcgtgaagaagcaagtgtgacctcgaggcggtcaagaacccatattcgatcaacttgaagaggagaaagtactcaacgagctaacgatggagaaagtatgggaaccagtaaatccacgagtcacttaaagacaaagtctatgagtagaacgcgatctgtgagtaagatgaggtctgccaacaattactcccaaccggatctgcaagagaacttgaatcggaagaaacttaatcttcgccaacagcttggtccaaagcaaaaggatcccacccaattgcagatagacgagctggaggacaagttcaggagatatcaagtgggggaattagagaggcaatttggatacgactctgacgaggagcttgagccgtatcatgcagatataatgaatgtaacaccccgatttcccgagatgtcacataggatagtccgt

SEQ ID NO: 141603 - DNA, 585 bp, Cannabis sativa
atgtgtcgttttaccaaaaaaaggaagagtttgcctaaatggaaccatactatacacaccaatatcatcaagattattgcaaaggaaacagaagttgctaaacggtgtggagtgtcaagagcaaatgcaactatgtttcagattcagatgaatccaggagggtgcttcactgtggacttagagaagaaaacatgcacctgtaggaagtttcagttaacaggcataacgtgtggacatgccttagctgcaatttggatgtgcaaccataattcccacccttattacaacaaagaggcttttgaaaagagttatgcaaacacagttttcccaatcccaagtcttgacaagtggccaaaaacaggagaaaacacaatccttcctcttggagaaaacattttgctaggcatggccaagaaaaaaagaggaagaagtgttgatgagccaccacctccaacttgcacaaaggctagaagaactggtgcaattatgcattgtggaaaatgcaggcaagctggacacaataggaggtattgcttgaatgatgcagcacctcaaccacatgtatgaatttgtctaaagcttact

SEQ ID NO: 141604 - DNA, 634 bp, Cannabis sativa
tacttggtagtaaatctagatcatggtaaaatattttcaacaacaattcccaaggccaacctagctaatcgatcaaattgagttatgtattcagtaacagtcatactttcgttccgagtcagttgggtaaattcctttctctttgcacttctgactgcctcgttataatactttgcattgaaaaactcctagaactcttccctggtaatggtagtaacatcccgagtcaggcccaccatgtcccaccataccagggcatcttcctagaattggaacgtggcacagaccactctatccttgctagtgacacccataaagttcagcattcgtgtaataaccgtctgccactgctcgactttcatcacattaagacctcccaaaaaaactggaggtgcctgtttgcggaacttttcatatagtggttacattcaattcactgtaggaattggccccatctacacagcaggggcaggagccatctgcatctctggaacatgcattgcaggagcacctttctgccttagccgtctaatttcttcatcttgctctttatcctggcttgcattgttgcaagcctatcttcccaatcctaggcagcctacaacgggttaacatctccccgaccgcgtgccct

SEQ ID NO: 141605 - DNA, 503 bp, Cannabis sativa
tatatacatactaagttaatattacgtataatgcacgtaaacttgattatattctttatttttattttagtcatgtttatttataattgtataattaatttttttatgttattcaataaacaacattattttttattaaaaaattgtttaatttaatgttatttataaaaggaaacataataatattcaaaatttgttgttaatataattttagtttaaccataatatttttaattttataatacttttattctttaaaataatgataaaaatatattttttagtaactacaataggcaatgacatcacaatagtgattctttaataaacataaatatatatatttttttattttattgtttaaaaaagaaaacaataacagaaatatatctttttagatatatggattgggtaaaacaaataataatagaaatatattttttttgatatgtgcaatgagtttaaatttaaattacaatgttaaaaaacaaccacatttaata

SEQ ID NO: 141606 - DNA, 671 bp, Cannabis sativa
  modified_base (641)..(642): a, c, t, g, unknown or other
gtcacaaagaagcgacaaggcatacttcgttgacctcggaaggataaagaaaaaaggctccagctcgctattacagtcactagaaccaaacccctatcgagacattttcgaacgtaataattgaagacatgttaaaacacacgatcatttttacccagttcaagagagaaaatcacactgtgtgatttttacacaataaccgcatttacactacgtgatacgtaatctaaccccatgatttaggggataattgttgtaaaaagattacagttaactttgtaattaactgtctactgtgtaattataaatagtggtaggtaagataaaaaaggggacaaaaaattatacaaaaaaggccctgagaaaactatcattaatatgaacaagattgactcgtggactatttagaattttaactgcaaaaccacgtaaaaaatcctgtgtgttcatatttcagcctttatttttgctgtgcgagattgtcgctgttaggctcaaatttggttaacgaaaatctgtgttaccaggtgttatatcatgacatccaattactttgggtaccccaacgtccaattacctcaaggtaaaaaacttgaactgcttggctagccatgatgaatggatcattcttgcttcctctnntacttaaatcaaccaaagtaaaaccaagc

SEQ ID NO: 141607 - DNA, 1194 bp, Cannabis sativa
  modified_base (501)..(514): a, c, t, g, unknown or other
  modified_base (1067)..(1077): a, c, t, g, unknown or other
tatttttataaatatttgtatgtggactgtataaatgtttaatgggccggcccaaagtatttttgtaattttttttccttttttgtatttttttgtttttttccctttagtttattgttaactaacaattttatttatattaaataagattatttttgaattaaagatgataactttaatttaattgaggggaataataaataataaaataattgacacaagacatttacgtgattttataattaaatctacatagtccacgtgtttagggctggtcctgagtataagcgggctaggcccgcgcttagtgcccactcattttaagggcccaaataaaaaaattgcctgttaaaaaagggaaacttataaaaatactatcacatgaaaatctttttaaaaatactttatttttataaaacaccaatagaatacaaaacagaacaactcaaaacaacagtagaacaattaaaaaataccagtagaacaacagtaaaaacttannnnnnnnnnnnnnagtatgaaacttataaaaaaaaacacaaagtaaaaaaataccgcctgacagtattttataaaaagaaaaaggtaaaagttagtatactatgtaaatttccctttaaaaaatatacatattttttttaataattattaaaaatactatttatctttatagtacccaatttttttttttttttttgcccatagctcatttcaactgagggccttgtttctcggtgttttgtttaatagagtgcataatctatatatctatataaaggaaagatatgaggcggtgacatgtcactctaaaatctctccaaaactatttttctcttctctccttaattctctcatttttaattttttattagagcataaatttacaaattaatattttattattatttttaataagctatttttcttttctctccttaattctctcattttttaatattttattagaacataaatctacaaattaatcattttatattattttagtaatcttttttaaaaaaacacactatatatataccatcacacattattattattattattannnnnnnnnnnattattattattattattaggggttttgaatcacatatatataccccatattagggatgacaattatacccgcgggtacgggggtagactttcgggggcgggggcgggtatgggttt

SEQ ID NO: 141608 - DNA, 652 bp, Cannabis sativa
  modified_base (57)..(73): a, c, t, g, unknown or other
cagtataaataaattatttaaatagctataattaattttcataattaatcataattnnnnnnnnnnnnnnnnnttaaactaagcgggctttacaggcttcatccccaaatgtggttaacgaccatgtcacactcataagagaccctcgtcgtcagtaactctttcaaatgtttgaatcctatgaaaggctcaaagacagttgttaacccacaaaagtagcaggatattatcataaaaatcagacttcaactacctccgaaaatcaaaggagacggttgaggtagctccgcattggtcgcgtctcccgaagcgagaagcaccgaccctctcccttatataaggggccatccatgacctgggagggggatcaaaaatttttgaacacttagaaaaacaaacactttatcattatttttgcaatcaagagcctgttcttgacttttgcaactccgattaatgaaacacaaggggagtaggctattatcgacatccggagccaaacatcttgataaatttcgtgtcttttatttacatttattgtaaattctagtgttattaattggatttatcattttgactttggtttaaatctcatttattacgactccgcatcggttggctaaaaatccagtcaatattttggtgctttcat

SEQ ID NO: 141609 - DNA, 981 bp, Cannabis sativa
caaaacaaccgaatgtcaatgtgttttgtcttctcttgataaactggattcttgcacaaatgaatcgaggattggctgtcagaatatacccttgcctttccaactagaagcttctactccttcggaattccttgtagccatattgcttctttgaatgcctctgtggtcgccatgaattctgcctctatagttgaaagtgctactacagattggagttgtgatttctaactaatacaatctccattagtttgaaacacataagaggtagtagacctcctagtatccttacttgatgcataattaacatccacatatcctttgaatgttactttctctgaaactctcttgtaagtcaatccaatatccgatgtccctcgcaaatatctcagtagccatttgagtgccctccaatggtttatcctaggaattgacatgaacctactcaatatgcttaaagcatgagcaatgtcaggtcttgtgctaaccatgacatacatgagacaccccaaatccattacatatggaatttcttccatctcttatttctcttctgctgtcatagggctttcttccttggttaataaaaattgtcctccaagaggtactaaagtgctcttagaattttgcatcttgaactttgttaggatcttctcaatgtagttcttttgctttaaatgcacgactccatcactcttggatctatgaacttctaaaccaagtatcttctttacttgtcccaattctttcatgtcaaattctaccttaagtttatctttaattcttttgattattaccttgtctttgcccataattaacatatcatctatatagagtagaagacacacaactgttgactcttctaggtgcttaaaatataaatagtgatcaaacttagaccttgtgaaaccaatttcctgaacatagttgtcgaatcttttgttccattgtcgtggtgattgcttaaggccgtatagggacttt

SEQ ID NO: 141610 - DNA, 680 bp, Cannabis sativa
atgacgtggggacttatgccagtcatgtcctcttggcaccacgcgaaaatgtcgatggcgcctttcagtgtctttattattttcccttttttcctccgggtctaggcttgttcctagccggagtaccttggtggagtcgtggtcacacactgatatctcctcgacgtcctccattggttctacaattttctcggaccccacacggggatccaattcgtcttcttcagccatttctggctcaatggtttcctggaccatcagtacgggcatgtgggtcgcaacgttgtagcattacctcgcctccccctgatttcctctcacggtccctatcccagcttcctgggttgggaaatttaagcacaagtgccgtatggatgtgactacgccgaaatctaccaaggccggtcggccgaggattgcgttgtatgcggtcgggcagtccaccaccacgaaagtgcaatacttgaacgtgctctggggggtgtccgggcacaaggtgacgggaagtatcactttctccattgggataagtgtcattccattaaactcggtgagttgggaatcacttggtgagaggtctcggtccgtcaggcctattgcagcgaaggcctctttgtaaagtagattcatgggactttcgttgtcgatcaagactatggccaccactttattggcgatgg

SEQ ID NO: 141611 - DNA, 3675 bp, Cannabis sativa
  modified_base (1306)..(1306): a, c, t, g, unknown or other
cacaacccaaattgaatcaaacaatcccgtagttctaggtaacccaaccacaaagttcatcgtaatatcttcccatttcaactcaggtagtgttaaaggctataacaaatctgccggtctctggtgttcagccttgatctgctgacaggttaggcatctcgatacgaattctaccacattgttcttcattccgctccaccaaaagtagggtttaagatctttatacatcttgggggtgccaggatgcaaggaatatggagtggtgagcctcttcaagaatttcatttataagttccacactacttgaaacacaaaccgtggtcttgaacaacaacatcccactttctgacgctgtaaagtctctggcttgaccaactgaaacgtcttctctgattttcactaactctagatcaattaattgaggagctttaatttgttctaacagatcagattgcagcgtcaagttatgaagttttcctacaacaaactcgatgcttgatctgatcatgtcttctgctagctgaggtgaaatttgaaccatactagttattttcctgggacccttcctgcccagggcatcgagcactacattggctttcccaggatggtaaaggatttcacagtcgtattccttaaccaactctaatcaacgcctctgtctcatattcaagtctttttgagtaaagaaatatttgaggctcttatggtcagtataaatttcacatctctctccgtagagataattctaccaaatcttcaaggcaaaaactaccgcagaaagttctagatctgggtcgggtatcactgctcttattcttttaactgacgagagtcataggcaataacccgatcgacctgcatcagtacacaccctagaccctgtctgggtgcgtcacaataaatcacgaacttctctttattagaaggtacgctaacactggagctatgattaatctctatttcagctcctgaaaacttgcttcacacttgtccgtccacacaaaatgctgattctttttagtgagctcggttaagggtgttgaaattttagaaaacccttctacgaaccgacgataataaccagccagacctaagaaactcctaacttctataactattttcggtcttggctaatccctgacggattctatctttcctggatccaccttgatcccgtctttgctaataatgtgcccaagaaaggacacctgagatagccaaaattcgcagttcttgaatttggcatataacttatgttctcaaagtcgttacagaaccatccagagatgttgctcatgctcctctnctgactgagagtacacaaggatgttgtcgatagatacaataacacaaatatagaggaaatccttgaataccctattcattagatccatgaaagttgcgggagcattagtcagtccaaaagacataaccagaaattcaaaatgtccatacctagtgcggaaagctgtctttgggatgtcctcctctcgaattctcagctgatgatagcccgatcagagatcaatctttgaaaagaccatttttccctgaagttgatcgaagagatcgtcaatcctaggtaaaggatacttattcttgattgttagcttattcaattcccaatagtcaatgcacatttgcaaagacccatctttcttcttaacaaatagtaccagagctcccaagggtgacacactaggccatgaaaaccctatgtcaagcaatcccaggagttgaatttttagttctttaagatctgctggagccattctgtaaggggccttggaaaccacgctctaggtgccaaattaatgacaaaatcaatttctctctgcggtggtaaacctagaagttcatcaggaaaaacatctaaaaattcccgaaccaccttgatgtcttctggccgaacagagtcaggccgagtggtatctaataccacggccagaaaccctagacatccatctcgtaacaattccctagctgttaatactgaaattacctggatccgagatccctgaaccgattcgacaaaaacaaacggttcttcgccttctcgttagaagattaccatcttcctcttacaatcaatactgtctgaatgcttggacaagaaatccattcctagtataatatcaaaatccactaaattcatttctattaaatcagcactcaactccctatcctcaattctaatcggcatagacctaatccaccttttggagatgagtaattctctgccaggaagtagggttccaaaccctgattcatagctatcatgcggtctatccaatttactaaaaattctagctgacacataggaattaatggccccaaagtcaaacaacacacagaaataagagtttttgaccgagagttgacctgttaccactgaagggctgacttctgcatcagcctgagttattgtgaacaaccttgctagagtgggttttgctgcagtcttctgcacttccggcttgagttggggacaatcacttttataatgcccagccataccacactgaaagcacccctgccctttacactcccctaaatggtgcttcttacagctggggcacttcgggtgagtgtatcgggtttcggagctaccctgatgattgcctcgaccctggttccctcagaacctcttgttctgacctgagccactagatgtagtaggtgcctttcttttctgatcagtggccaagccactacctcccctacttaagcctgatgtaggaggggtatgagccccaccaacaaccggagtccctagagactctaaggtgcactccactgcgccctcagctcgcagtgccttacccaccatatcagtagaggtggtattatcatcggtagtgatcattaggtcgtgtatgatcttcgcattcaacccattccagtatttctctttcttgaaatcggttggcacgattcctgcagccaatcttgccaagcaatcaaactgagtcgtgtattcagtaacactcatgttttctttctgattaagctgggtgaattcttttcttttagcacttctgactacctcgttgtaatacttggcattaaacagttcctaaaacttctcccaggtcatcattgcaacatcttgagtcagggacaccatgtcccaccataccagagcgtcttcttgaaagtgaaaggtggcacaagccaccctatcgttgccagtgatgcccataaaattcaagattctagtgatcacagttagcaactgctcgactttcatgacatcaggacctcccagaaaaactagaggtgcttgcttacggaacctttcatacagagtttccatccggttcactgcagctacaggttctatctgcacagcaggggcaggagctactggtatttctggagcaaggattgcaggagcaccctactatctcaaccgccaaatatcttcatcttgttcattaattctggcttgcaattatgcaaacctgttttcccaatcatgggcagcttgggcagcctgtggcgggttagcatcaccccggccacgtgccctacctttgggacctctacctcggccacggatattaaggggaatctgagcttcctgaccaccattggatccaaccgaattgcctgggctcctggtgttttgcctggcgtccatactaattagaacagcctgcgtaactaagagct

SEQ ID NO: 141612 - DNA, 590 bp, Cannabis sativa
gtaacggggcctggaacagaccagtagtcggggtctagatctgggactcagactagcactagaaccacaacaaagaaccaaacccaaagttagaaccttaacaagaatcgctgaaccaggaccctagagcaagactaggaccgtgacgaggacccggaccctgagctagaatcgaacacagacctagcctaagacccaaactgatactggaactctggcctgacatggtcgtgtaccgaaacgagaactgagacccggacctggacctaaatctttgacccgatcccaaacacatacttggaccttgatagggatccggaaacgaaccaggactcggaccaagacccagactgggatcaaaatgatggacctcgatctggaccgagatcctgacccagacccgcagtcgggacccgaacttggacctggacgcgaacctagactcagataagggtccagacgtggacacaaactcggacacagactcgcacccaaaatcaaacacccacacctagaactgaatatagactcaaattgggattggaacttgggattcggacgcaacctagaccaagaccgaggacgcgaac

SEQ ID NO: 141613 - DNA, 617 bp, Cannabis sativa
  modified_base (562)..(563): a, c, t, g, unknown or other
ttaatgttttggtttgtttatatatatatattgtttatgcttttatttatttttttttttattttctttcttctcttaaatgtgaaaaataatttttgccacgttgttactcagatgagcataaaaataatgccattatgatattgtgaataattactgttttataatttttgccatgttgtttatatattttttttcactattttcagaaaaaaaaaatatttaattactaatattgtgaatagttactgttttataatttctttcaatcttagtttacgtttattttagaattttatttattgaattaaattattatattatattatacgataactaattaaattttaaagtaacaaacaaggtatataaaataattggcatataaaaatagtagcgtattatattacatgacaactcattaatttcaaaaatattttttaagattacccaaatatattttaaattataagctactataatataacttaaaaataattaattgattactaagacatatacaaataagttttaaaggtaaccaatatatatatatatatannctagcaaaaaattacgtgcgagacacgtatactaaattttatgttaggtttttt

SEQ ID NO: 141614 - DNA, 570 bp, Cannabis sativa
  modified_base (517)..(521): a, c, t, g, unknown or other
atataaattagtttaagttaagtggatttaattacacaataatttttaccatacatatttttatttcatatttagtaattttaatttttgtaccttggttgttttttaaaaagttagttttataatcacctaaattttacatttattttccataatttaaatagaaccataattaaattttactaaattagttacttttaccataaataaataatttttattttatttgagtttttatttaaaaataaaaaaaaattaaaaaatatatactttagttaattagttactttgtaccttgttgtgacttgttttatactatattatttagtggtttgtccagtatggtagtttggttgtgtctaatatatcttgtttcgtatcatatatgatagtttgctatgtaggatgaattgtttaaacttttccttagatttcatcctaaaaatagtgcaaggtagcactgagattctcagctctaaaaatataaaaaataagttatggtggcgtttggtaacannnnnttaatcagttttttgtttttaaaagtggaaaagtgaaaatatttttcaa

SEQ ID NO: 141615 - DNA, 503 bp, Cannabis sativa
ataatcaatttttaaatttaaacctcaaaatatcaaaattaataataatatattaaaaaataaatattattaatttaaaaaatgatctttaagtttaaatatattaaaaataatcttctattttaatttttgggtttgaaaattgaaaaaatctgaaatttggaaaaaatcccacaaaaatcgggttgagtgggtgcgctggcagctaggctgcacgctgcagccccaagaggatgaaaatgcccaggacgcgcgcgcggaaggaggatttgcaaggttggacgtgaagctgggctcagcgtggtgcaggattcatctgggcggacgtgcaggatcccctgtgcagttgtctgaacgtgcgcgcacgtaggcgtgtgtgtccaagcgcctggtgcactcgatgcacctactcaacaaccatggcacctaattttcaaaaattcacaattctttcaatttttatcgaagtcgagttccgtaaaaaacaaaattgcttaattttt

SEQ ID NO: 141616 - DNA, 507 bp, Cannabis sativa
  modified_base (29)..(35): a, c, t, g, unknown or other
atccaggaaagatagaatccgtcagggannnnnnnagaccgaaaacagtgacagaaatcagaagtttcttgggtttagcttgttattatcgttggtttgaggaagagttttctaaaatctcaacacccttaaccgagctcacaaaaaagaatcaacgttttatatggttagacaaatgtgaggctagttttcaggagctgaaacagaggttgattacaactccagtgctagctttgccttctgacaaagaaaagttcgtagtttattgcgatgcatccagacagggtctgggatgcgtgctgatgcaagccgatcggattatcgcgtatgcttatcgtcagttaaaagactatgaacagcgatatttgactcatgacctagaattggccgcagtagtgttcgctttaaaaatttggtgacattatctttatggagaaaaatgtgaaatttataccgaccataaaagtctcaaatatttctttgctcagaaagatttgaatatgagac

SEQ ID NO: 141617 - DNA, 501 bp, Cannabis sativa
tcattaataatacatatatatatatataatattctcattttgacatgaagaaaactatataacaaaattgccatgtagtagtgtttaattaaatttgttaccttaaaattgtatgatgtattttcctttgagtatttcagggaaagaagcctgaacaatattatgataataacagattaagacaaatgatgataaaccttttaagtaattaaggaataaaaatgtgagtttatataaatatatatgtatatctttatattaaataattttttctagtataatgttagaaaatacttacaattttccatcctatcaattcaccacaaccaacacaatacatttgctcaaactcaaatacaccagttgaatccacctctattattccatccgtaaatatatttacactaacaaaaattaatcaaagcataaaaattaataagttaattaattaattaattcaatactctttatcaacaaaacatatttaaatagatatatata

SEQ ID NO: 141618 - DNA, 1635 bp, Cannabis sativa
aatagttataaatatcaaccattagatttaatccaatagctaataatagaatacccattcataggtaatacacattaagagcatgaccattcatatatatttatatatattaactaatcagtgatgattataactaaatttaattataaatattaattttaaaaatattaaatcattaaattttaattaaatactacataataagaaaaacttaaatttgtatacttaatataattaattaattaattatatatctttatacattatattaaaaaatatgtataaaaacatttaagtcaaactcaattttttgtctgaattttttttctgttttaatttttttcaatcgataaaacaacctcagcccatataatgtaaaaattaagcataaatattgaagtttttttttaatttcactcattcatagataatacctattaagagtgcaaccatatttatatatatatatatattgtgaaacaaagcacttgacgccatgttcaacctaaaacacaaacacttcaagaacacaaccaattcgagacaccaagaactataggacaaattaaacgagaaataagggaaaagaacatcaaaaaaaattaacgagttcgagctcagtgcaatgcaacaaccatcattatcttattgatcatcaatgtttacaatgttacatagatcttaatcacaccactcaagagttacaagacactctttcctcacaaaggttttgaaccaattctctctgttataccaaaaattcagttgtacttcggaaagtgatacatgtcaatctcagagaatatgaatcaacaaatataatggtaattatatcattaaatgtaaaatggaataactcattaaaagtagaattaatagagtttatttataactcactgactgcacagtcttaagctagatcagaatgtacaaactattgattcacgtattgacaagaaactatttcacatcagaaggcataatcctgagggagacatagacaacgcatagcgaggcatctacctcgctgtatgtaaagaggtactgacgtggtgaattgattattagaacacttagcatataatatacattataataacgaagtaaaataaattgaagaccattattgtccaatctgcaaggccttatggtcaaagagcagttcctaagttttctcagtacactggtgctcatgccattgttggaatacaagtaaactaagtcactcacttatgtactaggcgagacgcctcagcgaggtacatttggcagcatgtcctaatccatgtcagcgttgacctccttaaaaacggtttaaatcacaagtgtgtgattatctgatattaactacacttatttacgtggagcataattaaagcccccaatttcaggaaatattgttatgggatttgaatttaaatgtaattaactgcaaacttatattactataagtaggggtagattatacaaaaaaaatggacgaaaaatcatagagagataaaggaatatactgattgtaaaaaagccctaattctgtatctaaaaatatctgaataagatagactcgtggactatgcagagttaactgcaaagtcacgtaaaaacctcgtgtactttttgtttttattatttttc

SEQ ID NO: 141619 - DNA, 532 bp, Cannabis sativa
ccaatttggctaaagaatgggcagccttattgttttgcctccctatatgggtcacagatttgcaatgtgagaaaataggggagtccttgatttcctctagtaaagcgctccaatctgttttgactttcttgttaccattcagaacctccgccacacgaagacaatcggtgttgattatgaacggcacggcccctgtttttactgccagatgtatacccattcggacagctaaagtttcagctgcttcaactgaaaaatcgccaatctgatgatgaatttctgctgcaataacagccccttcaaagttccttatcaaagcacctaacccgattctcagctccgaatgctgtagacttgcatcactattgatgcagtagtagtccttaggaggcgcttcccagccgagaggagtagaatgactggttgtattgttggtgtccgtggtgtgattgttagacagcatgaatttggcttccaattgggcccgtccgatccagttctcagttgtggggagatgcaaattgagcctttt

SEQ ID NO: 141620 - DNA, 990 bp, Cannabis sativa
ctctctctctctctctcaatttgtgtcctttagtgattaagaatggcccacacaattcaaggcaatacccagatcaatgaggaagactgtgaagaaactgtttgtcaattcaaggaagacatcgtgtttagttcttgttactactctatgacaaaaaggaacaagtgttagagaactgaaagaatgagttttattattctgcaaccaacgtgaggttttctgcaacttttatgtgtttattcaatatttttaatgtttttcatatttaggattttaaattatgccatgtaatcaaacatacgtgattagttaatctagatactggtaaataagtaccaacaacacttagaatttaataaaatctctgtaattgagaaattatatcactaatgcctatttctgataataggtataattttctactaatgcacatataatcataaaataataactaacttactaataactgctaattatatactaattttatgtttaaatacacggttattacaattatccctccgttaaaaagattttgtcctaaaaattaacttgaacaactgcgggtattgaaccctcatgttagattatgttggtttttaggattcatatcaaagtcattgcgggagtagagaagtatggataaagggatttttttgaaaaaataaattgttgaatttgatatgaaccttaaaccctgaatgtcagcacaatacaacataaattaaatctaactacttggaataaggattttatctcttgatgtctatcaaggaatccttgtatctttttgtataattgttcgatcatcaaatccaaagctttatggacttgatgaaaaatctacaccagatcttccacatcgataagatgaataaacttttttgttacagtgtgtactcaactcatgagtcactataacgtgagattgagaaaaacaccaattctcatagaaaccaattctcatagaagagagagagagataagaga

SEQ ID NO: 141621 - DNA, 636 bp, Cannabis sativa
gatgtatgtgtgatttggatgtaattcatgttcatctatgtgtttattggtgaatgattgatgtttgtaaattttttacgtaaaataattaaatttccgttcttaaattatttttactggatagtatgggaaaaattaagcaattcacttttttatagaactcaatttcaattttatttgaattagttatgattttttgtaaaatttgaaagaaaaaaaaatcaagaatcgagtgcaccacgtgcgcgcacagacacgagtgatcactcaggtgtcacgcgcgttcagacagggcatgtctgaaggaacacgcccaggatgtttgaatagccccattccgcgggcggaaatgctacgtgcagcatccttgtttggcaaatctcggccagtcacctccccctgcgcgcgcggatggcatccgcaccaaatgcaatttttttttcaattttttcattttttttttcaattttttcattttttttttcaatttttccgtttttttttttcaattttttcatttttttcatgcttttgcatggattaatttcgaattttttgtataattttgtattttgatttttatttttcaaatttcaaatctaattatgagaataaaattaattaattttagatatt

SEQ ID NO: 141622 - DNA, 562 bp, Cannabis sativa
tttttacaccacgtagtgaaatttcaaacttttttacttttttactgtggggcggaatttttttcaaaaatattgtgtaagttttatattgtgtactgtgttcatttttcacggttattccacgattgttttatagttgttccactgttgttttaattgttctattttgttgttttatggttgttttataaaaagagtatatttgtaaaaattctgcgtgatagtaaaattgcaaatttttgtccaaaatttagtatttttgtaaaaattccaagaattaatgtagataaataaatgaatctattatgagtgtaaggatgtataataattataataatagggtaaaattgagttattttatcgagttttgtcaattttgtcccttgtacgaattaatttccttttttttttttgtttttcttttttctttttgaacaattcttccttttgttgctttcacatacttcttcccctaaattaatatgtatattttctatgatattaaaatatatatgtatatttctagttatctatatccacaaatgtttctgtagtaatgtca

SEQ ID NO: 141623 - DNA, 749 bp, Cannabis sativa
gcaagtggctcggaggttgatgggcatacgtggctattcgctgacatttgtcgcatttctttgtgaagttgaaagcgtcttgtggcagggtaggccagtaatacccctgtcacatgattttcagggcaagggaattaccaccagtatgattcccacatatacccccgtgcacctcgcggagtatgtagtcgcaatcttccccgtcaatacatttgagtagaggctgactgaagcttctgcgatatagccttccatcatagatgacatatcgggtggcacgctatcgcagctttctcgcttctatcttatcatcgggcaagatacctttctccaggtatgcatttattggagtcatccaggtgacttctttggcgtcatcgatttccattacttcttctcgactcactgtcgggtgagccactacgtccacaagaattacatcgagtaattcggcttctctagttgaggccaagcgggtcaatgcatctgcgtgtgagttgtgagcacacggtacttgggacacgactactttcttgaatttctgcagcaactcgcatactatggctaggtacttagctagacgcctgcctctggccagatattctccgtttacctggaatacgacaatcagggagtcactgaaagcctttaaatattctattttcatctcgatggcgagctttaagcctgcgatcaaagcttcatactcggcttcattgttagatgtagaaaattcaaaacgtaaagca

SEQ ID NO: 141624 - DNA, 816 bp, Cannabis sativa
atatcactcagtataattacaatatatataaagattacaaaaattagataacaccgcgcgaagcgcggcttagttccctagtattaaataaattagaagttgcaaagaataggcaaaagcacttatataagttgccacataatttccctaatgctttcctttatattgacagattgatatgagattaatatatatatatatatgatgtattggaggttgtattatattatatataatataataatacacataaaagttgtaacatatgagaagttacaaatctgaaaaatagattctaacttaaggattatatgtaattaagtgagttattacatatggaagttatggaattaatgagataagtttctagctattagaaactgttacaatactcaattatatcatttaaatgagtattgggacgttggaggaagatttcagagagtagttacaaaaactcaattttgagttttctggaaacagttgtttaatggttgtttttaagttgttttatggttattttacgaacacctgaaactagtttttgaaaacgttcataaatgtacataaattaattgagcatgtttccagttctcttgtccaacgtttttatcccattaagcactaatttaagtattggtaacaaccatgtgatgaaaggatttgatttttaaatgtgatcctcaaaacactataaatagaggtcttgggtttactttgcaagagaactagtttctatcaagagagcacattgctagaaacactatagacttgataaatctagaaagttatttccattcttttcttttccctaag

SEQ ID NO: 141625 - DNA, 549 bp, Cannabis sativa
tcacaaacttctgggtaagattatgaaccttattattttaatttcaaaattatttatgtttacactatttatttttcgtcaatgttttatgtatttaactataactatatccttaccaaaaaaactataatcatgcaaaagtatatgaaattgacatcaccattaaccatagataagttgaggtcgcttgtcttaaagaaagagaaggcttgtgtgcaagtggcaaacactaattaaggctcatgtggatgtcaagaccactgacattgctttcactgagatatggtaaaagactaattgattgcagaaattttccccggggtacgatcagtgatatggtaaaagatgtttgtcgggggatatcatttgtttataacaacatagcatactacggtggtgacactgacaggtgattaactattttctttcttttattgtctctgtcgaagaaaatgaagattaaaatctaccaatgagtatcattagttttcttatctacaatttttacacacatgctatcttcaattatcaataatttagagattgatt

SEQ ID NO: 141626 - DNA, 1010 bp, Cannabis sativa
ggacttcaagagatcggcggagcaacggagcaccgacggcggaggatgagattctagtaaaagtaattcgaggccaatagtaaatctctcctcccaaatttattttcatcttgtaaatatgtttggctgttgggaaaaagaagaagcaaaaaactattttttgagatttctaggaatattttgtggctctgtttgaactatggagaaatgcaaggaaaatatatcattttttttagatttttgaaaaaatgcaaataaagtattaattatgtatgtgattgttagagtttgaagatgaatataaattttaatctgtgtgttttttttttttttgaaagaataatctgtgtgttattcatatcttttttgatgggtttgttctatgttcttgttcattgttcatacccatatttttgtgggattttattaattgtacatttatgttaacacattgttaacataatatgtttaatcagggctaattagaaatttatggatttaattaatgatttttgattttaattagttaaaatatgaatttctaagtatatcttttattttattagattttaaatgaatttttagattttttaaatgaaaaataaagagttaatgatttggaccaatgagatgatgacacatggatacttatttgatacttaacagccaagtacttactgtacttccaaaactttaacagaaggtatttttacagctaaatttttacttagtaaataaattccatactaattcaccctaaatcctcaataaaaaacaaaggaaactaaacataaataaaatataaacaacaaaaaagttacaaaatataaaattttaataaacaaaactgcaagaaaataaaatcaaaaacaaaaattatataaaaaacagaacaagaacatgatctcactaaaataaaccacacacaaatcactacccatcctgtacaaaaatgaaaataataataaaaggattcaaccaaacagctaaaataaaaaaaaaataaaaaa

SEQ ID NO: 141627 - DNA, 678 bp, Cannabis sativa
  modified_base (410)..(411): a, c, t, g, unknown or other
aagtacaaactacgtacgcccttccttgagagtacagtcgggggcatgctgaggtggaggccgtaaagaagattttgcaagaggagcagcagaacactcttcacgaggacgccttccgaaatcggtgggacctgaacatggatccgttgacggattggttcaaccgcttcgtcaggcccaccttagctccctttgcctcggagatgaccagccagtttgtctcccacctgactcaattcccagctaaaagatatgcagcttgtgcctctttgaactctgtttaccaggtccaagacattagctctgccatggccgcggtgagtacttgtaatttattccttcctttgatattttgtataaggcaacagacctcgttcctgtttcttttttcagattactgccgagaccgnncgcctttccaagaccttgatcgacgatggcttcgtcatgtccgaattctggggcatacacgaggccgtgaggatcctgcgggatttgtctgccgaaaggcgggcattccaggaggaggctcaacgaacggaggcccttgcggaggcgaagttccgacaggaggccaagcaaagggaagttgaggcgaaggcgaggcaccaggaggccttgaaggtggagggcgaggctgcagctagggccagacgtgagcttcgggaagccagggag

SEQ ID NO: 141628 - DNA, 503 bp, Cannabis sativa
cccatgattctcaacaatgagaagacgtctatattagatgatgaggaatgaaaaagttcaagatagaaaagtcattatctatattaaatgatggatatgcatattaatcttcatgagcatatttgataggtaacggatcctcttcgagacaagacaaatttttgaaatagactcttggagatagtgtcaatctcccaattgaactataaagctctaatttctcattctttatccaataatagttacacaattacatatttataggctttcacactatttacaaattactaataagcccctatataattattttcataacactttcccaccctttcaaaatcaccttgtcctccaaggtggtaaaaataaaaaaaaatgacatacaaaaacaaaccaaataataaaagagaaaattacacttaatatggtattttgaaactttatttgaaaatatggcaattttatatttgtctgctttttatggacttaagcatttcttttat

SEQ ID NO: 141629 - DNA, 516 bp, Cannabis sativa
  modified_base (473)..(483): a, c, t, g, unknown or other
tcttttaccaaaaaaaaaatatataatataaatttatgattttggtgcaaaacacaatgtaaaacagtgtggtattttggtgtgcttctagatcttcggctagagcggtccaacgatgtcttgatctgtatagtcgtgcctcaggttgagttattaatccagataagtgtcttctttccttctcactaaacacaagagcttgtgatcaaatcattcaagcacctccttggtgtgcccattcaaccttgccacgaacaatacttgggtctgcttttttttttcgtggtgtgataaacaccaactttttagtggcatcactgacaaaatttggaagcttcttaattcttgtagagagcaactcttctctataggtgggaaggaggtacttttaaaagttgtagtccaagcaatccttacatatgtaatgagttgtttccaattaccagttaaattagggttgttcatccgatccnnnnnnnnnnnttttggtcaaacaacatccaattcgcactaagt

SEQ ID NO: 141630 - DNA, 953 bp, Cannabis sativa
  modified_base (880)..(893): a, c, t, g, unknown or other
ggatcacaagtgtggagagaattgaattggttgtttaggtttgattcttcttcatgaacttgagtgaagtactcatactattggccattggggccacgagcaaagtaacggcacaattcccccctttcatctcgaaaatacttccgagtatgaagcaactcgttggtccttccctgttggattttgtagtctctagtttcgaagtagcgtctcctactacttctttcaggatgagcagtaggtccctttccccttgcaaggtcttgaggcctggtttcttgagaacgtcaaggaggacttggtggaggagtcttgttagttctctcgttgttacgaggtcgttcagcatcgagtggagggcccatttgttggtaccctcgagcttgagtcttctcgggctcttgattgaatgtaccttccctctgagaggtctccatgcctagtgttttcctagtgcctgctcggttatcaagtgtaacagtgtcgtttcaagcattaagggttttgccttggacactagttcccacgtgaccagctggtcgatggggcttctctctcaccaacttggaaaaacctcttcgggaagtagtttcgtgataaacttctctaatttgttgagacaggttagctctctgttgttcccacttaacgtgttggctttcaacattcttttaattttccacaaaccagtgtttaaactaggggtgttcgcggtgcgagtggtgctgtttttgactattttttcaaaccaacccgcacatgcggtttttcaaatttcccaaaccgcaccgcaccgcaaaattaaaaacccgcaaaaaccgcaccgcaaaaaatagtgcggtgcggttcaatttttgcggtttatgcggtttggactatnnnnnnnnnnnnnnactatcacaaatacaacaaactttgagcaaaacttgtcaaaataccataaggcttgaaaa

SEQ ID NO: 141631 - DNA, 582 bp, Cannabis sativa
cgagataagcacctcgcttactagctctcgagccaaccagactgtcacacttagtttgtacatcatacactaagggcttttgtagtcgatatgtgtcgctttcgtcttcctagatataaagtacttgatgccttgctattcactatcagtgacatatggtttctcgctaatatactaagcaacagtttgtatattttttttcctcgcataaaactttacagtcagcaggttgcgagtatactctaatacttacgtaattaatgacttattccataaaaagcgattgcatcgatccatattccttttgtcttgacacatgtcccccactgagatggtagccgaattttgggtataataattgcccctaaaaagttcttttttagtaaaaagtgctttttattaattatagagggcatttttgtcataatccctttttggaaagatgcgtcctttgattctagcagttgtacggtttcgagggtgattatgaatcatctcttcatattctgtcctactcccaaccgttagatttcctaatctttggccttcttgtcactggactttgtgtataaaagggcggct

SEQ ID NO: 141632 - DNA, 554 bp, Cannabis sativa
ttctgtttctgcaaagattttgtcattcattttcatctcaaaccccaaaactctctgaaacgtcattcattttcatctcaaaccaccccatttcgccaaatgtgtaaaactcaccatttctagacccaaatccaaaccctagaatgcggaaactcagtttagggagggagatttgtttagttttcgagttccctcacagatggccaaacactctgttggttgggtcgcctcgcagaagcgatggcttctggcattccttgtcatgctttcggtctctaccttgattgccttctttatcagagccgccttcgatacttgcgatcggaaccttgatgtcgtcgatatttaatctttcgattcgttggcattttgcgttttatctttatgggtttttcattttatgattttgttcttaggaaaggtgacgactttcgtatttatatatatatatttatatatgggttactgttcttataggaggacctttattgctaatggagttagcatttctgttaagaagtggtggtgctccggttgaacttcatggctggttg

SEQ ID NO: 141633 - DNA, 1061 bp, Cannabis sativa
  modified_base (396)..(396): a, c, t, g, unknown or other
  modified_base (813)..(831): a, c, t, g, unknown or other
  modified_base (997)..(1026): a, c, t, g, unknown or other
taaattataagattagaaaataatatgaaaaatatctagttggttatgtcatatcatttatcttattaaatattgaatttaatttgataaaataatcttaataaaacctagaaattttaaatataattaaaattagaaatcctgaaaaagatattttagattattttaaaaaccctaaagttttaaaaattattgattatttaattgataatttaattatataattattaaatatctcaattcacatttgttacatatttgtttgtttatttaattgtttaattcaaaaaattttaacaaacatattatttatttgatttaaattgctaggattaacgtgttgataaatccaataatctaattttaatcatagtccaattgtcaatagatcaaatnaataatttgtaacaagtaattttgtaatttctttcatctggaataaacctagtaacatgatagggcccatccaaattatttatatatgtcagtctatatgtttgtaattggatttagatgtatgtaggaatcctatttatttttggatatttaaatggactaggttgctaaaaataaaatatcaccttgataaatttatttaggcgtaattagaatttgacttattcaattagtaataattatttaattaaaggttaaattcctcttttttgggccttgtgtgagagttagggggccaatatagtgggtacgatatactgaactcaaccctccctcacatgaatcaccccaactctgaagaccaatttgtcttttttaaataattgtattaagctaattatattagtttaacctaannnnnnnnnnnnnnnnnnntaattaattttaaaataaataaaaattatttttcattagattattttgaaattaatttagaaaaacacacttactataaattaaataaattctagatagaaatttctagtaactaatatatatattttattaatatttttttttaagtagaaaaatatatttaagnnnnnnnnnnnnnnnnnnnnnnnnnnnnnnagaatatttttcttagatattaaactagaattaat

SEQ ID NO: 141634 - DNA, 627 bp, Cannabis sativa
ataacatctcacttgcccaatgctctttcacttcatcaatttcttcttctgtatactttgcatcacttaactacaaaatttaaagataaataatatattaactaaagttatcatcatattcattcttaataataataataatgtatgacatgttatatagtttgtatgttatgtacctcggccaaaaagtgtttccgattcgaagcttgaattaaatctttcatcatcttcattacataatatccacattcggtgtcttccggttgatgtggacattaaagatttttttttaaaattaataaagatcttaataaaatataactgaaatttaaaataaagaatgtattgatttggtaattaaagcatcctgcatattgatttatgaattaactaaaattaaaaaaaaaaaagtagcttctctacaaagtatagatgacaaataaaccaattgtgtcacctgatcggtccaatcatgaaatacaagcatcgtgcatatttgtttgtatatgcgcgcccacacatacacacacatgtgcaatagaaaatgatgaaccataatgttaggcctcaatatattctcacacaacaaatcagttagagagttagtacagtttaaattcctatacg

SEQ ID NO: 141635 - DNA, 906 bp, Cannabis sativa
cgtcggaggaaaatacaagcaatggaaacccctaacaaactttatgcatgtgattatttatattgtgaataaaacgcaagcaaacatctgcatattcaagtttaaacttaaaaggacgtggcatttaaaagcaaagttggccatccaaccttgcaaatctgtctttacaaaagaaaggtgccaccaggggcagaccattgtctcggccaaagggccattttctaaaagagaaaagggagataaataaaagctaagtctacatgctgggagacttggacaaatcttcttcttcttcttcctcgacctcgccatgttgttcctttatcctggtctgctcgcaaagagctaaagtctcctcttccttctcctccaagaagttggtgtccatattagggttccaaatccaggcccgatatacagtgcaaaaaccaactttgtcgcatcattctacggtcttgatttctttctcagcaagcatcttctcaaactcatcggcttgggctttgatggttttctcggcctcttcttttgccttcttagcttcctccttcgccttctcggattcctcttttgccttcgcggcttccttctttgccttctcgacttcctcctttgctttccttcttgcttgaggcgggtattttcctgttgagagtcatcccagtgcttactcacaaccttgcattgtgataataacttctggacctcactctccaagtattcaagccgcttagagagtaatcaattagaagcaaaagaagcaaaataagcctggagaattgcaaacagatgaaaatgaaagaggtacaaaaagaattatatatttataataacaaagccaacgtaccatgaagtgacagtccaagctccttgaaagcatctcttttggactcctaagattgagaa

SEQ ID NO: 141636 - DNA, 735 bp, Cannabis sativa
tatatatattctctcaattttcacactttaagaatagcctaaggctcaaaaagggtaactaggataaaaattacaaggattgtttgaaaggcacaatcgatctaaaaaaaatacctaaatcactttcctagtcattgttgggttattttttgtattaaatttaggttaactttagcatatttttttatttagtttaaatcatgtttagagcattttcacactttttatcttttaattttgcagatttaaaatagatgaagagttggaaaatgtcaatagaaaaagatataatatcgcataaaagatatcccggtggaaaaatatcaaattcaaatccaaaaaaagataaaatcaagtggaatatggattcataggagacacgggccgcggcatggctttagcatgccacgacccgcctacgtaaaaaatcaaaaggaagtatcccagaaggccacacgggtcgcgacatggctttagcatgccgttgcccgcctctatttctgcagcaaaaacatctcgttctggaggtttcccaaaatttaaatcccaattggaatttaaacatgtgcgttttatctatctttttaggccctcaatgcctatatgaagggaagaagagagttgatttcatcaagaaattcagatggaaaaaggagtacgaatttcagagaccaaagtcaatactggaggcattctacaaaggattttcaacattattttattctctatcttctt

SEQ ID NO: 141637 - DNA, 1138 bp, Cannabis sativa
  modified_base (734)..(734): a, c, t, g, unknown or other
tcgactccattttacacaatattaaaataagatcttgttgagcaacctccatgtctttaacatttatagtcctagaacaaatttgcctaaaaaagttgtacagtttagaaatggtggtcgatatagagttcgggagaaacttgcaaacaccaacataaagtaattgttgcattattacatggcagtcgtgtgattttaacccaataacatttgataattttttgtttactttctttttcaaattcgaacaaaagccatctagaaatttcatatctctaataaatttacaaaattggagcctatcattaggtttaagaacgtaaggagcatgcggtttctacaacttccccctctcatcttcataaatctacaaccattctctgactcataacttcttcaaatcgtgtcttgcattggtggtatccttggatttatcattgtccaaaattgtgcccaataaactgtcacaaatattcttctcaatatgcatgacatcaatattgtttttaaaatgtttgaacaccaatagtcaagctcgtagaagatgcttttttttcctccaattttgatttttcgccacttgcctatgcttcacaccaccaaatagctcatgatttctcgagagttggggtgggagtttgtttacttgttctaatacttcctcataagtgaaacgtctcggaggtcttctctcaatttttctgtcaaattgagtatcccttctcattcgatgnttatttggcaaaaatcttctatgacctacataagatgtcttaccaattactcgaattgaagagatatcttcattacaagtgggacaagctttgtatccctaaccactccaaccagacaaataactacgagctggaaaatcattaactgtccacagaagagatgcgcgtagcttgaacacagtgttggttcaactatctctcgtatctactctgttaacccacaagtccttcaactcatctactaagggtcttaaaaatacatctatgtctatacccggtgatttttttccaagaataagaatggccaacataaaattattatctttcatacataaccaaggtggaagattgtagttcgccaaaactacaggccacatactgtaagcttggctcatgttgccaaa

SEQ ID NO: 141638 - DNA, 742 bp, Cannabis sativa
ttttttcagattttaaaaggcaataagaagttccaatggaccaaaaaatgcgaggaggcttttcaagccttaaaaacacttttggggcaatccctaatcctatcaaagcccatgaccggcgaggtcctatccatttacctagcagtgtcagaatatgtgattagtttggtactaatacgcgaagatcaaggatgaaaatacctggtgtttaatgtcagtaaaaaattgctggatgccgagacccgctatcctcaaatggaaaaattggcgttctccctggtaatatcgtcaagaaagttgcgaccttatttccaagctcacagtattgaagttttaatgaactaccctttgaggcaagtcctagcaaaaccagagacgtcgggaagattgttgaaatgggcagtagagttaagccaattcgacatcaagtataaaccgaggactgcgatcaaggggcaagccttggcagattttatcctcgagttcgcaagcaccgaagtggcactcatagacgacaaggttgacactgctatgcccaatggagaagtatggaagttgtacgttgatggggcttcaaatagcgaaggttctggtggcggaatcctgctaatcagtcccagcaattttaaggtacacaccactttacgctttgaattttctacatctaacaatgaagccgaatatgagtctttaatcacaggattgaagcttgctctcaagatgagaatcgagtatctacagg

SEQ ID NO: 141639 - DNA, 565 bp, Cannabis sativa
cttgatgaagaaacaaatttcttggtaattttttttgtattttttttctctatttggttgattgatgaaactggtttcaattattttcagtgtatcattgttgtttcttgatgaaaaaactactttcttggcgatttttctagtgattttgctggcgacaataccaattctgacgacttttttgacaccagcaataactccggcgatttttccgacaacggcaactacttcggcgacttttccagcaccaacatcaaactccagaatagtcgtcggacttggcattttcaccagaaaaatcaccaagaatccagtttccaagaaaccggtttcttcatcaagaaaccaatttcttggtgacttttccagcgacaatgctaattttgatgactttttcagcgccggcagcaactccgacaacttttccggcaacgacggctactccgacgacttttccggtgccgacagtagattccggtgacttttccgacatgagtaacaacttcggtgatcactatattttttttttatttttttttttaaaaaaaataaatatgaagggaat

SEQ ID NO: 141640 - DNA, 685 bp, Cannabis sativa
gtagccacgccactactcagcaagtagcaggcattgagattccttataaggaagcagactacgatgggatctttacttgatatggagcaatcacctgttaggaaaatgagctacaagtgagcgcccgaaaggacaaactcaagatcgtaggcctataggtccaccacatgtagctaataggaccaaccacaactctatttgaagcaattcaaacaatgcaggaaaccaatctcctccatgggattctcttcacaagtctaatgaatctagatcacgccgtgacctttcaaaggaaaagggacatgctgttagacttaggggaagaccctcgaagatctactacaaaagtgaagagtatgagattcagagtgtgaagatcaatgaactactccacactaggaaatactttcataatgaatgaggttcttggcataggtactttgcccgaggtcctaacggccaacagtacaaatacttcccatgggtgcatggaaacaagttgaacttgagaaatcagtccaactctctccacacatgtttctctaaggaagactattttgaaggaaaaagtgttgacctcaaatttggccaactgatagcggagtcgtatttaatgctgatgcttgccatgtattacataataagaacaataaagtaaattgacacatgattttatagaggtttg

SEQ ID NO: 141641 - DNA, 569 bp, Cannabis sativa
  modified_base (368)..(369): a, c, t, g, unknown or other
ttaccttttttaagtaaaaatcatggttttaaagaataattattaattaccactaattagtatgagtgagtattattaaaaaaaaaaaaagagtttttagacttggtttttctatttaattaaaaatattttatttttttaaatattatatgagatggatttgttcgaaaaaaaaaatattaggcacaaaaataaaaaaaaaaattaaattttacttaaatatttttatataaacatattttgatacagtgtaaaaaataatttttttttaattaagtatagaaatatttctaatttttcttttgttattcgtcaatagatcaaaatatttttaattaatgaaaattttttaatcacaacataaattnnttgtgactaaatgtgactttaagtcacaacaaaatattacttgtgacaaaacataatatttagatataaatcgtcgctaatttagttttagtcacaataaatattgttgtgattaaaaatatatttagccacaataaattataattaactaatatatttagttataaattttttagtcacaatataaaaataataattta

SEQ ID NO: 141642 - DNA, 681 bp, Cannabis sativa
tctaagatcctgctaaaataatatccaaaaggttagatatgttgaattaagcttattttgagggttgttttgtttgttgagaaagctttgagttttagaactcaagcttggctctttaatggtgatttttgattctaagttgggtcagctgttttgttgcttggaatatgtctattggggtataatatgcaggtttggaaggtttgtactcgaattgattaggttttcaaaaaatttaggttacctggtgtaaaactggtgaacaggattagaaaccggtttcctacatttttcatgttttcgattcatgttagtttcagagctttggttggttaattccttattagtttagggtatttggatgttaactttccataggtagattttttgttcaaaacctaagtcccggttgtgattaagtgtgtcacttatccatgttatgaacaatgttatttaggagcctataattcactgagcagttgttccactcaggtgggctagcacacctgaattcagaaacaaggtaagattagtataatgtcatgcatatgttattacatttttagcatacatgttgtttatccctgttagagtacattgataggagtaataatatacatagagttgtattgaatactgataaatgtatgctggctaaaataatgatcgatgttgtcacat

SEQ ID NO: 141643 - DNA, 673 bp, Cannabis sativa
tccaccatcttgcttggatgccctaggttcttagtcttagccatgaatttttgaaagaagaatgacaaacaaagaacaagaacacaaagaagatggatcgggtaggtaatgagaataaatgacaaagaaaattagtttaaataaacatggtagagtggagcatataaggaaaccaatttcaaatttgaaaaaccaccagcccacgaacaagcaataaccgccccactctttttcaaaaaatattttttaaaaaaatagaaggaaactagaatgaccaagatactttccaaaaatagaaaatttaagaaaatccttcaatatcaaggacaaattacaatgaataagatatcaacctttgaaatgtaacttataaaaaaaattaatttagagtaaatgttgatacttacaaaaaaaaaaagcacaaaattttcttagcccaccaaccaagtcaccaatgcctccctctcttttttttttattttttttatttttgaaaatctaaaataaatacaaaataaaatatgcacaataaatataatgtattctgaagcaagcaactaatcaaagttcataaccaatgacaaatatacatgttatgctttcaaaagataataactaattagtatctcaagaacaagccatacttagcagatgttaaggaaaaagatatgca

SEQ ID NO: 141644 - DNA, 668 bp, Cannabis sativa
gatccaagaccgagatcctaatatagacctgaggctgcgaccatacccatagtcagtgtttttgaatccaggacccggaccaagatccgcacccagacgcggaccaaaactgggatctagacctgcttccagacaaagaatctatttagcattgggataggaacccagacttgggactgtaagaggacccaaactcaaaccaaaatccatactaggacttggacctggactgggatctctgacctgggacataaaccacgactgcaaccgagaccaagactgggacctaaccccaaacctagactcaaaaatcgagatcaaacccaggaccaaagaaccaaactcggacttgggacccaaaacccagactcagactagtactaagacccgaactcgaacttgaacccaaaccgagacctggactcgaatcgggacccaagacctgaacctaaagtggaacataacttagacctggatcgggacctaggacccgaacattgatgggggacccagaaccagaaattgggcccccaaactgggaccagaacttaaatcgagatttgggacccgacccagacccagacccaaacctgaacctaagacccacctcaagacttgggattcgggactagatgcttggacttgacccgtaccccatgagttgaaac

SEQ ID NO: 141645 - DNA, 614 bp, Cannabis sativa
  modified_base (179)..(179): a, c, t, g, unknown or other
  modified_base (544)..(572): a, c, t, g, unknown or other
gtcgccaccattatggtgatctattctaaaataaacacttacaaaaaaaaaaatacttatctttcgagattctacggcgttaaattgctaattaacgttcctccattagaggggattactcactaaaataattaattatgtaaaaccaacaatagagatcgaatgtctcttgattaaanctcattatttaaaaatatatattttatttaatcatttattttattctatattttaataatgaaaataaaaattaaagttggttaattgtaaaaaaaatttaaaaaaaaaattccaactttaactaaattgtcaattatttaattaaaaaaaaaatcaaaattaaataaataattaaaatataataaaataaaatttgaaaatttctaatttaagttgttatagataaatctaaaatatccaacttaaatatttttcaaataacatttaattaaatatcaaaaattaagttgtaaccacctaatttaaaagatattctattttaaattgatctttatgaaaaaaaatcaacttaaaaaaatatctnnnnnnnnnnnnnnnnnnnnnnnnnnnnnttcctcaacttaattttgaaatttcaaaagatattcaaattt

SEQ ID NO: 141646 - DNA, 640 bp, Cannabis sativa
aaacataataacaaaaataatcatattcataattaaataacgaagcaaaagaataaagaagaagaagaaaagaactctaatgttgatagttgttactaattgcttcaagtctcttctctcttgctctttaatgtgttttccaatctcaaagttgcttgattctatctctctagtcttctctcaatatgattagcatgtttctttatataggtcaacaaagatagatcaatcctcttagaattaggatttatttaaaagaataataagtgttgcgctttagcacccataccttgcgctatagcgcccaagaggaaaaatcctaaatccgtgctaaaattatcctcctttttcgtaaaaaaatctttttttttagccgggcgctacggtgcagacacctgacgctatagcgcacaacaccaaatttttctacttcgaccttgcgtagtaaatgatacataacttttgtgtccggtctccaaatgagatcatttcacatgttttggaaagcttggaacgagctccatcattttgggtttcataaattcttcgagaaaatgataaaatcattgtcaaaaatgggctcaaagatcgcaatccatcacaaaatgtcttttcggcacaaacctacacacttggagaa

SEQ ID NO: 141647 - DNA, 692 bp, Cannabis sativa
tgtaatcatcaataatactcataaagtagtgtgctccacctttggttggaatcctagatggcccccaaaggtcaaaatggacataagctaacctttatgtagttgtgtgttctgccttgttgaacttaaatctacaagcctttcccaaaacacattcaccacagaattcaagtctttttatcagcttctccttgaacaatcctttcctattcatttcctcaagtcctctctgacttacatgccccaatctgaggggccatagccttgcttgactgtgtttagttgagtccataacaggtgctgcactacctgatattgtcttcccatccaagaaataaaatccattactcaaccttcctctcaacacggttttcgtgccttgtgtaattttcattacaccatcctcaattttgacaacataccccaatttatcaaacataacagagagagaaattttcttttgagattcgaaacatacctgacctgctgcaaggtcaacgtgacttcatcatgattctttaagaagattgttccctcaccttttatctcacgcgctttgttgttccaaagaagaacggtgcccccatgaatctttgaaagagtcctaaacagtcctttgattggtgtcatatgaaatgaacaccctaaatctagaatccaatctccacctgaatctgatctagacatcacaa

SEQ ID NO: 141648 - DNA, 1076 bp, Cannabis sativa
  modified_base (929)..(932): a, c, t, g, unknown or other
  modified_base (1016)..(1018): a, c, t, g, unknown or other
cttcttgaggacccagattatacaatctgaatatttgttttttctttctatgtgttataatattttattttatctttatatttttattttttacatttttttctatgtttgttattgttaccattatcaggttatcttagctctcgtcctgtgcatatcatcaattaggtgtactcttttccctatcttcttcatctcatattttgttacattgaggacactgtctaatttttagttgggggtggtcagctctgctgagcgttcatttggagaattttaattatcttgttgaatttttaagtcaaattttttcaaaattatccgagcatgattgtaaaattacggtttgagtcaaatttttgctatgttttgttaccaagttgtattttcagagttattttatgcacttccaaacttgtaaaaaaattgttgttaacacatatagttgagaaaaataatttgagtgtaaaacttttcaattttttgtgagttgtgagagttgagaaaataactttttgaatttttattgttcatttgagttggcaaagttgaacttttagaatttcgaacatgacatttactagagggattaatttcttttgtaataaagaacctttattttttatttttttttatttctttgtgatcttattttatttctttgtatttttattccttcatatatgttgtctcatgtaaaaaaaattaaaaaaaagtaaataaaagagaaaaaaaaaatcataaaaaaaatatttatagaacaagagcaacatcatcttatttcaattttcaagtagtgtgcatcttttctaaataaaaaaaaaatatatatttatataataaaaaaaaaggtgagacaactagagtaatattattttctctctaaaaaaagtgtttcaatttagtattttattcaaaaaaaaaaaaannnnagagagagagagagagaaatatcatatttatctataaaaaaataaagaaatatatatacatatatgggtgactattcaatggtnnnatttttattgtaactatatggttacatttttttttaacctgcaatagcaggttactaa

SEQ ID NO: 141649 - DNA, 740 bp, Cannabis sativa
tctaaggtaagctttagcaacttatcctcttaaaattttaagtgtaaagttaagtttgaacatgttattttggggaattgtttctgtatgtgttggggatgttttaggatgttttgttaagttattttgagttattattgggtggttttgtggctaatgtggattttgagctaggtttgacttttaaagctcaaacttagctcaacaatagtgaatttagattcagggccttgatgatatttttactggttgaattatgttatttatgtcttgattgggtgttttggagctttgtacgaagtttggggtagttttctaggtagaaaacctagaaaaacaacctgccatttttaggaacttttcctagtcttatttttttttttttgtgtgatttctcgatatttagggtattttcatgccatttatcattaggaaaacttttagttttgagtttaaagtccctaaatgtgatttagcgggtcacttccagttttacgtaaattgttacttaggatcttaaattgtcgaacaacaatttccactcagggttaccgtcatacttgcattcggaattaaggtaagattagtataatagttgcatatatgaatacatgtttagtgtgcatgttattgggatttatacgctaaaagaaagtaattaaaggaaaatatattaatgaatatatgaaatacaattataagataaatgatacattaattataatagtataattattaaa

SEQ ID NO: 141650 - DNA, 1013 bp, Cannabis sativa
gggtcccgtgacacatagtatgtactcagcttacctttggtgtaccagaatcactatcctcctaacgaactcactaaacccagtacagctacggttcaactgagtggcattcagccgttggtagtactcacactgtcactggcggtgtttatgggtatcgtgacaaatagtaagtactcaggttccctttgttgtaccggagtcacgatcctcctaacgaactcactaagcccaatcgggctagtgttcaatgagcggcactcaaccgttgctagtactcacactgtcactggcggtgtttatgggtcccgtgactcatagtacatactcaggttacctttggtgtaccggagtcactatcctcctaacgaactcactgaacccaatccggctagggttctactgagcggcagtcaaccgttgatagtattgaccctctcactggcggtttttatgggtcccgtgacacatagtaagtactcaggttacgtatgtgtacccgagtcactatgctcctaacgaactcaccaaacccagtcgggctagggttcagtgagcggcactgaaccgttggtagtactcacactatcattggcagtgtttatgggtcccgtgacatatagtatgtactcagcttacctttggtgtaccagagtcactaccctcctaacgaactcactgaacccagtccagctagggttctactgagcggcagtcaaccgttggtagtactcacactgtcacttgcggtgtttatgggctgtgacacatagtaagtactcaggttaccttttgtgtaccggagtcactatcctcctaacgaactcactaaacccagtcaggctagtgttgagtgagcggcactcaaccgttggtagtactcacactgtcactggcggcgtttatgggccccgtgacacgtagtacgtactcaggttacaattggtgtaccggagtcactatcctcctaacgaactcactgaacccatttcggctagggttctactgagcgg

SEQ ID NO: 141651 - DNA, 909 bp, Cannabis sativa
  modified_base (271)..(274): a, c, t, g, unknown or other
  modified_base (614)..(617): a, c, t, g, unknown or other
taaattctcaataattaccctaagtaagatcataatcttacttcattaccaacataattacatatttaataaaatatgcctatttaaatattatttcttttccgggatattacatatagtatatgtattttaacagcggttttataacttgggatcccgacttatgacgttttataaatataatataataactttaaatacaaattagtaaatttttaaatatcgacattacatccaaattcagaaacaaggtaagattagtataatgatnnnnatatgtgattacatgtttagcgtgcatgtttattaagcatgttaaattacattgataatggtatcaatatatgtagagttgtattggataccgataaatgtatgtttggctcaagtactgattggtgttataacatcggtacgactagagtgccaagtataggctgatattatggtcaatagtactgtcgtatgaacgttctagacttagtaccacgtaggacgcggggataggattatggctgggtgtataagagcctaattgtaatgcgggttatatttatgattatgattatactttttgtaacactctaactagcataggcgtgttagcgtgattnnnnacaactgtgcagctcgttgctaatcaacgaggctattgaaaatcgtgattaattaaaatttgcttatttaattaaaaaacttaaagtattacataaaagtattacatatataatattttcgggatcttgttttcgggatcttgttttcgggatcttgtttacaaaatactttataaaagtttgctattcacatataaaaaagtttgtcgcccaacgactatacagcaaaagcctcaatgtccccaaagatcgtacactccaggccttaccgcttcgacatgtacaatcttca

SEQ ID NO: 141652 - DNA, 910 bp, Cannabis sativa
cgcttgttggagcagctagtagctggtttaacaagtttactcatcattcaataacttcttgggagcagttgtccaaggatttcaagaagcaatttcaggatgctaaggatcggtgacccgaagcggcctcactaaccaatataaagcaacagcccgacgagacacttaaggcatacttaagtcattttagcacggctatagctaaggttagaaattatttggatgacatcacgcaacttacaacccttttggtggggatctctactgatccattgaccgtaggggccgagttgtgggatgactttcaaggacgtcctatgagaagcaacactgagttcaacgaaagagctcaggtgttcgttcggaaggaaaaggcccaataggaaatgaatctattgaaaacaagctctggaggcaaacccagcaatgtttcaacaggaactgtttccactagaattgataactcgcgggcttctggttcgaaaagaaaggagagagttaaggaaccgtcgaaggatgaaaagaaacagaagaagcatgacaaatacgtgccagtgtatactatttataccgagcttaatgaaactcaagagaatatttacctcgcacatgagcagaaggtggcctttggcaaacccgagcctatgaggaattagagaagcaaaaaagatcctaacaaatattgtaaattccataaggatattgggcatacgaacgacgaatatcaccaattgaaagatgagatagaaagtctcgtcgtttatggccattttaaacagtacatgaaaagacaaggctagggaaacaactagcccagtctgcctaataacccaaacaaccaggggttacaacctattcctgttgaaggagaggacatcctggttacttcgggaggaccacatatcgtagg

SEQ ID NO: 141653 - DNA, 503 bp, Cannabis sativa
aaaaaaaaactctctctttctctgttcaaaaacaaaatctctcttcctttcgtgtaaacctaggtccggcgccacccctagccgagggtttcccagctgctctgctaccatggccgaccgacatttacgatgatctgaagcccaaacggttcaggtatttgggatcgtcgccccttaaaaccaatcccaggtactctttttttcctcctcctctgcttcttattctttgagatcaacgatctctttcttttgttcttctattgagatcgtcgatctcgatctcatcctcttcctcttattttttttttcttttcattttttatcacagatctatgggagtacgatgtttgcatcaaccggttttgggtttgtaacaacggtggcggctgggggttcacatcgacggtgacggtgacggtggttcgcatcggctaggttttcgtcaatgtttgcatcagccgagttgtttttgtcttttattttagtttctggtttagtaaatg

SEQ ID NO: 141654 - DNA, 523 bp, Cannabis sativa
aatagcaacactgctccgcctttgcatttttgcttgattaaagcctataaatgtagcagtcatttttagttttgaaaaagttgaaggcagtgaaaaatttagacaataaaatcaagcagtttaaagaaaataatatgtacctcttttcatgcttttgaacctctgatgctaggacaattaacggatcatgtacataatcgtgattaagtgcaacccactgctgcatttgcgctaacccagcaaatgtgtttttcttagaaactttaaaaataaaatatagaaacttttattgaagtttttaggaaaatgacacaaaatatcaaataacaacacataagtcgctcatcccctgttgatcgtcatcatgacgagctgctccgagttcgagtacttccaccgatacggcgtcgtttcggttgctgctatgcgagtcgccactgagttggatatgtagctcagccgcgttgatttctggctcggagaaaattgacgtagaagagagcaacgacgaggaagaagaaga

SEQ ID NO: 141655 - DNA, 787 bp, Cannabis sativa
tgtagggagatattttaagagaacactaacgagtgttagagtatggaaaaaacctagtcaaattaaccctgaaaagaagaatatttttaatttttagataacgtggccattttgaaaaaaatttaatgcgaaaaaaaatcttcatattcacgtcttagtagtacgaattcattgtgactagtggtgaaaaatattctgagatggcttcgggccacatttcacaaaggggtaccactatcaaaaatgtaagattttttactatttcgattaaactgattgttagtacttgaaaactaattttctctcaatgtgtctaatagaaaagtaatgcacaatggtcttggctttgtccccttgaaattattgattttttaatataagtagggtaagattttaagagaatactatcgagaataagagtaaaaaaaacttgttaaaatttatcctaaaaagaagaatattttcaatttttgaattagagagctattttgaccaaatttaacgtgaaacaaattttcatattcgtgtcttagtagtacgaattcattgtgactaataggggaaaatattctgagttgggtctgggccacatttcacaaaggggtaccactatcaaaattgtgagattttgactatttcaattaaaatcaatgttagtgcttgaaaactactttttctctaacgtgttcaatatgaaagtgatgcacaatggtcttggcttcattcctatgaaatttcaagattttttaagatgtgtagggtgagattttaagagaacactaatgag

SEQ ID NO: 141656 - DNA, 515 bp, Cannabis sativa
  modified_base (43)..(46): a, c, t, g, unknown or other
attagagaattaattactttcaaaatacattttatatattatnnnnaaacatatattttaaaaaaataataatagcgatagatacattcataatatgtagttcggagagtatagttataataaagtgttcaaattatttgaagtatatatatatcattaatcatttttgaaatagaaggtttgtcgtgaaattaagatttaaatatatatctttatatattaaaagtatctatctaacgacaattgttggtctaacgttttgctattttttattctgttaactttaacggagaccatcacttcttttaattaatgctatttaaactaaaatacatattgtgatttctatttcttctctaacaaaacaatattgcgatttttaatcccagtaattctccattcccacaagaaataaaaaactgttatatgtgattcttcatccccatttattgtgattcttctctcttctcacaaatccaaatttcaatccttgaagccccactggtccaatggtc

SEQ ID NO: 141657 - DNA, 691 bp, Cannabis sativa
ttggcgagggttttttcgtgggtaaggggctgctatggctgatgtgttcttcgtgttcaataagttgtgaaatgaggaagacgaagctgaggttctgatatataaccctatggcatcagttatttggtattaaccgacgccataggtgcacatgtgtcgaataacagctgcacctatgtcgtcggttaattccaaataaccgacgccatagggtcaataaaaaacccttaactttactccaacccccaactgatggcatagatataattaaattatatacctacggtttttaccaaaaaatgcctctaaatgttaatttcaaaccaggcgggtattttcacaccctttagcttcccttttataaagtgggttgaaaaaactgcctctaaagcccataattgtagtagtggtgtatcaattctaaaattacattcagagtttgagagagttttctttattttgtgaagaacttgagtccaacaagttcttagtattctattattttgttattttgtattgttttttttattgaaattgtgcaggttgaacaccttagatattgttcatcaagctttaggagaagtcttgttcgtgagtcacttttttcaggaggaaaagtgcaagtcagccactcttcgggagaaagattgcaagttagtcactctttgggaggaagattgcaagtgagtca

SEQ ID NO: 141658 - DNA, 672 bp, Cannabis sativa
  modified_base (529)..(530): a, c, t, g, unknown or other
atgtgatcaaactagccatccatctcattttctgttgtcgccgagcaaaattacaaaaattgcataattcacatataggacaaataattataactctccagaattgagaaattataacactaatactcaataataataatggggtccacaaataattaaattcataaataattataaaaataacagatattagtgttaattgtctttactaattcaaattactaaagcgatcattacagctccggtggtgtttggggcctcttgtctgcttccgtcacggtcatctttcccttgtctgataaaaaatctcgcaattgatccttgcgtaagagtccagccacttcataccttaatgttatgcactctggagtggtatgtccatggtcattatgaaattcacaccactttgtcatctcgcgcattactgctcgttttttaatcttttctggccacttgacttggtttcccattcccttcattactgcaaatacttcgacagggctgatgttcaggttgtattcaggaattnntcccttgtctgattccctcatccgtcgaggtagtgttgtcttggcaatgtaatcccttggtctgtgtgattgggtggagttcttgctatctctatatgaccgtgattttttggttggataaggttctgaataatggtaggac

SEQ ID NO: 141659 - DNA, 789 bp, Cannabis sativa
attcttatattctcccacttggtcagcatttagactaaaacattcaaacccaaacgttcctcattatagacataaatataaatacatacgtccaagagtgatagagggatacagagtagacaccggccgccgccgccgtcctcagccggatccgagtgagtgaaagagaagaaccaattctgagtaagaagaattcaatttatatatacagagaagaaaacttacctatgtagtcatctaacgccgccgccgccgacgaagagaaccgtggagagagagattaggtctggtctacagtttgagagagagagatgatttttgggctgaaggagataatgtccagatcaaagattatcaggcaccacatgatcgtttctgatattctgaaaatgtcgtcacgaacattttttagataagcattgattgatcattgaattctttcatatacaaggaatcatatacaatactaccacactaatcttgaattttcttgtcttaattattattattattttgttttgtttcctttcgtcattaatgtctcaaaattgtttggtaaaattagagatgaaaattgagcggttaatgtacggcgaatgcaatccccaccccatctccgctacctatttatacccccatccccgccccatccccgtctaataaccaacggattcggggtaggggaatactcatcggttatgagaaattcatcgggtatccattaaggtaaaatgaaaaaaaattaatttaaaataattaaaaaaaaaataaattaaacaaatattctca

SEQ ID NO: 141660 - DNA, 506 bp, Cannabis sativa
accttcattagtgacgcgcgttgaagtgtcactaaagagttttacaattacttaatgtgtgtcactaaaacccatttttctagtagtgtaggtcctgtttggttgggagaaataaaaatataggaatgagaatagaaatggaatggaataaaatttaaaatggattaaaaattgataaaaaaattattaatttttttctcatcatgtattagatgttagactataatatagtatatgacatacagcatacatgtaaacgatatgtaatgcggaaataaactataaccatatcgtaaacatatgcaatgaaagatcgaaatacctccagcccttgatttttaagcttcaatcccagctatagcttcggtattggagttcggacttcctccctctctcaactctctttagatgaaatttgctaaataaacagaatgagtgagaagttcgggcaccgagaccctatatttataggtgaagtactccatcagtatctgcgccacattaat

SEQ ID NO: 141661 - DNA, 1007 bp, Cannabis sativa
tttaattcctacaagaaaaacataaattgaattaaaattaaatattttcatttataaaatatattacaataatttcatgaaaatatcaattaaaactcaacttattttataatttaaataaaataaaagtgtatttttaaccattaatcactggggttgccaacaacggagtggctgacgcttacatggtaagatcattattgattgtaatataaactgtgattgattatttttctttagttattaaaacttggttataatgtttgtagattcttgaagccatgttgttcattcgggaaaactatcctgcgttggggaagaagaacaaaaaattgactgctgataatgctttcctaaaattagagaatggaaagtatgtagaaaaagagcgtgaacttgaagaaactattaaatctttgaagggtgagcttgaggaggtgaagaaagagttcattgatgagaagaaaaggacagaggaccttgcctccgaggcagaacaagttgcattgactgctgttatcaagactcgtggggaactaatgatcgagtactaggacgaaaagaatgaagattgggatgtggctggtgaaattgaaacttaccgtgcccacatgggtttggatgttgatggtgagaggattgagcaacttgaatattcttttattgaggaagcaacaactgagatacttgaccttggtactacgaatgaatgtgaagaaccccaggaaaatgctcagtttcgttttatattatgcttagtggttcatgtgtcttaaccttttaactttttttttttgtattgaatatcgacattgactcgaacatgtctccttttgtgatttatagttgtttgtggtgcctagcaaggttaatgactttcggaggaagcatttaccacttatgctctaaatgagagtttatatttcttttttattttatgctagaattgagtaactgatcaacatagaaattttaagaaatttggtattaaacaagttaaatttaga

SEQ ID NO: 141662 - DNA, 939 bp, Cannabis sativa
agtataaatgtacagtatttttgtaatttctaccgtatagcagtataaaagtaataaaatgcaaaaatacagtataccatgtaaaaatcccaaaataaattacattgaattaagaaaataaaacctcaaacatgcacttcaaatttaagattaattaaattatattaattataccagttatttcgccccacaataagtttgattgttaatgcatttcacagcttaattgtgagtttctttattcttaattttttttatatctagcaagaaattcttaaagcacattaccatcttttttgtctgcacttgacacttcgacttgactcgttttttaattgatgcatttagatcatattcatcttctattatgatattatgtataataatgcatgaagtcattattttatgtaagttttttttattccaaagacgtgtcggtccaataataattgcaaatttagattataatactctaaatgcgcgtcaatatttttctattttaaattttattggtttgtttaattttaattttaatgtatgtttaaattaataatgtttgtattgtgtaattttttttcttaaaaaatatataaaaatttaataattttatacttatactacaattagaaaaaataatttatgatattcaagttttaatttacacacaatatattaaactctatcttaatcttatgaataccaaaaaaaaaaaaaaatcttaatcttataaatacaaatctatctatatatacaaataggagatataacacggagacatgacactccaaaattacttcaaatatttttatttatttttttccttaattttttcattttctttaattttttattcaatttaattgataaaccaagtttaaaataggaaaattaccccttatagtattttttaactttttttaaaaaaattattgtttggat

SEQ ID NO: 141663 - DNA, 832 bp, Cannabis sativa
tgatgtctacaagttggggatggccttgtttgttatgggcgtcctcactagtaaggaggagaagactgacgttcctccttttgtcataagaatggttgacaacctaccattcttctacaagtacccgtggggaaagatttcgtacaacaagttgatggaaacttgtaaaaaagactacatagatgtgaagaataagatgcttaagaagattgaaaaggaagttagtcagaaggaggctaaatactcatcttacggttatactgcagtgttaaagtattgggcatacgaggccatcctggagctgtgcaacaagtatgttgttaagaagtcgcatcgctttttgagaatggtgaactaggagagtaagccaaaatgatactcgggaaggacgaagtcatacgattatttgctagaaatgtaagtttcttacgctttatatttatttcatgttcatttccatctattaatatatttgctttatttttcagttgacagtttactctatgttatgaacccgagaaaatgagattgagtttgtgagttgcatcactagcggtcaggcgcctttatttgttgacttagaggaacttgtgttgggtgatgatgggcaaccaacacaggatgctttgcgaagccaggccaaaaatcttgcctcgacatttggaagaacgagcagagatgcagcctgaatatttagagactctacaccacatccaccgtctccaccacgtgcaccgtcttcactactagatgagtctggtgttgcccatctgcagcatcagaggatcctcctctttgcccgtcagcatctattcccagcaccttagaggct

SEQ ID NO: 141664 - DNA, 1175 bp, Cannabis sativa
  modified_base (1138)..(1150): a, c, t, g, unknown or other
atcataattaaccttaatccaatccagtgggggtggaccaaccaaacacatcatcagagacagtggatgagaggatggataaaacataatctgcataacaataagtaatatggtcaatataatatttaatccaagacacattagtattgtatattttatcattacgagctctccaaatcgtatcaacaatgatagatgcatataagaagacctcattaacattgactcctttcgaattaagactcgacgaaaatttaacacaatcccatatcctcaccctagtatcattaatcggaatgaggccccataaggacaagctccatggacttcttttctctgccacaattagggtaagtagtatcttcaatagtcaattgttgcccaatgagctgttggggattgttttaccaggatatatatttactaccccatgtatgttatttaacatcttaaacatgaatttctaaaacaatagaatttaaacaaatataaattttaagaaaccttacattggttacagtgaaattaaatgactcattccactcggatctctaacccttgttccattctgtcccagagtattatcaagatctaagcccaaatatccttcaagtgttggattcttcacagtcttacacactatgattgagtactagagttgctatatgtgagtatgtactctatcactatatggctcaaaaatttgaagagaaagaaagagaaaaggattcaaaaaatagagtgagaagaaagaaggctcaaatttcactgaaaggctaatgattcatcttctatctgttttgagtctatcactatctatttataggaatccttctaggtttaggtttaaattatatggcattaaaaaattaataaataaatggctaaatagagcttaagtggtcggtcgtaggatgtgggccccactagttacaattttgttattttattcaacaatttatcatttttttttacaaataccatattttccaattttaatcttttaaatgtcaaaactatttatctaataattaaaattaattatcaaataaaattatcatttaatttatttatttttaagacttaatgaagtctcttaattaataaataaactctaaaacttcttttcttcacaatnnnnnnnnnnnnnagtgaaaatttataaataagacata

SEQ ID NO: 141665 - DNA, 575 bp, Cannabis sativa
  modified_base (317)..(320): a, c, t, g, unknown or other
ataaagagttgtatgccctagtgcgagctttagaaacatggcaacactatttgtggcccaaagaatttgtgattcacacagatcatgaatcccttaaacatttgaaggggcaatagaagctcaacacgagacatgcacgatgggttgagtacattgaaacatttccatatgtcattcggtataaacaaggtaaggagaatgtggttgacgacgccctttctcgcaggtatgccttaatctctactcttgatgctaaattacttggttttgaacatgattttggggagatttatggtgcttgtgaaaaatctggtgannnnaagttttataggcatgagggtttcttgtttagggagcataggttgtgtgtgcctaattgttctttacaatatttgttagttcgggaatcccatggaggagggcttatgagacattttggagctgctaaaaccttagttatattacaagaacggttcttttggccccacatgaaaagagatgttgagcgaatttgtggtagatgtgtaacttgtaagcaagctaaatcgagggtttagccaaatggtctttacaca

SEQ ID NO: 141666 - DNA, 641 bp, Cannabis sativa
ctcttacactcattagtgttatgtaaaaatctcaccctacacatctcaaaaaatcgtgaaatttcacagggacaaaatcaaaactattgtgcatcacttttctatttgacatgttgaaagaaaaagtagttttcatgccctaacaattattttaatggaaatagtgaaaatctaacatttctgatattggtacccctttgtgaaatgtggccccggtccatctcagaataatttttgtcagtagtcacaaggaattcgtactactaaaacgtgaatatgaagatttgtttcgagttaaattttattaaaatgcctgcctaattcaaaaattgaaattattaatttttccacggtaaattttaaaaagtttttttccttactcttacactcgttagtgttcagttaaaatctcaccctacacatctcggaaaaattttgtaattttgtatggactaaacaaagactgttgtggatcacttttctgtttaacacgttgagagagaaagtagttttcatgcactgacaattattttaattgaaaaaatgaaaatctcacattttcgatagtgataccctttgtgaaatgtggcccgaagccatcttagaattttttttggcactagtcacaataaattagtact

SEQ ID NO: 141667 - DNA, 672 bp, Cannabis sativa
aaacaattatatcgtagtgcagaacattttgaaaagttaatttggcatgagaccgagagagttaaagatggaaaactcagacatcctgcagattcccaaaaaagtaaagtacataaatcctgaattcaaatatgaaccaagacatatttgtctcggtctgtctgcaaatggagtaaatccacatagatctctaagtagtcgtcatagttcatggcatgtctttcttgttatgtacaatctttctccctagttaatagtgatgaaaaggaaatttaatatggtttatttaatgatatcaggcccgcaacaacctgaacataatatctatatgttcaagagtgtttgacaaatgtttgcattttctttaataagttatgcaggaagaaattagaaatggataaattagatgcattacatgaacatgtagtcaaaacattgtgcaaccttgaaaagttttttcatccatcttgtttcgacatcatgatacatttaatggttcatctagtgagagaagcaaggttgtgtgggtcagtttcggtgagatggatgtatccacttgaaagaaatatgaagctacttaaaagttatgtgcgtaaccactatcggccagaagcatgtatggttgagtgctacatatctgaagaggctgtggaattttgttcagagtacatg

SEQ ID NO: 141668 - DNA, 560 bp, Cannabis sativa
tatcaatatttattcttccttgatttattttgatatgttaccatttaaagtttggtctcttatatggtaatgtgtttttaatcttgaaagtttgtcttaaatgagatgtttttggaaatactattggtttttctagtttccttttatttttttaaaagaaaaaagggaaaggacagaattttatttttgcaagagtgggcagttttcttttgtggttgtgggctggtggttactcaaaattttgaaattggtttcctttttgctcatctctcccatgtttatttaaaccaattttttgacatttattctcaccacctacccgattctatttctttgtctctcttccttgtttgttgttcattgtcacattcagatcaccatggttagaacgaagaacctaggaaatcctaaaaaggtggttgaaacagatgcaaccccctcgaatactcctcctgctgcttcaaccgtgcctcctactgctgcaaaaataggagatttatcgcttcctcagcgtgaatctcagcccgagaagcccaaacgaattcctaaacaagtggctc

SEQ ID NO: 141669 - DNA, 552 bp, Cannabis sativa
  modified_base (514)..(514): a, c, t, g, unknown or other
aaaattattttccatcttagtagtaatttttcaataaatattacgaaaattattcaatttaagttgatcaaaaattaattaaaaaaattaattttcaacaaaaatttcattttctataaagatatatagcataattcgaaaatccaatgtatttaaaaatacattttcaaaattgcttagaaataaaataaaataaatcctgaaaaattattctaatgtatgtttgtcaaaaattaattaataaattaatttttaacagaaatataattttcctatttaattaaatttctaagaaaattatcaaatatttaagtatcttgaataaaattaacttaaatagtaattttctatttaatcaattatagctagaaaaatatttcaatcaaatagaaaataactatctagattttcactaactaattactttatattctaattaaaatataatatattttttccatttatcttaattaatcattaatgaaaaatttacatgatttaagttgatctaaanttaattaaaataattaatttccaactttaatctatttt

SEQ ID NO: 141670 - DNA, 582 bp, Cannabis sativa
ttaaaatatgtataatattaaaatatctaaccttaaaaagaaataatatataaatatgaaagaaattaataaattttttaaatctgaccataatttaaaaattgaattaatcaattttcaaatttaaacctcaaaatatcaaaaattaataataatgtattaaaaattaaatattattaatttagaatattgatatttaggtttaaatgataatttaattagatgttcgggtttgaaagttgaaaaatccgaaatttggaaaaaaatcccactaaaattgggttgggtgaggtggcggcccagaaggatgcacctgcagccaaacaggggctgctagtagctgtttatgctcgcgcagagagggatttacaggatccttagctgagaaaactcagcaggtgcagggtgagcctcgggcggacagcagggtcttggccgtgcgagcgagttcagacaaaaagttgtctgaagcccatgtgcctatggatccttcttgtccaaaaggtctgtgcgtgcgattgagcatgggcatcccaaaatttcaaaaattcataactccttcaatttttatcggaatcgagt

SEQ ID NO: 141671 - DNA, 1345 bp, Cannabis sativa
ataaaaataccgctctaaatcgcttggacacacaccaagctatctgtttccaacatcactctatcccacgaatgagttgcaatccaactcaaagcttttttaatgcctattatatatctcagcaatttcgggttgaacacagccaatcttccccttcatgaatgcttctatcatagtaccatgatgattctgagctacacaacccatgccaaagcgcccctcttgttcaaataaagctccatcaacattaactttgatcttgtttaagtcaagtgcaatgcaacactcaagatttcgccccccatcatgcagcggagacaacgaaagattcttccttccttgagcaaatttatagtgatcacgcatgtttctagctgatgcaataatatttgatgcagaccaactcttcttttgccaaacaaattcattccgcgcgcgccaaatagcccaattcaccacaaccacttcctccatttcaccttcgtgccctctgccgaagatccccaacagccagatgttgaatgttgcagccccagccccgatgtcgaccatgctgcgattccaagcagctttagcaaactcacactccacaaacacgtgttgaacgatttctgcatgagcgttacacagcggacagtcagcattgacgggaacatgacgtttttgaagctgaaaacaagttgggatcacacccgaagcagccctccataagaagttactgatcttaggaggtatttgtaacgaccaaatacgcttccaaaaatcagtattggcatcatggcaccaagcacctttagattcttgcaagaatttataagcaattttaaccgaataatttccacaagtctcaagtctccaattccaaccatcatttacggccgaatcactaagccgaatggacaaaataaggtcatgatcacgtgaaacaaacaagtctctcacaacatcctcatcccaagcgcgagtgtcaacttgaaagaggcagttgactgatttgttcacaagtgcagggtgccttgtaacgacatagctgttagaactatgtggaagccaaggatctgtaagaatggatatatttttcccattagcgattgttctttgagcacatgaatgtactagatctttagcttcaagaatacttcgtcagatgaaactaggatcatctcccaattcagtagaaaacaagttgccatgagcataatattttgccttatagagcctactaaccaaagagtcatcattaaccaacaaccgccaatattatttccccagtaaagctaaattaaagtctctcaagcttcggaaacccagtccttctgcatgtttatgacgacacaaccgctcc

SEQ ID NO: 141672 - DNA, 555 bp, Cannabis sativa
  modified_base (322)..(324): a, c, t, g, unknown or other
cggatactaaaacagatagagatgtatcggtgtatcccttttaaggggatgtattatagaatttcccaatagtatttattttctaaaacataattataataattctatttaatttttataaaatctaattaaacaacattctaaatacacatatattattcataaaaattaggtaaacacatcaaaacattaaaaaaagaatcaaccacaggatctataaatttgatgaatttttaagaagtaaattaaaaatatgatatggcaacatataaatagaaaaaatcaaaacatataattaataaaaaaaaaattaatatatatnnntatatatatatatatatgagtgcggatagtggcggtgtacgatttatatataattaataaaaacaaattaatatatatatacacgtatttttaaatactagttagaagttacgtcccgaggcacgtaaatattagttttatttagagtttagttcctcccagtcttctaagtgtgaatgtttttcctgtacctgtttggccataagccattacggtcccattataaccatc

SEQ ID NO: 141673 - DNA, 1022 bp, Cannabis sativa
tattattattattattaagtttaaatttattgttgttttgatgttatttagatgttattttcatgctacttttatgtagtttcttgttgttttcgtattgtttctatgaaaaacaaataaaaaaaataaacgtaaaaacgtaactttttttacaaaaaatagtatcttatgtaattatctttttatggatggaatttactcaatatcttgtttggaaggctttgcaccactttcaaaaataacattacccttgtgatattcatgttgatatttaccatattagtgcagggtttttcaattttgattctaattttgtgactaaatcccttacaatcaagagcaaaattacaaattttttggtttttaatattatttgtgcaataatataatttttttttctttttcaaaaaattattttatagaaaaaaattcaagaaaaaattaaaaaaaatatgggtaactagagtaatcagattggtaactagttactttataccttgtcatatattttaactttttcttttaaactctcatataaaataacttttttaaggaaaaagtaatatttttacaaatttataccttgaaaactataaaataaaaattcctctataattaagtagtgaaaaattaagtgattttttccttttaaaagaaaacaataaaaattaagtaaattaatggtatgaatattgttgtaataagcaagtaatgaattttggatcaaatacaaatcatgatgatatatgattgatagatagatagaagacttgattagttgataaagattgttaacatattcaacgacttgattagttgccaattattaagcctaaaaagagagagttgtttttacttttgatgtgtttggaagtaaataggtaattattaggtaaagtaattataagtgtggtaattacacatttagtaattacattatattttaaaatgcaaggtgtgtttagatatgaggtggtaattacatataaattcttaatatcttgtttggcaaaatagttagt

SEQ ID NO: 141674 - DNA, 520 bp, Cannabis sativa
agcaagagaaatgagttggaagctcaaatcttctctttgtaggttgccttcttctccttcttcttagtcttcttcttctcttctttctctttttctgtacttagatttttctctctgtaatttttcgtactagcctctttcaaagtgcagccaccatatatctgatgtccttcctcccttttttttgctccccaattagggtactaaagtttaccctaattggaaatccaagtcaaggtccacttgcccttcattttccacctattagttgagtcattggccacattttcgccaccttagctcttttttttttcattaatgccagctggactctttgccaaaatacacttactgggctgacaaattgctacgccatgattgctatagcaatgccagtcagcaataaggctttttctgctacttttcctccttgtcccaaacatttccaaatacctattcttgcaatttttctgcttaatacacataaaaacaacaacataagtctatttaacacttacta

SEQ ID NO: 141675 - DNA, 1328 bp, Cannabis sativa
  modified_base (53)..(53): a, c, t, g, unknown or other
  modified_base (327)..(328): a, c, t, g, unknown or other
  modified_base (781)..(781): a, c, t, g, unknown or other
ttctgttattaattgtagttgtaaatttcatgtaaaataagaataactttgantctcgcctaccgggacatcgttggtttcttattttaatcgaaattatcctttaatattttctcttagcattttcatttagaatttatctaagaactctttgttgtaactaaacctaagtcatcaaaagaccacaaccacattctatatatctatcgcattttcatcttgttcatagtgattttgaaaagattattttctgcaaacaaaaaatatgcctatatccacttgaaaataggatcatctatattcgcatatatggatgtacattcaggnntggatatgagttttcattatattctttagacaactactctagattttaccttatgcaaagaaatttgaaatgtttgagaaattttatgaatttctaacaatggtgaaaaactattaaggtaagtggttaacgatcttgcgaactgataggggtggaaaaatatttggatatgcaattcaaagatcattaagtttaaccttgaattgtattcaaacttacctccctagaaatttgatttgcatattgatgatagtgaaaggtttgtgatttgttactagcagttacctaagtccttctagggaaataccctaatgaaaggaaaatttcagaatgatggaatggttgtgtacttagtgtataccattactagattcatagatgtcctgatcgtgaccttaagaaaagctagaactgttaaacgaaggttttcatgtttgatagctattctaagtnattaggggtggaccatcccatggtcattagataagaaagtgtttgtttcaacaaataccactttttcaagaaaatgactaaatctaaaaacaaagtagcaaagtaaaggagatattttttttcttgattccaaattgttctatcatcttattctaaataggatggtctcacagcctctgttgtcttgacacaaccgaagaggacaataccattagtgttcttagacagaaagtcagggtaccttgtcgtagtaagatggtttcaaggaactcaccctcttatgacttggaagacacttgtgataaaatccattgttagtttaaataagtaatggattgtcagaataaagaactacgaagcaaagccaagagaactatagttaaaccatttatatggagtaaccaaaatttttctattacaatgacaagaaaagaaattttgataattaagtctaatcaatggacttaacaaaacttcctcttccaagtattataggtttaacattatctaaacatatggcttatggtatacctggttatttaattac

SEQ ID NO: 141676 - DNA, 922 bp, Cannabis sativa
tccactcccgggagaaagaaaaagccgcaggatccgcgaaaggtcggctcagatttccccaaagggaaaggtccgcagaggggcaaactccaaaaagaaagtcttagccctcgggatcgaggggaccgaaagagcatttccgtgcaacaagagcccgaagggagaggaagaaggggccacaagtaccctcccatcgatctgagaaattagattaatgggaaccatggtgatcttcgggatcacctggaccaaaagaagtacagacccgcgatctctacgggaacgttgaatgaaggaatcatggcagaacttgccatacttcgaaaggacatcgcccgagtctcctggagaaagaaaggcgacgactccgactctgattgtgaggaccgggagccatgtgccaaacacatcctggaagcagagctccttaaaaaaactttcagatgcccgaaatggcagcttacaccgggaactcggattcgagtgatcacctgtcatgacagtcatgagggtcaccattgacgccaaatgcttgtgcttcccgcttactctaagtggatccgcagaagaatggttcaagaagttggaaccgagatccgtggattgttggaataaattgcaaaccatctttcagagaatttgtcgccgcaaggaaggtcaatctggaggtcagcgccttgactaaaatcaagtagctgcctacggagacattgaaaaatttcataaagaggttcagggaagaaacctcaaaaaccaaaaaagtagatgacagacaacaacttgctattctccaagcaggcatccgcacggggactccattttggaaagagttatagcaagaaggagcttccaaccttcaagatttccagaaaagagtccagaaatatatcaacctggaagaggcccaaatagtggcgtatgg

SEQ ID NO: 141677 - DNA, 608 bp, Cannabis sativa
  modified_base (266)..(269): a, c, t, g, unknown or other
cgttgatcttgaaatcgagaagacctgtaggagaaatagaaggaacaagaggcaagaaagagtttcagcaactgttgaaacacctgaaatcattgctgataacactaatgctgctaataatggaggtaacaacggtaataatggaggtgccgttgaagatcaagcaaatagctgcagtttgagagattacattctcctaactcttacgggggttcagccttgcatcatgccgccccccgtagatgctaataactttgaaattaagnnnncaatactccaaatggtgcagtcttcagtccagtttagtggactcccttctgaagatctcaatctgcacttgtcaaacttcatggagttatgtcggactttcaaggttaacgaagttagtgatgatgccatctgtttgagactttttccattcttgctgagagagcgagccaagagttggttcatttcattgccctcgaattctatagcaacatggacagacttaacaacaaagtttctgtctaaattgtttcctccagcaaagtctgctaaactgcggggagaatcaacaacttttgtcagttagataatgaatctctccatgagtcttgagagaggtt

SEQ ID NO: 141678 - DNA, 680 bp, Cannabis sativa
gaaagagtgattttgatagtatatgttattcctatttcattagtttgatggattagtaaatgtttcttttatagtgatatgcatgtagctcattcatgagagtacgttaactggtgtgcttataaggctgtatgttagctagttcgcatgtgtagggagacgttttacgatctttatagagcttacatgtagttcatgtaatttatagaagacatatagtctgtatgaatgacatcagtttgttgatatattagatcatgtgtagggctacattcttaattattaaactacaaaatttagaattaggtagtctattgattgcattgaattggataatttcgatgatggaattcatataagaggggaacaattgtctagattgaaaatgtaaaagtaaatttcgaggacgaaatttcttctagtgggggatacttgtaatatccatttttttaaggaaaacttaagaattgaattccattttttttacttccatttattttatttcattttagtattttgaataatcatgatattgtcaactaagaatttttaatggcaaatgaattttgttttatagtgatgaatatttttttattaatagagatgaattacttggcatgtgcataatgcttagaagtaattagttgtgacaaaggaactatttattttgtgagtgttgt

SEQ ID NO: 141679 - DNA, 1419 bp, Cannabis sativa
tttccaaccatttaccaaacattaccttgtaagattcagccatagagttctcatcaagatctgactcatctgagtctgatccatctttttttccattgctatcggtaaaagtattattcaaacatatgaactttcctttttcctacagatatcttgacaaaacacttgttagagcaattttttctttttcaccctcactactttcaaagtcatcactccaagtaactttaaaaccttttttatttttctttaaggtattggcacattcagattgaatatgaccatacccttcacacttcttgcattgaataccctttttattgttagtgacaaaaggtttagaaagattgttacctaaattgttacctcttggattttttgaaaaaatctttttatttctaacagatttcatgtatttttgaagtttttttgtcaacaaggccatttcattatcattttcatcatcagaaatatcattttcagaaactttaaagcaatacctttgcttttctcactcaagatactttgcttattctttttcttgatttgttgatttaactcaaaagttcttaaataacccatgagttcatcaacctttattttgccaaaatcttttgtctcttctattgctagcaattttgtgtcaaacttgtcaggaagcacacgaacaattttttgaaccaagacagattcatctaatttttctcctaaggcaaagaactcattagaaataatggataagctctcataaaatttagacaaagttttagtttctgacattctcaattcatcaaatcttgtttgtaacatggtaaaacgtgatctttttacatcagcggtaccttcaaactgagtttgaaggatttcccacacgtcctttgcagattcacaagatgaaattaatttaataaagccttcaacaacaccattaaaaatggcatgtaaagccttattgttataactagataatttttcaacatcagtagtccaattgagttcaggtattaccttagtattacctttatcgccattttcagtaggttgtgaccaacctgtaagtatagcttttcaagccttctcatcttgtgacttgataaatgctctcatcatgaccttccaatggagcttccttctgcaaacaaagacatctcacacaaaacaaattaaacgacggaataataaaaaataatctatctcctcaagcaagaaagatctcactaagattttagtgaaccgctctgatactaattaaaattctattttttaatatacccagtttattatttaattaaatacttaattaaatgtggaataattaatatggtactaaaatagtttttctgtagctacagaagacaactctgtaactccagaataaactagaaaaacaaacaatgtagaaaagtaaaaacacacaag

SEQ ID NO: 141680 - DNA, 572 bp, Cannabis sativa
  modified_base (402)..(403): a, c, t, g, unknown or other
gcgacaacacttttatctggaggtctacccaaatagatgtgtcatcatgctgtgtattttcccagcaggagttattgctcggtgggaagctgcaggtgatgaccaagctaaatatcagtgggatgagggcatattagatttgattcgaaggggatgaagttcaatacttggccagtgggaagaataaggagagaatatatatggcactctacttcgatagtgcaaggcattgggtgacactagaggtagatctggatcattggttgttaaacatatttgactcgagcctcggatcgatttccccgaatgaattgaagagtcacttggaaatgtgggaaaaattactaccaactttgatgctgcagggtggcctattcgagactcatgacatgatcctcgtgnntcaacttaccgcctcagagagccaggttagaagtttcacttcaaaagtcatggaccgggacgttgttcgacatacaaagtcaaggtaacttaattacaattgatttttttgttatttaacttgaatttaatttgcatacttttatttatttactttttattgtctcata

SEQ ID NO: 141681 - DNA, 521 bp, Cannabis sativa
  modified_base (459)..(462): a, c, t, g, unknown or other
tttttggggttttgaaaaaaaaggtatagtttttttagggttttaattattggtttataaatcaaattttttgattttctaagcatagaaaatcaaatttcccttttattattttgttcaatattggtatattaccgggtagtgtaattacataccgtggtaatcttatagtaattacacactatatagtatatatagtattttaaaatataaagtatatttgaatataaagtgataattatttataaatttttaatgtcttttgttagtaaaataattaataattatataagaaattggagtttttttatttttacatttcaaaacaatttttttttggtatttttacgaaattctacatagaaacttttatagcaactaacggagtaatctaaatcgcaacaaaaatttgtatagcaactcacatagaaactactggagcaacccaaaccgtaaatnnnnaaaaaaaaaaaaagttgaaaaatagtatatggggtaattgttggattaaaatcctatgt

SEQ ID NO: 141682 - DNA, 563 bp, Cannabis sativa
ttcctacaggtaccaaattggtttgcaagcttcaaaaatccatctacggattacgccaatcttcaagacaatggtacaagaaattgactgccgcccttattcacgaaggatttcagcaatctcaagctgattacaccctctttaccaaaggcaaaaatgacaccttcatcgctcttctagtgtacgtcgatgatattgtcattaccggacccaaccttgctgttcttcaacaactacaagattctctccatgacaaattcaagctcaaagctcttggcacactacgatacttcctcggctttgaaattgctcgaactaaagagagcttattcctttctcaaaggaaatacactttgcaattacttgaggacactgggtacataggcagtaaacctgccaaagctccaatggatccacggcaaaaacttgatgatcaacaaggtgtactattggatgctccttccaactacagacaactcatcgggaaactcctttatctcactctgtcacggccggatatcacctacgctgtgaatgtcctcagccaattcatggcttctcct

SEQ ID NO: 141683 - DNA, 1127 bp, Cannabis sativa
  modified_base (540)..(544): a, c, t, g, unknown or other
  modified_base (1092)..(1095): a, c, t, g, unknown or other
atctttcatctcaaactcatcactgagtttccttttcagcttgtcaatctctgactttgctttgctaaagatcaatatatcatcaacatagagtagcaaacaagtttgattgttgaaatacacacatgagtcatacttgcttttagtgtatccaatattctgcatataagtgtcaaacctcaagttccattgcctaggtgtctgcttgaggccataaagagacttcttaagtaagcatacatcatctagattcccattgtcaaagcccccaggcagttgcatatagatttcctcttctaactcaccatgcaagaaagttgttcttacatccatctgttcagtctctaagtccatgcttgctgcctttgccatcatggttctaattgaagcttgcttaaccacttgagagaaaaatctcattataatcgatatcttcaatctgagtgaaacccttgacaactaaccttgccttaaatctggtaggctcattccatgaaccttatttgtgcttgaaaagccatttacatcctaccagcttgnnnnnctctggtttcttcacaacaatccaagtttcgttcttcctaagagattgcatctcttcttggatggcctgcagccatgctgcagcatctttacatgtcatagcttcttgaaagctagtgggttttgaacggtcaacctcttctgcaatcataagtgcatatgcaatgaattcagcataactaaaacgattagggacttttttctgtcttctttctatatcttttgctaattggtagctacttagttcctcctattttcattgtcttccctttctgttgccttagttccatctagaacatcattagttggtgttgtaggagcaacctgccccacctcaatatggacattctcatctaaaccagcttcactgtctttggaagtgctcttggttttcatggccatttcatcttccttgaaaactacatctatactaatcaaactcttcttaaatccaagttgtaaacatcacactctatatcccttaaccctttcagggtagcctagaaacatgcatctcaatgctctaggttgcaacttatcttgtctaannnncacaaatgtagtacatccaaacactttcaagt

SEQ ID NO: 141684 - DNA, 561 bp, Cannabis sativa
gacctagggcccttacttaaatttaggacccatacccggacctgaacttggacctggacctagacccaggactcgagacccaagatttgaccccaaacccaaaaccagaccagggatcaagacaaagaccaaggacatgaactaaaattgaagcagtatttggatctcgacctaggacccgagacctaggggttagagtcgacccatagtcggtatttgaatctaggactcggacccgaacctagacccaaacccaaaccttaactaggacccaaactggaccaggatccgaacacaaactcgaatcgagatccggacctaaatccaaacctgaacctagactcggtacccaaacccaaaattgaacccgaactcggacccaaacccagacctaggactcagacttagattgaagacccacacttggacccgaacctaaactcgggacctggaacttgaaccggttcttaggacccgaacggggtctaggtccgagtttgcttcgggtcctggtttgagtctaggtttgggttcaggtttgggtccaggtcccagatctag

SEQ ID NO: 141685 - DNA, 1377 bp, Cannabis sativa
  modified_base (67)..(67): a, c, t, g, unknown or other
  modified_base (127)..(140): a, c, t, g, unknown or other
  modified_base (351)..(353): a, c, t, g, unknown or other
  modified_base (900)..(910): a, c, t, g, unknown or other
cactattgatagattttatttaggggcctattcaattaagaacagttgttcatttaaggttaaattnctctcctttgggccttgtgtgagtgttatgggggcatttgtagtgggtacgacatactgnnnnnnnnnnnnnntcacatgaacaaccccaattatgaagacccatttgcattatttaaataactgtaataggttaattaaactagtttaacctaataaaattgataagcaacataattaattttgaaatatataaaattaattttttatcagattattttgatattaatttaagaaaaacacacttagtttaatgaaaattttcaagataaactatatgtattnnnctgtatttaattaaataaagaagtgataacttattagattcttcgagacacttaattatttaatatttcataaaaataaatttaagttgaaaatcagttattataattaattttggaccaacttaaatttgaatattttgaaattaataattaagtagaattttctagaaaattagttattcagatattctttaaatattttttttaagttgaaaatttgttaattttggatcaacttaaaatggaatattttttaaattaaggttattagtataagatacttaattcgttttttaattatatttttgaaaaataatttaagttgaaaattttgttattttagaacaacttaaattagatattttccatgtacttattttattatattataataattttcaaaattttacatattttatataaaagattttcaaaaattaaattaaagttgaaaattaattttggatcaactcaaattaagtaattttcattattaaaatatatagactaaaatcagtgacgaaataaaaatacattttaaataatnnnnnnnnnnnaagagacattcgatctccattattcacacctattaatgatgaatctgaagttccagaaagaaaatttgttgggaatttatttatctagagagaaatgggttcaattcattcttaatagtcttcctcctgagtataatggatttgttgtatcttatatggtcaacaattttactcacccgacgtggataagctagaagtagaattgcgtgcttacgaacggagtttgcctgtaaggaggccaccctccagttttgtagacttgagtaagaggaaaagaattaagtatggtgcttgtaacaatgctgcttcttcaagtacaaataatgaaacaattgatagtagtactcttcaatgttcaaattgtaatgagaagggacatcaggaggaactatatcctacacttctagacaattcgaacaaaggtaatgcttttgtttttgaatcatgtgttttagagaatgacaaat

SEQ ID NO: 141686 - DNA, 1175 bp, Cannabis sativa
ggcataaaacccaacagaaatatataatcactaaaattttaaaattctttattagtggagtttgaatatgttagatattcatccgtagtgaactaggttctgcgattaatcgaactgcggtcgaatgggtggaatatgcatgttagatgagtttgaatatcttaaaaattcatctgtagtgaagtaggttctgcgaatacatgtactgtgatcggatgggtgtatacttttgtattgttaatgttattttgttattattttattgttttatgtgtttattaattattttttcatgtttaaaattttcgagaacgtccaattacaaccgttatgctgttgaaattttgctagaattatgataaattttactaaaaatgcaatatatatatatatgtgtggtaattaatttaactaattatttactacacatagtcaacacaaataattgaataaatttcttttttttttttagaagttttgaaatggatagaaattggatgagtgcgaatagattatcggcggagtatagttaaggtgttaaccatttcttggactattattagaagtatgccaaaaatcctaaattagttctttgtccttgtcttaaatatggtaacatggagcatatatatagacattactaagataaatgagtatttttttaggaacggaatagaaaagagttataaggtttgggttcaccacggggaaaagaatagaatttcgggcgagggaatgtctaagtctaacaaggttaagggtgtaaatttgaactatgaggatgatcacattccagaaatgataggagatgtacaatttgaattaaatgtcgatctattgaaatttcaaagttttgtagaggatgccgagaagcttatttaccttaattgtaataggttactaaatcatcgacacttattagattatgcaatataaaagctaaacacgggcggagtgataagagttttaagaatttattagctttcttaatagagttattaccaaaaggtaatgtgccttcatctttctatgaggcgaagaagacactttcttccttaggcatgcaatatggaaaaaatacatgcatatcccaacgattgcatcctataccataagatgtttgtggatgcaatatcgtgtcccacttgtggtgagtctaggtggcaaaagaaaaa

SEQ ID NO: 141687 - DNA, 609 bp, Cannabis sativa
tttttaattttgtttttcaggttcgacaagaggtggaagatgcagtagccatgtgttatttcagggaacgattttcttgttgctttgatgatggtttcatgtctgtcggatattaggcattgatattcttgaacctcgaatgcttcttttattttttgaagaaccactcccatgatttatcgttctcataatcaactatgcagtatgaaagtggaaatatttttgattctgcatcttgtgtgttggtagtgagcaacgtacctccatacgcagcctataggaatgtcccgtccacaacgatgattggtttgcagtttggccaaccttttatagcagcattcaatgcaacaaatgcatatttaaaactatcatcatcttgtttctctatgtcaattattgttcctgaatttcaatcaaacagtattttaaagcaactgttactcaactatttagcaacacaaaaacaacgttttcagttcaacaaatatttttgaaaaaaaatattttctttacttggatttgttttttttgtagcatgtacaattatcttggcaagagattgtacgactctttagcatttccatgtagctgggtttgtgctcgctcttt

SEQ ID NO: 141688 - DNA, 1381 bp, Cannabis sativa
ggaatctccacatacttgggatactaggtaaaatagtacttagcacgtagagttaagcgcagtggtgctcatgtttggtattatgcttgtgattaagtaagaaaccgggattatggttattaccctaaaataagcggttatatggtctagagttatcaccctagtgattaaacgactttgaatgcaatgccatgttatatattttgagataaagaattatgcgggtaaggcataattaggttagactcggtgatcagaaccgagataaactaatctaaggccttattgtaaatagatgtgtgagagcaacacataggtttatgctaaatagatagtagatgcggtggcatcagtatttatttgaattgtgaatatatggtatactgctatttatactgtcttgctaggcttggctcacgggtgctctactatataggaaggggtaaatcaatttgtgatcagccatgggttcggggtcttggcggtggattgtacatgttcggaccatactagaccacgcaggttgggtctaccagctgatgttttttgtattctttgttttgtcgcttaggtcggcatgtaaaaatgacttgtaatattttgtgaaattttttttgggatccaaaaagttgagaaatcattttaaaatggtttgtaaagtttaaataattataaattatatttttattctgtaattaatttaaagtttaaattctgctcttatttccagtaatcccaaattagtgggattaggttatgtttattagaaaattgtagcgtgcctaattgttagggcattacatatatgttagaagatgggaatgtatattagaatcctcatatctacaccaactcagaacttattagagatggtggttactttgggggtggaagaattatttataataatttagttcctccagtgaagataaataacttagttgtttttgaaaagcactataaagttattcaatctgaagataattcttaactgtttgatttctattctattttggatagaattagagatatgtcttctattcattcagatgcacttaataagcagaatagaattcagtatccctaaaggagtaatacatgtagaagtatgatgttacataatgatttatgagcacaaatgaagtaatggtggataaagtagttgcttgccattgccttagagttcctgttattttggtatagtcaaatacgcaacactttatctggatatcaagataatggattgattgaattgcacttctagttttatgttactgcaagagggagtttattgggattttatgccctaaataaaacctatttcgatagggaaatttgaaattatatgcatattagggactaaaattggtatcctaatcta

SEQ ID NO: 141689 - DNA, 745 bp, Cannabis sativa
ctagtaaaatattcccaacaaacatggcagtcaatctcgatatgttttgttctttcatggaatacgggactctctgagatgtgaatggcggctgtattgtcataataaagaatggagggatccttgtggtgaatgccgaagccccgaaaaagtgctaacaatcaggtgatctcacaagtggcattagccattgcctggtattctgcttcagtagaagaacaagagacggcagactagttttttgatttccaagagagtagggagttgccaaggaagacacagtagccagaagtggaccttcgagtgtcactacatgaggcccagtcagcataaaaaaaaatcttaagatgaaagtctgaattggacatgttagtttcagcataagcagacaatttaatggaggaggcagattgaaagaaaagcccttggccagaagtgcctttgagatatcgtaaaattctatgagctgcatcaagatggagagcacttggatttgataaaattgacttaatttgtttacaccaaaggaaatatcagggcgagtaatggttaggtaaatgagtttacctatgatgctacgatatatttttgggttttctaatggttcctatcgaatgagagccgaatattaggctccattagtgtagaagcaggagaagatcctaaataacctgtgtcagttaaaagttgtaaggtgaaagatctttgggatacataaatcccagaggaagatcgaccaatttcc

SEQ ID NO: 141690 - DNA, 910 bp, Cannabis sativa
taacaaagctgacataccatgaagtgacagtccaaggtccttgaaagcatctcctctggactcctaagattgagaaaatcccaatctgggggaaggagagttttaagtttgcgccaacaagagacgtccctgtatgcctgggcaaactcagagccagcttctccagctgcaatctacagggtctcaatggcctgactcagagaagcattaacgagagtcacctcggattgaggggcattggcatgaagaaaatctggaggaggaacttgcggtggtaacatcttcttttgagcggtggttttcctttacttcttgggaggaaccaccttggcagcaacggggactccagggttggatgaccttttcttccccttacggttcaggatgtcttcataacccatgtctgcaaaacgagatgaggcgttacaatcattataaaagacaattaaaaaaggaggagtataaatttccacctaagggatttaccaaaatcactaggaggtgagctatcactagatgagagggtagaaggaccataatattcgctaaaatccctacaacctataattcggaatatatcaaaaggctcaattggttttaaatcccagctcgcatctttgtgacctgccctatcttccatggtgccatattactcggctataccataaaataactcgtgatagttgatctagacatgaaatcaagggtaccaactgtcaaacttatgagcaatacggtcaacgagaatagaattccaagtataaaaattaagatgggagtcctggaaggtaactaatgtattacgttcagccctgagcacagtaggtgaccaaccacattgattacctcgggatgctccttcaccggattcccgaggggcagtactttgaaggtattgtgcttgggccaa

SEQ ID NO: 141691 - DNA, 692 bp, Cannabis sativa
taagggtgctcaacaaagaaagaacaaatcgttctcactcaccatgttgtcgttctcattgctggaagagaatctaatcggtgaacccaagcgacatctccatcagaaacaactcaataaatttcatcatgcatcgtagccaaacgctaaaacggcttgatgaaatcaatacattaaattctaaaggaggcagctcaacggatggaaggaagggtcaaaaaaaaagtgcatgaaaaataatataaattaagaaagaagctgttacgaaaaggagggacttgaaggagctaagtgttgaaatgccattatcggcgctgctacaaacgaaggaggagattggtaaactaggaaagccctactaaagttttgggccttgaattaatttcttgagaaggataaagtccaatttccacgaggaaagcaaatgtaaaagacaattaattgggagtgggcccactgaaatttgacagagagaatattgaatataggtacgtgacctggtgaaattttgcatagttaattatggaattatgataaagtgagctgaatttagaagtcgcatcatatcccacgaaatatgataactcgctggtcaaacctctcccatatttcagtcaggtgctcttaatttacttatatatatatatattcttttttcttcgtaaagaaagttaactataggatgaaaatac

SEQ ID NO: 141692 - DNA, 501 bp, Cannabis sativa
  modified_base (445)..(449): a, c, t, g, unknown or other
ttttttttttttttttctaattgaatgattatttttcttccttcattattttattctccattgatcttaagctctctcagctaatacagtatcaattgtaatcaatctggagctagagctcaaacacgaacaaatattaatcttttttgatccacacttgctcagaacattgttgatccccatattttttggctcacagtaaacattttggagctagttcgaactcaaaattcttattagcagcatgaactacaacttttatatagatgctcaataattgttgctcttttagtcaaaaactagagttatttgcggcataacttccttaagtggtcaggtatttgcaactaacccccaattttaaaattttggtggtaaaacctcctaaacccagctcctcttagcagttagccctttccgtcaatttttctttttctttttcttnnnnntctcttttctttcttcacgcctccttcttcttctctgtaacaccccgatttc

SEQ ID NO: 141693 - DNA, 909 bp, Cannabis sativa
  modified_base (257)..(268): a, c, t, g, unknown or other
  modified_base (631)..(631): a, c, t, g, unknown or other
aaatatttgatatttttcttagatgttatatttgtgttgaaaattaatttattaattaattttacaccgacataaattagaataatttttcaggatttattttatcttagtttatgtaaatttcaaaaaagtattttaaatacattgaatttctaatttttctatatatatttatagaaaattaaatttgagttgaaatttaattttggaccaactcaaattaagtaattttcgtaatatttattgagaattattannnnnnnnnnnnataattttatttattttcagatctttctaagtataattttatgaataataaattaaaatttatatttagagttatctaaattgataattttaattgaataaatatatatatataaataaggaaaattacatgtgaatatgtgtttgtccatttaattttaataataacgtgatgtgttaaattattgatattacaattattttataccttctttttaatttaaactatattagatagactattaaacatactgaaggtactgataagagtgaaaggattgatgagggaaattgaagatgttagagagtactaatgttatgtgcatcaattattttttcctatatgtttaagtttatttattcntttttgtgaacaacctagcttttttttttttaacttctttttccctatttttttttttatatttaaaaagattttttttactacactaataactatttggtctcaaaaattacaccactatgatctactttttaaaataattatcttaatacattaaaagtatatatttatttgctagcaaaaatcaaaggtattattttagttaatttcagattttttttttcaatttttttttttatatttagtttaccaataaataaacaatattcaaattatga

SEQ ID NO: 141694 - DNA, 843 bp, Cannabis sativa
ttttaggtagagcccaatacctaatgtctaagtgaaaatataattttaaataattagaaagtagccacaacatcttgaattatataaaattatatattaagtaaaattcatcttaatggacataacttgtaattaattatataggtttaataattttaccccacaagaattttattatatttttataattaattaggataatatattaacttaatttctcttaatttactccacggggagttatgaggatttaatttaatagtgttatcacaaacattaattaagatagatttcattcctcattttcctaaattaaatatttcattaaatcaatcataaagttcatataattttattagatttaaaatttagtccacaggcaatttaagatttaataaagttttcatcttcatcatgtttctacattggtaaaacatgaattcttaacgcctcaattttcttttaacatctaaatttgtaatcctatttttacagctatttcatctacctcttaatacgctgaaatcactagtgaaatccctgagcttaggagtgacaacttcaaaatctggaaggatcaaattcttctccatcttgcttgcactgacatggactatgcaataaggaaagacgaaccagctgatgtcactgaaactagcactgctgctgagattgcactacgtgaaaagtgggagcaatccaatagtctttgcatcatgttcatcatgtccagaacttgaacttgaacttcaaacaagcttcaaacttaattttcttcaaaactcatcataagttcctaatcaagaacttgaacttcaaacaagcttcaaacttaattttctt

SEQ ID NO: 141695 - DNA, 670 bp, Cannabis sativa
tgtacctcttctcaagttatgttagtgtggattcccttgagaaatctataatgtcagatgcttctgcccagatacgcctctctccgtcaagtgttttccacggtcgacggtgaaagcaaagtcggagtattgatcgtgtgcagcttagtcttctttgtcggtcgagaagaattatgtcgccataaaacaaaaggtacttacgatcgtgttcaaagctctgttcagatttttcgttccaactcctatattcataaattctaataaattctttgactgttgtaaatcttttttgtcattatctacacattacatatgaaaatttagtaattatatgtattattcatatttatatttttgtcatatgccattatgccacacgtatagcggaatttttagcccaattatgagaattttcataaaatttgcttttattgatcttaccttgtattatctatatctattagaaaaacatcttcatattttgttattatattgatattgttgttaaggcgtgaccaaatcgctatgggatgtgaaactcttggtggttgtctacatggcaccggtgggcaaggtagttactcatggaacagttactagtggttactggctaatatagtgtgataaaattttctcagttatatatattacgagcttaattaatttttaa

SEQ ID NO: 141696 - DNA, 659 bp, Cannabis sativa
tatataaatataaaacaatatatacatattaaaaatggagtatacctcaaaaatggccgccggaggtgggctgacgaaccttcaggcggaggagagcggtgctgggctaatgcgcgaagcttcaggcggaggaacgtggtggctgtcgtagcttcaggcggaggaaggtggtttttcgagcaacaaataattaagtaccaaactgccaccacattcacaaacaaacacataaaataaattataataacaacttcacaataataaataaaaaaaaataataacataatctattaacaagtgtagtattttagagagaatttaaccaaaaaaaatacacatatttaactctaatctaactactaattctaataattttaataaaagttgcatgtaaaagaattaaaaaacataatatatattttttttgtaaaaaccgtatataatatatattatttttattttttctttatcatataatatatatattttcaatctgtttaaactaaaaataattttaaaaaaataccagagtgcgtgtggttgtggcggtggtagtcgaaggttgggctccattccagtcgacgacgacgacgacgacgggcggctgaggatgggtggagtggactgatgagggattagggggagagaggcggagtgga

SEQ ID NO: 141697 - DNA, 565 bp, Cannabis sativa
gaatagtgaggcaccagagaaaagtgacacataccttagcttgcaataagcaaactaagtgtaaaagtcggatcgactcgaagaacaagtatgcaagatgaccatctcactatgaggagacttcctatagcttcatccaactaacaggagtgaggctcataaccctggcaagtcagaagatttctttatactcgcgatcgacgtaggacatacattgtcgacctcagaaagaagaatggtcccagctcgctattgggatcactacaatcaagtttctgtcgagacatctccagattcaacaattaatgacgtgtttaatacacgatattttttgacccagtaaaagcgtgaaaatcacagctatacgattttcaaaatcatacactgcatttacatttcgtgaaatgtaatgagctcccacaattttagggataatggttgtaaacatattctggtcaactctgtaattaactgtctactatgtactcataaatggtggcaaacaatctcaaaagagggacgaagaaactcatatgaaagaggccctaaaaaaatactcagaaat

SEQ ID NO: 141698 - DNA, 574 bp, Cannabis sativa
ttttatgtcattttaatgtgagagagcaaaaaggtcattttgcctatatgtactttgtcttttgtggattttatttaaaagtttattaatctgatttttagttatgttatgctgaatattaaccaaggaaaatctattatttgctcattttattaaaaaatcaaaagatagacgaaaattgcattttctctcaagtttctctctctctctttcgaatccacctagagggagctagggttgggattatttttctgcattttcagcttcttccaacagggattaggagatcttaagctctaggagcctgtaattcgccgagcagattattccactcaggttgaccggtacacctgaattcagaatcgaggtaagggcaaggctaaagttgaggaaccgtgaggacgagcagaagaaagggcatggcttctcagcatttaaaggagtacgagcagaggtaccctactcacgacttagaactcctggcagtagtatttgctctaaagatttggcggcattacttatatggggagaaatgtcagatatacactgatcataaaagtctgaaatacttctt

SEQ ID NO: 141699 - DNA, 556 bp, Cannabis sativa
gatgcccttgcataagtacttcaaggatgtggctaacttcttcggtctctgcccggccgaaatcactcctaagggcattaagtatttgtctgcctcttcatcctctacggttcccaaggatggggtactctttctcctcacgaggttgcctggttcttcgatttgaagtccacccccaaaaaaggcaggttggggtacttctatttctctcagccgtgcttcaagtggttgaccggcacgaatgacaaggccatcagcaaaatagggcattttgttgatgaatacttcatggtgaaggatccgagcattacccgaactcagttttagcagattccaacatatcaccgtcctcccctaactcttgctcttagggatagagcttaaaaacttgcccggttgccagggtaagaccgaaatattatccagttgacctccaatgataatcttgtgacgtgaggactttactcctaagtccgtgacggggaagaagaggaaatctggcgctggcctggctgaacgaactcatccggaaaatgagttgattcaactgaagcgt

SEQ ID NO: 141700 - DNA, 660 bp, Cannabis sativa
ggtagatatatagcacataacatcatgatatgccaagatctcattaggaattatggtaggaaagggtctaagcctaattgcatgatcaagcttgacctgcaaaaggcttatgatacaatggattgggatttcctagaagaaatgttgagtcatctaaaattcccgaagaaatttataagactaatctcgacatgtatcagaactcctagattctccttgatgtttaatggttctatgcatggtttttttgaagcaagaaggggtttgagacaaggcgatcctatgtcccctttactatttgttctggggatggagtatcttagtaggatcatgagcaaaattgggaagaaggaggaatttggtttccatgaaagatgtgctgaaatgaagctcaatcacttgagctttgcggacgatgttcttctattttgtagaggggactttaagagcatttatctcttgatgcaagggctgaaattattttctaagtcttcgagtttaacaccaaacaatacaaaatctgcaatatattttagtgggatggatgaaaaagagattaaacgagtcctggctatgactgggttttctaggcaggaggagcctttcaactatctttgggtgcccatctgtgcaaggaaaattgcagcaggggattgtatc

SEQ ID NO: 141701 - DNA, 1070 bp, Cannabis sativa
aaagtttaaaaatatttttttttaagtaataatttaagtttttttaagtaaaattaatattttgtaataaatttaatatttttatcaaattttttaatacttttagtatttattttccagaattaatagaatgttatagtttttaaaattaattttttgataaaagggaaaaaaaattgtaatagttaaagtttatgggataaaaaatactaatttttgacggtaaaagaaacaaaacctaataaaagaggcataattatgtaactgttatattatagggagaattgtaaacaagtcgtatattttaaggggcaaaatcaggtagtgccaaaagttcagagggtaaaaatactaatttaattacttaatatctaatttgaaaagtgattatagatatttcaaggttgttgagatattttgtcaagtggttgagagattctttcataaatatcagtaaccaaattcaattatagatatttatttatttatttgaacaattaaatataatttaattaaagggatttaactgctataaatagaagtttgatttgaagaatcagaacacttcccaaaatacttaatttttgaaattatagagggaaagaaaattatttttttctctcatttgttcttactcatgtgttgagaactcaacaagaacaagcctatacactttatcctcatagcccccacactatttttagtgtgtggtggattgatttgaaagatactggtgtgagtccaattgcatcatcctcatcatctagattaagggatacaacatacgagaagttttgaggataccttgatagcagtcttcaagaggtgtatattttaaacttgttaatttatgttttgatttaatgtacacaaatctaaagatcaatttagatatggtaaaatgataaccagttaatatgaaactcttttgctacgtatctaatttagtgccagaaaatcaacaagtgtatagtaagccgtacttagcaagattataccttctcttgtacatccttacaagattatatcttctccatatgaataaagaatttttagatatatattaatta

SEQ ID NO: 141702 - DNA, 737 bp, Cannabis sativa
  modified_base (108)..(110): a, c, t, g, unknown or other
aatttgtgctgaatatgattggtcattaaatttggttaaaatgaccccaattcaaaattttagaatattcttcttttcagggtatattttaacaagttttttccttannnttacactcgttagtgttctgttaaaatctcaccctacacatcttcaaatttcgtgaaatttcacggggacaaagccaagaacgttgtgcatcacttttctattggacgccttgagagaaaaaaaaaagtagttttcatacactaacaatcatttaaaccgaaatagtaaaaatctcacatttctgataatcgtacccctttgtgaaatgtggcccggacccatctcgaaattttttttgtcactagtcacgttgaattcctgctactaagacgtgaatatgaagattggtttcgcattaaatttggttaaaatggcccttaattcaaaaattgaagatattcttcttttcagggtaaatttgaataagttatttccttactcttacactcgttagtgttctgttaaaatctcaccctagacatctcttaaaatcgtgaaattttacggggatgaagacaagaccgttgtgcatcacttttctattggacacgttgaaagaaaaagtattttatatgcactaacaatcatttaaatcaaaatagtgaaaatctcacatttctgatattggtacccctttgtgaaatgtggcccgaacgcatcttgaaatatttttggccactagtcac

SEQ ID NO: 141703 - DNA, 750 bp, Cannabis sativa
tggaggcttgaagcggggacgttacaaccaaaacttattaaaaatctttatcaaaattcttggggataaaccctaattctcataaccgaacaaccccatttcctcttagattaaactaacttaaatatctctaaaataccctgaatttcactccgaaagataccctgaatcaaattggacttgaggggaaaaactcaaatttcccccctgctggccaaaccggtcgaccagtttaacagttgcctggaaaattggtcgaccgattttctgggcagccatgggaatttatggtttttcaccccaaaaactaatcaaacctccaccaaacattctcaaaccttccataatagtttcatatagcaaatataacatagccaaacaaataattcatcacaactcatcaatttgcttaaaatcatgctctcaaatgaaaattaagctcaaatcacttaattaaacacattcaaactaaacagctactaaaatcactaaaaatatgctcaaacaatgaaacctacaaacataatccaaactcaatttggtaccacattctcgaaattggtacaaaccctatccaaacctctaacttaaccataagaaaatcatgagaaaagagggagaactcaccttaccacttaagcaatacttgttggaatatgttttaccaggatgtagatttactaccatgtatgttatttaacatcctgaatatgaatttcttaaacaatgtaaataaacacatataagttt

SEQ ID NO: 141704 - DNA, 546 bp, Cannabis sativa
  modified_base (236)..(238): a, c, t, g, unknown or other
tatataagtccatccacacctgtagattaggatgtgttagacaaatttctctcattggacaactttaagcaaccaattattttagcattgcatttgggagagaaaccttttggatagctcggacaagaaatattggaactttaacttttttgccctgtacataatgaaataccaacagccttgagcccaaattttttaattaaaattacattgaaaggcactcatcaatggaaacnnntctagaaagaaagtgctagcagcatcaataacatttaaaattgactctcatccctatgacacattatcttgcaatcataaactgtacccaagctggatcgataaaaaaaatatacttttcaagcacacatagttgatgatgaaacaaatctaaaaaagaataagataacaaatatagtcagaacccagatgaagtacaatattgacaatacaagagaggatatgattaagatagattgaaatacaagaagtataataaagtgtaatcattttaaattaatattataagtataataaaattttaattat

SEQ ID NO: 141705 - DNA, 1502 bp, Cannabis sativa
  modified_base (51)..(56): a, c, t, g, unknown or other
gacaattttatttaataattatttttattattaaataaataattttggcannnnnntggttgaattggaaaatatgacatttgtaaaagaatatcattaatagttgaaaaatggccaaaatgcaagtggtgggcccacatcctatggtcggcgacaaatgctcatttttactatttatttatcaattttttaatgtcaaataatgcaaacctaaacctagaaggattcttataaatagatagtgatggactcaaaactgacagcttaagtttcactggcctttcaatcaaaaattgagtcttctctttctctctcaatttttgaatctttctctctttctctcttcaaaattcaaacccttatagtgatagagtacatgcccacacatagcaagttggtactcaatcatagtgtacacaagcactcgcgcggatgtggggatgcacctcggtcaagaccgagcttcagacaactcgtgaccgaggtgcttcagacatgttttgtctgaatagatgctcacgttgagctagctcagccaacagggctccactgcagcctttccctcggacacatccccctcgtgtgcgcgcaggggtatgcagtgcatagccatcatgtgcccaaatcttatttttggtgatattttgactttcaaatatcatttttcattgaaataaaattcaaattttggtagaattttgtgtagaatccaaattttcaaataaaaatctaattatcaaaataaaattaatgttattaattttttaattaattaaaattaggtttagatatcagtagtctttgaatttaaatttttgatttttccacaaactatccttatggttaaattttgaaattttgattatttttatttgttttatttattttaattataaaatcaaatattacttattttattattaaatgtgaaatgattttattttgatattaaaatattaataaaatttagaaataatctagttaaagtttcaaatttgctaaccatatcacattatcaaaaatttttatttttgaaatatattttattaaattaaattataagattataaaaatgtaagttttaatattttatcttattagatatttattttaattaaaattttatttttggcaaaataacatgtaatttttttaaagtttgttaattttggtttgaatagaaattttaaagttaggaaaccataacatttttaaactaaggatattttgttttatttaatcattaaataaaattgataatatcctaaccatcaaaatatcaatttttaattttgtttattttgttatatttaatttattatattataagattagaaatatctaaattttatattaagaaattatattatattatattatattattagatacttaataaatataaattatttaaataaactaaaaaaatttgaaaattagttagatatttgaatttcagttagaattttatatatttaggagatttgttaaattttaaatat

SEQ ID NO: 141706 - DNA, 634 bp, Cannabis sativa
aagggttcaagatgcccactatgacaaaatatgatggaagtactgacccgggagcccacattagtgatttcaacacattaatgaggacaagccaagtgagtggcgatctgaagtgcatgttattcccggtgaccttgacaggagcagcaaaaacatggttcaacaaatttaagaagcattcaatcacctcttgggacaaattgtcgagtgattttaaaaaagaatttcgtgctgccaggtctcgaaaacctgaatgctcttccttggccaatgtaaaacaacaacccggtgagagtctaaaggcctatattaataggttcaacatcgaggcggccaaggtgaagaacgttgatgacagtgggagactcatggccttgggggcaggcataactcatggatctttactatgggatagcctccaagggagaggtgcccccactattgaggaatttatgaaaaagggcccaaaaatatataaacattgaggaagccaggttagctaacaacctacctcttccctcaagacaacctgtttcacctactacaacaacaacttccaccaatccaaaggcaacaactgccaaccctccagccaccaataactctgggcacaataataagagaaagggcgaca

SEQ ID NO: 141707 - DNA, 945 bp, Cannabis sativa
aaacccgatgtagatctgcgagtgatagggcaggaggcccaatctgaatcagagaagcctctaagatgtaatgtggaattagagctgtaaagtagtccttgtccaggacatctttttagatatcgaaggagatggtgcacggcttgcatatgaggagtacgaggagaggacatgaactgacttagagtgtttacagcataggtgatgtcgggtctggacagtgtaagatataacaatcggccaatgagctgtctgtaggcagtaggatcatcgagagcagttcctgtagcatcatcaagcttagttttggggtccattggtgttttagctggtttactacctgcaaaaccagtgtctgtgagcagctgtaaagtgtatttcctttgagagaggaatatgccttcttgagatcttgctatttcgaatcccagaaaatatttcagtggtcctaaagtctttagttgaaaccggttgttgagggagtcctgaagctgatgcagaagcaatttatttgggcctgctatgatgatatcgtccacatataccagtaatgcaatgaaattgggtccagaacctttggtgaacaatgtgtagtcagcttgagattgatggaaaccttccaaggtgagagcatctgaaagctttttataccattgtcgagatgactgttttaaaccgtaaatggatttatttaatttacagacaaggttggattcattactgtccattgttggagagagataagaccaggtggaatgaccatgtagacttcttcgttgagatctccgttaagaaaagcgttattgatgtcgagttgtagtgtgtgccaattttgaatggctgatatggcgagtaatagcttgaaagttaccatcttggcgactggtgaaaaagtgtcaaaaaaatctaaaccttcttgttgagaaaaaccttgagcaactaatc

SEQ ID NO: 141708 - DNA, 634 bp, Cannabis sativa
aaagttcaattatttcaaaatagaacaaattccaagagaacaaaactctaatgcggatgccctagcaaaattggcatctcagtttgatctcgacaagttaaacttggtctcggtggagatactggacgagccaagtatatgtgaagaggaagatgtcaacatgatagattaaagacctacatggatgacaccaattgtcaagtatctgttacagggagaacttcttgcagataaaaacgaggcacaaaagctcttatattcgatccctcactatactatggtcaaaggaaaattgtataggagaggatattctatgcctgcactgcgatgtgtgttaccaacagaagataatgaaataatcagagaaattcatgaaggctttcatagagatcattcaggttggaaaagcctgtccaagaagataatcagtcaaggataatactggccaactattaatatggacacacacgagtttgtcgagaaatgcgacaagtgccaaaggttctcacatatacctcgagtaccacccactaagctaagaatgatgacctcaccatatccatttcaatatcgaagattcgcttgattgggtccttacccacaggtcgagatggtgcaaagtatgctattacgg

SEQ ID NO: 141709 - DNA, 833 bp, Cannabis sativa
gagatctgtagcagtggtgaaggggcttcagctttggatgctgagattaaggcaatggctttaactatgcaatgggcgatcaacatgaactagtcttctgtaactcttttctcggattgtttggtggcagttaacgctttgaaggtgaaaaccttaccggattggaagctagcggttgttttctttaaagtaattgaacttgcaaaatcttttaatgtttgttcctttttacatgttaaatgtgattgtattactggtgtgaatgatctagctgtccaagctagagtgctgagagttgtgaactcgttcagcgtaggggatggattgccccctgtcaatcctaatttctttctttaaatgaatgaactaaggttctctttcaaaaaaaaaaaaaggattttagtaaatttagtttattttatatatttgtagatgttaagaaatatgagttcttagtaaaatttgttattattatcattattattattatttgtaaaaatcctatatggattaagaactacataattactatatctctaaactataaataaagtattcttacactaacctctgttggaaaatatatggtcagaaaatgtgtggcatcatcctattatttattatttttttttaaatgcagcatcctattattttaggattcttttttcttttacatatttttttataaatttcttttctaagtgacgtttgatatacttactaaaattatgtacaactataaaatataaataatgatattatagatctaattatgattaaattaatgaatatataatcaattatttttataataattaataataatatcttat

SEQ ID NO: 141710 - DNA, 740 bp, Cannabis sativa
  modified_base (88)..(98): a, c, t, g, unknown or other
aatctagtgcactgatgaatcatgggacattatcttttgaagcatataatcacaattatctttcactgtgttgacatcactataattnnnnnnnnnnntatgttctggacttaacagaattagtatattaaactataaagataaaaactacatttaaacataaataatttctaatcttctattgataacaaatcagattatactgaaatgagttttatttagggtataaaatctcaacaaactcccacttgcactaacataaaacaagaagatttcaatcaatctattgtcttgatatccaaatgaagtgcagtgtatacgcctaaacccaaattacaagaattgtaagtctgtggtaaacaactgctttatccaccattatttcctttgtgttcataaaacattatgcaaatcactttttctatatgtgttactcctctagggttactgaattctttactgcttattatgtgcttctgaatatacagaagacaaatctctaaatctatcctgaaaaactgagtttttgtaaatatcaataaatattacagaaatataataaatatataattgtaatagtctgcagcagtagaatgtaattttgttactgcagaaaatagttttgcgaaaacaaacaagaaccaacaaaatataaaaataattgtagaaaattaaatcacttgacacaagagatttgtacgtggtatcagtgttctttcgaacactcctagtccacaggg

SEQ ID NO: 141711 - DNA, 695 bp, Cannabis sativa
  modified_base (566)..(567): a, c, t, g, unknown or other
  modified_base (635)..(641): a, c, t, g, unknown or other
aactcgcccctagcgattaatggatcagtggagatcctcgcccgaagggctgtaagttgcatgttatcatccaagtttctaaccatagcggcagctctgctaaaacaacttaagtaaaccttaagtgttttgtcaggctgctactttatattggttagcgaggctgcttcgggtcgcctatccctagcggcttgaaattgcttcttgaaatccctggacagccttccccaagaaattattgatggatgagtgaacttgttaaaccagctacttgctgctccaacaagcgaggtggggaacaaaatatagcgtaaatttttcctcacgttactcgctcgcattatcctattaaagttatttaaatgcgagactggatctgtggttccgtcataggacgagacatgctggtttttgaatcccaaaggaaaacggtattcataatatctgggtgatacaactctagttcctcgtcagatttgtatcaagatgatttccctacttcccccacttgatatctcctgaacatgtcctccaactcatttatccgcaattggattggatcctcnngctttggaccaagctgttggcgaaggtcaggttaattccgattcaagtgtttggttttatgccctaannnnnnntctatttcaatgtaatctttatcctttaaatatcaataaagaaactgaagtatt

SEQ ID NO: 141712 - DNA, 1321 bp, Cannabis sativa
  modified_base (1179)..(1184): a, c, t, g, unknown or other
catattccggtcaactttgtaattgattgtccactatgtaattataaatagtgacaaacaagatcaaaaaagggacgaaaaactcatacgggagagttcctaaaaagtaatcagaaatctgaaaaagacggacttgtggactatgcagaattttatctgcaaaaccacgtaaaaaacccctgtgttcatatctttattactataacttttatttttctgtgtgaaattactactgtgaggctcaatttagttaacgaaaatctgcgtagacagtctggtgctttcattgagagcctctatgaaaaagtttagaaaaaaaaaacctcccttcttttgaagaaaaaccacctccttcatggttgaaaatcgagaaaatgttaacaccccacatgaggaaaccaatcatcattcacgaaatcccatgggctccagaagatctaccaacccgcaatccagaaggaccacccgttttaggagggctcaacctgagagtggccacagtgcacggaccacacgttcctgaagaattcgacccgacgttggtcctagtatgcagaccacacgcttgaggagaactcagtgtgggaatggtcagaagcacgggacgagggatgaagagctcaatcatggaggtgcctaatttgtgggagaagtatcttatgaaatcgaaaaccgccgcttgagacgtcgtctgggagaggcacagcgtcgaaacgctgtgttagagcgtgatgcagcctcgaccagggcggaacaggggacgaatgctcaaaatcaacctgaacctggagtgagaagaccacgaggcagacctcgtggctcacaagctaggagataggaaaaggcccgggaagaacaacccagagaaaatgagataccccttgaaaattaaaacgaccagccagatgggagacaaccgaaaactgatgaacgagaaatccctcatgaagatgaggaggatcttgggactcaactaggggaacggaggtcacctgctagaaatcaccaatgttcttaccaaacccatagagcgagcaatcgtatagaccctaatgggggaaatacgacaaaatgctctcgggaggaaagaacagagcttgaagaagaaagtgtgacttcgaggcggtcaagaatccatagtcgatcaactcaaagaggagaaagtactcaacgagctannnnnngagaaagtatgggaaccagtaaatatgtgagcctcttaaagaaaaagtctatgagtaggacgcgatctatgagtaagacaagatctgccagtaattactcccaaccggatctgcaagagcacttgaatcgaaagaaa

SEQ ID NO: 141713 - DNA, 765 bp, Cannabis sativa
aatatcaatgatgatcattagtaaatcagcctaagtcggttgtgtattgaagttctgggaatctttaagatgaaactgctaagtacagctcactatgcactatagtacttctagtgtgtgtgattttaattcgaatcacatatgtggatagatatgtagtaaatgtattgtgtataatcagattatgcatgactagaccgatatataataaacatctttcattaacttatcgtaaattcactataaaaagagttattcatatcacaaggatgatcactagtatatcagcctgaatcttgagtatacataaactcttatttgtgttcattgagttctttgatttactcgttaaattttatcagagaagatgattattaccaattttgttttgagagcttaataacatgagtggctagaaaaatattatacaaaagttaaatctaagctttcctagcatatcgaatattagttatttgatagtgttaattctgtgagtgctaacagttggatccaaatctataatgagttatagatagctgttcacattgaatttatggtacctaaagaatgaagagataattggaagggtaaaatgatattttgaccaactctaattatgaactaataattgaagtgcaaactacttatatccatcaatggattacgtaagaattctgtaaatataattttatattgtcaaagagtacaattttatatttatagtagagtaataatggaatcaataaaccagattattctattgat

SEQ ID NO: 141714 - DNA, 508 bp, Cannabis sativa
  modified_base (280)..(282): a, c, t, g, unknown or other
  modified_base (448)..(460): a, c, t, g, unknown or other
aatcacatccaatgtatttagacctaaccgatctaatttatttatttatgggatattgaattttgtcatctgatccaatccaatcgaattgagacattcgatccgatccgatccaatggatgtattggattagatcggttccaaccattggatgcattgactgattttctattagattggattggatccatctaatccatttcagctaccatttaagttgatatttcattaagaaaatatatatataaaacataatttaaaacttaataatctaacatannnaataaacattagtttagtccaacctaattctcatgatctcataataaaatcactaaaaaataaaatttattcaatacgacaattttatagcatttaggaagatgagaattaagattttttttcattgatctcatgtgttaaatgtatattaaattaattaatatannnnnnnnnnnnnaatatattaaatatataaaattacgaatcggtttggtcggttatccat

SEQ ID NO: 141715 - DNA, 670 bp, Cannabis sativa
aattatatataaatgtaatctaaaataatagaacatgtaactcccattaacccaaaggaacaaaagattataaaatgtacatatcaacaacatgtttgttaaataactacacgacacttaatcctttggttagaggatcttctaacatcgacttggtcttgtaatattctatcataatgtctcattttttgatcaagtctctaacaacaatgtactttatttccatatgttccgaagcactactaatctcattattctttgaaaagaaaacaatagtattatactatgtcaaaaaatcagtacttacaatagattagtataggagaggaaatagaatcaactagtcgtatctttaaaatcaaattctttaactacaaagcttgcaaagatgccccatatcatgtgacaaactttgcatatatagtagatggtgtgattaaaatctgcttaacacaggaaatagttgcaccagccaaagtgaaaaaatagtcaaaagttgactttaaatcatctacataaccattaaaatatgaataaccaacaacttaaagattgttgacatgcttatacagaagcatagaattctttgttctttgcaaatatctcatgagtttcttggcttcaaaccaatgatcatgtccaggattagataaatatctcccaagaacat

SEQ ID NO: 141716 - DNA, 747 bp, Cannabis sativa
  modified_base (436)..(444): a, c, t, g, unknown or other
tttagtgacactccatatttttagtgacacacattccgcggaataaacaccgaacatttagagtctaatgctgtgtgtcactaaaaatcactcttaattttttactgatacacacttttatgagtgtcactatatagtgtcactaaaggcctaatttgtagtagtatggttaggttctagttcagttgtattatttatgttcttcaatttgttgattatagttgaccaatggatcttctcgtgacatatagataaggacatggtatttcaattgggtgggaccgctaatcatagatacggaatctatagcttctatctggaaatagaagtaaaatgatagtttctttcgagcttagtttaatagagataaatggtggagtactcattgaagtaattatattactttattaaaataccatttataggtagctaagtnnnnnnnnnataaaatatattgaagggtgtaatggtaaatctatcccttctcgatgtaaatcatctatagcggatcattgattattaaaattataacaatggataattcatagcatatctatattgtagaacatgtagagcgttctatataactaagagagtaactttgaatctatagtggcggaaggaggaattaataagttagaaaatttatttgataatttctagagctacttattggaagcttaattgtataggcccatggttcccacactagttgagacaatactggttgtaagactcaattaattg

SEQ ID NO: 141717 - DNA, 562 bp, Cannabis sativa
  modified_base (261)..(271): a, c, t, g, unknown or other
aatcataaagcccctatataaaaccaatcatttttagcttaaaacgtaattaaaccatactttaagcttttcctcttcaaggattttctatcttggtactaccggagcttagatcgttatgtttcacgttgaaaatcgaagaaaatgaatatagagggagaagattttatcgaaagaggaagaacgagagttccgttcgtcattcattcttttactgttatatcttaaaacataatatatatattgttatagtgagatttnnnnnnnnnnnaaactcgagaccaaactcctgtttggaggacacatgtactcaatttttcccaagaaaagctgagatgtcaatgagagactcctcgagttgaaatctcgcctgagctagaatcagcgagatgatgcgaatatgaccaagtctaatcgcattcgtgtgactcgcattatgcaggaccaaggaacgaatttaagtcacatgtaccaggatatgtgcgagtatcctctcgatcctcctgtgaaaacttagagatcgagtctctatgatgcgagctggtctcaacgacccgacagc

SEQ ID NO: 141718 - DNA, 625 bp, Cannabis sativa
ttttttttgcaatgaataaattcattaaaaaagttatttattcatccaaagagcatgcacaactaatctatgagcaacacagattagggacactcctgggatctaataatgatcttaaaattatttgagcgggaactctaataataaaagcaatcatagttgtaaaatctttgtaacagactccaatccattgtcatcatcagctgcatgcaatttgttataaaaattcgctatcatttctctaagagctctgagggacaataatatttcaactgcacataaataaataatatattagtaggacggaaattaaaataatgagtattaattaaatattattgcaaatttataaaatgagaattaaatattaaatataaaaacaatatatattagcaggataaaaattaaaacaatgagtaattaaatatagtttataagtttttaattacaaatattttcatgttatttttgtgttgtaattttattgtttttatgttgttttttgttatttttgtaagatatcgtaaaattgtaactaaaaaaataaaaaatcataaaattaaaaataattgtaaaaaatataaaaaataattatttaactgttaaaatattataattttgtcca

SEQ ID NO: 141719 - DNA, 585 bp, Cannabis sativa
taagccattgccagaagtgacttccccacactacataggcctgatgttaatcaaaaagtccttgtcacctgtcatatgtctagagcaaccactatcaaaataccacatttgagaaaaagcacatttattagaaaaaccagctagacattttttcttaatccatttttgtttcatacctctatgtttcttttgagatttttccaaattaccaaaataatttgttttatacatattatgcaaggtgaaacatttaggtctgatatgtcccttcctaccacaaaaatgacaaataggcacaaatttccttacctgtgatcttacactttttataattcttggagactttgcttctacaaatacagaatctgcagcgacaggcattgaatatgatccagcaaccttcaaattaacaacatcatgatagtttgttggaatactagattttacaaatttcatgattccaaaacttttagtaccatctaaaccaatgccagcaaagcctccttgaccaacattctgagcttcttcaaaaataaaagatctgagattaagcatttggatatttttcttaaaattttcaagttc

SEQ ID NO: 141720 - DNA, 550 bp, Cannabis sativa
  modified_base (343)..(353): a, c, t, g, unknown or other
ttaggatgttaaacaacatatatggtagtaaatctagatcctggtgaaacatattccaacagacacgtgtctgcaattctctacattcggctcgagagatatttcgaaaagacctcagccatgcatctacacgaacaaagtctgcctaaccgagcaaggcaagggcagatgatctggacagcaagaaaagtcatttctctgagcagtgtatcaagacttagctacttaagttttgataccgtcaagcacacaagcaatccctacaataatgggatcctatcaaagggatatggaaagctgtccgaagccctcattttgtgtattctaaatatgtaatgtatgnnnnnnnnnnntatagatattgtaagcaaaagggaaacctttcctcatgcatttagccatataaatagtgatccattctcactgtaaatggggtcgaaagaattgcttaagagagatctaagagaaaacactcagagattttattgtgatagctttgagagaggaaacactgtattctttgttcatgagttaatacaatctaagggga

SEQ ID NO: 141721 - DNA, 595 bp, Cannabis sativa
tcaattttgtttcatctctcagaaaagtcttcatcaaataagagcccttttaaagttgtgaaaggatagcaaccactcttacccccacacggtggatgagtaccacggacaggatcagcgggccttcaattttacaaaagactcaaagaagaatacaaagattgctcaagcatatttagagaacgcctcacgaagaataaagaagtgggtagatcaaaaatgttgatcactggggttcaaagcaagtgacttagtgttgatcaaactacgaccaaaacaatttagattcctaggggacaaggacatcagactcgtgtgcaaatatgagggccctcttctagtcatctctaaagttggcctagcctcctacaaagtcaaactactttcttggatgaaaatacacctaatctttcacgtcagcaagctcaagtcgtatcataaagatccataagatctagtgagaaaccactctactaggaacatcatcagccttcaacgatgcagcaacagagaaccaaaagaaatccttggcaaaagaactgtttgtgtgaagagaaagaagagaaaagagtacttggtcaaatggaagggcctc

SEQ ID NO: 141722 - DNA, 572 bp, Cannabis sativa
ttttctgaagtttagggaatcaaaaacaaatataagaacatatgataaggaattggaacaatatagaaaagaaaagaaaagagaagatgagacataaatacacacttactcttgaagattttgagaaactgaagagcagttgtctatttttttcacattttcttctctgttctttctttgatttttttttctttctgccaacctccctttgcaaaaatgatctccccctccttttattgaggtctttctttttatctttagaattcactcatcgttgaagtggtgcactaaagagagtggttagaaaatatctccttaattttctctcattttgaatgactatttccttttctaaattattttattattatttattttaatataaaaaaaatcatccctttaattgtaattgatttataaaggaaataaattatttatatattaataataataataataataatttttttttttcgctcaacagttacaattctcttacaccgtcactaccacttaactcataaatacggacacgtgaagggtttagatgcattacatttatttttatttta

SEQ ID NO: 141723 - DNA, 616 bp, Cannabis sativa
acaaaaagtagcaaaaaattttacgatttttttttacatttttatagatttttaattttttagagggaaaacaacgttattttcaagttgcagtaaaattatgctacattttcgcaacgtttaagcaacggtcttttctagaacaacctagaaacaatggtttgtaaggaaaaaaagtcgataaaatatataaaaaaaaataaataaataagaattttgtacaaaatgtaaaatttttgttatttttaggtatttttaaaaaaatcctcttaaaattatatatatgactatattatgattactatttttttcattctattttaattaatttatttaattataatcaccctacaaaaatatataattattaataatagcatacgtgaaaagcaatttcaatctaattaacaaaaaagaaaaaattgaatataatattattttttgcatattataaaataaaaaatatttaataaagtctctggtgaataaagtccataacagtactctttttaaaaaaaggtccctgacactacatttatctcaatttgaataaaatatattttttgtgtacatttttataaaattaattttcttttataaaagtagtctccatagt

SEQ ID NO: 141724 - DNA, 865 bp, Cannabis sativa
  modified_base (808)..(814): a, c, t, g, unknown or other
ctaaatttgagcctcacagtagtggtttcacacagaaaaaataaaagctataaaaatgaaaatatgaacacaaggttttttttacgtggttttgtagttataattctatgtagtccacgagtcaatcttattcagatttctgattgttttttagggcctatcttgtatgagttttttcgtcccttttttgatcttgtctgccactttttataattacatagttgtcaataaattacaaagttgactgtaatatgtttacaacaatcatatccctaaaatcatgggatttaattacatatcacgcagtgtaatgtggtttatgatttgaaattgtatagctgtgattttcccgcttttactaggtcaaaatgatcaggttttaaatcatgtctttaatattgtttctggagatgtctcgacagaagcttagttctagtaatttcaatagcgagttggacccatttttcttctagggtcgttgatgcatgtcttgtaacgaccacggttcttaaagagttcttcgaggctcatttgaatgttatcttgaggctcgccaagattttaggcctcgctaaccctaactagatgaatctataagaaatcttcccatagagagacgggcacctcgcttacttggttttgagccgaaacgactgttgtacttagtttgtattctaaggactttcgcaattgatatatgtcgcttccaccttccaatgtgttctattcttgatgtctcgctattcgttttcagtgacatatgttttctcattaatataataagtgccagtttgtacattgattcctnnnnnnngaccttacagtcagcgggttacaaatatactctgatacttacgtaattaat

SEQ ID NO: 141725 - DNA, 871 bp, Cannabis sativa
aaaagtaatgggtgagtgtttttttatacaaaatattgttggtttttattatattgcatggatctacacattattcgttgtattatgtcattttgtgatctaaaatgaaagtagagttcgtacccaaacgctggtttttttttctgggtttttcgaatttttgcgatttttgtacgctattgtgcgattttttgtgcgatgccaacagaaattagaggttagggatgactttctttctttttggcgacattaaacgatatccttgcgattttttgcgattttaatagttttgcgatttgtgtgcaatatttttacatcattatgcgataatatttttgattttttttaatatttccaatggttgtattttttgtgcgacattatgcgatgttattttgtgcttgtgcgatattgtttttttcttgtgcgacattatgcgattattgtgcgacattattttattttttgtccttgctttaaactgaatattttattttattttgatccggactttgtattttgatcactatcagtgtaatttattgctatggttatgataccattgtatttgataaagattctattgttaattttttatagtcctgttatttcttctaaaagcgagtaagctaaaattagctggaaagaagcatttttactttttaaatcttctatatgtaaaatttgggtgatatcagaaaactttctgcaactagacttgctttctatgcattctcgatttttacttgtctttttttccttttttcgggtgtaaatacaggtgcatccatacacataccgaaatgagaaccagttcttgcacttgaattttcatgaagacccatatgtagagttcaattactggcttaat

SEQ ID NO: 141726 - DNA, 1579 bp, Cannabis sativa
  modified_base (1328)..(1332): a, c, t, g, unknown or other
atcctcgcaaatatccaaacaaaaaaaaaatactattttaaactggatattacaaaaactcatacaaaaaaaggcccagaaaaataatgagaattttgaataagattgactcgtggactatgcagaattttaattgaaaaccacgtaaaaaaaatcccgtgttcatatttttacttttatagctttattttttctatgtgagattatcacattaggctcatatttggttaacaaagatttgtgttaacacactcacttttacaatacgtgtcactaaaaatatgaagtgtcactatagagtaatttccttccataattaattactatttaaaaaaaaaaaaaattgttaacttatagtgacatgccaggtgtgattgggtaaatgtgtcgtgacatggctagcgcgtcattgtataataaccttaaattattattttttttaaaaaaaatgttagattacagtaaaaaaaatatacattgctgaactttaattaattattctctctctatttctcattttgttctttctcattatttctctttccttattaataaaaaatcctaaattttctaaacacataaccgcacccttctctctcttctcagccagtcgcacctcctctcttctctcttctcagccagccgcacctcctctcttctcagtcgcagccgcaccttctctcttcccagcaccggtggggctttgaccaccatcgaccacctttctcctccacagtcagtcgccctctctctctctttctctcattctccttttgcgcacgaacctccaccagaccaaacttttgagatctccatcacgatcgcccaaggtaaatacgtttttttctaatttttattttttcgtgcgactctctctcgttctctctcgtggtgacgatgtttattttttttttgtgcaccgatctcagctcgtggtgacagcgtttgaagctcgccatggatctcagctcggggttcgtttgaatcacgctgtggatctcggctcatggttcgtttgaagcccggatctaatttgttttagttttttttagttctaatggtctatttctaggttatatttcttgttctaaatattgtgtctgtaaaaaaaaaggctaatgttttggtactgacctaatttattttagtagtgtttgttgaattagtgagctcgtgtctgtaaaaaaattgggttaatattttttttagtaatagatatgagttttattggaattatgataatcgtgtaatttatattttttcggttaattaaaattattattgttatatttaattgtaattgcatataattaatataaattattatnnnnnatatataaaatttgaattaaaataattaaatattatatttttaaaataatatttattatccaaaaatattaataaaaaaaggatatagtgacactttatgtgtgttgctgttactttttcagtctgtctctataagcttatagtgacgagcagaaagtgaatgtaaaagggtgcagtgacacgtgtgaagtgtcactaaaaattatcttttcagtcaccttcattagtgacgcgcgctaaagtgtca

SEQ ID NO: 141727 - DNA, 614 bp, Cannabis sativa
  modified_base (227)..(228): a, c, t, g, unknown or other
ttaaatttataccaaatatacaagagtgattattctagcttagaccaccactactaatcaaggtctaattttaggttgcctaaagtaaacatatacaagtaggagattctaagatagaggatctatatcatttcgggatagaatgtcaggaatatagtcgtctacgccattcaatttcataagagaaattagagtgacatcacaagcagatgatttataaaccattnntccaatgatatactatttaagcaaattttaaatgaaaagctaattagaggaaaactaaaggataatttcgattaaaataagaatccaatgatgtcccgtttaggtgagagtcaaagttattcttattttataaatttgttcattgtttcatattgtaaaaagtagtctaaattgtcatctttggatgtacaactagatgttacatttacaaatacttagctgtcgagatctaacactattatgtttctctaatggatgacaatcatgattatattctaatgtgaaaaagacactataatagtgaacaaataaatatacatatttatatatgttatggacttaatagaatttatacattaaacataatcataaaataaatcatgtga

SEQ ID NO: 141728 - DNA, 718 bp, Cannabis sativa
  modified_base (68)..(70): a, c, t, g, unknown or other
  modified_base (665)..(677): a, c, t, g, unknown or other
accttaggtattttcaccgccaatttttgaggttgaggactaatcggcatcaacctcaagtttttggnnncttttgccgcaattatcccttatgagaattagataaggtctaaaatacgaaatttatacttagtgcggatcggatgcaatatgacaaaaataatacagattagatcgaatgaacactcttatcaaatatagtgtaaccctatatgtttggtaggaaaaaaaaaagtgagggaaaaaaactttggagagaaaagtaaaacttatgttgcaaaatatagagatgatttactattggtgataaaagaatgttattcttgaaatttgtattgatgccacacaatgatattgatgctatgttttttttttaaataaaaattaaaggtgaaatatatataatagtttaataaataaaaagatttatatgtatataataatgtgtgatcataattatagcatttttaaaatatactataccattggagtattttttttaaataagagtgccaacaataatataaaaaatatatatatattatatcattggatgatatggaaatatatggcatctttaaaaaaaaaaaaaaaaaaactaccatttgagatgctataaaatcactacaaaaagttgttacctttagtgacaactttttagtcannnnnnnnnnnnnttgtgactaaatgtgatttttaatcacaacaaaatgttact

SEQ ID NO: 141729 - DNA, 796 bp, Cannabis sativa
  modified_base (651)..(656): a, c, t, g, unknown or other
gtcatcttcccacacaacgacccctggtcgtagaggtgcgaattgcaaacaagatggtggcatggtctatgatacataatggagtttcctcaaatattctatttaaaacaacttatgagaagatgggactttaacttaaagacttaatcctttacacttagctcgtatatggtttctctggccagagtgttccttgaataatttttagaatatattttattttattttaataatcatttcccacataaatttcaaaataaatttattttaaatgtagatatttttaaattttcaattttaaaaattagattaaagttgaaatttaatttgttaattaaatttagatcaacttaaatcaagtaatattttcattaataatttaattaaaataaatacactaaaatatattatatttcaattagaatataactaattagtttatgaattatctaaataattattttctaggtaagcttttggtatttttctagatgtatttgattaaatagaaattaatatttaagttgagtttttcaagacacttaaatatttgatatttttcttaagagatttagttaaataggacaattatatttgtgttgaaaattaatttaattaattttagatgaacataaattagaataatttttnnnnnnttattttattttattttaatatgagattttgaaaatgtattatttaaatacataggtttcaaatttaaaagagatatatatttatagaaaattaaatttgagttgaaaattaatcatttaatgaattttggatcaactta

SEQ ID NO: 141730 - DNA, 635 bp, Cannabis sativa
taatgattaaactccattgatgatatctattgcaattaataaattcaatgccatcaattatattttgatgaaaagcattatcattatttgttttaaaattacatatgaaaattaaaaaaagaaattataaccataattaaaacctaaaataaaacttagtatacgtgacttgtcacgtaacatctatctagtatatatatattcattatacataaattttatgaggatgatgtacataaataacatagcgaacaaaaataaataacatagtgataaaatatatagaagtattcattttaattaataaaaaatacaataaaagataatgttttctaattaataaatatatttctttaatgaataattattttatttttatatataattaacattatatataataaaaaagtatttttattttaattttttaaaataatatataacattcatgtactcaattaaacagtgtaattcaattaacaggaatataattatatattaccctacacagctaaacacaatttacaaaattccttataattatattctctttcataatattctctataatcaaattattttgaacacctcatatcaaacacccccttaattttttaaaaataactcttaatatt

SEQ ID NO: 141731 - DNA, 513 bp, Cannabis sativa
tggttggacagatgggtggagatactccaagattgaagatgaagctcggaatcttctttattataattttttgaattaattgttttaattcctaaacaatttgatttaaattattggttagggatttttattccctattttttatattgttgcagacaattcgtttattttggagaattttataataaagttttctcttttggaaatgtattgcatttatgaattgaacttcatttactttatcttatgtatgccagtaccaattatatatatatatgcttataatgtttgtatgtgttagtgtcttattacagacaaaaaaaatcaatggtatatttatctctgcaaaaagataataccacataaacactttagaatttcaattctatgtttatgaataattgttatttctgaaacaattatgaagattttgtttaataaaaagatattttgatctgatagtggtggaagaagttaagaataatatatgcagttcaacgatcttttatatct

SEQ ID NO: 141732 - DNA, 975 bp, Cannabis sativa
tccgtgggtgtaaggacccaatagaggcttgaagcggggacgttacatactggatgtaagtacaagcgtcagtgatatataatgagtaccagcgtagatataggcctacctgtttcctggcgacgtactaggcataagtacgggcgtcagtgatatatgataagtaccgggcgtaggtacgagttcgtctaagtaggcgattactccttgcgacgtgtagatacggcgtcagtgatatgaaaattgccaggttatggcataaaatgaaatcgttgtagggtttcctcctagcgacgtgtagatacggacgtcagtgacatatgataagtaccaggcataggtacgggctcgtctgattaggcgatgcgatatattggtgccaaggtgtggcacgtgctcacctgattaagtgatgcaattatatgaaatatgagtgcaggtttttggcacaggctcacctgattaggtgctgcagttaatgcgatatatgggtgcaaggctatggcacgggcttgcctgattaggtaatgcaatataggattatcctatttaagcatcgacttgcttgattaggcaacgcgatgtgatgaagatggttactttatgaggtaacatatatataatttatatgattaaatgaatatgaattctattattggtgtaaaagttttgtatcaccaaatatctgtatactgatgtttattcgtggcagatgccagtagtaatttggattttatcttatgagcaatgtgtgatggttcgattcttattgtatataaatgacaatattcgaataataaactatataattattattattattattattacttaatcttcctgagtccttgtgattcccgattgctatgtgatgcaggtaaaggtaaataaaagcttgatcaaccatgaagtgacagccttctctagcaatgtacatattgacctcaccggcctgcgtgccgagttgctaggagt

SEQ ID NO: 141733 - DNA, 805 bp, Cannabis sativa
caatgggacccacaaataatttaaatctacaaatactataaaaatatcaataattagtgctaattgcctttactaatccatattatgaaacgcggtcattacaattaaccccccattaaaaggatttcgtcctcgaaatataacctgaatagctctggatattgagtcctcatgtctgactctaattccctggtgacttcttccaccttactgttcgttcagagtaccttgaccaaagcgatggtcttgtttcgaagaactttttccctcctatcaagaatctaaactagttgttctttgtaggataagtctgactgtagttcaagtgcttcgtaactcaagacatgagtcgggtctgaaacatattttctcaacatttaaatatgaaatacattatgaacagtcgataatgctggtggtaaggctagccgatacactacctttctgaccttctcgagtatctgaaatggcccaatgaacatagggcttaacttacccctcttcccgaagcgcctaatacccttcactagagaaacctgtagaaaaacatgttcccctgcctgaaatgtaacatctctgaactatggatcaacataaattttctgtctgctttgcgaagtaagcatccgagccttgatcttgtttatagcttccttggtcctttgaactaattccggacctaagtacttccttgctctagtatcatcccaatgattaggggaacgacatttcctaccatatagcatctcatagggagccatccctattgtactttggtaactgttgttgtaggagaattcaatta

SEQ ID NO: 141734 - DNA, 882 bp, Cannabis sativa
  modified_base (416)..(429): a, c, t, g, unknown or other
ctaatttgatgtcgaaaaatgacaagaaagagactcttgcaaaggctcatagtgcgatcattttgaatcttggagataagattttgagaaagattgtaaaagaagatacagtcgcaggtgtttggctaaaactggaaagtttgtatattactaaattgttggtgaatagaattgtaagcaggtattttctttctacaattgatgatatactacatcagtatatctgaactgagattacttatactaaagaacgggcatcagtgaaccctactagcaaccattgattaaatatctaaaattttattatgttgctaactgttttattcatgggtaagtggtcttaattctccgtacaactacattgtcatagcctcatatatgaataaaaaaatttctgatatttatatataaattannnnnnnnnnnnnnttaataatttaacattcatgcatatatcaaaatgtttaatttttattaataatcaaaaatgtctttatagattattcagggcataaaccctaacagttcaacagaaccattctagaaagagtcaagtgcatgttattgagtgttggattgcccaaaatgttatgggcagaagttgtgtgcattgtagtttatttgataaataaatgtccgttaacatcactagatttcaagatgctagatgaggtgtggtcggggaagccaacaagttattgttgagattttatgccctaaataaaatccattttaatataataaaatttattaattaataaaagacgagaaattattttatgttgcatggttcacatgattactttcatgattatatgtttaatatatgaattctattaaatcctgaatatatagttcttcatgattatagtgttgtctgca

SEQ ID NO: 141735 - DNA, 706 bp, Cannabis sativa
  modified_base (152)..(159): a, c, t, g, unknown or other
agattgtgaagaatccagattcaacagaaggacaatcgggctcagatcttggtgatactctgcgacataaaaaatacaagggttagagatctgagtggaaggagaaaatatattccacttcaaccactctaaggtttctcatactttatatnnnnnnnnttcatatcattttagaagttcatatttcagatgttaaataacatacttgttagtaaatctaagattgtggtaaaataaatccaacaaataatatattatatgttatgtgcttttcttactgagtctgttgacccacaaatactgctttcaggtgtaggtaaagggaaggccaaaactgaacaacagtgagtccagtgctcagggattatttttaaagagttcgatctcgggacgacttgagcttcattttgtagtcactgtgcgacatgtctgaaaaattattttgattatgaatataaagttttaaaatgggatctaagttttctgaatgaaagtgtgcatatatttataaaagtttaaagttaaatcaaaattttagtttatcacgattttcaagaaaacttgttgattaggaaaggtgtgcaccgtaattaaaaaatcacagtagcatgcctaatcattagggcattacaattatggtcaaacctatgagaaagaaaaacgagaattagaattgaaagggtttatggatgcagtgttgggtttt

SEQ ID NO: 141736 - DNA, 666 bp, Cannabis sativa
ggcttgtaaagctgtgacaaatgggagggcgattaatatttggagggatccctggattcctcatcttaaaggtttcatcccgaaactaaggagcgggatcttaaccaatgataactgtgtgtctgaccttttgctggccaatggagatttggacatccggaagcttaatgtcctttttgataaggaaacggtgtctgcaatcgtcaaaggcggtaaaccctcgggtctaggggatgatagatgggtttggactttagaaaaaaaaaaagaccatttacttgcaagtcggtgtatctgtctcaagctttggatagagcccatcaaagtgcggttgctccggcactttggatcaagctgtggaatagcaaaattttggagaggcataagatcctttggtggtgcatcctctctaatgcgctccctattagagctgtgattggaagaagattccacattgagaataccaactgccctttatgcggtttagggaaggaatcaatggaacaccttttcttgtcctgtgatgtggcaatgcatttatggttcttcaccatatggggcatttatcctatctgcaattctgggattcgagtttgggactgggtcaaattcatatggaatcttaatgctagggggattcgagtggatgaagtatttttgtatgct

SEQ ID NO: 141737 - DNA, 603 bp, Cannabis sativa
  modified_base (258)..(264): a, c, t, g, unknown or other
agctcgtagatgctcgtagatgcaatatgcaatagcagggcaatagcagggcacgaaattttaagcttcatggatgcttattcatgctagaatcaaatcaaaatgcatccgccagaccaagaacatacaagtttccgaacaaatatgggtctctattgctacaaagtcatgttgtttggtctaaaaaatgatggagctacgtaccaaagattggtaaacaagatgtttaaagaccagatcgggcgaaatattgaagtnnnnnnngatgacatgctcgtcaaatccagaaaggctaggggacacatagacgacctggacgaatgtttcaaaatcctcacaaaatacaacaagaaactaaatcccttaaagtgctcctttggagttagctcgggaaagtttctctgcttcatcgacaatgcccaaagaattgaagccaatccaaaaaaaaatcaagccctcctggatatgaactcgccaaaaaaaaccaaagaggtgcaagtcctaactggtcgaagcgccgcacttagcagattcgtgtcaaaatcaacgaacaaatgtgttccattcttcaacatcatccgaggaaacaaaaagttcgagtgg

SEQ ID NO: 141738 - DNA, 830 bp, Cannabis sativa
  modified_base (800)..(802): a, c, t, g, unknown or other
ataaccaaatatttttccacccctattagttcgcaagatctttaaccacttaccttaatggtttttcaccattgctagaaattcctgaaatttctcacatttcaaatttcattgcatgaggtaaaatctagagtaatcatcttaagaatttaacgataactcatatccacccttgaatgtacatccatatgttggatatagatgatcttactttcaagtggatattggcatgttttctctttgcagagaatgatattgtcaaaaaaactataaacaagatataaatgccatatatatattactgtagttgtggtcttttgatgatttaggtctagttacaaaaaagaggtcttagaatagtccaagtggattctggtcacagaatacaaaactcatattccatacattaacatatagtttggatccattgacagaaaatagatattaacaacttatgaaagttatactgtattgtccaatgtattttggaaactaaaatttaaaatttatatttggaatctaaaatttaaagtcaaggacttaaatttataccaaatatttctcgagtagtttttctttcttagatcaccactacaaatctaactctaggtgtagattggctttagtaagcatatacaagtaagagatttttaagatcgaggatttatataattttgcgatagaatttctggaatatagtcatttgagccattcaatttcatagaaaaaatagagtgacatcctatctaagcaatttcttgatgaaaaagccaaaaggaaaataaaggataattttgatnnnaataagaatccaacgttgtcccagtagg

SEQ ID NO: 141739 - DNA, 765 bp, Cannabis sativa
cacaaatttaaagttttttatggcattcctcataactttttatcatatttgtaagtttttttaaaaaaatgacatatttaggatttaagttttgagtaaattacgccagacaacgttaatattaaattatttatagatttgccactacctatttaaatgtttgaaatactgatatatctttgacatattttttggcgcgtataccgtagcatcctggagatattttttctgtccaaggcatatcgcatacacactttcctttgtttaatttctcaatctccacgtgcgcctattttgttttttctaaaaaaaaactttttacatatgcaataaatttttaatagcagcacatattcaacttttagagagttagaataaaaatgtatccatttcgaagaggagtggtgtttctgaggcttcttctgacaatcggtactctaacaagttaaagagtgttgttgaagatgatgatgattttgattcagaatgtgatgaagcccctattatgttgccaaaaaaattaaaagttagtatcttatttgtttatactgaatcgtgtatttttttgtttgatttttgttaatgtggatgcacatttatatgttagttgttttttttttttgtatacagagttgtttggtatactaagtagtttacattttatttttttatgtgtttttttagagattttctagtgaatattatatatgttagaatatatatatttttttttgttagtgtaggttgtttaacactttatttttt

SEQ ID NO: 141740 - DNA, 657 bp, Cannabis sativa
  modified_base (496)..(497): a, c, t, g, unknown or other
aagatgaaagacgaacgttatgcaatttagaaacaagcattatgactgtaaaactgcatgaaggcatgataaagaagaatcgcagaggttcctaaacttagggtttccttaacatttttctacagcacagtagaaggagcattcaaaatgtaaacatgcaaagataagcataaaggaaatcaaaaacttactgaagattcaaatgtctgggttcgagcgacgtctatccaacaagtagtctgtacaaaggcacttcggcgactttgaagccaagaaattttctttttcgctatgaagtttacttaacaaagaagggtgacaaaaataagtttatgtgccaatgttgttggtatttataggcaagtcatgaaaagaggtaattgctttaaaggaacctcagacgcctcagtttccctccttaaaaacgaatatgggaaatcaaaagtaatctagtgcagccgtggagagagaaaatcagatttcgaaatattaattnncagagcatttattagccgaaaaaccgaaggaacgcccaatcagcctcacatcaagtctcagacggttgcgttcaacacgtgtccccatccaaaggcagaaacagcttagatgaagtctacacgcaacttcggaagtcccatacagacttggggggaaaat

SEQ ID NO: 141741 - DNA, 651 bp, Cannabis sativa
attaacgatctcaatagttcaaggagaatttttaacggccaaaaaagtttaagtggtatgatttggtatatgtcaaaatttgggggaaaaattcttaattagccatttttatatatatattaaattaaaaaaaattgtattaattaatattttttaattatcttaattaaagaatctccatttattatgtagtcttttttttttttttctatttttttgaaacttcatttattatgtaatctagtttaacgttatcttattaaattagaaatgaataaatatttaaaaagatggtagtggaacaatgtgagcataaaaagataagttaaaaatgtaagaaaccaattgttaggtgattaatgtaattaatatatataatatgtattacaatgaaatttttccaaaaaaaaaaaccctcatgtatgttttttctctttggactatttacaaaattatggaaaaaaataaaaattttaatatatatagcttataaatttaagactaattagtaattttacaacctaactttgatatgtagtaaatcgtgacccctgaacttgtttggccgttaaaaattgcccccgaactattgagattgttaaatttaaaaacttttttctaatttcattcaattttactgtttcagttatt

SEQ ID NO: 141742 - DNA, 1029 bp, Cannabis sativa
cacaatataatttttatataattaaccacaacttttttatttttaattataaattttattgtgattaaaagtaaaaaaaaattataatgatataaagcggcttcaaaacattcttacccctccacaaactcaagaatcgagaagaaacatattaatctcgcttaccaaagatgtagaagtgtgtgtatgaaaagggaaagaagagctttattgaatggaaaagaaagagccttttgcatggtcttcaagaaccatcattgtaatatttgacagtataaaaaatgaagaaaaaaacactaatctaagggattcgatgatcatatccttttgccagcaacatttagctggttttctccttaaaatgtcagctagtttagatttatgtgtttagactcctctttatgatggaatcttcttctaacacttttcctttccctacttctctgatcattctgatttgagtataataaaagtaaaataaatggccttatttctgctgttactttccatcattgacattcagttgatattattggagactatataattcatataaataagatgaattaatattgaagatgtattggaaattaattagatggctagaagataagaaaataaaatacttaactctatcaattgatagttaattactttaattataacattgatgagaccaaaatttcatcccttggagatactaattaaattaatataccctatatatttaccgatcttccttttgatctctcttataagttaattaaagggcattttacaattttgtataaatatgtgaaaaaaatttattactatttgctcatatatttttatatttaattaaaaactttttttcaatttttattataatatatatatggtaatgattattaattattatatatatagtaatactggctatgttttatttttatatttacaattataataaacataccaataatataaaacattttatatatgtatttattttattttctattaattaaacatattaatttaataaac

SEQ ID NO: 141743 - DNA, 1673 bp, Cannabis sativa
gtaaaataattccaacaggaacaccatgaagagtaccaacccactgagcccgctggtgaagagacctctcgacgtccaggcaaacaacctatgcctgacgacgaaggtcaggtccaagatgcgagaagctcatcatcaccatcccatggtgtacgatgaactaccaatgtccatgaggtgttcatggaaaatgaggcattgcgccagcgtttagatgaaactcacagactcaacaaagagtggcgagagaggtatggagcttaagaggccacaaggccacaaagaagaggaacctgcgggcgtcttggtacggcaagaaagagacgactccgcgggagtcgttcaacatgttaccctctcgaaggccaagagagatttaggtcacgaacaacccaaagccgtgatgctaatcgtaatgccataccacaacgaccttctcgtgagaacgacaaccatggcaggaggagcgagcgtcctccatcacaacaacgacagcgtgtaacaacctcaggtcgtgagaataggaggaacaatgcaccccctcctacacagtaaaaacttggagggacgcacaactactgccccacaagacaatgctgcagatcccccacgaggaggctcccgtgagagacgggcacaacacgcaataatgggatcccaccatctcaaccatctccaacacctagggatattggttttgatgagaggggaagagaccatgttcgaaaccctccttcaccaatcaggaaagaaatgatccattctaaaaatggatctcactaaagagccagaaggtttgtgaaaaataacaagcttgagtcaccattttgtacacgaagtccactgacaagaaaaccaaagactgagaaatctaacggttggaagttgtgcaaaatatgaataggcgattcataatgactctcgaaaccgtacaactgccaaaattaaatgatgcgttatttccaagaaaagatcttaacggaaatgccctttgtaattattaaaaagccttttttttactaaaaatgaatttttttaaggggcaattattatacctaaaattcggctggaggacacgtgtcaagataagtggaatgtgaatcagtgcaatagctttttatggaataactcattaattacgcaagcatcagagtatatttgtaactcgctgactctaaggtattaggcgaggaatcaatgtacaaactgacacttagtgtattagcgagaaaccatatgttgttaaaggtgaatagcgaggcatcgaagaagagtgacgcataccttagcttgcaataagcaaactaagggtaaaattcggatcgactcgaataacaagtatgtaagatgaccatcttgctatgagaagacatccaatagcttcatccaactaacaggagtgaggctcataatcctggcaagtcagaagatttctttatacccgcgatcgacgtaagacatacattgtcgacctcggaaagaagaatggttccagctcgccattgggatcactataatcaagtttctgtcgagacatctctagattcagcaattaaagacatgtttaatacacgatattttttgacccagtaaaagcagaaaaatcacagctatacgattctccaaatcatacaccgcatttacattttgtgatatgaaatcagatcccacga

SEQ ID NO: 141744 - DNA, 1029 bp, Cannabis sativa
ctttttttttctttctattttcctttccttttctttttttttttgtccttcttctttcttcttcggttttctacagatttcccagccctctccgaccccctaacacgaccctccatcttcgcccagccccatatcaacaaacccctagccaccataacgaaccaccttcaccagcagctaccaaacccccattcgcccaaatcgtacccagcgacccccttcctcaagcccataaaccatagcgatccccttcctcacagcgacccccttcctcatagtggaccccctttctaacagcgacccccgacctcagagccaagctccacgaccccccacatcacagtggtgacctcagaccttcagaccacatagagagagaaagactaaaagaggtacctccaatgagagatagcgaatgcgggtgagagatctcaccgtcgagagcacgcccccggttaggttttaaggctccggtggtgagacgagagagagcaagagagagaaaggggttataattatttttttttaggtcgggtttttgggctgtgaggaagggggttgctggggttggggttcaaggccggtggtcacagggggtttatggttgaggctgtgaggtcccagggatggagggtttctgtagaaaaaagaagatgaaagaagaagaaagaagatgaagacgaagaagaagaagaaaaaaaaaagtaaaaaaataatttaaatttttttaaagtaagaaaaggaaaaaaaattctgatttttttaatatttataattattttttaaaattaatattatgtggaccactaaaaatttaccacgtgtacaagtgtgtatacgtagacagtccaccgtggcacttaacagtgatttttggacagaggtgtgcagagcaaaacgggatgggggtttaggtagtttagctgccgaaaattcattttttgtggttaagtgttacaaaccgtaaaattcaggtgatttagtgcatgtttggcatcataactgaaaaactgttttttgtttttaaaa

SEQ ID NO: 141745 - DNA, 620 bp, Cannabis sativa
tggtaaaataatatccaacagaattttctctcgattagcttgaattcctcgggaattgatgataaatcctaaaaatttgcctgagctgactccaaaggagcactttaggggattcagttttatattgtatttcttgaggattttgaagcatttgtccaggtcatctatatgcccccagccttcctagatttgaggagcatgtcatccacgtacacttccatatttcatccgatctggtctttgaacattatgtttaccaacctttggtatgtagctttgacattcttgagaccaaatggcatgactttataacaatacaaacccatatctgttcagaaacttgtatgttcttgatctggtggatgcatcttgatttgattgtaccccgattaggagtccatgaagcttaatatctcgtgtcaagctgttgcatctacaagttgatctattcttgatctgttgttgtagtcttttgggcacgacttgttgaggtcggtgaaatcaatacacactcgccattttttgtttgtcttgggtactagtacgggattagcaacctaggacgggtagaaagcttcaattatgaaatttttgttgcgcagcttttctacctcttcttt

SEQ ID NO: 141746 - DNA, 1121 bp, Cannabis sativa
  modified_base (224)..(224): a, c, t, g, unknown or other
  modified_base (685)..(688): a, c, t, g, unknown or other
  modified_base (876)..(877): a, c, t, g, unknown or other
  modified_base (978)..(1004): a, c, t, g, unknown or other
gtaactaaacctaagtcatcaaaggacacaaccacattttagtatctatgacatttgtatcttgttcatagtggttttggcaaagatcattcttcggaaagagtcaatatgccaatatccacttgaaagtaggatcatctgtatttgcacacatggatgtacattcaagggtggatatgagttatcgttatattattaatatgatcactctagattttaccttntgcaaagaaatttgaaatgtttatgaaatttcatgaatttttagcaattttgaaaaatattaaggtaagtggttaaagatcttgcgagctgatacgggtggagaaatatttggtaaatatgcagttcaaaggtcattaagttgaattttgaattgtatccaaacttacctccccagaaattcaatttgcacaatgatgaaattaaaagatttatgattagtcactagctgttgcctgattccttctagggaaaaccttagtgatagaaaaatttcaaaatgatcgaatggttgtgtacttagtataaaccgttactagattcatggatgttctgatcgtgaccttaagaaaagctaggactgttaactttgcagttttgatagttattctatgtgattaggggtggaccatcacatggtcattaagataagaaagtatttgtttcaacaaatactactttnnnnagaaaatgactaagtttgaaaatacagtagcaaagtagaggagatacttttttttttcttaattccataagtgttctatcatcttattcgatataagatggtcccactacctctgttttcttgataaaaccgatgaggataataccacttagattcttagagggaaagtcacggtaccttgtcgtagnnggagggtttcaaggaactcaccctgttatgacttggaagacacctgtgatgaaatccattgttagtttaaaaaagtaatggattgttagaataaggaactnnnnnnnnnnnnnnnnnnnnnnnnnnntaaaaccattcatatggaataactaaaaaattttattacaaggataagaaaggaaattttgataattaagtctcttcaatggactcaacaaaacttcctattcctagtattataggt

SEQ ID NO: 141747 - DNA, 619 bp, Cannabis sativa
aattgcaaagtgacggtagttggccttgcttctccaattcccaacttcttgaaaatagacatgggcattaaattaatactagctcccaagtcacataaggctccacccacatctcttccgccaatgatacatgggattgtaaaacttcggagatctttcaacttaggaggaattttgctcttcaacatgccgctacacccttccttcaaagccactatttcaaactcacctagcctcctttacatagttgggcatttgctccaaagcttccactaatggtatgttgatgtggagctgctttagaacatcaagaaatctttggaattgaccatcttcttgctactttttgaatctttgaggaaatggtgggggtcgtttgctaagtaacttttctgctgcattttgataaggaattgttgcatcattttcttcaggttgctcctttgccctattggagggttcaacatttttctatacttgactttggattgaagtgggctcattttgatccatagtttcttcctcatgtggctctagatttttaccactcctcaaggttaccgctttgcaatgctcttttccatctcttcttggattttcagtatcactaggcaaagta

SEQ ID NO: 141748 - DNA, 1009 bp, Cannabis sativa
ttggttgaacatgttcacttctgctaagctccataatcttgaaatttcaacttcagaccatgctctgattcttatggtcatggttcctgctgcatgccacaattctgttaagcggggtttgaaaatgtgtggttgagggaacctctttattgtcagattgtaaaggatagctgggagatttgtgagtctaatgatgttatgcataaaattcagttttgtggggacaagctggctgtttggggtaaggaggttactgggaattttaaagaaaggttaaaaatgtaaaaatgaagtgcagaagtcgaaattgtgtcgggatgaagtctctgtagccaattacaaacaagcaaagaagcactttgccgaatgttatgtgcaatgggaagttttctggcgtgaaagatcgaagcaattgtggctgcaagagggagataataatagaaagtattttcatgcttctgcaactacaagacgaaggaataattttgttgcaaaacttaaagatcattcgggtgcatgtgttgactgggatagtggtttggatgatcttatggtttcttatttccacaagcttttttcctcttcccaaaccgattggagagaagtcacaagcagcgtgcaaacatgtgtatcatcccagcagaatactgagctgctgttaccgctttcagatgaagtagtttggaaagctttgttccaaatgcatccagataaatccccaaggcctgatggaatgacccccgatttttttagaagtgttggctgattgttaaggatgatgtcatcaatatggtgaagaagttctttcataatggttctcttcctacagacgttaacaaaaccatcttggtcttaatccctaaaaagaagcagcctatggatataggggatttaagacccattacgttatacaatgtgttgtacaagattgtgtccaaagtggttgctaatagacttaagagtgttatgtcgtctatcatatctactactcaaagtgcatttttgcaag

SEQ ID NO: 141749 - DNA, 1091 bp, Cannabis sativa
  modified_base (493)..(510): a, c, t, g, unknown or other
gcgaggcagaattgacagctgctcaaaaatcaaaaagtttggtagattactaactacttaaacaggaggattacgagcaatggaaaaactcaaaagtactgtacattagatcaaaatatagttatttacatcgtgaataaaaatgcaagcaaacacaattgtattaagctcgaatgaaaatagtacaaagcatttaagataaggaaaaaacccaagttgggttacaaacttgtctttacaaaaatgccactaggggtaaagtattaagtcatattcctaaacaaaggatgagaggagaagtcgataaactcgagaaagaccgtcttcatatagctcgagaaagaccaactacacatagcttggagaaaaactggctagatgtagctcgagaaagacctagggtttaattaatagactatgttttgtttatgaattttcactaaccaagagcttatttgagaagaaaaaagattttagggtttgtttattaatnnnnnnnnnnnnnnnnnnctaattaataaataagttaaatataaattttatttgataataaattataattattaaatagatagatttgacatttatagagttaaaattaaaatatggcatttgtgaaaagaaagatgagtttaaataaaatggtaaaattaaaactaaataggaccactatagggtttggccaaggggtttaataaagccattattttatctttttgattctattttaattctaaacctaaccctaaaagctaccttataaaaataaaaagagctattattttcaaaattctccttcttctctattgaatcattcgaagcctatagtattttgagagtatacccacacatgtcaaagcaattcctagcatagtgagaaagattgtgttgaactaaattgaaggagaggagatccaagttcagttcttgataatactctgagatagaaagaaataagggttctgaatggaaggaaccattatattccgttgctgccaacataaggttttctataactttatatgtgtttattttattattttaggaaattcgtatttgggatgttagattatagattataattaaacata

SEQ ID NO: 141750 - DNA, 638 bp, Cannabis sativa
aagtacgaaaccatggtgttattactaagttcaattattgtgataccaaacttataatttataatggccaaaagtaaatagaggaaagtatgaaattaagaatttataaaataaaatgattaaatctttactttctgtaagtaaatatttatcatccatcttgaattgctttccaatattcttgaccattaggggaaagaataatattgtttacttataccatcaatgtgattgacattggaggagttgattggcgaatagatttgagtttgagagatggatggaatataagtcaattgcaataaagaaggagaaaaattataattttattattataaaaatataaaattagaaagtaatcgtttttttaattagtaatatacaaggtggatggtagaggtagatgaaaagttaacggagatgttaattatatgcatttcaaataatataaattaattaagaatattctgttaagttatagtatattctggttaaaccaaaaatatcggcgacttagactttaaaagtaatattaatttatttaaaagttaatattaaaattcatcttaataaaaaaactgttatttttgaatagataacttaagaaaaaaaaaagtcacctaataatttctcataaa

SEQ ID NO: 141751 - DNA, 513 bp, Cannabis sativa
tgaagttccaaacaccagaaggtgtgggagtggtgtgacgcgattagatgctagctcgcaatttctatcacatagagctacaacatagaaaagtcggtcaccaattaatggcagtcttggcagaagaaagcgaaaagaaggatgaagatcttgatcctaaaatttaagatgaaagaaacttgttaaaaccaattgaagaattagaagaagttgttcttgacccaagaaatcccacaaagtgtgtgtacattgggaagaacctggacgagcagttgaaatagcagctaataagtttcattagggcaaaccaggatcagttcgcctggaaccatagagatatgatagggattgaccctaattttatctgccatcatttaaatgtcgatgtaaactacacagcaaagaggcagaaaaggagacccttggattctgagaggcaagaggcgctaaaacaggaagtggataagttgttagtcaatgactttataagcgaggtgttttacccctcgtgga

SEQ ID NO: 141752 - DNA, 1367 bp, Cannabis sativa
ggtacgaagtttcctcagtttagcaggctactattgacgtttcgtagaaggattcttcaagattgcaacgtcattaactaagctgaccagaaagaatcagtgatttgtgtggtcagacaagtgtgagaatagcttctgggagttgaaacaacagttgatcacagctctaattttagccttatcgactgatcaagataagtttgtggtatattgtgatgcatctaaacaaggtttgggttgtatgttaatgcaagcagataaagtcatagcttatgcctcacgaaaactaaaagattacgaacagcgttatccaacttatgacttaaagcttgcaacagttgtgttcgctttgaaaatttggcgacactacttatacggtgaaaggtgtaaaatttatactgatcacaagagtctcaagtatttcttcactcagaaagatctaaacatgagacaaaggcagtggctagaattagttaaagattatgattgtgagattttgtatcaccccgggaaggcaaatatggtggcagatgccttgagtcggaaagggcctgaccaaattttcaatgcaataatgatttctcctcagttagcctcatatatgtttaaggcacacaatgagtttgtgattggagaatctcataacctgacacttcagtcaaacttgttagagaggatcaaaatggcacaactagaagaccctaagctggttaaggctcgagaagatgtcttagcaggcaaagctaaggacttttcaatttcaagtaatggaatttgttatttaagactcgggtgtgtgtttcgagtaatcctgaacttaagaaagaaattatggatgaagcacacactacctgttactcattgcatccagaaaccaccaaaatgtatcaagatctgaagccttattattagtggtatggaatgaaaagggatgtagtggattatgtaaccagattcttaacttgccagcaaattaaagcagagcattagcgactcgcaagattacttcaaccattagaacttcaagaatggaagtgggaagacattgcaatggactttgtggtcggtttacacataaccacaggaatgtatgactcagtttgggttttacaaaatcagcacattgcttgcctgtaaaagtgacgtatacggtggatcagtatgttgacttgtacgtgaaagaaattgttcgtcttcatggggtaccaaaatctattattttagatagagaccctaaatttacatcgaagttttgggtgagcttacagaaggccatgtgtactagtttgaagtttagtacaacctttcatcctcaaatggatgggaaatctgaacgaaccatacaaatacttgaagatttgttacga

SEQ ID NO: 141753 - DNA, 910 bp, Cannabis sativa
  modified_base (856)..(857): a, c, t, g, unknown or other
tgttaatttgttgttgactttttgatatctgtatgttattttttgttattattttcatgttacttttatgtagttttcttattaattttatgttgttttcgtgttatactttggaaaaccgtagtaatgtaaaaaaaacgttctttgaacgtaaaaatataaaaattttataaaaaaatagtgtcttatgtaattattcctaacaataataatctataacatatataaatttattgacagggccttttattttattaaaaaataatttggacttcatatttttaaaaataaaacataatactactccacctaatttttgtcatattttttttttaagatataacaaatttaaagtcagtttctagcacaaagagggtgcaagaaatgtagtaaatttagtcataaaacctcaaaatcatagtattattatattccattttgattaaagttgggctcacagtattattatattctaatttaaaaaatataaattatttgacaaaacagatagtccagtcggtaatttttaaaatgcaaaattcaaaataatatttacttaatattacattttggacatctcgaaaatttattacattaatatatttttttgataatttcattatattaatactaaattttgaaaaaaatatttgtgcttaaagaactctgctaaatacaataaattaatcttaaaagaaaaaaaaattgatttattatctcttttataatttagattttcttgagataaaatttaaaacttataaattagtaatcaaaataattactatatgataagtaattaaattaataataatgaaaagtctatcttattatattttagagtaatttgcggcannaatacctaagttttatgccgagtagcagataaatacctaagtcgtatttttgg

SEQ ID NO: 141754 - DNA, 563 bp, Cannabis sativa
cattacccattgggcgaggaggagctaagtatgcggtggtagcagtcgacttcttcactaaatggacggaggttgagccccttgtatccataacctgcatgcaagaaagtcattgacttttttgtcaagaacattatcggtaggtttggaattcccataaagatagtatccgataatagaacccaatttgatgtcgacttgttcactgaattctgcgagaggaaagaaattatcaaaagcttctcgtcagtatctaggcctcaagaaaatggacaagtggaagccgttaataaaaccctaaaggatactatcaagaaaaatttagacgctgccaaaggtagatgggtcgacgagctaccaaaggtgctctgggcccacagaactaccgagaaaacagccacaggaaacactcctttctctctaacatttggctcagaagcaatgctgcctgttgaagtgaatataacaactcatagaagagagttttataatcaagaagaaaaccaagaacttttaaaattgtccttggatctacttgaggaaaaacgaactgagtcgcaaat

SEQ ID NO: 141755 - DNA, 515 bp, Cannabis sativa
  modified_base (467)..(467): a, c, t, g, unknown or other
ttcttgtaaaagcaagatccaacggattaagtgagatttagcatcttttttcgacaagagatatttcaatgcagcatgatcagaatagacaattattttagatcccagcaaataagacctaaacttctctaatgcaaacacaacagcaagcaattctttttcagttgtagtgtaattcaattgagcttcatttaaatttttgctaacatagtatattacatgaggtaaattgttgattctttgtcctaacacagcaccaattgcataatcaaaggcatcacacattatttcaaaaggaacattccaatcaggagggcaaataatgggtgcactagtcaaaagggattttaatttttcaaaggcaacatggcattcattatcaaagacaaaaaaaatttcttttccaagtaatgacataaagggcgtgaaattttgctaaagtcttttatgaatcttctataaaaacnggcatggcctaagaatgatctaatttcttttactgtcttaggtggagg

SEQ ID NO: 141756 - DNA, 654 bp, Cannabis sativa
taattttttcaggatggtctcatcctgttgtggtaaatttcgaagataattctaagttaaaatctaaacttgaatgatttactgaacatgataaattatctacttacaatagtaaaggtttacatgctatatttaatggagtaggtggatgttttattaagtttatatcttcttgtgaatctgttaaagatgcttgacaaattcttcaaagccaatttgaaggaacaactgatgttaatcaatctaaatttataatgcttcaaactaggtttgataatattagaatgtttgacaataaatctttgtctaagttttatgaaagattatctgatattgctaacaattttttttgtcttgggtgaaaaacttaaagaatcagtgatagtcagaaaaattgtgagaggccttcctcacaaattcgacgctaagttattggctatgaaagaagtaaaatattttagcaagatgaagatggatgagttgatggggtcctttcgtacctttgaaccaaatcaacaaatcaagtaaaaagacaaacccaagtccacattttgttggaaaattctcattacaagagataatagaaggattacaatcaaaatactcaaaatacaaataaaaatattttatcaagattacaagaaagctagagaa

SEQ ID NO: 141757 - DNA, 1426 bp, Cannabis sativa
tatatatatatatatcatgtataactatttttattattatttattgaaaatattacataatagattaaaaaatttaaaaaatattacaaaaatatattagcacggaaattttttcatttttacgctttgaatttttttatttacaaaataatttatttagtaaaagtaataatttttttttttgcttgttttatattttatttgtagttatattattgtcgtggaattacttttttagtttttttttttattgttttataattgatttataatttttgtaagattgattttttattgttttttaactattttcttactttttgctaagcaaaatgtatttttatatttttaaaattttacaagcatatttttataaataaaaactttagactgtaaaattataaatagaaaatagaaaaaaaaacatttataaaaatttcctttatttatatatatgataatagaaagggaaattacaaatacgtactaacaaattgtcatatacaattatctcaaaaaaaaaattgtcaatacaaataaactaagtttatcagcgtatactaaggatggcgatatattataagataaaaatatgtaataaacttcattttatttttttgttattaaattcaacttgattttaaagctttatctaactcttttgtgggcaactattatcccactaaataatggaaaaagaaaaggtgaacgcagtatcgtatcgtaggtaaacatgattagggtagaaaaggtagagtgatcgatcaataacgcggaaagaaaaatgtatatatgtgtgatgaaaacgtagggatatcacatcagaaacttaaacatgaagatgatcactagtctctttttagtggcaattaaatatgagaaattctaaatgtacaaaacacaatataatacaccaaacgcaccttaagagacagacttaaagtaaggaagggtgcctcgttcaataatgtattccaaaagccaaccccgtacgttacaaatggcaaacaatgcgttgcattgcatatatgcgtgactacgagtgacgaatagatagacaacttctttgattggcttgttgctaatgctattacatacttatcaactctccaatcaaatctcattttaatttcacaactatccttctctctctacctctcatcataattccaacttccacgggttatttgccgcaaactattttatgcttttatttttgagtacatacaattttgaattttctattttataagttattaattgaaccctgtattttattaaataataaattaaaatggactctgtattttacaaaatgataaaaataaaactttgagcttaatttttgacaaatttttttaatataaccaacttgaagacaattcttaatacgaacacatatagaaaatataaacagttttttcat

SEQ ID NO: 141758 - DNA, 1523 bp, Cannabis sativa
acagatggatactttataattgactggatagtcaaggtggtttataaggtgaccattgaaattctgagaaatgattactttattaagcaattatggaaaggcatactcacccagaatgggaaaaagcttataaattgagatgcaatttaatggacatgtatttgagtgattggtgaatgttggatcacaaagtaggttgtttattaaacaacgagctatataattgagtgtaaaataagttttaaagttgttaactaagtatgaagataataatgattgcaaggaagcaatggtagcatatgaaccagggagtgaaaccttagtggtaatgatggaaaaagaacacgagagtctcagatattgatgaatcaacatcatcaacgggggactcactataagttagtatggtaatttgtaccaacgggttaacaataaaacaaagaatgtacttgacgtatgtatattctggatgtgtttgaaaagattatcaagatttctaccaaacacagaaaagaaattttaggatcacggaaggatctttgattaattgatattatttaagatttcaggaaatgggtaattctagtttagttatgggtatttggtatgagcaatgttacctctattgtgtaggttaggccaattcactttataatggtagttaactgtaagttattgaggaattttaaagttgtgtcagtttaagagaacttgatacaagttaagataagtagaaatgaacaatattcaagttgacaataagatgggaattcctcaagtttaagtgacagaaccgatgaggaattgtaggaggtgaatgaagggagtgatgggacttgatttttttttacaaaagaatgaaagtaagaaatacaattaagaacgacaaagaagcatctactttctcataacccaccatgagcttaccttggagttaagcgtacttaacttgggtaatctcaagatgggaaatctttcggggagtcatcccagaaagcatacgagtgaggacaaagtacgctagaagattcatattaggatgcaaaatcgatagtcgttccagagatttataagaggatagaatgtgttaacaagtaaagatttacaaggtatcaagatgagtttatgttagtgggtggaaataagaaatgttctgattgaatacctatcagaaatgaatacttaacttgttattaagttaagttagtaggttagcttaggaggtcccatataaggaatggaaagacataattatgaattatgtattgtgggatcttatgatttcgactgaatagtaacagttggacataccgagttaatatgctgtctatcagtatagacaatttatacaataaatgaggatatggaatttatacaaaggaatagtctaatcttgtgaaattctaaggttgatatctttggctatgaatttaaggattaaaaaaaaggttattgagaaccatggaggttaaagcaaaaatagtataatattttattcttgaaaggtgggtaacctgagaaga

SEQ ID NO: 141759 - DNA, 513 bp, Cannabis sativa
tttagattgggatttgagagttttagagaggcgaaagatcttaataagaccaatttttatatgctatggagttagggttttaatttaacggtagggttaacttactattaagtttaacaaataaaaagaaaataattgttaaactaagaattgtcgttacatagccacttttaatatataaagataaagatatatgggtgactactcaatggttatatttttattgtaactatcatggttacatttttcgtttacctataatagcatgttactaataggtaaaacttttttttttagattaaattaattataactaattattttcttaaaataattaattgaatatttaacaagacctcttttagtaattaataattataagtaattttgttaatagttttgccatttcattataacatttacaatgaaactttattttttttttacaaaaattagacttctttttacacaaattagaattctcttcttgtataataaatttttaaacaatta

SEQ ID NO: 141760 - DNA, 865 bp, Cannabis sativa
  modified_base (590)..(595): a, c, t, g, unknown or other
gagctccaccacgagaaccaccgtcactcgtctctctctctctctcgtccgaagacagaagagcgaccacgagcaccggtcagtcttctctttctcgtccattatttctcataacttctttattattttattttattttattttaggatttatatatttttgagatttttgtatttcacagatcatcaaagatctcaggtattcggggatcttaaaaccaaacaaaactcctatctttgttttgaggaggatgaaggcaaggaatttttttggggaaatccactataaagacaatttaaaatcgtggcccatagtctcaactatggccgacagttttaaattgtcggaaattattttataccgatatttttccactgtcgcctattgaaaaatcgagtttttataaatgtcaataataaatacgaaaatatacgaaatacaaaactgtatacgcctgcagaagtagaatgtacttctattactgcagaaaccaattttgcagagacaaaacagaacaggcagaatataaaaataattgcagaaaattaaatcacttgacacacgagaattgtacgtggtatcagtgttcnnnnnnacactactagtccacggggccacgcccagagaattaaatcaattagtaaagtatcaaagattaccaaagcaattgacttaaacaaatttagactccctctagtcatttgtcgcaaccctttgtaattaaccttgctaatctgatctctgaaacacaccaagtagtgaacccccttcacaacactggtattttcacatgcagaatgacaagtaagaatagatgtgagagtatagcaattatcaacagatctaaacccttgtaaaatgcatt

SEQ ID NO: 141761 - DNA, 607 bp, Cannabis sativa
ctaacttaaaacttaagaaatcattaaaaacacatagagagaacttacctcaaggttctaaactgtgcttaaggttgaaatctgcaagaattggtcaacaattgaagaggagacctggtttttcttctgggttcttcttgcaccgaaaaaggagagagagaaagaggaaagaaaatgatttttttcttagttttgttttaggatgaatcttccaatttctattaattatctaacataataaacataataataaaatactattttcagcttaaatcaatccacaaaagaaaaaagctcaatcccacaaaaagactattttgcccttctttcaacactaaagtctaaaatcaaacttaagggtattttggttatttctaaatcccccgaataaactaataactcgactttctaaactagtccggtataattctaacataacacaactttaatcaccgtgacatctctgacctccccgtcgagtttccacggtcggcgaactcgaaaatattttattttgaaaatagtatctacaatactcccttaatccgataaaatctccgtagttaataaattacgctttatttattcatttactcaaattccacta

SEQ ID NO: 141762 - DNA, 1009 bp, Cannabis sativa
ggcataaaacccaacatggggaccctcacatctatgatgaatgctcggtagatgtgaatagtttgccgatggatgaagtaaaagccattgggaattattcccaaattaatagctttgtgtacaatcaaggaggggatcgatgaaatagtggttctaatcggcaacaacaggggttctatcagcagagaaatcagtcccaacagaatcaacagcaaccacatcaacaaggttctagtggagggtctagtattcaaacagatttgttgctacagtttatgatagagtctagatcgaccattaaagccttagagaatcatatggggcaattggcaactcagatagctacccgtcctcaggggaaccttcctagcacaacagaggcgaacccaaaagaaaactgtaaggcaattaccctgagaagcgagaagaagtatgaagggcctgatgggagacaaccagtggaagaagaggttcaggacaactggcaccaacatcagcagaaaagaagactactgagagtctcgctccaaaagaagcttctccaccagtcagcatagaccaccatgtgaagatcccatatccgcagaggctccgagagacaaacctagacaagcagcttttgaaatttttggaggtatttaaaaacttgcacatcaacattccctttgcagaaagccttggaacaaatgcctagctatgtgaaaattcatgaaagaaatcttgtccaaaaagagaaaaattgaagattatgaaacagtggcattgactgagggttgtagtgcgatactgcagaagaaactccctcccaaagtcagagatcctagaagtttcaccattccttgtaccatcgggagaatagagggaataaatgtgttgtgtgatttgggagtgagcatcaatttgatgcctttgtctatttttagaagattgcagttgggagaggcaaagattgttggaaatattttactaggatctagatttactaccatgtatgtttcattaacatcct

SEQ ID NO: 141763 - DNA, 683 bp, Cannabis sativa
aatcatcataaaaataattctcatcataataattaactcctgattatctgctaatttctaaattaaagctaagcgacctttacagaaacattgccgtgttgtcatatttgtctttcacctaacacaatttggcttttgttgcaagaaatcctcagctatttgaatgttggaaaaccatatttattaagatcattgaggacgcctttaagtgccttccgtttagtcaccatttggaacatttttataacattgattggttgctgccaagtcgagctcacaagatctgcataattaggatgagaggaccacatccaaaaatacttgaatggttttcttccgcttcgtatttcaggatgaactatgaggagggcaggcgtgtgatcgaataatccttcagacaaaaaaattacctcagcattagtaaattaagcagccactgttggttggcaagaactctatcaatttttgaatagactctacaattccttgttgcttgttgctccatgtgaaaaagcttccactatatttaatatcattcagttgacatgtctcgacacaatctataaactcagctactggtctatagctaattctcttgccaattctctcttctttcagcaatatctcattaaagtcttgttaggttttatgccctaaataaaactctttacaatctgattagt

SEQ ID NO: 141764 - DNA, 653 bp, Cannabis sativa
gttaaacttaggtatttatgctgtaatttactcattttttaattactatgttaaaatttaatttcatataactaaaaattaaataatcaatctaaataaatgtatatatttacattattctaagtaaatatattacacaaatattgtaaaattactccaagtgtttaagagttatctaaacaaagaaaaagtaaaatgaaaaaaaaaaatagtgttatacaagtgctctagtcatcactatgaatcacctcaagcaattttgttatccattctccttataatggtaacaaatcattttgtgcatcgtatcaagcctattcccaaattgtaaaaaaggacaagtaaatatttttattagtatatatatatttgattgtttattaatataataaataagaaaattaaaaattaaaaaattacagctctttttccagttatgaatctgctagcatttgcagatatgatgatttgattgatgtatttcaagacatcaaaataacattcttaatttttagattgttttaggcaaattgcacttgatattttaggatacggtggaacgcattcgtgtcctgaattatctcgtatgttttgttttaaaaattatattactatttcaattaattaacataatttagctaaaaaaaaatttt

SEQ ID NO: 141765 - DNA, 660 bp, Cannabis sativa
ttttttagtgttaagagctttagggttacatttatgggtatattgttttgggtttatggtttttggtatatggtatagggtttaagagttagggattaagagtgtcgggtttggggtttggggtttagggtttagggtttaaggtttagggattagggattaggggttgaggtttagtgtttacggatagggtttaggggttaagtgcttagggtttggggtttagtgatttgggtatagggattactggtttagggtttagggttcagggtttaggttttacagtttttggtatagcgtttagggtatagagttcatggcttaggtttagagtttattagcgttaagggtttagagaggatgatttacgatttagggtttagggatatggttagggctaagggtttagggttaagggtttagggttaattcttttgggttgggtttattgtttaagatttagcgtttagggtttagggtttttagttgagggtttaggggttagggtatggggtttagggttttgagtttatggtttagaggattatagtttattgtatattatttggggtttagggtttagaatttaggttttcgggtttagtgtatagggtatagggtttagggttttttaaggttttaggatttagggtttacggt

SEQ ID NO: 141766 - DNA, 556 bp, Cannabis sativa
aatctcacatttctgatactggtatccctttgtgaaatgtggctcggacccatctcgaaatttttttgcaactaggcacattgaattcatactattcagacatgagtacggcgattggtttcacgttacatttggttgaaatgtccctctaactcaaaattttcaaatattcttcttttcaggataaattttaacgagttttttctatactcttacactcgttagtgttctgttaaaatctcaccctacacatcgcctaatatccaagattgttgtgcattacttttatatttgactcattgagagaaaacgtagttttcatgcactaacaaacattttaattgaaatagtgaaaatcttaaatttccgatagttgtacccctggcctggacccatctcggtatttttttggcactagtcaaaatgaattcatactactaagatgtgaatatcgagatttgttttgcattaaatttggttaaaatgccttaattataaaattgaaaatcttctttttttcagggtcaattttaataagttttttcttactcttaca

SEQ ID NO: 141767 - DNA, 819 bp, Cannabis sativa
aataatattattttatttccttaaatagaaatttatttctttaaataaaaatattcttatatagcactcttcaaaaatactataattataatctcacatatattatttaattttttagtagcaataattttttagttttaatttttttttaaaaaaataatgataacatcaatactactgtaaagcattcacacatattcttggaataacattattttatctttaaatggtatagcatctcaatattttaccacttcatctatccacttaagcaagcatcccttaattttttactattagaaatgctctaatagaccccattctcacttgcagttgcaggtagctaggggtgtacatcggtcggtttgatcgtgttatagtgtatttttaccaacccaatataaatgtcgggttgaaaaaatctaactataacctgtccaatgaaaaaataaaaataaaaagtgtaacccgcccaataatttttgtcagtttggtcgggttaactcttttcaaccaatctttatttatttttatttttttttcattgttgttagctttcagtgttcaaataattgatttgaaaaaataaatgtataatatatgcctttcaaaattaaaatagttatactttaaattaatgttaaaaaataaatatgaattgaataaatgttcaagtattaagcaatatttttcaaaaaatagaattaaaaaaaaaatattcatgtgtaaattttaaatttcaacttcaatattcaaatacaatcaaaattatcaactataaattctaaatttcaaaataaacactataaaatacaaact

SEQ ID NO: 141768 - DNA, 971 bp, Cannabis sativa
  modified_base (61)..(65): a, c, t, g, unknown or other
gaagactcagatcattgctcctcaaatggtgacttgtacatggtttcagatcaaagaatcnnnnntgaatggattcttgattctggatgcacataccatatgtgtcatattcttgaaacttttattgattataggaaagtgaatgctggtactgtactaatggggaatgacaaatcttgcagggtaatcggcattggaaatgttgctataaagcatattgatggcactttttgaatgctgcatgaagtaagacacatgccagagttgaggagaaacctgttatcacttggaacccttgaagatgaaggctacaactataaatcctgcaatggccagatgagaattgaaaagggatctctcaccatcattgaaggggtgaaaaagaagaaattggcttatacattctgcaaggaaaaacagtaatggcttgtgaagccaatattgtgcaacaccaagatactgagatggaaatgtggcacaaaagaatgggtcacatgagtgagcaagggatcaaagaattgaccaagcaagggctccttggaaatttcaaacctaattcactaccattctgtgaagcatgtgtgttgggaaagcaccacaggttgaaattcatggcaggtaatcattgctctaaaaggccattggaatatgttcatgctgatctgtgggatctcacaaggttgaaactcactcaggtaaacactatttcttgtttattgtagatgatttcagtaggcatgtgtgggtttatctacttaaaactaagaatgaatgcttagaaaaattcagagaatggaaaactgaagtagaaaactagtatgaaaagaaattgaaagtgcttaggacaaataatagtttagaattcatcaatgctgaatttggcttgctgtgttttgagtttggaattgttaggcataggactgttaagcacacacctcagtaaaatcgtgttgctgagagaatgaatagga

SEQ ID NO: 141769 - DNA, 1090 bp, Cannabis sativa
tatctttttctatttatactaatctttagtggtaatttgcctccctgtggatacgacaatagcccgtttattaccgcgaccgcagtgtaactaattgggcgacatcaataggaaacacatacacaaaaatataaggatatatgcaaaaatcctaattagcctaaatcattatgttgaacatcttttgctatttgtaattgattgtttgatttttcaaatctagcattatgattatataattaaggcgaagcgctcaataattaactcttttacctaagcagtaaatccaagaagcaggcaatttatttaacttagataaagctttgagatttatagagatagactaatctaggcaacaaattaattaagtagataattcatttaacctgagttttatttttcatcacaattaaaattgcaatttgtcataaacaattagaatcctagactattaggtgaatagtaattctaagatgacggtagattaaagtaaaacttaatttagcggccgtctaaacaagattaaaataataatcataacattgaacatagaagatacaaaccatttgatataataaaaattagaaatcgacattcaataatgaaattaagaattcatgtctcgggttttgaaataacccttaactaaaagaaaactactctgaattaggcattataaagaaaattataatatttagtaagagtttaaggagaagaaaagaactagaatgaagaatacttcgaagctgcgacctccttctcttccttgctctctctccaagtttctctctctattttgtagctctagaataatgaaatttgtagcttaagagatcttatttacagtactagaaaatatctcactaaaagaaaagataaatcatctttttttgaaaaaaaaaaataataaaaaaaattgcagtgcagaaattcatccctcaccgcggcgacggggcttgacaccttgttagagtttgactcaaattatttatttctttatttatttaataatatttataaagttgcaatttctttttgggtaattattaattatgggaaaaggaaagtcttggtggccaagttttgaaaa

SEQ ID NO: 141770 - DNA, 548 bp, Cannabis sativa
tagaaaaaattagaaaacaacaagaagatgaaataccacacataatcaaagtgcatggagtaaacattttatgtgtggaattaaataatagtggttatgtacttgtagaatagacacacttataatcaagggaaaactatatttgattattgaataggaacgtgatttgtttaataaataaattgctgtacattttgattttgttttatatttagattatttaaatatcattccctgaagagaataaatagagatgaaatagtatttcaaagaatatagattttacatatactagtaatgtcagaagaaaattaatatacacattttattatttcataaaatcaatagtgcaaagacttgattttgaccgagtcaaatatatatataaaataataattaaataataataatatatatatatgtataaaaaaatttaatatatataataacagaccctttcgtcccccctctctctctacctatctctctttttctctctcttcaaaacacaagaaagaaaacccacaaactaccatcaccaccacact

SEQ ID NO: 141771 - DNA, 630 bp, Cannabis sativa
cctattaataatttcttgacattcaggatccttcaaccagtgagtttcgaatcgaaaacatctttttttatcataccgctgccgcctagaaacattctcaagagtggccacaataggcctatgatctgaatttaggaagtcgccattaagaaccttaacaaatggaaacaaatcatgccacctttggttacagaaataatgatcaaggcgttcttgtacatgcgcacccccttgtcttttattcaaccatgtaaaacactgtccttcaaaccccaaatccgccaaagagcacctatccaaggcattttgaaactcagtcatagccgacatactacgatcagacccacccttcttctcatttatcgaaagaatctcattaaagtcaccaccacatatccatggaagatcaaataaatccttcaatctgcataacaatctccatgattctgaccgacaactcgcctttgggttaccataaaatccagtgaaccgccataattccctaccagggcacttaactagagcgtcaatatgacccgaagtgaacgacttgacactcacctcccaatcatcattccataataataacagaccaccactcttcccaatacaatcaacatgaaaactatt

SEQ ID NO: 141772 - DNA, 579 bp, Cannabis sativa
ccccacgcggggggatctccaacactcatatctcttcttccatcaatcttggttcattgtccccgcgcactaccagtactgacaagtgtgtgcgatgttgtagcattgccttgtctctccctggtttcccctcactatccccactcccacttcctgagtagggaatttgaggcataagtgccgaatggaggagattgctccgaaatcgaccaaggcaggctggccaaggatgctgttgtacgctgttgggcaatccactactacgaaggtgcagtatttgaaagtgctttgtggcgtatcaaggcacaaggtgacaggtaatctcactttccccattgggataagtgttgtcccgttaaatcttgtaagttaggagccgctgggtgatagatccttgtttgtgaggcctatggccgtgaaggcttctttgaacaataagttcacaaaactcccattatctactaatattcttgccacgattttattggcgatgagagtttcgatgaccaaaggatcatggtgagggaaacgcaccagttttgcgtcatcttctgtgaaggtaatgggctggtccatgag

SEQ ID NO: 141773 - DNA, 587 bp, Cannabis sativa
ggccagcgactgagtttccatgtacacactttctatatctttagtcagaatagtgaatgtagtgtatttggcatggttctcccagggagcttgtttggatttttcagtgcacgttcctttcttcccattcccttgcttgtggttgttgctggaacacttaccacttgagctcaaattacttgggtagtggggaagtttggcggatgttccagtaggaagagcctattacttgccaggcttttgctcaccttccgctcgttgaatggattcttcgagcttgataaagccttcggcacggtcaagaaaatcactcattgagtctaccggcccgttcttccttatatccttccagagttaaccgaggacttcgatgccccacagtattgcagataactttccatctttagttacccgtgaaactttggtcacctccgtcatgaatctactgatgtatgccaagagaggctcacgtggtcgttgcttaacttcgaccaagtctcccaaatgcaatggaagttggcgtgaggaggagaattgtgcatggaatttctaagtgacggttttccatgaagtaaactttctaggag

SEQ ID NO: 141774 - DNA, 961 bp, Cannabis sativa
caattggatatccaatgtttatatccaatgtttggcggtatccaatgtttggcggtcgatgtttggcggtcggttgtcttggcggtcggttgtcattgggtcggttgtcattggattggggttgtcattggattggatcgatttatgcacacccctactaaattgggtagattccacaccaaattggtgtaatcattggagatggtcttaggtgcatttggtaaaatatttttcgacttgaattttaccttagtataattaccacaaagttaaatgaaattttagttgctgtagcattgaaccactattaatttagtacaaatcggtgataacatagacaccattattaatgttcacttgagatcgcatgtctcgctcttgcacagttaatgtattggattttatgccctaaataacgcattttaatataatcttatttgctaattaataaaagatcataaatcattttatgttgcatggttcacataattacatgattatatgtttaatatataaattctattaaatctcgaacatataattactcatgattatagtattgtctacaatatagaaattattcatgattatattcttcaaactattattagtcccacgatttattagtgtactgaatttatactgacgtgataatcagcgatgtggtttatttatacttgtataagtgggatgtctttttcagggcattagcaaagtaaacatgtatctaatgtattggctatacatcaaactggactgatattgatagtggaaaatatttcataaacttatcgctatgtattttctaagtcaatgtcccttagttgatcttaggtcaattgatctcaatcctgaatgattaaattctagcttaattatactatacgggttctttaacttgtttgttaccagcttacccgtaggagtcagtgacggacccaggatttttactttgtggggg

SEQ ID NO: 141775 - DNA, 501 bp, Cannabis sativa
gcttggcgtatgacacccaaagcttctgcatcatttgttgtggaatgaatgtttaatatctgcttgatctctttactcgaagttggaagaaatggattacatgccttctccagtttaagggtagttagaatcataagcaagctcttgttgcagagatgagctacatgtgttgcataagattggagtgcctcgttctcaggctctatagacaatgcgaactttgaattactcaatgtatatttatggccacagtatacatttgtgtcatctggcaaagacgtaatctttctaatggatgacaacatctgtttaggggttccttcaaacaatttgccacatgataaactgaacaatgtatctccagtgaaaattgcccaaaatccaggaaagtagaagctaatatgacatcatgtataaccaggagtctccataacatgcacctcatggcttgcaaacatccactcatccccatcatccaaaacaatatcaatgcctggaatt

SEQ ID NO: 141776 - DNA, 910 bp, Cannabis sativa
ttcaatcgttgtccattgaccttgaattctcttccggacttttcatctttcaccacaacagccccgaaaggatacaattccatcactgtgaatggacccgaccaacgggacgtaagctttcccggaaatagcttcaatcttgagttaaacaacaaaacttgctgatttttcacaaaaactctctctttgatcctactatcatgccacttcttcatcttttccttgtacaacttggcattgtcataggcaaacaagcgcaactcatctaactcatttaatttcaatttctgagcctttcccgcagctaaaagatcaaaattcaggttcttaagtgcccaaaatgccttgtgttccaactccacgcgaagatgacatgccttcccataaactaggcgataaggagacatgcctaggggagttttaaatgccatacggtaggcccaaagtgagtcatctaaccgttgtggccaatcttttttgctaggattcacaactctttcaagaattcccttgatgtctctattggaaatttcagcttgcctgttggtttgtgggtgataagcggtggctattttgtgcttcacgctatacttggctaaaagggcagccaagactttttttcacaaagtgtatcccttcataactaatcaacgctcgcggtgtcccaaatcttgtgaaaacattcttatgcaaaaattttatcaccaccttggcatcattggttggactagctattgcttccacccatttggaaacttaatctacggccaccaatacgtaaagattcccgaaagacggagggaatggcctcgatcattctgactcttcgcccctcgacatttcaatgttgccttagtattgtagtcctgctgactttcaccttaggccaacattgccatgatgttatctt

SEQ ID NO: 141777 - DNA, 555 bp, Cannabis sativa
ctacatgtagaaggtctcaacctcattcccctcatcagaagatcccatttgctgcagccgagaccttattcacagcctcaggatattcctcaatactagagagaggttggcgcaaaggtattctagtgcaagtttgggtcttggttttgttggattctctaatagaaaccacgccaactttccccccagattcatccaaaaccatgccaactttccttcgggattccttgtcaacctgaggaggacctctaagatcgttcacaagatctatgtctatttctgcagagactaagataaaaaagaagggggtcaatggagcaacaaaaaataataatggtccgactcaaaccaccacccacaagggacaatacttaccctcaagcatcacttgtgaagatcacctataacaatcaacgggttccctcagtttggattggtcggaagctcctcagtcttagaatcaatcgtttcttgttccaattgaggtttgaagtccttgggaacgaatggagaagaaaaatggttggtgcatcctagtgttatgaatttgggagg

SEQ ID NO: 141778 - DNA, 715 bp, Cannabis sativa
  modified_base (271)..(271): a, c, t, g, unknown or other
cattgttttattgttcctttgctattctgaaactcaaatatgacactctcttccctatctaataaaagatcacaacgtatgactttccctctcctattgagagaaacttctgaatgtggtctctttttctgaaagtgtttaccattatcataccataagaacacttgatttgagaacgagtctaaatcatcatcatcatcatcatcaaaatgagtagcttttggcattgcataatgtcgagaatcatagggttccatctcaaaatcaattngcaatgagtggagtagcccatgttgctcaattctctgccatttattctatgtgggacaatatccacaatacataattgaatagaattgaaagttctgaccattcttggttttcacattgtatttacattttaacacatcatcacgtttcaaagtggtcgcttcaaactcaacagcaatgcataaagcaaagcctaagaagttgcgaagatcttttgaagaggaaaaaggtaagtttagttcaagtgatgatcccatagattgatgagcaaaccattgaataattgtatctcctggataacaaaaactttgtctactcaaatcctacatgttaagggaattcagttactgagtctgttattttctgttaagttggttatcaactgttttagcttttggttgttagtctccttttcagttgtaacagattcttgttttagtcttta

SEQ ID NO: 141779 - DNA, 642 bp, Cannabis sativa
atacatggtagtaaatctagatgctggtaaaataattccaacatgtcaaggataggaataaagagttgtataaagatgtttagaaaattctatttcgaattcgcaaaatagtaattatttattgataaatataattctataattactaagagtgaaattctatatttatagtggagtaatcatagaattaataaacaagagattatttagttcatgagactcaataaataatctagtttattggagcttagaattataagtctatagtccctgaattgccaccttgaaatactgtcaagggtatgaataaggaattgtataaagatgttcagaaaaatttatttcgaattggaaaaatagtaattattaatttttctaataaataaatattttttcttcaaattaattaaatagggaaaagataaaaattgttaagacaaaatttttcgagataagatttgttaatccaaaagtttttaggagaaaagacaccaaccttatcctaaagataatggtaggcgcttatgcttgctcctatccctatgtgatttatctttttcggttaattaatttaataaggtaaatatctaatttgaaaagtagttatagatattttaaggttgttgagatattctctcaagt

SEQ ID NO: 141780 - DNA, 772 bp, Cannabis sativa
aggagttagtcgactttcaacaaattttaaccaatctgtaaggtcaattttgggatgctttttagggacgtatgccaaccgttcaaaatcatttcattttaatgcgtgtatgatgatatcttttgtcattctgttcttgaagtctttcattaacattccagcaaggatcagacaatcatgtttgaaatcatctcgcaccataaaacccgtctagttttaaggaaaataaaatgattagagttaacatctaaattaatcaagcatagaccgaaattctcacaaataactgcttacatgtatatctttataaatcttgttatttagtgtagggttgacttgcttccgattttcataggacaaccttatcgtctgacggcatctaactcctaaagtcgatactagatctgaataacttttgccaatatactctcgtttatctttgacttggagaggaagtctttttccttagtccatcagcttggatacttcattcatctgagtagctcctcgtgtaagtatctccctagggcactctgctgctaggtctgaatctgagcctgaacctgagttagccatatctacaccattaacaaacaaaatataaagttagctattatagagtaactacgtacataaaaaatagtatcacaagtaatctataacaaatattaactacataaacaaatattacaacaagtaagctattgcaagtaagttaccaattagacacattttcttttctttttttgtttatgtttgcctgaatcacaat

SEQ ID NO: 141781 - DNA, 1785 bp, Cannabis sativa
  modified_base (311)..(322): a, c, t, g, unknown or other
cgttgtaacgagaagggaaatacttcctctccaagcccatagccctataaatagtgatgcatgttcactgggcaaatgctcgatagattttacgtgagagatattgtctaagaatttatattcagagatattgtcgtaagggctataagaaaaggaacctttctccttgttctttagttaacacaaccgaactgctcaggactgaactacttgtttcttactaaattagactcactgtgtcttcatattgtttcttactaaattagactcacttttcttactgaactactgtcgttggctaaaagcgaggnnnnnnnnnnnntgctttcattgagagcagaatcaggaatcgctcttcattctaaatttaaccacaaatgcgatggtggtacagactcgtaggggcctagttgatctggcaaatccacgggcggtggatcatgcatcgcagaacccaggaaacacaatggttccgcgaactgttaatcccgagcaaccatcaaatgtatgccatggtgtgacgactcatgtggatgaaatcgcgcctggtgtgcaagagtcatgacccaggcagggcattcataacacagtcgttccgcctgctaccaacgctcgaacgaccgttggagatgatagtgagatctgaaatctccgtgctgctcttggactcatggagggtcataccaacaccatacatcatgatctgaaatctggcgttcgaagagcaaaggcgcatgtttgccgagtggagagacaaaaagatggaagcgttaagggctcatcatgcagagattgacaatcgtagccggaaagctactatactgatacaaaagcctactaaactgtctggcaacaacccccgaatgtcatccccctaggtgaaacagaagaagatccagcgacgaatacttcccagactataaatggtcagccgccaaatctccggtcacagcttccgcctttgggctaagcagtaggtgggcagaccttgtctagtaattcatcaggagaagtcatacctgatagttccaaccaagctaacggttgtgcaattccacctgtcaaccaagtcaattaatcactgagagagccaggcgcttctgtattcgataggttggggacaactcatgatctaagaaacaatctgaatagaaggagaggagtagatgatcagcttggcacgacgatcgtacagccctgaacccgtgctcaaattcctgctcagaaagatactgacatgactcaaatcgaccagaatgctgagcaggttagtctagatgtgcaggcacaacaagacaaactaaagagtatgttccaaggcatggccggacagagaaacaatgatctcgagttggactgagtacgtggcacccctttctctcccgagatcgatctcctggcgttgccccgcaagtttaaaatgccaacctggaaaatctacactggaagagaagatcctctatcccacctcaagtatttcgagatgcaaatggatctgcaaggtacacgaggggatgtgtgctgctgagtttttcctgctaccctctcggaagccgcccaataatggtatttcaagctagctcctggaaagttcaactcatggaaagctttctcctcgaaattcaatgcacaattctcctcctcttgcaaactttcgttgcatcttggagacctggtccaagtcaagcaaagaccaggtgagcctctccgcgcatacatcaggagattcatgacggaagcgaccaagatctcatgggtaactgaagatggaaagctgtccgcgat

SEQ ID NO: 141782 - DNA, 1131 bp, Cannabis sativa
tgtcatttcttcttcatcgttgtatactatttctatagccggttgcgtgaagttcatcccatgaaaatacaaggttgtgtacgattgttggatgccatgcataaacaaatgtactcgaatattatctggactcttgaagttcacattcagaaatctcatgcacggggatcgagtaagtcgagtagaatttatttgcattcaagcaactcctataaattcatccatacccctacgaaactctacagatcatctaattaaagtcatctaacttttgtcgcttaccatatttttaatgtcatctatcacatagagatcaccaacaactacccacggtttagagcatccctgtgacaccctactagattaggcgtgttagggtgctttctagatactgtgcatgcctttactaatcaaagcgtttaataaaaatgtgaatgattaaaaaactttatcgtataactttactttaatatttaaacataatattttacataatctggcatcccattttaaaagttgcataagtttataaactatttataaatcaaaagtagacgtctagggaccaacaaaagtgagttggcactgtcccaaagactctgaacactccaggtctaaccgtcatgatatgtacaatcttcatccttagctttagactcttcaatggttcgattctagctcaaacctacacatacacatagtaactgtgagtcgacagacttagtaagaaaagcataatcataacataaatgtaaataggattaagattaggcacccataccgctaaccgtaacccttccccgcatctaacacgatattgagtcaagaacgttcaaacgacagcactagtgaccacaatatcagcctatactcgatacgctaatcgtactctagccgtactgatgtgatacggtcaagtagtacagtattatcgactataaaattagcctatactcggtacgctagtcgtactctagtcgtaccgatgtgatactgtcgagtagtacaaatgccaatatacatttatcgatatctaatataatatcaaatatactcataccgctattgtaattgtaacaccctaatctatagggacaccacgtgtgtgattttataaactagtttaatact

SEQ ID NO: 141783 - DNA, 759 bp, Cannabis sativa
aatattttgatagactttgatattaaagagagttttttaatctgttttttattaagatattttccccttattataatgtataattgctgaagatcaattcaacatatccaacacatacatacggatgcacaccctcaccctcaccctcacagccgtacatcgagatgatccaggaaacgaatttgtacaacacatgtatatatatttattattgataaatatgtcgacattcttagacttttatccataggattcaagtacttatattattgaaatcaattgtttcatttaattattgctgtgacttacatagtattattgaagaactcattattgtccctttcaaacaaaaattaaaaaaaatcattttattgttgtatttttcttttatttatacgctttataaatgattatcattaagtatttttttttaaaaaattaaattaaatataatcaattatttaaatttaagttttaaacaaaactcttgttaaaaaataatatttataaataattttttttatatttaaatacctattataatttattttaacagttaaaccatttaattataatatttactcgaattttaaagacgatgatatgtcaagagtagcaacatgtggtacaaaaatactaagactaaattaatgaagaatatataaagtcacgaccgttggtcatgaccgttaggatggaaattagacggtcacccttacccctagcttgagtaaggtgggcgtctccaagaaggaaaaa

SEQ ID NO: 141784 - DNA, 1723 bp, Cannabis sativa
gtgcgaaaaccaaccttgtcgcatcgttctctggtctcgacttctttttcagcaagcttcttctcaaattcatcggcttgggcttcgatggtcttcttgacttcctcttttgccttctcggcttcctctttcgctttctcggcttcttgcttaaggcgggtgttatcctattgggcatcgtcccgttgcttactcacaaccttgcattgttatagtaatttgtggacctcaccctgcaagtgttcgagccgctcagagagtcgttgattgaaagcaaaagaagcgaaagatgcctagagaattgcaaacagatgaatatgaaagaggtataaaaaaataatataattataataataaagccagcttaccatgaagttatagtccaagctccttgaaagcatctcttttggactcccaagattaagaaaatcccaatcagggggtagaagagtttgaagtttgtgccagcaggcaactccatacgcttgggcaagttcagacttagcctctcctggtgcggccgacaaggtctcaatggccttgcttgaagaagcagtagcatgggttgcctcaggacgaggagcattggcatcgaaaacgattggaggcagaacttgttcttggatctcgttgtcaaagacctcgagatcgatgggtcggccagtgacttcttcttatgggcggtggttttcctttgcctcttgggaggaaccacttcagcatctgtagcgaccccagggttggttaccctcttcttccctttccggtccatgatatcttcataacccatgtctgcaaaacaaggcaaagcattacagttgttaaaaaggctgatgaaaaagggtaagagtgaaaattttcacctaatcgatttagcaaagtcactagaaggcgagctatcactagacgaaggggtaaaaggaccataatatccactaaaatccctacagcctgtaatcttgaatatatcaaaaggctcgattggatctatcccaactcgcatctatatgacctgctctgtcttccatagtagcgtattgctcagctataccataatatgactcgtgacagttaacctggatgtggaatctaggatactagctgtcaaacttatgagcaatgccgtcaacgagaaggaaatcccaaatataaaatttaaggcgggagtcttagaaggtgactaatgtactatgttcagccctaagtacagtgggaaaccaatcacattgattacctggggatgctccttcaccggcttcccaaggggcagtgctttgaagatattgtgcttgagccaagcgatcccaggccttatcctcgtttggaacggtaattttctaccaagaagaatacttgggaatcttgtaatcacaagtatattccttgtcagcgagaaggcccaccgatcgtaggttggcctcatttagaaggaactcgcatgaccgaagaccgtagggaagagttatcagacgcctgtgcctactgaccatctagggggtaggagtaggtctcgtcaagaaagctgtcaaaacaaataaaacattgatcaaaaacttgaaaaacaaagattgacataaatgagcaagaggaaaacaatcacttacgaagtttgcgaaaagtgtttgtgccgatagggtaaagaccagatgtctagaagaagttttccttgaaggatactttatttgccaagtccacaatgattttaggcttgctagaatgagta

SEQ ID NO: 141785 - DNA, 627 bp, Cannabis sativa
aagctagtcctaccctgactcgctaattcggccctagcaaagttctaaatcttaatactggctgcatcatccctgagatagctgtctgagggccggaaccaactagaagaaaaataggccgaaggatccaaggagcgggctccggaggtccagaacccattcgggaccgacataactaatctcctaagttgtagaaataataatcctttgcatgatccccccacgggtcgagggcatcctaaaactaaggagacgttcatcgaacccagcaggcctaaggctagcatattcgctaacaggagggacataatgtattgctaaaggggacttaccagagctggaagtgctcgtgtcaggagcctctgtattcggcacctgggcgataggccttggcctgggagccctcttctcaactggactcccaatgcgaagggatctcccgacagccgtctggctccttctctcaaccgggctcccaacgcaaaggggcctcccgaaagccacctgggctttagtataatccttttcctaggccttccggtagaggtaatcttggtacttcttttccgcggtggcaataatctcatcccgaaaggtcttctgcgcggccggaaccctcacgttcgg

SEQ ID NO: 141786 - DNA, 519 bp, Cannabis sativa
  modified_base (478)..(478): a, c, t, g, unknown or other
caatgtacttataattttaggtggtatcttaatctttttacattctctattatttactttctcgattaagtgatagtctaaaaatttatgtatttcatcttatccactttctttcttattgattttaatttattatttgtcatctaccataataataataataataataataataatagtaataataatcaatatatattggaatatttaaaagaattgatgtggcatacttaagcttcaaatgatctttattagctattatttccgaattcatttttacaattgctttaaatattcctattaatatgctatagttaaaatattatttattttatatatcatttatttatgtctattaatattcttcgtatatatttataactattgatataataccatagttaatatactattatatttttacatgtataactattgatctttggtgtgtaatatatttatttatgttttttttttntttttttgacaaagtgattataatcactcatgaatttacga

SEQ ID NO: 141787 - DNA, 565 bp, Cannabis sativa
ccgaaatgatccaaatgaaaaaaataaagagatccatgtgagttttatacatcaaaaagacggaaaatatcgactgtaatttcaataaaaaatttaggtccgaacgtcgattttaagaatttttcaaattttcatagtttttcaaaggtattcatgctcatatcctttatatagcacaatataaatatgattaaactattcatgaacaaaaatacaacaaactttgaaattaaaaaattctcattcgacagtcccgaaaacgaaaaaactcgtacatatatatatacatgcctataacaaattttatgatatgaaactacgaggaatatatagattagattattctaatcaatattaaaaaaataaaattatataatcatagagaattatatataaacatgtataggcgaaactatatatatttatatataaatatatattatatatcaacgtgaagaacatatatatatgtatatataaaaataaaatgagtatgaatgtatatatataatcaggattatataatatgaaaaaatatataaaatttatattataaatgaagaac

SEQ ID NO: 141788 - DNA, 525 bp, Cannabis sativa
gataccaatcacatactcctagccaaatcacttgataaaatcgaagagagatgagccactgcaaacttgaagttgatggcccatcaacaaaaagtagctcgatatttcagcaaacaagtgacggctcgaaaactctttttgggagatatggtcctaagaagggtattcttaaacaccaaagacagtacgacaggtgtacttggacctaacttggagggaccatatcaagtggtcgaagttctcgaatccggagcatacaaattaggtaagtagaatgaaaaaatgcacctcgttctagtaccacggtattggaatggggaaaatttaagaaaatactaccaataaagtaccaggtcagacgaccacactaagtattgaatgaacatttactcttaagtgaatggcctcctgggcggactacgctcaaaagtttcgaaaaaaggaaaaaagtactcaggtcaggtgaccaccatctaaagtacaagttctatttctacaatttgttttatttcatgttaagctaaa

SEQ ID NO: 141789 - DNA, 1062 bp, Cannabis sativa
gggcttacgttaggttgggctcaaaaaaaaaaaaatattggggaaaatagaggaaactacactttatacctttttttttttattttattttaatttttacttttattttattattctttattttatacccaattttaaaggttatattatatttccattatacccattacaaactctaattatgataagtcatgatgaaattatatttagtattttaattataaaagagggtatttatcgattaaaattattttaaaattatatttggttaatatgtaataaatataggtaattttcaacttacaggaaaacttataaaaatactataaaatagggaaaatttacaaagtattgtcatacagaattttttaaatttttactgtactaactttacgaaaataatgtgtaaagtttcaaaattataaaaatagtgtttcagtaaaaaaaaaaaactcaaaaataactaaaaagcaatactaaaacaactatataacaacaaaaatataattacaaagcaacagaaaaataacaaaatattaacccaattgcaataagtaaaataatatcttaatatgttattgtatttacgatatttttttacttagttttgacaatgttatatatttgtaatattacattattttttttcatggaattttattgttacaattttatttttttaatttttttttctttttctttttgagttagtgatagttaaaaaacaactataatctgaaaaataactaaaaaataatatgaaaataacaaaacaaatacacatatatacaacaaaaatattatctggaataaactgaaaatatacacgataaaaaatgcacataaactaaacatgtgcaaaaaaaatacataaaaacaactataaaaaaattattgaacacttaaacaacaacataaaaacaactataaaataataaaaagacaactataaatcagcagaaaaacaacaagacattaatcttgttataaaatatgcaaatcattcataaattaattttgaataaactacaaaacatccaaaaaaatatactatttttatta

SEQ ID NO: 141790 - DNA, 1061 bp, Cannabis sativa
  modified_base (53)..(67): a, c, t, g, unknown or other
atgtttattcaaaatatgtgtgccatagagtactgtggtgtattgagtatagnnnnnnnnnnnnnnngaactacatatgtcaatagctttatccacccctaaatgttttagagatcatgtggagttatgaatgtaatccagggttcaatagataaaagatcattgaactgcatatattcaaaagatctttttattaaacaaagtcttaattattgcttcagaattaacacttattcataaacatagaattgaaattctaagtgtttatgtggtattatctctttacagagtttaatataccataaaatttgtatcaataatgaaacacaaacacatacaaacattataaacatataaatataattggtatagacatacacaagataaggaaatatgaagctcaattcataaatgcaattcattaccaaatgagaaaactttattataatattctctaaaaaaatgaattgtctgcaataatataaaaaatagggaataaaaagcccaaaccaataattgaaatcaaattgttcataaattaaaacaatttattcaaaaattataataaagaagattttgagcttcatcttcaatcttggataatctccacccatctgtccaaccatccgactcaactcgctaggatagcaatccaagtttaaccagctagagctgaaagaagaagaaaaacaaacatggttagtaggtccagaattaataacccaaggggataatgattctctaaaacacatgagtttatagcataaaagaaataccttgtttctttgctagaaacttagggcattggggtttccagtcccttttcattgtaatagaagcattttccttttggcttatctccgggattagcagcctttttctttttaactttttccacagcttgaacatgcttattgctattcttccactttttcttgttgttgggttgagaagtagaggcaatgtttacctcaaccttagccgccccattagcattcccagaattaggagctttagctcctcctttccgtggtcctccaatcaaatttttaaatgtctga

SEQ ID NO: 141791 - DNA, 562 bp, Cannabis sativa
  modified_base (521)..(535): a, c, t, g, unknown or other
ggatgacacttggaggttgctgacttacagtttggtaggcttttcgtatcagcatagtagcttgccgactacgattttcaatttttgtatgatgagcccttaacgcttccatatctttatctctccactcagtaaacatacgccttcgttcctcgaacgtgaggtttaccgcagcgcggagatcttcctgatcatgatgtagggcattggcatgatcctgcacaagcccaagagcagcacggaggttttgtaactgagtatcatctccaatggttgagtgttggtaacaggccgaacgactgtgttataaatgccctggttgggtgctgaactgttattcccagtctcttgcacaccaggcgccatttcatctatacaagtcgttacaccgtgacccacgtttgccggctgttcaggattaacagctggaggaacccttgcgtttcttgggttcggcaatgtaggatccaccgcctatggattggctggatcaactaggcccctacgagtctgtaccaccnnnnnnnnnnnnnnnagattttgaatgaagagcgattcttga

SEQ ID NO: 141792 - DNA, 1574 bp, Cannabis sativa
  modified_base (1067)..(1067): a, c, t, g, unknown or other
ttaaaaacaaaaaatcacttttaaaatggttaccgaacggggccttagagttttgtgacaactctaaaatgtatttttatttctatctctcttttctttcaaactttgtaaatttttgcataatttattatgagttaatttttcttttgctagaattattttgttgacttcatttgtgatatggtattttgttgctatgtttagtgaattgattttgttcattcaagagtgtttattgtataataacttacttttgcaccattagtaagttgcaagctaatcttgattttgaaaaaaataggattagtggaataacttgaatgatgcatgaatactactttagaaaaatgtggtttgtaaatgacataggaatatgttatttaccttgtatgacttaaaagggattgtgcttaaattgatattcttaaaattaattgggcataagaatatattaattaattaaagaatcaaaccataaatactttggaaaaaagattatgacattttaaattcctagttgacattatcaattcacaataatactcatttgcaccattatatcaacattgcatttttagtccaatttaataattctagcatattttcctctcaaagtttgtgtttgttaatttttatatattctcactactttattttatttttgcttaaaccaatttgtgagtaattagttttataaattaatttctaattttcaatccatgtggagaaaatactcgatttatcactttattacttgttaacgattgtgtgcacttgcgtatattaattttcacagcaaatatgaataagaacagaacataaatccttacaacagtggactacgcagaccgtgatctgactggaccactatacctcttttgttttcattgtgttttcgagattttccagtttgtttgtgtggtctcatttgaatactctccattataggttgagtactcgcgctttttattaaataactatattttttatttttatttggtgttgtcaaaattcctccaacatcataaagtaaataagacacaattttatagaggttcgaccccctnagttagcgggtaatgacctactttccttttagttgtattgataccgagagataatactactcaaatcactatagtgatgggatctgaagtagcaatcttaatattacaatgtataaatcagtaggcaaatctcaaatgagagagagagcctttgaagcgtcagagagagagggagagaggcctttgggcatgtagcagagaggaggagagaagattaaggtttcagacttagagttgaaagctaatgacttagaggcttgagactttagacttagggttttagagataggctaatattctttatatagtaaagcttacatgcctaatatccttaagaataagtaaaataaagctatccgtagcatcttcgtgggttgtcaaggcccaactcgcagcttgacttgttgtccaaggatgaaggctgcacattaatgtcctacaagggaaaagctaaccggccatgaacctgtaggatgtaggttgcccgtgttgggttttatgccctaa

SEQ ID NO: 141793 - DNA, 573 bp, Cannabis sativa
aatttcattttgattaagtcttgcttgttataatgaattttgagatggcttatttattcactttgtatagaaatgtttaatttttgtttttaaataaattgattagataaatttaacaaaatattcatttattatgttaatcctttctttatgtttttttttaactaccacttttatttgcacccaaaaatattataaatatatctctaaaatacatatctttaatttatattaattttttaaaaaacttttttcttccttttcatattcttaaaattatacatataaaattaaaaaatatatatattaagataataaaattaaaataaagaattatatataattcaaaagaataaatgaaaaaaatttacatgttaaaatatagttataattttatcgggtacaaataaaattctttttaagttaatataaattaaaaatgtcattttaacttgtatattgttgactttcattaattatttcttataggatttttttttttttgaaagaattattttttatagttaatggttataagctatataagaataagaatataatgaattataataa

SEQ ID NO: 141794 - DNA, 1115 bp, Cannabis sativa
ttggaggtgaacttcggatctctatccgaaactatagactttggtaccccatgaagccttactatttctttaacatacaactctgcgaactaatcgactggataggttgttttacctggcagaaaattagcagacttcgtgaatcgatctaccacaacccagatagaatcgaacaatcctgtggttataggtaatccaaccacaaagcccatcgtgatgtcctcctactttcattcaggtagggttaaaggctgtaacaaccctactagtctctaatgttcgaccttagtttgttgacaggttaggcatctcgatacgaattctacaaaattcttcttcattccgctccaccagaagtaaggtttaagatcctgatacatcttagtggtgccgggatgtagggaatatggagtggtatgagcctcctcaaaaatttcatttctcagttccacactatttggaacacaaaccctggctttaaacaataacattccactgtctgatacggtaaaatccctggcttgaccagctgaaacctcttcgctgattcttactaactcaggatcaatcatttgggcgactttaattctttctcacagatcagattgtagcgtcaagttgtgaagcttgcctacaacaaattcaatgctagatctgatcatgtcctttgctaactggaatgagatctgaattatactagctacctgcctgggacccttcatgctcagagcatcaaccactacattggctatcccaagatgatataggatctcgcaatcgtaatcttttactaactccaaccatcgtcgttgtctcatattctaatctttctgagtaaagaaatatttgacactcttatggtcggtataaatttcacattttcctccgtgaagataaagccgccaaattttcaaagcaaacaccactgcggccaattctaggtcatgagtcgaatatcgctgttcataatcttttaactgacgggaggcataagtgataaccctatcggcttgcataagtacgcatcccagaccctgtctggatgcatcacaagaaaccacaaacttttctttgtcagaaggcaaagctagcactggagttgtaatcaacctctg

SEQ ID NO: 141795 - DNA, 998 bp, Cannabis sativa
actctcaatcgtaacacctttccaatgatatgccttgatccaactaagtgcttctttgattcccatggcttctatcacttcaggtgcaaagtagcctccatgatacgcaacatgaatgtgaagaggggaacctagatgatcacgagccaccatcccgaacccataggaattttcttgctcaaatgaagcggcatcaacattaatcttgatagtttccaacaccgatttgacccaaagctcatttcaatcacctatattgttgagaaatatagatgaaagagaagaaatgtcctgagcttttctccaatgatcaagagaagtagttgccgataccataacctcattcaaagaggatgtttgattcttccacacttttttattttgcaccttccacaatgcccaacaaaccataacaattttacacatattttcggttgcagtagaagaaaatgtgagttcaagccaagatgcaaatgtacccccgggggttcggatggtgcacaccaaggtgctgccaacatgcagcagccaaagaacactcaactaaggcgtgagaggtgttttcgggttgggtagcacacatgggacaaaggatagaaacatttacatgtttggtgacaagatttaaacaagtggggaggcagtttgtcaaggcgtgccacagcatatttttaacttttggaggtattttcagctgccacaactccttccagaacccgaagttgttagctgcaggtcgaggaaaatttgtaatgtaaggtatttttaacaaggaaatttggtttagtatgcttaaatataaaatatgttgttttaatataccattaaattagaaatagtatatatatacttttaatatttttttctcctaaaaatacccttacatttcaaaaaaacttctctctctcactctccggtgttaatcccaacccagaacccctactgtcgaacacacagacccagaacctcggtcgcaaggcctcgccgtcatcttctct

SEQ ID NO: 141796 - DNA, 829 bp, Cannabis sativa
gactgttgtaattcatgcattgcaaatggtgaacgaacttgcaggttgttaagatgttccacatgctgttgctgattttttatttttttcttgatgttcccgaatttccccctatgccattcctataatgaatttgagcatagttgaagtgaattcttaaaatcagcaagtacattcccagattgagaatgaaaccagttgttctttataattgtggctgcttctgcttccttcaaccagagtttctcaaatcgaaaacgatgcagtttttgctgttgaggcattactgtgagggtcaacacttgaacagataaagctcgatgatctgagttgaagaagtctaagtgttgtgtgacaattggttggaaaaaatcagcccaagaagagttaacaaagaaccaatcaatcctttctttgatagtgtcaactgtgtgcctaccctttatccaagtaaattgatcaccatgaaaaggctgttcaaaaagttggcaggtgtctagagctgaacgaaacctatccatttgtgcctcatttcgcaaagaaccaccagacttattattgtgtgagagaatttcgttaaagtctccaattactaaccacggtgtttgaggagcaacatctttaagtctttcaagcaaagtccaagttaagggtcgattatgagcagccggagccccataaaatgcagagaaatgccatttcggatcattcccaacagccatgtaacagtcaaataagtttgtattatgatttaaaagagttacagttacatcatctttccactataacattaaaccaccactacgaccgacacgagggacttcaagtc

SEQ ID NO: 141797 - DNA, 521 bp, Cannabis sativa
attgcataaaatacaattcaatataatacaatacaatacagtgtaatacgacataccaaaagaaccctaaattatttagtattttcagtaccataaattattcgaaaatttttaaaaatttataggaataatgttgtaaagatatataacgaacactactatgaaataaattttgaaaaaaaaaatatttcaatatgctttcaaacataaaagttaactaaaaagtaatagtatagctagtaaattaaaggtattagaaaggtagctagagacaattataagctatatatatatatttgagaattgagatattaatttatataattaatgagtcattagttttatatttaggatatctaaatccctataaaacatattcaatgtttaataatattaatgttattgtatgagaaagaataatattcatattatcagggccggccctgaaaatttatgggccaagacgaattaaattttggggccctcaaaaatatatcaaaaaaagagtgtcatgggatttg

SEQ ID NO: 141798 - DNA, 790 bp, Cannabis sativa
acatcttccacgttggcattttaaacttgtggggcaacggcatgagattgatctcgggcgagacaggagttccaagtgctcggtccagctcaagatcattgtttctttgtccagccatgccgtgaaacataattttcagttcgtctagcggtgcacgtacggctgggctaacctactcggcattctgatcaatttgaattacgtcagcatctttttgagcgggaatttgagtacgggctccgtgctccacgatcatcgtaacattctgatcgtctactcccctccttctatttagatcattccttaggtcatgggtcgtccccaacctttcgaatacagaagtgccatgctgcctcagtgattgattcgcttggttgacggaaggaatggcaccattgatctggttggaaccatcaggtatgacttctcctgatgaattaccaaacaaggtttgccagcctaccgctaggcccacgagtggaactcgtgacaggggattgggcgactgaccatttgcagtgtgagaagtattcatcgccggatcttcgtccgtctcacccaggggaatgacatttgcagattgctaacctacagtttggtaggcttttcgtatcagcacggtagcttaccgactatgatgagccttttcgtaacgcatccatctatctacctctccattcggtaaacatacgcctttgttcttcgaacgtgagattgaccatagtgcggagttcgtcttgatcatgatggagggtattgttatgattctgcatgagtccaagagcgtcgc

SEQ ID NO: 141799 - DNA, 842 bp, Cannabis sativa
ataaaatgagtgctgacatcatcaagttagtatttttgtaattaaagactttttaaaattgaaaaatgtaaaaatggatttgtaaaaatattttaaaaaaatgataactgataaaaatgtaaaaaaacttagccaatcttaacatctattgttaaaaaaattagattctaaaaaactaccaaattaaaaaaaaaaatagttattattaatttaatatcaagataaaaaattaaaatatataaatatgattagaataaaaataaaatataataaaaaaattattaaaattaattcattgggaagcaaatatagtaccccttatcaattcaaaattatatacccgctaataattttatcaatttttttattttttattatttatttttggcttgaaccaaccaacagttcccattaattaaaaaagaggtataaaagaaaaacaaaagaagaagagaattttatttacactctaaaaactagtaaaaacactctattttaataattttaattttatataaaatttatatctttaattgtactaactttttttaatttgtttctttcattcatatttttaaaaaatattttgtcaaataaaaataaattatactttaaatattatgataaaaaaattaaaataaaaaattatataaatgtttcttagaaaaaaatatatatacatatatatacataatttataaaaaaaataaaataaaataaaattaacataatataatttatgcgaggaaaaaacttaaaagttcaatgcggtctatttttttttttttttttttttttttaaagtttaattttgcccttatgaattagagtttatataataa

SEQ ID NO: 141800 - DNA, 927 bp, Cannabis sativa
  modified_base (283)..(284): a, c, t, g, unknown or other
ctccgggcatacataagcagattcatgacggaagcgaccaaagtttcacaggtaaccgaggatggaaagttatccgcgatactgaggggcattgagtcctccgtgaactttggaaagatataaggaagaacgggccggtagactcaatgagtgatttccttaaccgagccgaaggcttcatcaggctcgaggaagctattcaatgagcaaaaggtgagcaaaagctaggtaagtcaaaggcttcttccactggaacatccgcccaacttccccattacccaannaattcaagctcaagtggtaagcgttctagtaacaaccacaagcaagggaatgggaagaaaggaaagttcactggaaaatccgaacaagctccccaggagaatcatgccaaatacactgcattcactattttgactaaagatatagaaagtgtatacatggcaactcagtcgctggccctcataagaagcccgggcccatgaagaaagatgccaacaaaagggacatgataaagttttgtcggttccacagagactacggccacaacactaatgaatgctacaactagaagcgggaaattgaattcctaataaggaaaaacaatccacacctgcaaaaatatgataagactgaccaaggtcacaggatcgacaacaaccaagatttgctacctccaccagcagatggaattctgcaagtcattgttggaggccctcacattgctggagattcgggcgaaactcgggagaggtatgcccaaacagtgcagcacgagcaagaagtcatcctggctgtggaagaaaggaagccaaaagttccacgagcaggagagccgaccataaccttcaacgaggaagatgctgtgaaaattagatttttgcacaacgactcgctggtcgtggaagtcaagatagccaataaaat

SEQ ID NO: 141801 - DNA, 1482 bp, Cannabis sativa
  modified_base (1178)..(1182): a, c, t, g, unknown or other
tcatatttagggtgtttaaacaacgtacgtgtgagtagatctaagatcctggtaaaaaatattccaacagtaagtttgtggtaaactactgctttctccaccattacatcctttgtgttcataaaacattatgcagcatcatattctatacacattactcatctacgaatactgaattgcttactacttattaagtgcaagtgcatctgaataaacaaaagataatgtctctaattctatccaaaatggaataaagataacatagttaagaactttcttcagttaaataactttccagtgcttttcaaaagcacctaagttatgtatcttcaccgatggagcttaaattattatagatgggtctttacatccttctagaataatttctccacccccagagtaaccaccatctcgaataggttatgagttggtgtagatataaggattctaatgtacacccttatcatctcacatataggtcacttttagagatttttcttgactgtctcctaatgttccttgttcgattacatcttagattgctcccactcaacactaggagtgtagttaaattcatacatagaagtacatttaacctcttactattgttactcagggacatcttgttgtgacgtattatcttagtgtgaaacattaagttccttctagactaagtcgtcaacatagcattctagtataaacattaatgtacaatacttgcttaagattaagtaatcattagagataccataaaacatttcttgaagattaggtattttttccaagtcattcaaatagagtttgcaaattttcttatcttatcctcaaaattctgataagttgtttctatccatatgaatggttagatttactttctcagttgaattctaaagttcttatcatgatcataacatagtaatctatcactagtgtcatccaaataaagatgagcttagaatttgaaaattctcttactcaaataaggtactgtgatactatgtccaagaaatttattggtatcaatttctattactacagtaacatattaattggaacaaaaaacaggataaagaataagttctaataaatttgctaattagttcattatactatatccatgtctaatcaaaatatgtgttatagagatactatagtgtattgagtatagtctagagttnnnnntgaactacatatgtcaatagctttttccacccctaagtgttatagagatcatgtggagttattaatatatctagagttcaatagatataaaagtttgcatatgttacttcttaacttcttctatccctatcagatcaaaagatccttttattaaacaaaatctttataattgtttaagaattaacaattattcataaacattgaatttaaattcaaagtgtttatgtggcattatctctttccaaagatggaaatatcatagattttgtatcaataataaaacacaaacacatacaaaca

SEQ ID NO: 141802 - DNA, 802 bp, Cannabis sativa
catttcaatttcttccgtgccagtgatgctaggctcttcaaggaactggatagggaccaagtttgccttgtcacttatattgctgcttgctaatcaagccaacgcgtctgcaattgtattttcttctcttggaatttttctgagaccgtagcttttgaattatgcgagcagatcatgtattttgctcagatatgctatcattttttctcctcgagcctcgtattcgcctgatacatgatttaccaccatctatgaatcactgtagatctcaacgtgttcggccttcatttcctgggccaacttaagtcaagcgattagagcctcgtattcgactttgttgttagaggctttgaatgcgaacttgactgcatcgtgcaggtgttgcccccagatgtgacaagggcaattcccacactagatagttgatctgttgccaacccatccacatgtagttttcaggtcggtttgtcttcaatattactttgctgaggtactggctcgagattgctttttggtatgatttcttttttgcctgtgcattctaccacaaagtcggccaaggcttggcctttgatagctgttcggggtcggaagttgatttcgtactgacccaattctaccgcccacttgagtaactgtccagaggcatctggcttttgtagtatttgtcgtagtggctggccggtatatacccaaaaaggatgagcttgaaaataaggcctcaccttccttattgctagaatgaggccaaaggcgagcttttctatcaacggatatcgaccttcggcctcgatgagtcttt

SEQ ID NO: 141803 - DNA, 660 bp, Cannabis sativa
ctagttcgtgggcccgattcccagatctaggtacccgtctatatttggatcctaggtcccggtctgggttaaagtttgtgttccggttctagttcgggttcggtctgagtcatggtcccgatttgggttcgggtctgagtttgggtcccagtcccagtctgggtccgggtttcaggtcccagttccgagtctggttcttgggtcctgggttcgcccccagtttttgggtctggttttggcttcgggtttgggtccaggtcccgatcttggtttatgtcccaggacacaggttccggtctgggtccaagtctcggtgtgggttctagtttgggtttaggtttgggtgctgctacagtcccatgtctgagttctagtcctagtcttggtccgattccagttctgggtccccgtgacttgaaactggaagtgggaccgaaagcggactgggacatgggaataagatcaggggactaggacccagactcagacctggacacgacgtggacccaaatcaaaaatcagattatgactcaggacacgaacaaaaactagacatgaacttggacccagatccagacgcaggacctgaatcgagattggagacttagacttggacctaggtcctagacctagattggaacccaaacctgaaattagaac

SEQ ID NO: 141804 - DNA, 503 bp, Cannabis sativa
ttttttcttttttcttcttattcttcttcgtcttcttcctctagccgcactccgaccccctccccacctcgtctttttcttccagccacactccgacccccaccccgtctattgcatttggcatctgctaaccaaatcttcaacgaaaacttaaaatctttttttttttggcctagggaaaacataaatctaattaagcagacaaaaactataacaccctaatctcagtattattttcttttcctttttgcaaatttcaaagagtgagacagatctatgtaagttgaaataagaacaaataaccagatcgccaccattgttttgacaaaaaaataaaaaatcaaacttatataaactaatatgtatatatacacatatgagaataaacaagggagggaacaatcaaatctaaagagagatatacttaaaaatggagttcctgttgggttttatgccctaaataaaattccatttcaatgtaatctattttattcaacatcaat

SEQ ID NO: 141805 - DNA, 612 bp, Cannabis sativa
aagtttttatatcattgctgaggagaagttgttttactagaaattcccaaatataaaataggagagttatatgatataatagattagtttggtggtttccaattggatcaaaaaccctaaaagcagacacaaacaaatgggttacctcctaagtcctacccacccaaagttatgctttgctgtcttttggattttgtagggcactctcgtgacccactgcccaggataataatgtggtcatgccacaccacacccttgtaaatttcatgtcaataaataaataaatcattaatcacatcaaaactttactcatttcaaagttcggttcacataaacaaaatggtaatatgtgtatggttattgagattccaatcatatcataatcctatcctttgcaaaggatataacaagggtttttttttgaaagcaatatataacaagggttaatacatattaaaaaaagtaaaaatttatagaataattctataatgcattctcttaaaaaaatacaccgatacatctttctttgttttagtatcttaaataattttttaggtaaattttttcttatgatcatgtaaattatagttatttaagacattctgcaaaatt

SEQ ID NO: 141806 - DNA, 779 bp, Cannabis sativa
ctctctctctctctctctagccctgaggaccgccgaacttctcttcatttttcggaaacccaagccccaagaactaccgagagaacctcttgattcattcttgtgtatatgtttgtcgatagtattgcgattgtgattgttcttctataggcacagtatgctatgcttacactgtctctacgataggattgtgcttataatgtgatagggatacaattttttttcaacatgggcaataatattttcgatagttttacgaatttttggtgattatttttcgatcgtatatataatacttgtttttgtatatatttatatgttggattttgatagacttagtgttggaatatgttttactaggatctagatttactaacaagtatgattcattaacatcctaatatgaatttctaaaacaatgagagtaaacacatataaaatttcagaaaactttacattaggtgcagcggaatattaatgtctccttccgctcagttctctaacccttgtatcctgtctgtcgcagagtatcaccaagatctaagcctgaatgtccttctcttgattctggattcttcacagtcttccacactatgattgagataccacttgaggtgtgtgggcactcactctatcactcaaggtatgaaaatttgaagaagaaaagagagggaaggtggtttcgactatacgtaggaggctcaattttttgaagacaagaaatttcatcaatctttaagtgtgagccatcactaactatttataggtaaccacctagg

SEQ ID NO: 141807 - DNA, 1710 bp, Cannabis sativa
ttgctaacttttattttgttatttttttttgcagagacctccacagctaataattccactctcggagcattacagaggccgtatcacttggcgcgaccgtagttattactacctgaagattaaggccaaatttgaagaattcagattatgggataggataagggaatcccttttcaaacaatttttcaagagagagccattataattttcaggagcattgattcatcaattgatgttggataaaatcaaatctcacaagctagaccaggtatatttttacttggtgaagaagagatatagatttggtagggtggagtttggtttggtgaccgagttaaacttgttgcccagacctactgaagaagaaattaaagagaaaggaatttcagcccggttgattatggagtatttcaacggtaatcattccatcagctttggccaactacgtagagttttgagaggtacacagaagttgatgatgtctacaagttggggatgaccttgtttgttataggcgtcctcactggtaaggaggagaagacttccgttcctcctcttgtcataagaatggttgacaaccttccattcttctacgagtacccatggggaaagatttcgtacaacaagttgatggaaacttgtaataaatactacaaagatgtgaataataggatgcttaagaagattgaaaagggagttagtcagaaggaagctaaataatcatcttacggctatactgtagcgttgcagtattgggcatacgaggccatcctagagctgggcaacgagtatacagtgaagaagttgcatcactttccgagaatggtgaactgggagagtaagccaaaaacgacatttaggaaggaaggatgaagtgatacgattatttgttagaaatgtaagtttcttatgctttacatttaattcatattaatttccatctattaatatatttgttttatttttcagttgacagtttactctatgttatgtccccgagcgaatgagattgaatttgcgagttacatcactggcgatgaggcacctttatttgttaacttagaggaacttgtgttgggtgacaatgggaaatcaacacaggatgctttgcgaagccaggccaaaaagcttgccttgacattggaagaacgagcggatgcagcctgaatatttagagactctaccacacctacactgtacgctggctagatttggtgaaggattatgactgtgagatcctttatcatcctggtaaggccaacgtggttgctgatgccttaagcagaaaagggtcagagtgagttaagcactgtaaaatgagatgacccgagctaagattgagttggttgtggggcagctggctaatattaccctgcaatccactcttttagagcgaatcaaagaagtacaaatgcaagatcccccattagtgaaaacccgagctaaggtttcggctgggaaggctagtgatttctcagtggataaaacgggaatgttgagattcgggaatcgtgtttgtgtgcccatggatgagaatatcaaaagagagatcatggatgagtctcacacgactccttactcagttcatcaagggtcaacaaaaatgcatcaagacctgaaggccatgttctggtggccatgcatgaagaatgacattgctgagtatgttgcaaagtgccttacttgtcagcaagttaaggttgaacatca

SEQ ID NO: 141808 - DNA, 923 bp, Cannabis sativa
  modified_base (36)..(37): a, c, t, g, unknown or other
gaatggattggttgactaagtacaatgctactatannttgtaagagaaagatggtgaccttcgaaccagagggtgagatcccatttgtttttatgggaaaggtgcatggatctcgaattccattgatatcgacacttagggcaagggaatcattgcgagaaggatgtatgggatacctggctagtgtgttggataccacaaaagatatacctgagggaccagaaaaggttcgaatagtatgtgaatttctagatgtattcccggaagagttaccaggattaccaccaaagagagagattgactttgaaattaaattagtaccaggggctgagctaattttcaaggccccgtatagaatggcaccgacagaattgaagaaattgaaagttcaattatagaacctacttgatctatgattcacgaggtcgggtacctctccttggagtgcaccagttttgttcgtcaagaagaaggacgagtcattatgtatgtgcattgattattgagaattgaacaagttgaaaataaagaacaaatatcctttaccaaggatagatgatttgtttgatcagttacagggaaagaccatcttctccaagattgaccttctatctggttatcaccagttgaggattcgggaagaggatattcccaaaattgcttttcgtactcaatatgggcactacaagtttttagtgatgtccttcgacttgactaatgcaccagcatcatttatggacttaatgaatcgggtatctaaggacttcctcgataattttgtgattgtgtttattgatgacattctagtctattctgaatcggaggaagctcatgaacatcacctttgtatggtattacatcgtctccgagaacacaagctttatgcaaagtttaagaagtgtgagttctggttgtcccaagtg

SEQ ID NO: 141809 - DNA, 527 bp, Cannabis sativa
  modified_base (185)..(185): a, c, t, g, unknown or other
aaataaggcaaatgagccttcacaattggggttgttcatgtgaggaagggctgggtccagtatgtcgtggaatttaacaacctagtcccaaagaagtggaatttaacaacctagtcccaaagaagtggaatttaacctttcattaaataattgttattcaatgaataagcccaatactaattggncctaaataaaactatcaaaagtgatattttattttagcaacctagtccatttatctatctagaaataaataggcttcccatatgcatctaagtccataagcaaacatataggctcacacaggttaaattccgatcatgtttctaggtttacacagatgaaagaaatacaaaatttacctgttagaaattatttataggatctattgacaattagactatgatgaaaattagataattagatctgtcaaaaagttaatcataacaatttagatcaaataaataatatgtttgttaaaaaaattttgaataaacaattttaataaaacaaacaatgtccatgta

SEQ ID NO: 141810 - DNA, 722 bp, Cannabis sativa
  modified_base (382)..(383): a, c, t, g, unknown or other
  modified_base (689)..(689): a, c, t, g, unknown or other
cacaactaaggatgcaagagactttcactgctgttgtagcattcctgaggtctaaagttcaacagtggtttgctacacgaaaagaaaaagctgataagtggacgaagaccctagcaccaggattggaggaggacttggcattacattttgaaaaatcttggtatttgaacgttgacacatgtggaccttacacgttgcatgttcaccctggaggaacaattgagactggtggcgtaatggatttgtaggaacagacttgcacttccagcttgttctagtgcactaagtttccttgtcctcatgcatgtgttgcagctcaacaatgaagtattagtatgtacgcactacgctcgccatattacacaacagaatattggaggannacatatgaaggtacaattatgccaattggtgacgaagatgattgggaattgcttgatgacataaagaatatgacagttggagtgcctactgagaagcaaccagtagggcgacccaagaagaaaaaagttggaagaattaagtcaaatcgaattgcttgtaatggtgaaaggattatcataccacgaaattgtggcaagtgcggtgccaaggggcacaaaaagcagttgcacctaccgaggttaaaattaaatttttaatttagtcgtactgtgatgtgttgtactattatgtattgttattgaatncatgttggacttttttaaacattaaaatttgtg

SEQ ID NO: 141811 - DNA, 1149 bp, Cannabis sativa
caatcagtcgggacttgaagattatcactgctcacgacactttgtataagaaagtgcttgaattagccttgatagcttaggaggctgagcaacatttaataaaggagcagactacgaaggatgccgccacgacatcgaatcctcctgcaagtggtaatgtcagtaaggggaccgacggtaaccctgatcacaaacagaaggctgatgcttccaaaacatcaaggggtaacaaaacgttttgggaaaacatcggtggttatcaagaccgtggatcttcattttgatcataccctgagtgtccgaaatgtaagaataccatcagggtgaatgctgggccaacacttatttccagtgtggcatggtgggccactttattagagattgtcctcaggccaagaaagaagagccgaagaagaatgcaaatctaaactcaagacgactatttaccatgactcaggctgacgcagatgctagtccatcaatggtgataggtcagttatctgtaaatggttattcttacactgtgctgtttgactcgggagctactcactcctacatgtcaagtagggcaataaaaagtttccataaaccatgtgatgtgtatgctttgtggttttggtaccctgttaccttcgagagaccttatagtatccgctaggtggattcgatctttatccttttggattgacggttgtgaattaacctctaatctaatttagttacaactgtctgattttgacataatcgtgggaatggatttcttgtctaagtatggggcaacgatcgactgcaagcagaagatggtggtgtttgagcccgatagtgctaacccagcagtgtttgtgggtaaagtttaggagacgcgcatacctagaataacactttcaaaagcaaaacatcggatgtgtagaggttgtctaggattcctagtcactgcgatggataccagccaacctgtaacatttggatttgagaatataagattagtgtgcgagttccttgatgtttttcctaaagatttaccgggattgccaccttcccgagagattgaatttgtgactgagttagtttcgggagcggaaccagtaccaaaagcactgtatcgaatggctccagcaaaattgaaagaattaaagatccaacttcaag

SEQ ID NO: 141812 - DNA, 730 bp, Cannabis sativa
aaaaagaaacttaaaataaagaatatacaataatatcataaaatggagcagccccatgacaaaacccttaaaacctatgaaaccaattttgaacctgtaaaacaagtatctaacctttgaaactagttctgaacctgtaaaccctgtgaaacaagttcaaacctataaaacctattaaacatgtttcgaccatataaaaaatcatagaaaaataataacaaaatctgtgtaaccataacaaaacttgtagaactcatacacaattataacaaaacttttaaaaatctaattaaaaatcagttggataaaaataaattgtaaaaacttacattacattaaacaactaattaaaaatctaaaataaaaaaattagtttcataaaataaacaaattaagaacttacacatgataaccaattacttgaaacaaaataaaactttttctctaacataaagtttcaaaatttaacataaagaaaccagtgacaaaaatcaaccaaataaaaaccaattacttgaaaaactaaatcaaaagctgaaatttagaatccaattacgtaaaacaacatagctaataattaaccacaaaaactagtttactattataattaactaagaaaataaacaaatacataaaatagctaaaacaatcaaaagattgattggaacacaaaaaataattacaacaaaataattgagcaaaaatctaatataacgaaaccggttacaaa

SEQ ID NO: 141813 - DNA, 1012 bp, Cannabis sativa
gctactcgtgatcacgtcctggagcatggtgtaatccaatttgatcgaaaaccggtaattactagaccctggactattgatttagatgctatgaaacttgttaaatcagtaccactttggattcgtttacatgatctgggattgcaatattgggggaagaattgtttgagtgctttggttagtacaataggcaacccgataatggtggataaagttacaaaggatagaactatggtcaaatttgctagagttttagtagagatggatattactgaaaatccttcgacagtaattcattatcttaatgagaaagggagattggttgagcagggggtggactatgaatggttgccagttaaatgcaaaagttgtgggggttttgggcatatcatggctgagtgtaggaaaggtgaggctaagcaatgggttaaaaaagatgtgaaaggagtaggggcatgtgaggaaaagaaaggtgaaaatgatgctcaaactaatgcaaaggatgcaagtgatatgggaggtgatggcaagaataaagtagaggaaagattgggtaaggaaggggagaaggatggagctatatcccaacagaaggtaggggacttgagaggctgagaggtagttagagaatcttgtcatggggctttgaaggctggggtagtgagagtgggagaggctgaggaaagttgggaaacaccaaaaagagctcatcttctcaaggctaagcaagtggttagggagcatggagagcatcacaaagctaagaatactttcgagatgttgcaaaatagggagagtgggatacagggagatgggtcattggttcattttttatgaattgctgcaatgtaatgtgttggaatgttagaggcctcaataaagagaagaagcaagaggcagtgattaaagtttgtcaaaaaaaggaaattggggttggaggttttgttgagactaagctgaaaagtgagaagatgcaagaaatgatgtcaaaaacgttttgtggttgggagag

SEQ ID NO: 141814 - DNA, 749 bp, Cannabis sativa
  modified_base (45)..(52): a, c, t, g, unknown or other
atgttccacgatatagatacgtaaactgattatattgaaatgagnnnnnnnnagggcacaaaacccaacagtttctatcaaaaaagcacattgctcgaaatccccaaggctttataattcctaaagttattttcatgagagtttccctagtgcttagagataggggaaataagcttttagataaaggtgtaatactttgttcaagtcatggtggtctccactaatctacactcgaggtttatagtgagtgtattatatatatattcttcttttactacatatatattatattatatgtgttgtattcttcttcttctacctttcatatatatatgcaatatatatagtgtatatatgtgtattgtaacatatatttaatcaatatcttttattgtgcttgtattgtttttacaatggagttgtaatgcatctttattttcttccattgtaataaaatctctaacaattagaagcttatccctttccaatggaagaggagataaatcaagattttaagaatacaaggataaaagattttgtatgacaatcattcatgggtgagcatggtggtgtatattatgtaatttactattttatatgatagtaatatatatatatatgttagttatacatatgtggcatatatgttatcatgtgtttatatcatattaatatatatagtaatatataatatgatatttgaatttatatcatgttattatatgtatgggggctattatggtagggat

SEQ ID NO: 141815 - DNA, 578 bp, Cannabis sativa
  modified_base (68)..(75): a, c, t, g, unknown or other
  modified_base (208)..(208): a, c, t, g, unknown or other
  modified_base (277)..(278): a, c, t, g, unknown or other
  modified_base (433)..(440): a, c, t, g, unknown or other
tgggagggtttcaaggaactcatcctgttatgacttggaagacacttgtgatgaaaatccattgttannnnnnnnaagtaatggattgtcagaataaaacttttggcaaccacttctgtgttaatcaggaagtaacactagaagttaataaatttttgaacaatgccaaaatgtatagaactctccttagactgaataagtatctttnctgcaactttaacattcagtatctctagtagacttagaggcaaatctagagtaatcaccatctcatcannagactttctagcactaaggcaaatctagaaatcttatttggtgtagtataagagtattaaatacacccttatcgactaacaaatagttcctcctctagatcttaagattcacttgattgtcttccaatattcctttgctggattaatctgatacnnnnnnnntactcccactcaacagctggtgtctgttctaatgcatactaaagcataactgagacctctcactgttgatcctaaggatttctttcattggcatttatcttttctagaatagtttagaagcttctatagattgccatt

SEQ ID NO: 141816 - DNA, 892 bp, Cannabis sativa
  modified_base (478)..(481): a, c, t, g, unknown or other
aagtctaggatgtctgcgttcttgcatagtcccactcacggacatcgcataacgagctgatagaacctagatccgcgagtttatattggtttatcgaggtcgttgggtcatcgagactagctcgcatcacagagagttgatctctatgtttttgcaggaggttcgaggggatactcgcacatatcctggtacatgcgagttaaattcgttccttggtcctacataatgcgaatgcgactagactttggtcattttcgcatcatctcactgattctaatcaggcgaggtttaaactcgaggaatctctcgtggacatctcagcttttcttggaaaactgaatacacgtgtcctctgaacaggagtctggtctcgagtgtctaggtgagagaaatctcactataacacaggccattcacttaagagtaaatgttcattcagtacttagtgtggtcgtccgacctggtactttattggtannnntttcttaaatgttccccattccacaaccgtggtaataaaatgagttgtagtttttaattatacttacctaatttgtatgctccggattcgagaactttcaccacttgatacggtcccttcccacttaggtccaagtacacgtgtcgtactgtctttggtgtttaaaaatacccttcttaggaccatatctcccgcgaagaatttctgagccttcacttctttgttgaaatatcgagctacttgttgttgatgggccatcaatttcaagtttgcagttgctcgtctctcttcgatttcgtcaagtgatttatctaggagtacgtgattggtatcttggttgtacatcaatcttctgtgggatggtggctcgagttctacaggcagcatagcctctggtcctactttgtgata

SEQ ID NO: 141817 - DNA, 566 bp, Cannabis sativa
gtggatcaatgagctgtaagctcattgtttattcgttctgaatagccttaattatgttttatgtttatctcgagatggacttgtttatctcgctagtctcaacatttaatagttattactcacatcttggtattgcctatgtggcggcaagggcggcgagttcgaatgattctattagatgtaacttccgaagcgagtcatttaatgtgcatttaataatgcatggtttaaattggttcatattccagccctaatacacgtgtcagattcttattgcaagccaaaatttagttttaacaatcacaaaaatacaagtaaaattttaaaaaatatttttgaaaaacaaaaatatgttctataaacacttttatttttaattttaaaaacaaaaaataagtgtatttgtaaattttatttttattttcaatattgattttatttaagttgggtttgggtttgaggccaagattgggaattggtctaggtacggggtcagagctagggtccgagttcgagttccaagatctacgttcgggtcgaactctaaaatattgattaagaaaaaa

SEQ ID NO: 141818 - DNA, 799 bp, Cannabis sativa
aagccataagagccatcaaacgatacaacaccatcactcacaaaacaagagctaaactacaaccccaaaaaagaaaaaaaaaacagaattaataaaaacaacaaaacccaataaagtttatgtcgttctagaaaaaataaataaagaaacaaagagattttttttacttgaaaagtttgagttgtctgctgttcttcttcttcctctgcattgttcttcttgcttttctctctcaaaacccaagtaaaaaaaaatgaatgaaatgagcgagcttggtaagtttttgaaatagtaaagagcggggagaatggttttatgtaaagtctttagttgatggtctttatcttaaacactaatctcaagaaattttatatagaaaccaacccacaaaaagagatggaaagagaaataaaatacatatataaattcttgggaatgggaatcacgtagatgggttgtgcccactttcaaacttaagtaaaaaataattatcaaaaaagtgatataagtcattaataaactaaacacatatataaattttaaaaaatgggattaggtgaatgagttggaattatatttcaaatttaagtaaaaaataaaataaaaaatctgacatgaaattaatcaatcaatttttgtaaacttttttttatatatagatacatatatattaggaaaatttacattccactactttaattgcattctttttacaaaaatatggtgctgtcatttatatatgaaaatgtaccgttttttataccgttatcaatttaattcaatttttttttttaaataa

SEQ ID NO: 141819 - DNA, 1314 bp, Cannabis sativa
tatactagatgagagtgacgtggcgagccacgtaaatattagttttatttaaattttagtggtttttgtttaagaatttggcaactaattgtaaattattttttaaactatatgttttataaaaataaatttgttaagaatgtcataattgtgtatataaacctatgatatacacattgttattaataataaccaataagtttatctcaatttattcatactcaaatagtaattatccttaatgtgatgaaataatttatgataagtcataacacttctaacatttactcttggtttcagaaaaattaaaaagatcaatatatttgttttgaaaaatttaaaggaaatattatgtaacgaaaataaatgaaaaaaatatcatcttaaaataggggataagaattattagttaaagtttcaacctataaattttcaatgaatacaaaccatcaggtatgacttcacaagagccaataatattgagtgataatcatggagagcaatagagccaagcttaagtttcaactgctccatgatattaacgtttcacattaactttgcatcagttttgctaagttgcacaacaaagaaagtaaaacttataagtgtctgttctcaactaatgaaagcacattaaaaataaaaaacaccgacctctacttgtatatgttctttgtgtccattttatcaaatgcacattaaaaataaaaaacaccgacctcttcctatttatttactccattttatcaaatgcattattaggaaaattatatcaaaataagtcattaagcatctattattataaaccatgagaaggtttagaaggaaaattatattaagtcattaagcatatagacttaatttggagggttaagcttaataatcactaagagacaccataactgaatcaattacacagagaatgtcttaaaaggcatttatgaaatatgtgaatgagattttatcagccaaaaagggtatatagagaaatctagtcaaatgttctataatgtttcataccacggtaaagttttcaactctgacaagaggaaaccgtttcaagaaaacgaaactcttatcaattaatgtatcaaataagttcaacatgagaagaaaaaagttatgatctttgaaaaattgataagtgtacaacaattgcaatagaagaaacttaattagctaaaaatttcattatattatcaagtcttttggagtaatgtaaacaaaaagaacaagtactcgaaattagttaggtaaccaaacttagaacatgtctctacgtcaagaaaaatgctactaatatttctctaccac

SEQ ID NO: 141820 - DNA, 647 bp, Cannabis sativa
ttaacaaagcttgtccaaaagattgctttccgctgccaggattgacctgatggtggatgccacctcaggtttcaaattattgtcctttatggactcgtattctggatacaaccagatcaagatgcacattgcagaccaagagtgtaccatcttcaaaaccgacaaggggtacactgttacctagtcatgccctttggattaaaaaatgttggagccatatataatgcatggtcaaccgaatgttcaaaggccttctagagcagaacatggaggtgtatgtggatgacatgctggtcaaatctaaaacaagtatgggccatgcagaagatctcatggaatgctttaaagtagtcaggaagtacgggatgaagctcaatcccaagaagtgcacttttggtgtcaaattagggaaatttctagggtttattgtgagccaacgcggaatataggaaaacccaaaaaagatacaggccttgttaagtatgccctacctgagaagacacaaagatgtacgaagcttgagcgggaaggtagccgccctgagtcgcttcatttcctgctcaactgacaaatgcatcccattcttcaacatctttaaaaaatgccaaaagtttgagtggaccgaagattgtgaggaggcatttagg

SEQ ID NO: 141821 - DNA, 855 bp, Cannabis sativa
aaaccaaggggcaggagacaacccagatatattcctagaacactcaggggaggcaacctgaggaaattgagggaagtctaggggaactacctaggatatgtggaacatcagtcggagattgccaaccttctctccaagttcataagaaaggagctcgtgtaaacccctgttgggggaacgaggtaaatcaaaccttaagaggaagaacagaatgagaagaggcaaggactactgctaggcgtgcagtatctcgtaatcaatcaatgtgaggtgtagagaacactcgtcgcagtgatgatcaaaaaggcataatgcaacatataggaaatgtaaggtccgacagctgtaacgaccggtgtgacatacgagaacattttaacatgagaaaacctcatcttgatcaacgacttggtccaaaacaaagggagttactccatttgcgaatggagagttggagaataagtttagaaggcatcaagtcagggaacccaaaaggcaattggggtatgattctattgaagaattcgaattggaagcctcaggatcaaagaggaaagacgatcccaaaaggctacccaaggataagaaacaaaagaaacacaacaaatatatacccatttatgctgactataccgaggttaatgacagggattgacccgggatattgaaacaattttgggaatatgttagggattgaccttgaacattgaaacccattctatcaaaactagaggattctcgaagattgataaaataaacaattgaactggagaagttcctatgagattaatgattgtaaattgcatcactaatgtaatattttgaactttcgttgtgaataaaataatcatttct

SEQ ID NO: 141822 - DNA, 1311 bp, Cannabis sativa
  modified_base (545)..(546): a, c, t, g, unknown or other
cttggaagagtcgcatcttgttcaactcttcttaatgtcctcctgaagctgaaggttctgtctcttcgcgagctcgacctccttggatccgggaacaaatgccttcgagaacatggcaatgaactgcgaggctaactccgcagagcgaggcaacagctcctcaataggagtcttgtcgatcttcaattagaattcatcgcttacgaacttctcttggagagccagtatgttgcgagctcggacagtcgggtcaatgacgaccttcttccctttctcttgtatgcccttagctggcctcttggaagaatccgcggcaggggtaaccaccacatcgctcttcctcttctgaggaatgataggggaagttgccgctcttctagattttggcttgcgattaagaatgggtgcggacttcaagaaagtcatctctgcgaggacaaataaaagataagtataaataaatttcaaagcactataaaagataagcataaataaatttcaaagcactagttaatatacgcgatatgttacctgatgatggtctnnaagtttgtttagagaggcgtttatctattcgctctggttgcttctcggaaggttccttgtatactggctctctttgaagacttgcgttctctggaatcagcttgtgttctcgcagcttggcagtcgtacacaataatcgcccgtcgcaatcttgtacagtaaggctcccgagaactttagctgtctctctgcgagtcgcgtcgagtgcaaatcgagctggtctatctgcgaaaataaaaagagcaagttagcatgaaatctcaaaataactcaaaaaatgactaagtcaggaaaaatgcaacatactaggtcgatgattaaaatcagtcctaatccctgggactttgaaaatataaaaccacttcgatttccagtctcccatattggaaaccatgccttccaccccattaatctcagaggtggccgacttgctgaagcaatagaaactgttgtggaggcctacgctctttatatcgtagaagtaactgaactcttctactgtgggtgccctatgtacatactccatatacatcgcatagtaggctagggttgtgcaataactgttaggggttaattgaaaaggagatacgtcgtaacgcttgagaatggccgcaatgaaggggtgaaaagggatcgataccccacattgaataatgggtattgaaactaccacatcctctgtgggaattatcgcatgattagtaaaggaaaggtgcgctctctgagtaggtttaggtcgtaaggaagcaagtcgcagaaggttca

SEQ ID NO: 141823 - DNA, 878 bp, Cannabis sativa
  modified_base (59)..(62): a, c, t, g, unknown or other
tcacattaaattatgaaacatttatattatttttttattgtcttacatattaaaataannnnaaaattgattataaagttattagaatttttttatatataaaacattaattagatattaaattttacattaaaattttgcaattgtgcattggagcacaaagctaaaatttagtgtaaatttaccacaaaaatactttttgtgccaaatatagcacaatttttacatctcccattgaagatggtctgagatatttgcatcacagtttgacacaccattagagtagacttttgacagagttatattttatatttgcatctccaatacagatgctcttagtcttcaatgtattttgtaaattaacaagtgacaaaattatttattaattttgtggctcttacaaatatttagaatattttacacacattctattttcgtaaaatagaatactttagattttttttaaagagggaaataattaatacataaaattattgtagatatatgagtaatgtaattagaaattattatagagtcagctggtcattataaactctcctttgcggtgagattataacacacacgtaatctaccttcataaagttaacaataataaaaaaaaaaaatacatattaattaagaatttattacatttgggcaaataaatttcttaaagaatgtatattaattcaacccaaaaactaataataaattatatatatttaaattattatctttggacaaataattaaaatatacacatttaatattagcccatttcatagaatgtgaatattttatatatatatatatataactactacctttgggcaagtaattacacatatagtcaatcaaaatagggtaaataccatttt

SEQ ID NO: 141824 - DNA, 528 bp, Cannabis sativa
tatattaaacgtcataaactaagtaaaaatattctgaattcataaacagtaatatctacactgtaaagtcaaaaaaactacaaatcaacagcatcatcttcctcattagcgagaggggcagcctgttaggaggaaccaactgcatggccagaaggctaaaatggtggaatcggtggaattgaaggcagattcggcatgttaaatcctggaacaacgccgaccaattggatcatttgttgttagaacacactcatgatctgattttgagtcatcatcatctgttgttgccactcgttccgtgcctcttgttcttccacccttcgcttcagtgcctcatattcctcttgagtgacactggtatgcccggatgcacctagcatgggagttgctctttttgccccctccttaagtcttggcaacgagccgactcttctcaagtggcgtgatcgctcacccaatacatgtgtcataatatgcgtatctgcaagaaattgggtggggtcgacattgtactggcggggggcatca

SEQ ID NO: 141825 - DNA, 523 bp, Cannabis sativa
tgtaatggtaaaattttaaaaaactcttaagaggtcaaaggttcaatccctcataactccacattaagttgagaattaatcacattacctcttactttaacgtaagaccttttactactacaccaaacaaccctgaacttttgttgagtatgcaacttcacacgcacgcgtggaatgttattcgtcgtttattatatatattgtcccacataaagataatttgtgtatactttcaagatcacttatgtattggtgtagtgttgtactttggtttttttagtttataatatatatttgtcaattgtttgttgtgtagcttgtacggcacatatatatagtttattagtaagcctaactgagatattggcattgcattggttgacatataatgttaattatatatagataatatataggataatttacatctatacacgtattttacaattaaattacacaaataactttgcccattataaagtaccgtaatttaccggttataagtttgtttttttccttttta

SEQ ID NO: 141826 - DNA, 634 bp, Cannabis sativa
  modified_base (240)..(242): a, c, t, g, unknown or other
caattaatttaaaaacggtatgtttaaacggtatagtttagaattataatggacctaccatatttttgaaattaaattacaattaatgtacttagatgtaaattttcctataaaatttgcctaacatatatctaatatgttaatctgatggcaactaacatgtacgttaaacatgtataagcatatgcatggcattatactaatcttacctcgattccaaatttaggtgtgtcggtcaannngagtggaacaatctgctcggcgaattacaggcttttaaatcataataatcacaacactgttaagtgacacgctaaatcacttcccaggaacttaaactcgaaactagaagtttccttatcaataaataacatggaaataccctaaataacacaaaaaaatgtgaagaactagggttcccaaatttgccccaaccggtagaccgcttccccaaccggaatttcgattcagggaaaaatttctggaagccaaccggtagaccggttcctacaggcctccctgaactggaattcctattcaatgcaggaatttttcaaaaattcataactcgaccaattcaaccccaaaccaattcaaactttctagacctgctaatttgtaacaccctaactag

SEQ ID NO: 141827 - DNA, 844 bp, Cannabis sativa
ttggcttagagaagtcaaggtgccacacgggtgttctgctacctgaaaaggtgagcccgtgacagttggtatcagagccaggttcatcttagtgggaggggaatctggttggcctatcctagagaggatgtaggtgtgtggaaggatgctagaaagacaactaccatgtgcagttgtagagaggcgcaatagaatatttgaaactcgttggtatagtgcaagattgattggatagtccatgttgtatgcttggtacactaggccaagtttgccgaagtgacatcgtaagccgtaggaggcgcttctattgaaaaggaagcttgttggcaggggtgtggaagtagtgcagaggtcattaaattcttgttagtcatgacagtggttgagagttgatgaccgagatgattcaaagtcggatagacatggaatgcttcagttactacatgggtgtgtcaagaaggatgcacatggagactaaggggggaagatgccgcaatcgttaaaggatgattatacttggaggtgttcgcatgtgactttcatttgatccatatggaggtgtcgaggcagttgagtgggatgtgttggcttgtaaaagcgcctgtgggtgtaagtcacacaaaggcatcgatagagatgtagagttgtggaatgaatgcatcaaagaagccagtaggggtgagaagaccgagcgcaagcgttaagatggcgctagagtttgagtagaggctagagggtcgtgccagtgagacttaggagtcatgtgagccggcaaaagtaaagaggggtgttagagtttgcatgacggccagagggttgaatcattggaacttagtacaccgtg

SEQ ID NO: 141828 - DNA, 526 bp, Cannabis sativa
gggctgttatggttgacacctctttcacgtttagttactagtttgagctgctacagaataccagtgacattgattttatttgtcgtgctacaactctctgctgggctctgtggaaagcacgaaataaagttgtctggaataaatataattctactgtcaaagaagttttggccacttcttcaattactcttgaacattggaggaaagctcaagataaaagcgctcttttaacactatcattcaacaatagtgatgaaggggctgagctatggacaccacctgcaacaaacaacctcaagattaatgtagatgcggcgctctatcaacaagacaactcttatggctatggcttagtggagagggatcattttggcaagttcttagaggccaaaacatgccactgaaatggtacttatcctgctaaagtggttgaaactttggggatcaaggaagccctcagttggataaagaacaaggcatggaataatattgagcttgagtttgacagtcttttatctgtgcaagc

SEQ ID NO: 141829 - DNA, 637 bp, Cannabis sativa
aaaataaatatgtaatttaaattatataaaataatgtataaattaataaatatataattaaaataaattatataaaattaaaaaactgaaaaatgctcatttttagcgtcagttcctacaccacctatggcgtcggttattagataggaaccaatgccatataaacccctatggcgtcggctcctagataataactgacgccataggggtatatatagcgtcagcttttaaaaatcctttagcgtcactctaatcagcgtcggtagcgaatttcgccaaaaccgacgctgaaagagcttaaaaactgcctctaaagggtgttttgtagtagttttatgtaaattaaaataaaataactaattaattatattgcaataacaactaacgttaaaacacattaattttaaacaataacaaaataaatatatataataaataaaaaagtatatacataaataaataaatatatttatattgagctcggagagagagagaaagagagagagggagacagacgggaggtggtggtgatccgacgtatgagacggagatgagagagacatcgacggtaggtggtgttggtctgacgtatgtgacagagaggagagggagaccgacgggaggaggggtgggtgga

SEQ ID NO: 141830 - DNA, 764 bp, Cannabis sativa
  modified_base (715)..(722): a, c, t, g, unknown or other
taccagcggggtattaccggcggaccccgccggtaataacttttaccagattttatcacttttaccagcatacctctccgcccctaataatactattagttgtagtgatttataataacataggtttgcagttagttacatttaaattcgaatctcacaacaatatttccccaaaattgtgggccttaattacgctccataaataaatacagttattattagaaaatcctgcagctgtgatttaaatcacttttaaagggtcaacgctgacgtggattaagacacgctgcaaaacgtatctcgctgaggcgtctcgcttggtacatgaataacttggtttattcataagtcttctaacaatgggatgagcaccagtgtactgagcaaacttaagaactgctctttgaccataaggccttgtagactggacaatcatgtcttgggggttctcaataataacaataaccctggcaacgagttggaatttactaggagtatgcctttttatagcaagatagatgtctcgctatctgttatttatgtccttcaagctgttacacttggctagtataatgtatattatatgctaagtgttctaacaaccaattttccttgtcaacacctctctacgtattgcgaggtagatgcctcgctatgtattatgaatttcctccttgttgggttttgtgtcctaaataaaatctatttcaatatnnnnnnnnttactaattaataaaagatcagaaatcgcttttatgttgcat

SEQ ID NO: 141831 - DNA, 514 bp, Cannabis sativa
ggtgaggggtcctctactaaggaaaagaggccttccggggaggtcattgatctttctgaggagctgactgctgcaaacccctctacccccaaacctgccaagtccaaggagtctggaccttcaacggttgggtgtgaactggtcaggagtgatcttgaacgggtgcgggcacctactccacctttgccagtgcttccagaagccaaaatgggcaaggagatgctggcccattacatgaactggctggttcctgagatcagtgagcaactagctggtgctgaaaatgactcttctttggaattgttagtgggcggagtcttgaaagagttcaccagggtaaatcttttttgatacttccctttaatcttccatacttagctcaatatgctaaagttttttttttcttttgtgcaagtcggtctgaagttggcctacacttactcccaggctaagtttgctgcttccaagaacgcggctctgtccgacaccctgaaggcggaggcggacttggcca

SEQ ID NO: 141832 - DNA, 534 bp, Cannabis sativa
ttttttttaaaaaaaattcttttcttccataatgaatagaatattataattgctttacaaaaataaaatataataatttttaaaattaatttttttaaaaaaaaatgagtaaaattttccattggtcaaaattcagggggtaaaaatgctaatttttaatggtaaaataaacaaaacctaacaaaaggggcataattatgtaacaagttgtatattttaggggacaaaatcaggtagtgccgaaagttcacaggacaaaaatgctaattattctaaaaaataactaggtgataacttttggtcataacatatttttttgttattaaatgtcttttagtcacaaccaaaaagtacttatgactaaaatatggtagttagatagatacaagttatcactaatttagttttagccacaacaagtattctgtctaattagaactaccgtgactaatacttttaggtacagatataaatgatgatttataattaggcacaacttttttacttttaatcataaattttgttgtgactaaa

SEQ ID NO: 141833 - DNA, 1186 bp, Cannabis sativa
aataaatttaatttctattattctctacagagaatgatgaacaagaaatacatgtctaacgtgtttaaataacattagtcattttcattgtcattcttatactttgatgtttcaatacaattttcttaatattctttttgggtattcaaaacctactataaaattgtatcaataataattattttaatgattctttagttgtattcacataaatacaatattttcgacaaatagaaaatatttacttcaggaaatatttaccaaaatttatatcaatattagactactttttattgtcatcaaagaatacaagaacatatatatgaatatgtatttatctcttttattatatttcagtcatctttatgatgaatattatgtttgcataatctttatgatatatgtaaaattttatcgagtacgcataattttcaagatgtatgcataatttatatatattctctatcatattatagataaataataaaagcatataatatatataagaatttaataataaatatatgagaataaaaatatatacatacatatataatatataaatatataaataaaaaagaaaaaaaattagttctttataacagtcagatgagtatatatataaatttatatttagtgtatctgatcgtaaaacaactaaggaactttaacaaaatatttactttgaggcttgagtggagactcatgctgataaaattaatatagaatagaatagagaaataaataaataagagagagcaaatagaagaatagaatgagagagtaaatgaaaattttctcagttgtttattctaacaggataaacctctatttataactaaaagaataaaaaactaaatttatataataaaaaaaaataaagtcaagcgtgataatttagacatttatatataatattttataacaatattcccttttttttacgagataagttgatgaatacatctttttcgtatttattaattaaaaatacttttatattaaatttcattaaaatgtaccgcttttatgagtgagttgtccaatatactctcattatccacttaaatctagcacttaatttatattaatctaaggagtataatggggatatcatctataaaaataagtatatcttaaagtataaacataaaattaaaacaaataaaataagggaaatttacat

SEQ ID NO: 141834 - DNA, 787 bp, Cannabis sativa
  modified_base (131)..(143): a, c, t, g, unknown or other
gagccattgagtcgagccaatttgtaaactccaattccaactactggtttgattaaatattgaccctcccaattcgggttgaacactcctgcagatgcatccctcgtgtttgcaaatacccgccttagcannnnnnnnnnnnnattgaatagtcttttcttgactttttgttgaaatatcttgtaactcggtgttgatgcgctgcattagtgacttacaactcaatttgtttttcatcaagtagatccaaggataactttagaagttcctggttttcttcttgattataaaactctctcctgtgattcaatatgttcacttcaacaagtagcattgcttctgagccaaattctagcgagaagggagtgtgtcccgttgtcatcttctcggtagtcctatgagcccagagtacttgaggtagctcgtcgacccacctgcctttagcggcatccaacttcttcttgatagtatcctttaaggttttattgacagcttccacttgtccattcgcctgaggcttggatactaacgagaagctcttaaatattttgttcctctcgcagaactcaatgaacaagtcaccatcaaattgggttctattattagatactatcttcatggggattccaaacctatagacaatgttcttgacgacaaagtcgaggactttcttgcaggttatagaaacgagaggcttggtctctgtccatttggtgaagaagtcgactgctactaccgcgtacttagctcctcctcacccagtaggtaatgccccaattaggtcaat

SEQ ID NO: 141835 - DNA, 1409 bp, Cannabis sativa
  modified_base (1115)..(1121): a, c, t, g, unknown or other
tcactgttgactgacaacaagcttaatggagctaactttatcaaatggagagagaacattaatattgctcacattggtgaaaatgccctgtttgtgttgactgaagaggctcccgagcagcaaggtgagaatgcgaccaaggcagtcaaggaaaagttcgagcattggcagaatgctaacaacaaagctcgatactttatgctgtctagcatggtcaacaacttgaaaataaggtttgccaatactctcacggctgtagaaatcatgaaccagttaactgaactctttgggatgacgtcaattcaagctcgctttgagccgaccaagaatttcatcaatgcagggatgaaacctcgtcagagcgtgtgtgatcacctattccagatgactagttacttccaagaggctgacaatcatggagctgtaatagatcaaacaactcaagtgagtttgatcttgaacagtttgactccaacttttctaccctttacatcaaattatatcatgaataagttggagcttgactttcacgagttaatcaacaacattcatacatttaaaaatttgatttgaggaccacagaaaggaggaactaaagctcctaattctaacaatgctaattgtacgaccaaggctgaggcaaatattgcctctgcttcgaaacccaacaacaagaagaattggaagaatagcaagaagcctgttaaagctgtgaaaacagttaaaaagaaaaaaggctcctaatcctgagggaaagccaaaaggaaaatgcttctattgcaatgaaaaaggctactagaaatcccaatgctctaagtttctagcaaagaaacaaggtatttctgtctatgctataaactcatgtgttttagagaattattatcccattgggctattaattctggatctactaaccatgtttgttttcttcttatttcaactccagctacttaaacttggattgctatcctagcgagttgagtcagatggttggacaaaagggtggagattgtccaagattgaagataaagcttggaatctttcttttaatttttgaattaattattttaatttatgaacaatttgatttcaattattggtttgggattttattnnnnnnntcatatttatgcagacaattcatttttttttttttgagaatattaataaagttttctcttttagttatgaattgcatttatgaattgagcttcatattttatttatcttgtgtatgccaataccaattatatttatatgtttatcatgtttgtatgtgtttgtattttattattgatacaaaatctaatgtatattcatctatgcaaagagttaataccacataaacaattagaatttaaattaaatgtttatgaataattgttcattcttaaacaattattaagatt

SEQ ID NO: 141836 - DNA, 558 bp, Cannabis sativa
  modified_base (441)..(444): a, c, t, g, unknown or other
cttgtaaaataatttccaacagttggaccagtaatctcttgtgtcagtgcgattggaagccagagacacctagcccagccgtttagactaagcactcgtccattgtcgaagagtggtacgagccacccaaataacatcagcagcactacagcttctaccattccaaagcgtatcattctgagccttccaaattgcctaaccaaccatgatggcttcttccaccaaccccatattgcccactgccaacacttccagaaaccagtcaaaaaaattgtttgctgtggaatggccaacacctaacgcagatcggagccaacatgaatgagcaaaggggcattgaaccaaaacatggaaaattgaatcttccctatagctgcacaacacacaatgtaactccaccgaaacatgtttactagaaagttgagtacgcgtaggcaaacnnnncgaaagagctttccaaacaaaatgtaaaacttttaggaggggctttaatcttccacaacatcttccaaacatcatcctccatagaggagttccaactaccattgaccgactgta

SEQ ID NO: 141837 - DNA, 959 bp, Cannabis sativa
  modified_base (921)..(925): a, c, t, g, unknown or other
ttttaaatattattttaaattaaatttaaatattttgatagtttaactagatgagtattttcattaattccgaaaataaatttaaaaaagaaatgattatcattacattgaatattattaattttaaaactatgataataaaaaaaaactaaaaactaaaatagaattaacatacgtgacaagtctcgtaacatctatctagtatatatatatatatatatatacaatttttctctttgatgtttctaaataatgtaacgtactatatcatgctgccgtgacactatgacaacattaatattggttattatgtgtaattctcattgattaacactaaacttaattagttatcaattactaatatacaataatattaaaggggaactagttatattttcctcacggtataattaacatcatgacttattaattagctcaaaaaaataagaaacaacttttgtaagaaccacaaaaaaaaattaaaatcttaataatttaataataattgtgacaaactttaactgtacacataattgtctataaaatgacgtgtaattaattttaatcacataattaaaattgatttgattaattatcatatatttatctataataaaaattgaaaaagtgtgtaaaattatatctttaatattactcgagatttattaagatatgaagtccaaactataagattcttcctccattattcggactaataaaatggcgttgagaaatcgatgtatatatactttaggtaaaacactttaatggaattttaatttgttacacagaaaaacaaaagaaaaaaaaaactagtggatttaattaagacaataaggaataattaatctcaccattacaaattatatatatgaaacctcttccatatgggtgactatttaatggttacatttttattgnnnnnatatggttacatttttctttaacctgcaatagca

SEQ ID NO: 141838 - DNA, 1734 bp, Cannabis sativa
ttgaaaaatattttcacttttctacttttaaaaacaaaaagctgattaaaaaagtgttaccaaacgccacctaaataaattgaaaatgattgtccaatatatttttatcgtgacttgaaaattttcaagaaacatgacagttacatttactgaaagtgtaaatgtattcataaaaactaaaaaggatatctcatttatagaactcattgctacgttattgtcaatatttttcatttcttacttggtaggctattgtgaaaattgatatgtacaagtgagcactcatgaagcaagtactgcagtgataaatatttgagatcgtctttgtgggaattgcaaattaaaactaaatgcacaaattaattaccaaatatttgcaacaaaaactaaattaaattgttttgaattttttaaactaacactacttgagattaattaaaatacttgaaaataaactgcaaatataatgtaaaagtgggctgaaagcaatttgattgaaataggcttgatttattaaatccctctatgcctagaaaaacctgtactcgccgcagcaagatttcatttaaattcccagagtttactagaatttagcacaattaatatagaacttttctaaatcctatgatgctaactttttcacttaattaagcatatttctatgtaaatcaagttcaagaattcaaatccaagcaccaattcctagttgttacactaggcaaataacacattactatgctattctaaaaattgattattaatttgtgtcattcaaatctatccactattcaaactttccaacacaaatatagtttagcatctttccatcgatggccaaacaacaacaaaatctcatcaataagcatatttgaatgaagtatgggtaaattgctaaacttaagtactagaatgtagaattaagacagagttgtaataattcaagcctcaaagtatttagttcatagctaagttaagaacaaaaattaccaacttagatctgtccatgagacttgaaatactaaaaatagagagaaaataagaaagaaaataacaaacaaagaagaaaattagcccaaaatagatgatgcaaagtctccgcttgcccttcttctttttgcttctatttccctctttgtactctctttttatcttctgtacttactgctctatttttctctaaaatggctgataatggaaagtaaagctccctcttcttttcttcaactagggtacaatacccctcttgcacattcaacaaataccctctctaaatgaggcccatatgactctatggagccttctagaaactctcctaaaaaatcagccatattctacttgcctcttagccatctcatcaatttttctaccacattatttaatgaagtgttgcatcctctccataaagttggttacacacttttcattctgctgagaattctcagtaatatttctgcaaaactttagcaaaaatctaagttttctcttttaaattcttaccttgaacatagctcaaccaaaattcattaacttcctatcatcagctctaaattacctaagagaacacaaaacactaaatagcacaaaaagaaaagaaaataactaaaaatgactagagtaaacaagcaacttgtagttgaggtcagttgtcttattcttcatcatctttttccctatcttgtatatactgtgaggaattttatgacaatttttaatgtttccgaggggtattgaaat

SEQ ID NO: 141839 - DNA, 841 bp, Cannabis sativa
  modified_base (714)..(718): a, c, t, g, unknown or other
tttttttttgaaaggaatacaaatttatttattaatgacttattaacattacgacgaattgactaatctagttataattttattatatctatcttttatggtattacaatttcaatttcatattatattattatttcattttttatttttatatttttatgaaaattcacatagcaactaacagggctcagctttggatatagacggactaggcctgtgcttagagcctacctagcccagggcccaaattttgttttctccttttgaaattatatattctttttactgattttcaaaaataccatatttttctaacataagggctcaaaaataaatttttttcctgtgacccactttgtttcagggccggccctgctaacagggcaactaaaatctacataacaacccacgtaaaaaccatcaaagtaactattgaagcaacccaaactataaatttttttaaaaaaaaagttgaaaaatagtatgtggtaatgtggtatatacaatatacaatttttttttttaataatattatattattttcttttattttttattaggtatatatgttttgttgtatatggtatataatttttattgtgtgtataatatatcatttatttaagatatttgtttctattttattatatataaaatttttggtatggtatatatacaaattttaaaagtgtatatataattttgttagcatgnnnnntatatatatatattttgagtattagtaatgttgcccctgatttcgcccaaaatacgtggaccagttaaacagggacacgtggatcagataacttgtaaatatttgataagtttttgtatgcca

SEQ ID NO: 141840 - DNA, 602 bp, Cannabis sativa
atctcatcacatcattttatctcacatattttttcctaaaaagcctcttcaatggatgacttggtgaaagaacaagaacaaaataaattaaaagatgaaacaactaaacttataaacaacgttaaatcaatatagccatttaatatatttagataaaatctctaatttatataaaaaaaatataacttagatcaacaaaagtaatatcaaaataatatcacaaaaatgcttatcttaaagtttaaataaaatcacatttgaatatgtcaaattcctttaaactagtgaaaaagactgaattctcttgagcatttcaccaaacacctagcaggtgtacttttatatgtatacatacaaaaactcaacattcagaataacaacaaaatttataaaatctatgagcaaaatagacaaattgataattgataagaaaataaacaacaaaatctaataaaaactatcaaatctaaacttttattcttgtaattttagcaaaaggagaagaagaagaagaagaataagaaggggaggaggaagaagaattatgaagatgatcttacaaacatcaattgaacgataatggtggaaaagtaagggtgagg

SEQ ID NO: 141841 - DNA, 512 bp, Cannabis sativa
ttcagaggaagaggtgaagacagcggtctttcagatgcaccccgataaaagcccaggtcctgatggtatgaccccggctttctatcaaaaatgttggcatattgtcaaaaccgatgttattgatctagtgcaacaattcttcacttctgggtctttcgtaaatggttgtggtgatgcaaatgtggtcttaatcccgaagaaaaagtctcctcaagttatgcaagacctgcggcctattgctctatgcaatgtcttatataaagtggttactaaggtcatgacaaacagaatgaagcctttcatggatacaataatttcagattctcagagtgcctttattccgggtcgattgatctcagacaatgtgatggtttccttcgagattctccattacttgagaaggaaaaggcaaggtaaattgggtttcatggcgcttaaactggatatgagtaaagcctatgatagaattgaatgggctttcttggaatcaatgttacggaggatgggttttt

SEQ ID NO: 141842 - DNA, 561 bp, Cannabis sativa
tcctaccaagggtggaattggctgcttgaagggcaatcaaatagtagcacgagagtgttacaacctatccatcataactagggagaaagcagtaaaatccctcaaagctacaacaagtagttctcagcaatgaggactcgcccaaaacggggtcgaagacattgatccccgttttcgggatattgatacaagggttggtcccattgaagaattagaggaaatactgttagaccccgaacaaccatccaaattagtcaagatcgggaaaaaccttcctgaggacataagatccgctttgatctaattcttaagggaaaaccaagatgtcttcgcttagtcacacaaagacatggaaggaataagccccaccgtgataagtcatgctttaaacatcgacgtcaaaacttcaagctagttcaacagaaaagaaggttactcaacaaagaaagggccaatgcattaaaggaagaggtgaaaaaagtatggaacaacaacttcatcaaagaagcatactacccagtctgggtctcgaaccctgtactagttccaaagccgaatggc

SEQ ID NO: 141843 - DNA, 550 bp, Cannabis sativa
caatatctttatgaaatttacaatatttgttaggatctcttttgctcctcgaattcctcataggctcgggtttgccaaaggcgacctactactcatgtgcgaggtaaatatttttccgagttttattaagctcagtataaatagtatacactggcacgtatttgtcatgcttcttttgtttctttctatccttcgacggttccctgattctgtcctttcttttcagaccagaagcccctgagttatcaattctcgtggaagcggtccctgttgagacattgctgggtttacctcccgagcctgtttttaacaagttcatttcctttcgggcttcttccttccgaacaaacacctgagctctcttgttgaactcagtggtgtttcttaccgaacgtccttgcacatcatcccacaactcgccttcggcaattaatggatcagtggagattcccgccgggctataagttgggtgctgccatccaagtttctaaccctagcggcagccgtgctaaaatgacgtaagtgtgccttaagtgtttcgtcaggttgc

SEQ ID NO: 141844 - DNA, 1476 bp, Cannabis sativa
aaaaataataaatgttaaataatagagtcaactgaaacgagtttcatcagattatcaaatgaaaaatgaaaaaagaaaaacacatataaaaatacaaaaaaaatatcaatcacacatatattcaaaacaacacacaatgcataccaataatttgaaaataaaatataaatgtaagtttcggacctagaaataaaataataaaaaagttacttgaaataaaaaaattgtatgacattataaaatagagcaacctcattatagaactctcaaaatatgtaaaccagtttcgaacaataatttagaaaaaaaaaacactaacaaaaataatcaaaaacaacacataacaataatttaaaaacataacataaatgtgaaaaccagtttcaaatttaaaaaaaaaaaataatataaagaaacttaaaataaaaaaaaaaatcataaaatgaaacaatcccattacaaaactttcaaaatctgtgaaactagtttcgaccctataagaaaatcatataaaatttacgaaactagtcttgaccctataaaaaaaaagaaattttatctacagcccaaaaacttttaaagatttaataatttttattggagctaaattttgaaatcggttgctattgtatatgtagaaaaaaaatatatatatactaagtgaacacttgtagaacatgcaaaataaatagaaactaattattattgtcgtcatagttgtcgttgtcaccagagttagaggttggatcccactcatacaaagtggttacatttatcaactagttaaaaatttcacacagtgaaaccagttttctaaaataacaaaaggaaaatgaaatttaaacttcaattacgtaaaacaacaaactagtttcaaacttatggaccctgtgaaaccagtttggaacccatgaaccatcataactaaatcatgacaaaatataaatgataaacgatgattgaaacaagtttcatcagtccacaaatataatcaaaacagcacacaatgtacaacaaaaatctaaaaaaatatatgtgtgaaaaccagtttcgaacctagtaaaaaaataaaaaaaaaaacttaaaataaaaaatgtacaatgacatcataaaaaggagcaacctcattgtagaattctcaaaacttgtgaaaccagttccgaacttatgaaccttgtgaaactaatttcgaacctatgaactggtgaactctgtgaaaccagtttcaaccctgtaaaaaatcataacaaaacattaataataaacgatgaagatagctaaaaacagtttcattagtcaaccaaatagaaaaaaaaagcacacacaaaaatgcaaaaaataaaaaatgcgtctcacaagtataatcaaaataacgcacaatgtacaacaataatctaaaaataaaatataagtgtgaaaactagttttgaacctagaaacaaagtaataaaaaaacttaaaataaatatacattaa

SEQ ID NO: 141845 - DNA, 1000 bp, Cannabis sativa
  modified_base (247)..(252): a, c, t, g, unknown or other
ccatccaatgaatccaatcaattttggatttttagataaggttaaaaacatatttattattgctaaaattaatgcttttgtaaaaatttaatttttactatggcctcaagtaatttttttttacataaattaaggcttttggtcatttctttgttttttatttttttaattaaaaaaaattatatttttgaataataaaaaggggaattaccctatttattgtttttttttaattttaatttttttnnnnnntttacggtttgagtttctaaagtgcttggttgcagcgctagttgcaataggggtttctgtacgattttttgttgcaatttaggttgcagcgttagttgcaatagggatttctatgaagaattccgtaaatgtaaaaaaaaaaaaaaaaaaaaaaaaacagaaaaaaaaaacagtaaaaaaacagttttgaaaaacagttttgaagtgtaaaaatgaaaaagtctcatgttctattactccttttgttttttaattttaaaatcagataaaataaaagtgtatttcataacttctattttcatttttattttttcactttatttaagtcaggttcaggtctggggttccaaggttcaagttgggatcgaaatccaaaatattgattaagaaaaaaaatatatttaaaaaaaatttgaaagtgattttttttcaaactttttaaaattttaattcttaattaaaaaattgaaaattgaaaacagttttataaaacatatttttcacttttctaattaaaaatacaaaaaaaaactcattaaaaattattaccaaacgcaccttatattaagtaaattttagagtacaaatggtttgttataaaattattataaataatggtctaagcttctgcttttgtttatagctaaaagtataagataagtaaaagtttttgttttatttttactgtttggataactattatataaatatctttttttttttttttttttttttaaaaaatgtttaa

SEQ ID NO: 141846 - DNA, 516 bp, Cannabis sativa
actgctgaaagagctggaggcaaagctaatcgatatgccacttgtctaaccttctcgagaatctcaaaaggttcaataaatcaagggcataacttccctcttttcccgaaacgcttgatccccttcataggagacacccgtaggaacacatgatcccctacttgaaattctacatctctgcatttcggatttgcataactcttttgcctgctctgtgaagcaagcattctggttttaatatcctcaattgcttcattagtccgttgcacttattccggatctagatatttcctctcccctgtctcatcccagtgaatgggagacctacactttctgccatataatagttcataaggagccatccctatcgtactttgatagctattattgtacgagaactctatcatggtaggtacttactccaagggccttcaaaatccataacataggctcgtcacatatcttctagtatttgaatcgtcctttcgaactgtccatctgtctgaggatggaaag

SEQ ID NO: 141847 - DNA, 624 bp, Cannabis sativa
gttgttaaatcaacatacttgcgagtagatctaagttcctggtaaaataacatccaacagataacccctccatcaaattctattgtaagcgtcctcactttcatatcccacttcatactcccaaggagtagaagtggtcttccaaatacagtttgcataggatcaccctcatattccatctcaagtatatagagatatgtttacaccaagagtagtcctgatgacgtgggcatcaatgtttgacacatggaaagaaagatgacatcttggagttgagtagtgccaagtcatagtaagtcgacctgggaggggtccctagccctacgcccaggttgactttgggaactctagaatggaagtttagacttcaataacttgaatctaactcactatcttttagtattatgtaccatgattacataaagcaatctaatccaagccctgggagctgaaattacacgaacaagtaacccagaagtcaacctaggcctttaaggtttaacctagcgcccaagttggcattcccaacttcagtttcagttttcaggaccgtataagtgaaaatggctcaaactttgcattgggacatcaactagacataccacgaacatatttgaggtatca

SEQ ID NO: 141848 - DNA, 527 bp, Cannabis sativa
tttctttcatgataaaaactgtgacattcaggacaattcgaagagacaaatgattgggatgggtgaaaagattggcaagctttattacattcattgtgatcccaaaaacagtgtaccttttatcttttccttatctgattctagaataagtaaccaaactgtttggcactatagaatggggcatcctagttgtatcaaaaaccattctatgaataaaactttgcaattttactatgattccatttctgattttcattattctgtgtgccattatgctaaacaaaaaaggcttccttttgtctctcataataatattacagctcataattttgacctcattcatatagacatataagggcctttcaatatacctactcttgctggttgtaggtattttaacaccattgtttatgatcattctaggtacacatgggttagcttcattaaaaccaaatccgaagctcaaacagccattcctaggttcttacagcttatcaagacaaaatatggggttcaaattaaaggga

SEQ ID NO: 141849 - DNA, 1476 bp, Cannabis sativa
tttttttttttttttttatagttccattttcaagcttacatggcaatggccttttctttgaagttgatgcttctggaataggttaagaaactcggtcatcctccattgcaatagcgtttacccattttagtttgtattttgggtttttatgattatttagtaacatttttaggatctggaattagaagaaaggatgaggaagctctagaaatagccatagtcttgttactctttctttctttttttttttttttgtaaaaaaaatggccatagtaaattatgaatttatgaactaaaaaaaataatttcacaaataaaaaatgagtggaatgggagaacatgtgtactggagaagttctatataaaaataaataataataaaaaaagaaatgtgatgaatgtaaaagagtagaataaaaaaaatgagtatttgagtaacgagagacagagagagaaaatcatgtctaacatgtaaaaattgaaaaaatagtgaaaggtacattatcaacataaatgtgtaagtagtaatttttaaatttttaaacttttaaaaatgtattaaaaaaaaatcaatgttaaaattattcaaaatgctgatcactaataagaaagtaataatatgtaattttttgttgacttgagtaaatatctcttatttaattaatattacaattgtttttttaatttaaaaagagagaaaaatgaagagaaaaaaaaaagaaaatgaaaaaaaaaagagaaagggagttaacatgtaaaagagactaaacataagcaataaaggtatttttgtaattaaagaactttttaaaaagtaaaattaaaaaatagattttagaaaaaagtttaaaaaaccaaacataaataaaaatgtaaaaaagataccaaatttgacatatagtgtaaaattcccaaatcaaaatcaccattgatgagccaaacttaagtttaaaaactcaaagcttgctcatccaacaaactagctatcaaaaccttctcaaatcaccctataccatcataatatagctacaaaaaacataatccaacaacagcaacaagaacagcaagcaaaacaacattttatgcaaaactcaattttcttacaattcaagaaactaaaaagattgaagctaagaacttaccttggctcaagaacacaagaacctagctgcaacaagcttgacttgaggaagaaaaagacaaaccctagctgctctaagggttcgaaaaagagagagagagtttgagagtgaaaaatggtttttccttagttttgtaaaaaaatgaaataaattaatcctttttctttctttttgttaaattatttctcagccaacataaatcacataaatcaaataaatcaaattataagcttaaattaaaaccactaaagacaaaaacataaatggtaaaatgacaattttgcccttcccccacaacacaacataaaaggggcacttaggggtaatttgggaa

SEQ ID NO: 141850 - DNA, 724 bp, Cannabis sativa
tacattgtgttaaattatatttatagtgatgtttaattgtacttgtaggtaataaaataaaatagaatggaaataaaaatttctcattctatttttttatctggttgcattttaaaatattcaaatatcatttttatttttatggtttcattcctgctaatcaaacatcattttaatattttagtgattatatgataagatctctcacaaaattaaaacctaaataaatcattttttattttaaaagtataatatatgtattaatatttctatgtagaataaactaaactctcctttaaacttattttattggtttgttaatttttttttttgtaagatattttatgtaatacaatatattattttgtaaaatatttaaatatatttattttaaaagcaaaaattaaaatattattagtaaacttatgatgtgatatattcttttcttttttactattatttataatagtattttttaatattaaaataaaattttattctttttttgttttgtaaattatttatgttgctaaatttttttgagtgtatatatatattttctaaaagggtatatatgtaattcatcaacaaaaaacccaaaatattttgactattaatttaattatagatattgtttactcaaatttttacgatgatgacgtgtaaagagtagcaatacgtggcacaaaaataccgagattaaattaataaagaatatgtaaag

SEQ ID NO: 141851 - DNA, 801 bp, Cannabis sativa
  modified_base (33)..(37): a, c, t, g, unknown or other
  modified_base (447)..(455): a, c, t, g, unknown or other
taaaacaaaaagtacatttcaaataatctcaannnnntgatatccagatcaagtgtattatatagtattctctttgtaatagaatctgacaagttgtaatcaatacatcctttttctaccattacatattcttaatcacaaaattcttgatattgtaaaattcatctctatatgtctactccttaatattattggtacaacactaaaaactgtatagaactttccatagactgaataattatctttcctgcaactttaacattcagtctcactggtagagttagggactttagatcagtttttacacttcttcaaaatcactgctccatcaccagagtaatcaccatctcatcagtagactttctagtattaatgcaagtctagaaacctgatttagtgtagtctaagagtataaaatactgctcttatcgactaacatatagttcnnnnnnnnnatcttaagatttacttgattgtgtttcaatgttggattaatcggatacctactcattactcccactcaacagtaggtgtctggtctaatgcatagcaaagcatacctaggatctctcactgttgatcctaaggaattctttatcatgacttttatcttttctggaatagttagatacttttccttagataaataaaatctatgtctagaagtcgaaaagattttatagatttagccatttagaaaaatgctccagaaacttactaaagtaagttgctagcactagagtaagtaaactaccagatataccacaagccacaggtttagataaactcatacctataata

SEQ ID NO: 141852 - DNA, 681 bp, Cannabis sativa
atatagctctctataaggatacaacacatggatcctcgtgacttttttggaatgtttaatgtgtgacttttagatggaaaagatttgactctggccttcattatgattcttgaatctttgagtcataaagaatgcgaggcacatattcaagttttgaaagaaaaacgaacattgggattcaaaacttaccttagccagcctaggaggtcttgcttgagacctggctggccctaaggcttaatcatgggagttggccagctttaccctataaagctagcctattcatgcctgggctaggtgaccttggctagttcttggctgagtcacgggaccctggccgaccctttcaaggcttgagaaccttggccggcattggagttggccaggtttagggttttaccctataaagctagccaattttctgtcctcttttgacttcagcaagagtccatctctgtaggcatatacaaccttagtctcatatgtggtttccttggaaactttgtatgaaacttaatggtgagtatattatagtcgatttttcaacttaagactcaacatgacttggaacctataaggaactctaccttagtcgtagcccgatgttggaattattttaacaggatctagatttactaacaagtatgttattaacatcccaaatatgaacttctaaaacga

SEQ ID NO: 141853 - DNA, 578 bp, Cannabis sativa
tttttttttgaaaagggaatagacccacataaggagggatcttcccgatattattaatgagcctcacttatggcggaggaaaaccatgattacaattaccatcagacaaaacctaaaacagaatcattctcgacagcttataaaatggttttccattctctgcttaagtctaaaaaggacaaattctcaaaatgttttgttttaaagacccaagtagctgtccaaaatttaactgtctcccacacatccgcttctgatttagcaaccccttcaaaaattctagcatttctttcaagccacacagcccaaattgttgctaagatcacagttttccaaagctttgttctgcgtttgctgccaattaacttggaagccatcatttgtgttactgaccttggcataacccaagccaaatcaaactcctctaacacgtgtttccatagacaccgaataaacttgcaatctcgaaatagatgttccacatcttctccactgcctttacaacaaacgcaccagccaggggatatatacaggaaaggcttccttttttgcatcttgtcatggacactcactttgtc

SEQ ID NO: 141854 - DNA, 1451 bp, Cannabis sativa
taatccaatcttgtccagtccagtccaatccttttcaatccaatccagtccaatcctgcgtactaaacgggccctttaagtaaacatgccataaatgtaaaaatttaatgtatgtttattattgtagggataaccaacaaaaggtgaatagcagtgagagagcaacagacccattttattaattgtgatctcaaaggaagtgaggttataatagattttactattttatttaaattctcttttttttttctttctttcaatttttcatttagttaaaggttattatttattatttattattaattattaattaaaaataataatgatgcgaaattttcaatcttcattagcccagttttgaacaaatacttatttatttttttcaaaattttcatttagttttaggtctttatattagtttacttttatcgttcattactaattattaattaaaaatataattatgtgacctttgcaatctttattaatgcatgtgcgtgtttccaacaaactatttcaagtcctcatgtgctcaatttttcatttacctttatatttagtttattatttattactaattatactaaatatcaattaaaaataataattttgtgacctttgaagtagtagtaataatcataataataacatcatcaaaaaaaaaaaaaaaatcataataataactatgtgtacataaatcacattactataaaatttattatttttatgttttttttttaatttcttttaattttagtggaggttacaaaaaaattattgaccttctggctttaatttcataaatattagttatgttaatatgctaactaataaatacaaacatataaaatttcaactatttatataactttttttttttcatctcctattctcttaatataccaattattcatatttactaatttttattaaaagcatacaatatcttatgatattttactaataagttaattatatattttttttcataatttattatacttaattttaaagcagctatatatatattatgcatgaaaataacactttgaatgtattattttactttaataatttaaatagtaacaaacaaattatctctaaaaaatttcatatatttatataatcctcttgcaagacaatgtaatgtggcatttatattagtttcctttttattttatttactctatcattttttcctcatttttttgttaatttttcatttaatcatgcaacattatttctttaaaaaaaatagtgactttttattcttataacttctattctattttattattttattaattaaacctcataacaatcttaaagctaattaatataatataatatttgagaagtatacttatacatctatatactcttccaccttctcatatttatgacatatgtaaaatttaagctatataatgttggaaaagttctcattacaa

SEQ ID NO: 141855 - DNA, 570 bp, Cannabis sativa
taccctagaattttagttgaggttcaaatggatcaaaagctgccagatctgttggagtttgagaatgagtttggcttgaacacttcagcaattaaatatgaatggaagcctatctcttgtacacattgttcaggggttgggcatgctcctacagagtgcaaaaagaacagcaatggggaacagcagtggattgttaagagtgacaaaagacaactacctcaggtggatgaagaaggttttactaaagtgcatagcaagaaaggtagtgctattcgagatgatgcagagaacagagtttctggttctggtaagactaatagcactaaagtgaaaaacacgttccaggtgcttgaggaagaggaaatggttgctggaactgatgaacatgagaaggcttatgatttgttcaagacaggaggggggggggagatcactctctgtctaatggataaattattatgttggaatgtttggggagccaacagtcaacataagcaacaaatgataaagcaatttatcaattctcaaaaagttgattttgttggtctccttgaaacaagagttaaggct

SEQ ID NO: 141856 - DNA, 2158 bp, Cannabis sativa
agatcaagaataacatttagggaaccactggcttgagaatggacaggagagaagaccatgctatcatcagcaaacaagagatgagacaagggcaaagcacccctgcaaatcttaatgccagaaaactgagcctgagcttcttgtaatcgaattgctgcagaaagaccctcagcaattaaaagaaaaagatagggagatagggggtccccttgccgaataccacacgttgaatggaaagtgtcagtaagagagccatttatggagagacgaaattggaccgtggaaaggcaacgcattataagagaggagaacgagggaggaaaaccaacatgattaagcagatgatttaaaaaagaccattctactctgtcaaaagccttctccatatcaagtttaatagcagcccagccaaccttccccgatcgtctagaatgaatggcatgaataatttcattcgcaaggagaatgttatcagtaatttggcgtccttggagaaaagcactttgattgatactgataatggagtgaagtacaagtcttaaccgatttgcaataactttggaaagacacttatagaaagtgttgcaaagactaatcggtcgaaagtcacgaacatgcttagggtttttctttttggggatgaggacaataatagtttgattgataagggagatatccccttgatgattaaggatctgaaacatagccttagtgaaatctgtgcctagagtggaccaattacgtttataaaaaagcgagttgagtccatcaggcccaggagctttgtccgcagagaggctaaataacgcatttttaacttccacttctgtgtaaggttcagctagaaaagcaacttgatgagtggacagcctattggtgatcccttggagaagtgaattgacagccacatcacaaacaccttgagaggtgaagagagaattatagaaattaagaaattgggaagttatagtggcctgatcatgagatatggatccatcaggaagagtaatgaggcgaatgaaattgttctttttgcgattggaggcacggtggtggaaaaattttgtgtttttgtctccagcacgtaaccaatcaactctagaacgctgtttccagtagatttcgtctttgaggagaaggccatccaatcgagattgaagagtggcaatttgagagagagagttgggagtttggtgagaagcactcagcaggttattgaggtcagcttgagtctgggaaatttggaacttaatagggtgctgggaattactccaactcctaatcttagcaatacagttgaattgcttgtcaagaaagagttgcaagggagatgaaagagaatcccgagttaacccaggatgaattaaaaaggtgagaaaaagagggatctttcagccaatgattttcaaaatgaaaccggttagatctttgagtagcaaaattggggtcttgaagcatgatcttcaaaaccctatgatcagaaccataaaaccccaaatggaaaagagtagcatgaggaaataaatctctccaaagctgattagaggtacaccaatccagacgctcaaggattggaccatgcctccacgtaaatttaggcccaacttgagaaagaggaacatgattatatttatcgagaaaagagtggaaagaatgcataacatgagaggggggttaagagaggaattcatgtcatttaatgaaagatagtcattgaaatcacccataactaaccacggcaaaagaggagcagtgtcaaataaacgattgagtaaagtccaagtaacagatttaagattaacataaggagagccataataaccagaaaagtgccagtctttgccattaaaattatttataatacaatccacatgattaagggagtaagaaattacattaacatcaatacagtctttccaaaaaagtaaaatccctcccccaagaccttgcctaggcacctctaaaacactatcaaaacgaagcttgtgtttcaggtccattccacgtccagccggcaacttagtctccataacaaacaacaacaatggctgatgttgcttgaccagcagggagagattacggaatgctcgagggctccccaaacctcgagcattccaactgcagagactcattgttctcggcggggccgcgtagcagc

SEQ ID NO: 141857 - DNA, 666 bp, Cannabis sativa
ttaatatttttataaaagtacgggtgttacaaactataaacagaaaacctaaaaacaaggaaaatcataaaggaagaaaccagtttatttagataataaaattaccaatggagtaacattaacaggaatctcgctcttcttcttgccatgggatttggaaactggtttcttttttacttttttaacaacattaaccagtttctcatcatcaacaacattagattcacacactttatcttaaaaacataaaacacaattcaattaaaggaaaatgaaaaaaaaaaatattaaaagaaacaaagaggtcaagatatatacaactaaaaaataaaatattattcaaaaaatacaatacacaaaacaaccaaaaaatattaaaaaaaaaaaaacaacaagacataccaaattagaatcctccatcgcatccttagttttactcttctttgacgcactagcgtcatcactaacaaacttctttttttttttgttgcaacaacttccgagacaaccttctgagtttgaaatcatcatcatggtctgcttgaaggacattagaagccttcttcctgaccttcttactatggtgtttatgagaaacagaatctgcatcatcagctttaacttcttgattatcatcctaaaaaaataaacaaaaacaaaacataa

SEQ ID NO: 141858 - DNA, 541 bp, Cannabis sativa
tgtagcagagtataatcaagaactgagcccaacactccttcagtttttttggattcttcacagtcttacacactatgattaaggagtaactcgctatgggtggacatgcactcaatcactaaggctcaaattttgtttgtgaagaagactatagaattcaaaaatagtagagagaaaagaagaataagacgtcttaaaatactagttgtctgacagaatgaaaattagatttagaagcattagcagcattagttggataatgagacctttcttttctttttatactaattgacttatggttaagattgaattatttggaataaaaaaatgataaaataagagtaaaaaaaagactaagtggccgacccctatgtgggtccatcactagttagatttttgctatttttctcaagcatttatctatttttcacaaataccactgtttccatttcaatcctataattgcaaaaaatatttatttaataattgaaattaattatgtattgattagactccatcaagtctcttaattaataaataa

SEQ ID NO: 141859 - DNA, 825 bp, Cannabis sativa
cgttgtagaagttatggaccaacacccacttttcaataccatgatgtggacactttctgatgagatccttgaacctctcccaagcctcatggagggattcattgtccagctgacagattttatttatttctcctcgcagcttagcagactttgctggaggaaagaatttggacaagaactttgttgccaaatcggtccatgttgcaatagagttcggtggcaaggagatcaaccaacttttggctcgctccctcaacgagaatgggaatagtctcaaactgatggcatcatcactaactccattgactttgaaagtctgacgtaactccataaaatttgacaagtgcagattggggtcttcagagggcagtccaccaaactggattgaagactgcaccatttgaagtatggcagattttatttcgaagttattagcatccactgctggtggtctgatgcatgactggacccccgtaagaattgggagaatataatctctcaacctgcggccatttgcttgatcttcaacggcacctccattattaccgttgttgcctccattattagcagcattagcgttttcagccaggattactggtgttttagcagttgctgaaactctctcttgcctcttttccttctgtttctcccacaagtcttctcgatctcaagatcaaccggtagtattacactttgtccttgacgtcgcatgcacccctaatgcttgaaatgaaataagacaatctaaaagaaacagattagcaataagcagaaagaattaaccaaagtggaatttaatctaatttttgtaatatcaatttttaa

SEQ ID NO: 141860 - DNA, 715 bp, Cannabis sativa
  modified_base (400)..(404): a, c, t, g, unknown or other
gtatgattttatgtaataaattttcaaaatgtataagttttttaaataatttttttttgtacattttttgtaattattttatttttgttgtacatttatgaaaaaagccctttataaattttataaataaattaatgatcacatgaaccaaataacacattaaataagtaataaaaataaatttgtttctttattgataaatgaatataaaaaattacattgaaatagagttttattcaggacataaatttgttcttattacgaagagaatactacatagtacacttgatctagatatcaagttgttgggattatttaaaatgcatttattgttttacattagtgcaagtgggagtttgttgagttttgtgccgtaactaaaacccatttcaatataatnnnnnttactaattaataaaagatcagaaattattttatcttgcatagttcacatgatttatttcatgattatatgtttaatatataaattctattaaatccagaacatataattattcatgattatagtattgtcaacacagtggaatataatcatgattatatgttcaaaagtttgattcccatgatttgttaatttattagatttagactgacatgataatcggcgataaggtatacttacaccttgggtaagtgttatgtcacatccagggcattgacaaagtttaccagtatcgaatgtatgaagtataca

SEQ ID NO: 141861 - DNA, 663 bp, Cannabis sativa
aaaaaagatatttaattattttttgcagaaccgcttgacccatctttttccttttccttttttttttttttaaaaaaaaaatcctaatttcaaaattagagtttcagtctatctcaacctagtattatgtgatttttctacttcgatgtaatctcctacatctctgccacaaacatgttccttcaatccaccaactatatcacgttctttccctttctctctgattctcagtcgacctgtcacacatcgatacccagtcaagggcggagacacttaaagggtgggatggccctggccccccctgaaattttgaagaaaatgaatttatagtatatatatgcatatagttattttttaattaactattataaacatatataaatatttagatatataataaaatgagattatatatacacacacgtatatttagcaacttaattactacctttgaatgtgatgaaagtatatttatggaaatatagttaagataaatactagtgtttctttatttaaatataattacaaaataagtttttttcattttttcataattatggactatttaaaaccactcgtaaatttttaaaaaaatcttaaatattctacaatactaaaaataaagtttaaacaactcatgattaccacgcatataagagaaaa

SEQ ID NO: 141862 - DNA, 605 bp, Cannabis sativa
aattacattctttaatagaaattaagaatgattgttgagggtggcgaataatctttaactagtttctcatatcgtattctttactttaaatttgttcttttcttttttctaatccttgttactaatttgtgaataattaaataaacacagttctcgtgggatcgacccttacttacgattatactaaaataattggaagtattggaattaaaaaaaatagtaaatttgttgtggcttatgacacgcatcaaatttttggcgccattgccggggacaactattttattttgttattcatttagtttttagtattttttttttcaatcattagaattttttttgaaaaaaattagaataaaagatagatatttagggaaatttttaagaaaaaaaataaaggatagatatttagaatttttttttttaaaataaatttagattttagaaaaaaaaaacgaaaaaattgtgttattattcatatttaatttctgttactaacttctttcactattataatctcaggtgtacatgtctagtgctgacgataatcaagagagcctttcaagggttgaacaatatcttgagtcatcatctgcttctcgatc

SEQ ID NO: 141863 - DNA, 635 bp, Cannabis sativa
  modified_base (118)..(123): a, c, t, g, unknown or other
tatatatatttagggtatttttaatgtattgatgtattctttatatattttagtatttaaaaaaaattatttttttttatattcgtgtatgtaataattatttaagatattttataannnnnnaaaaaattcaaaataatttacaaaatagaaagcaatgttcaaataatttctttcacacgcgtataaaataaatttctgatttttggcatgtttattttttttgaatttcttaaaattttacagaatatcttaaataactataacgtacacgaccataagaaaaaaattgactaaaatattatttcaaataccaaaatagatcagggcacatcactacatctcttttaaaggagtgaatggtagattatttcataaatttattaaaaaatatagaaaaattttgcagccctaaaagagttctattgttgcacctcttatctattttagtatctggaagaattttttagtttaatttttttcatggtagtctactttgtaattatataggacatctggtaaaattttgataaattttaaaaaaacttaacatgtcgaaaatatagttcaaacaatttatttcacacgagtataaaataaaagaatttcgtatgtaacacactatttgagagctt

SEQ ID NO: 141864 - DNA, 565 bp, Cannabis sativa
  modified_base (63)..(69): a, c, t, g, unknown or other
aaaagtaaaaacagttttataaaaatattttcacttttctacttttaaaaacagaaaactgannnnnnnagtgttaccaaacgccacctatatgtatgtttaatcattaaatcactactaaataattataattaattaataacgattataaaaaaattaaaatctaataataattataaaattaaaaataattttttttattacactgggcaagtatgtactttattttatcatttgtcatgtaattctatttttttagagctttattcttttttctttaccttttaattatattgtatatgtatctattaatggcatgtttactaataagaaataggaatcaataataaggtaatcattctcttacatttgtttacttgcattattaaaattagaaaagggagaagttgattaaataagagagaaaagaaatggagaacttcccccaccaatttataagaaatgtcactaagggtaatgaatttttattatttttattttattttttaatattaaatatataatgacaattttgtcctttaaaatatgtcttgcaaaataacta

SEQ ID NO: 141865 - DNA, 622 bp, Cannabis sativa
aaaatccaatattcaataaataattggattggatcggatgggtccaaatccattggatgtgatccaatgaacacccctattaagcgcacaaagcctactatataacccaacaataggttgcagttgacatccccaactgcctaggccatgctggactcaccagcaaattacacatcagcatagcatatgcaaatgaccaacacacccgcgtgtcagccatccaagccctcagcctgaattccatgcatctgtcttccaacagatgtcttcagcccacgtgcatgtctttggataaacattgataacttccagcaaccgtcattcacgtgtgtcaccatgcacattgtctgagaaacagtttgcatgcattcccatgcaatgtcacgtccatcttaagaccatcacgtagccaagtccaattaacatcccccaatgctgctgcatgcctatgatgttgctgcatactaccccttagcaggtgcacttcattcgtatgctgctatgccacaagctaagcctcgattgatgtcgaggtccactgagtggacccaagttagggtctcacaaaccacccccaccagaagaaatcgacgtcctcgtcgatacacttttgatatagctc

SEQ ID NO: 141866 - DNA, 1246 bp, Cannabis sativa
atttttttgtacaaccctagttggctgtctttccagaaacacggtactaggtctgcttccgggtacggactgtccttggcggaagctcatctgagcgaggaacgaagataccttcctagattgtcttgttggacttgggcttggcccaagttatcttctttgggcccattggtaggctttagatgctatcttggagtccatgtatcccctaccaaaaatatgaacatcaaaattcctagttgacatcatcaatttgcaacaatactcatttgctccattatatcaactttgcatttttaggccaatttaataattctagcttgttttttttcatagtttgagtgtcttctttgggcccattggtaggctttagatgctaacttggagtccatgtatcccctaccaaaaatatgaacatcaaacttcataataatattaactggtggagccccaaccacataaaaactttgagtgtcttatttatatatctcattataaatagtatttttcttgagctcttatatttaataattagtttttccgaaaaattcagtaggaaacttatatacttttttttttatatatatataataaaaatttaaaatatttttaatttctcttttaaaaaatataaatttaaaatttttaactcactattaaatcactaaatatatatttttataaattatattattattaattttttattttattttatttaaaaatccatgtcgtgttaaattcgtgataaaggggtcgtgtagtatttgacctgtttttatttcgtgtcaactcgttttcgacctacatctaatttaaaattcgtgtcctgtcaaaatctattctgctactcctaatttataatatcgtgcccaagccgagttttaaagcttgtcaaaacactcaactcgtatttagattgataatacttcaataatgttagttacttcataaatgagtattgctattaggcactttaagatgcttaacactatattgatgtagtacgtagtaattagttagtggttttttatattatttattgaataaaaaagtatcagacccgatattaaattatagatcattgctattaagtactagtgatgcttaacactacctaaaaatgacgtgttacgattggttaatattattcattaaaaattattatctttgtaatatccagtttatatacatatattggtatttggtatattaagtgtgatacaattatattgttattattatt

SEQ ID NO: 141867 - DNA, 1016 bp, Cannabis sativa
tatatttttaataatagagtgtatttatcattttatggggtgcaaataaaactctcctttttaatattaattactttgataataaatcactttaggaattttaaatataaaattttttaatttaatgatttaaatcgatttcaaaattaaattaaaaaaaataaaaaagtatatatattaacatatatataaaaaataaaaaattattcgagttaactaaatttgatatatgttaattaaaaatctttaccatttataatttgaattcactaaaaattctaaataattttaatatacctaatataaatttcaatctacagtgatgataactataaatgagatacagtgataccaccagctttaaatgtaatggtaattacaagtgaattacggtaacaataattgttttgaaatcatatgaaagtattctataaatttattttattatttttttttataaatctctatttagtgtgagaattcagttctaatattctttttttactataacttttaagaaatctctttttgtgctttttttgttacataaaaaatagtatgatgattttatatatatatatttataaagtcctttataaatttatcttttttttaatattttatttcttattataacctctaagaatactgataaattaatatattgtaaaagaaataatatatagacttattaagatttttgtctttgaactttgatatgtaccaaatcatatgtcccatgaacttgagattgttggattaaggacttctatctaatttcattcaattttggtaatgtgtcgattgtccttatactaaattgtgccccccgaactttgatatctactaaatcatgcctttgaactttaacatgtaataaattgtgcccctaaatttttatctacgtcagattatttttgtataaattaaacaaaagtccttaaattcaataatcttaatagttcaaggagaatttttaacgacttaaaaagtccaggggtcatgatttagtacat

SEQ ID NO: 141868 - DNA, 903 bp, Cannabis sativa
  modified_base (47)..(71): a, c, t, g, unknown or other
caaataaatcatcgtaaataaataattcaaaactaataaacaagttnnnnnnnnnnnnnnnnnnnnnnnnnaatttccaaattaaagttaagcggtctttacatccatgttcctcctatctccttttcaaacatctcattcactagttgctgatatgttaccccagcaatcttcaaactataaggcatgactttataataataaagtcccatgtttgttatgaagcttggatgttctttatcagagacatgcatcttaatctggttatatccagaatatgcgtccatgaatgtcataagcttgtgttcagcagttgcatccactaactggtcgatccttggtagtggaaagcaatcctttagacatgccttgtttaaatttgaaaagtcgatacaagttctctaagttccatttggttttgggatagggacaatattggatatccacgaggggtagaatgcctcggatataaagtcgttagtcaacaacttatccacttcctctttgagtgccccttgtctttcagatccaagggccattttttcagtctctttgttgggtaatttcggtcgatattcagatggtgacaaataactttatggtcaatccctatcatgtctgaatggctccaggcgaattgatcctggttttcctttagaaaacttgttagttgttattttagtttttcatccagacttttcccaatgaatacacactttgtgggattttctagatctaaaataacctcctccaattcctctattggtttcaattggttcttatcatcttgaactcaaggatctagatccttgatctgcttatcgccttccctagttgtgattgccattagttgatgactagcttttctattttgtagctctatgcggtagcattcacgagcca

SEQ ID NO: 141869 - DNA, 548 bp, Cannabis sativa
aatagcgaggcaccagagaagagtaacacataccttagcttactataagcaaattaagtgtcaaagtcagaccgactcggagtacaataatgtgagatgaccatctcgctacgaggatacttcctattgtttcatccaactaaaggaagcgactcataaccctggtaagtctcaagatttccacatacccgcaatcaacgtaaaacatatcatgtcgaccttggaaagaagaatggttccagcttgccattgggatcaccacaatcaattgtttatcgagacatctctagattcgacaattaaagacgtgtttaataaacaatattctagacccagtaaaagcgggagaatcacagctaaataattttataatcatacaccgcatttacatttcatgatatgtaattagatcccacaatttaagggataaggactgtaaatacattttagtgagccttgtaattaactaccactatgcaattataaatagttgcaaacaatctcaaaaaagggacgaaaaaaattcttatgcaagaggccctgaaaaa

SEQ ID NO: 141870 - DNA, 1032 bp, Cannabis sativa
gcaccccctctcttcaccgtcctcggtggcattatttaagtatcaaaattcacaaatttcaccaaaacaatgacaaatcgaaacccccaaattgactaaaccgggttaagatcgatcaattttcctgcccaaattcggatttgaaaccctagaacaaagaaaaaccctagaacaaggaataaaaaagttattttggagcgcaagtcttggtaaacgatgacacacaattatagtacgggttgaacctatctagttatatatacctcgagagagaactttccagtgttttgtttgtatctgagcttatgtagttatcgtggtacgagaaacagaggaactttctctccattctttttttttaaaaaaaaaaaataattaatatttttacttaaagtttcttaaaaatgttcttaaaatataataattatataattatatttttttttattaaatttcattttttctacagttaaaaattattattttcccttgttaaattttaattaatacaaaattttgccttttttattaaaaaaataattttaaaatttacaatcctctattaatactaaaaaaaaattaataaaaattattaaaaacaccaaatgaaaatattaaattaattaaatatattaagtttacttaaaaaatttaaattattcttaaaaaaaatattttcaaactttattttatttataaaccggaaatagtagtaaatggccctttattcctttttactaagcttaatgtcccattttaaaaataatatagcaaatggcctttattattttttagtacctaaaataccctgttgctcctgattttgtccaaagtacgtggaccaaccggatgatgacacgtagactgagagggtttaacgtttagataattcagctaagtctctttaaccacagggatcagccttagacatgcctcccagagaatgcacgtgagtctcacatactcccagagagcaacgctacaacaaagcatctccggaaggtgtcagatcctatctgaacagtcacctcg

SEQ ID NO: 141871 - DNA, 692 bp, Cannabis sativa
  modified_base (629)..(630): a, c, t, g, unknown or other
cagttgtgttttcttcccttggaatttttctgagaccgtagcttttgaattgtgcgagcaagtcatgtatttttctcagatacgctataatcctttctctccgagcctcgtattctccggatacatgaattaccactagttgtgaatcactacagatttcaatgtgttcgggtttcatctcccgggctagctttaggccagggattagagcttcatactcggcttcgttattagatgctttaaatccaaacttgactgcagcatgtaggtgttgcccaacaggagtgacaatggcaattcctgcaccagatagctgatctgtagccgacccgtctacatgtagtttccaagtcagcttatcttcactgttacttggctgaggtgtttgtactggctcagggttgctttctggtatgctttcttccttgcctatgcattctaccctaaagtctgctaaggcttggcctttgattgctgttcggggttggaaagtaatttcgtattgacctaactccactgcccacttgagtagtcgtccagaggcgtctggcttttgtaatatttagcgtaatggttggtcaatgtacaccaagcagggtgagcctgaaaataaggccttaactttcttnntgctagaataaggcagtaagcaagtttttctatcaatgggtatcggccttcggcctcaatga

SEQ ID NO: 141872 - DNA, 661 bp, Cannabis sativa
  modified_base (62)..(62): a, c, t, g, unknown or other
  modified_base (173)..(174): a, c, t, g, unknown or other
  modified_base (270)..(275): a, c, t, g, unknown or other
ttgcaccaatatagatttggaatcacactcttaattttatagaacgctctatatgtttcacnatatagatacgctatgagttatccatttgttattttcctaataaccaatgatcatctatagatgatttacattgagtagggacaaatttaccgttacacctttcaatgtannttatccttaaaacacttagctttctatatatgatatttcagtgaactaatataatcactaaaatgagcgctctattatttatctctattaagccannnnnnaaggaaatcatcgtttcacttccatgtccaaatagaagctatagattccatatctctgattagcgctcccacctaattgaactaccatgtccttaatctatatgtcacgagaagatctatttggccgactttaacgaataaattgaagaacacaaattgaactagaatctaaccatctcagcattgcgatcatttgatctaagatcaactaggtgctatttaattgaatagatattacggtaagtgtattatatctaatgcaagttcaatatcggtcccttctgatgcatactccatacatccaacccaggcttactttaaccaatacactggaaaggacatatcacttatccaaggtgcaagtaaactacattgtagattatcct

SEQ ID NO: 141873 - DNA, 754 bp, Cannabis sativa
aaaaccctaatcccgggaaacccgaacccacaactctaggttctgttatacatcctaggggttacacaaagtgtaaaaatagggaaacacccaaccacggcactgaaatggacgaaaattgagaaaatgaagtgtttggggatcacgccaataccgctaggtttggaggtctggtaaaaccggctagccaatttgcaccagttcaccccaagcttttcattcttttctcaattttccaccaaatgcaaccaaaccttccagagtacctaaactatgcacatacaacatattccagccagtaattcacagaaaaactcaatgaaacaaattatgccattaaagaccaaagctttgaactcaaagctcaaacttgcacaaaacctaaaccaaccatcaataccagctgttaggacctaaaaccaactcaaattaagcttagaattcgaaccctaagcatacctaaccctaacagcccccaattcacaaaatcacacattcaacctaaagaaaaagcttcaaaaacatgctcaagggttctagggttttacctttgcttgaatcctcctccaaccttgctggaaaataccaagtttagcaacaaatccccctggttttcttcagccgaaagagaggaagagagaaagaggttgtttcattgaatttttgaccttttcccttatttctctattttcttcaaatgaaaagagataaccccaattaatcactagctgagtaaaatggacaggtgtccaca

SEQ ID NO: 141874 - DNA, 1429 bp, Cannabis sativa
  modified_base (44)..(51): a, c, t, g, unknown or other
  modified_base (377)..(382): a, c, t, g, unknown or other
tttaattttccatcgttttagaaattcatatttaggttgttaannnnnnnnacttgtgagtagatctaagttcatggtaaaataacttccaacatagtgacccagtgatccccaagagataaaagatatgggaagatttctttatatttcagcagttgagagtttaatgtatgttatgctatgcactagaccaaacatttgttatgcagttggaattgtgagcaggtattagtcaaacctaagaaaggaacattggacagcagttaagcatattctgaaatatttaaagaggataagggattatgtgttagtctacaaaggtggtgctttaaatcccgtaggctataccgactcaaatttctaggcttgtcttgatnnnnnnaagtctacatctgggatggtattcactattggggtggaacatttgtttggaaaagtgtcaagcaatccgcaatatctgactctattacggcggtcgaatacatagctgtcgctaaggttgctaagtaaacagtctggctaagaaagttcttcacaaaacttggtgttgttttagggatggaaacccataagtgttactttgtgacaacactggtgctataaccatcactaaagagcctcaaagccacaagaggagtacacacattgagaggaagtgccacatcatcagagaatatgtggcaagaggagacgttctggtataaaaggttgatactgaagacaacctagccaacccattcaccaagactttgaccgagactgcatttaaaaagcacaaagagaatttaggattaattgaaatgtactgattgttttatattagtgcaaatgagagtttgttagattttgtgccctaactaaaactatatttcaatgtaatcttgaatattcacagtgacacctaacagagcattttaaacagaagggataaataattaacacaagtgatgtttggagggttttaccaccaaaaatcaatttatgtgattaagtgtcactaattatatagttgaggtagtttagccgctaatatctcagtttttttgtgactaaaccctctcaactatcattccacttgtacttaaccctctcaactatcattccacttacacttaaccctccaaactcatatatttaaaaattataaaaattatttcaaaatttataatatatttttttttattttttaaatattttattttatatttttaatatgaattttgaaataataatattaagtttcccaatataaacgtgacacatgtacatgtgtgagtgaacacataagcagtctataataatatttaagcagaacaaaattttagttagatataagtaaaataataattgggagaatttaatgccaaaaattaaaaaataaaataaaaataataaggtcatgtattttagattaaaaaaaaaaattagc

SEQ ID NO: 141875 - DNA, 518 bp, Cannabis sativa
cttttctctttctctttttcttttctttcttttctttattttgtgacacgtcttagtgacctacacaaaaagactttgaaaattcagtgtcagtgtcctataacttgggttactaaaaatataagggatcactaaagataactctcataatttctattatttttgagtaatttatagtataaatacttaagtgtaattcccagttacaaataaatacctaaatttaatttttgacggtaataatacttaagttatatttctagaactccgtaggtacctggctattaaatgtcaagtcattatccacgtgtcattttcttattggtatatttaaactaattttttaaaaagtaaaactttaatgacttagaccaatcagagattgttgtgcgacaatttacttaacactttacagtcaggtacctacaaaagttccaaaattataacttaggtattattaccgccaaaaattgaacttaagtatttatttgcaactagctagaaattaaacttaagta

SEQ ID NO: 141876 - DNA, 1330 bp, Cannabis sativa
  modified_base (1049)..(1061): a, c, t, g, unknown or other
  modified_base (1130)..(1130): a, c, t, g, unknown or other
tatactaagtcccctgttatggattttagtgaacttaactgtgcaataaggatttgaacccaaaaggtaaacctctgaaaattatagatatgagcaaagcttttgggtatttgtaaaaaacctttttggtaggaacaaatgtggtggtggtggtgattgagtccatttgggaagttaagatcggtggtggtactacagaaattgttttcgtggattgagcagagtgttttgtagtggttgccattagatgtaaggatgccattgaagcgattcaagaagaaggcaacctcggtgtggatatatccatatgagagagtttcagagaaggaaatttgagtgaggagatgcggctgaagaggagatgcgactgaagaaaatcgtaaggattttaggtttacgcagagggctgaagaggagatgcggctgaagagaatagtctgaagagagagggctgacgattttgcgttttttaattttagggatttcactttttttttgcgtcagttattaactctcagtattgtattttgcgtcgtttttaaaagctcgctaatacaatacacgagttttaataacagacgcaaaatgaaacgtaaatttttaaatttcctactttttttgttggtttagtttttagcatcatatacctaaaagacacaaataacatattattagtgtcatttttaaagtgacgccccaattatttgactactattcacgtcggtcaacgctatgaatagtagcgttgaccgacgtgaatagtgtattttgtaatagtgatcgagccatagtgatagagtgccatgcctacacatagcaagtcaagtactcaattatagtgcaaaagacggtggtatacccgaaggagagaatgagatccaagctcagatcttgttattactctgcaacagaaaggaacaagaattagagatctgagcagaaggagtcattattattccgctgcaatcaatgtaaggtcttctaaactcttatgtgtttaatttcatcgtattagaaaatttatatttagggtgttaatgaaacatacnnnnnnnnnnnnntagatcctggtaaaataaatcccattaggaaataaggttagagacattgcttttgatgaggaattgaantcaaactcagttcctactatcattttagacaatgtttaggcttccacacctatcatctatcaagaagtgaatctggaacctcaaccagacaatgttgaacaacttccaaatcaagatgaggttgttgttccaaaagaacaaactcaacaccctcaataacaagagccattaaggaggtccacaagagagagagagagaga

SEQ ID NO: 141877 - DNA, 702 bp, Cannabis sativa
aataaaacatcataaattaataatgtagaattaataaataatttccataattaaaccctaattatctactaatttccaaatttaagctaagcggtctttacaggttaaccttagttgtgtaaaatcccagtattgtgactaggattaccagcacctggtcaggagcacccggggattcagaatctctgctattgcgggacaactaggtaagatagtaattaacacgtagagttatgcacggtggcgcttatattggaagtggtatatgtgagtaaatagtaaccgggattagggttattaccctaacatgagcagtttaatagcctagggttattacctagtgatatatgttgtgtaaatgctatgccatgttgaatatatgaatatattgagagtaagggttatgtgttcaaggcataaccaagttggactcggtaatcagaatcgagattaaccgttctaaggccttactgtatttagacgtgtgagcgccacgtgtaggtctacgccacgtagacataaatagtcatgtgagcgtaacatgcaggtctgtgtcacacagacgtatgagaatggtattactattgatatagtatgataagtatattattgatattttatactgtcatgctaggcttggcttacgggtgctctactgtgcaggaaagggtaaagctgtttctgatcagccatgagtgtagg

SEQ ID NO: 141878 - DNA, 550 bp, Cannabis sativa
ttatttagcttttaattacaagtaatttattagtaatatccgttattaaaataaattctgacctttctcattctcttttattctttgtgtctctcccacccataacgatatggcaaaacaaactatatattggctgatgaagtaaacactacccaacccatcataaccagcctttgcatctctgtacattattgtccagcgaagcccaacgaaattctggcgtaggcaaaagttctgataacaatctcccttcacacctgttccttttccctaacatatctctccttttatcttttcttatttatggtttttctctttctttctattatgctagattgtgtctcaatctttaaatctccacatgttgtatgatcttcattgtaattttgtagttgataaactctgcttgtaattagttattgctttttcttatttatgtgatgtcaatctcaaattaattaattttacttctcttttttcatgtgatcattttttttcttattgtcttactgtatgttgtgggattttattgaaacgaaatgtttgtctc

SEQ ID NO: 141879 - DNA, 802 bp, Cannabis sativa
acttcgggatacatatatctgttaggtggtggagctatatcatggaggagtgcaaaataaacactcatagcttcatccaccaaggcagcggaaactattgcgtgttatgaatcatccaaccatggtatgaggttgaggaattttgttaccgggctgcacattatggatggaagtgaaaaactagttaagttgtattatgataataagtcagatgtattgtattccaataacaataggagctcgacgaagtcaaaacatattgacatcaagttccttattgtaaaaggaagggtacagagtgcacaaatttgtgtaaaacactttggtacaaaattcatgattgtagacccccttactaagggcttgccacccaagctctttcatgagcacactgctcgtatgggtgttttagattatgagaatatctagatacagttggtgtttgtctttattatccttagtgtgttttatttgtttcatgaaacatgtgtatttggatatattttttatccaaaattatgttattcagtttatttcactttgtacatttaagctaaagttttgatctccatacataaagtaaagtaggaccaattgaaaattgagatgaatagagcaccatgcatgtaattttcataccacactattatgattgatctttgttatttggctatattgatgtatgtgaccattgatgggtttagttgtgattgatacaacgaaaatcgctttgatgctatgttgatatagttaatggataagattgcatatgcctatggttatgatgacaaagttatgagct

SEQ ID NO: 141880 - DNA, 1102 bp, Cannabis sativa
  modified_base (50)..(54): a, c, t, g, unknown or other
  modified_base (735)..(755): a, c, t, g, unknown or other
gctatcatttaatttaaaatatgtgcaatattaaaatatctgatcttatnnnnnaataatatataaatattaaagaaattaacaaattttaaaaatctgaccgtaattcaaaataaataattaatttttaaatttaaaactcaaaatatcataaattaatgataatctattaaaaaattaaatattatcaatttaaaattttgatattgaagtttaaatatattaaaaataatattttattttgaaattagggtttgaaaattggaaaaattcgaaattgggtgaaaaatctcaaaaaattagatcttagggttgaagatgcgagctactcacgaggaggctgtatgcagcgtcctacgcgcgcgtagataggctttagcagggtcatatgggcggcaaacctcggcgcttgcatgattttcatgggcgaagtgcagcatcagctgagcacatcgtgtctaaagtagggttgcatgtggcattaggacaggatttgtctgagggtcacgcgcgcgtagatcctccttgtctgagggtctgtgcgtgcgattggggcatctcgacacccattcaaccagaaaaattcaaaacaccataacttcctcaatttttatcagaatcgagttctgtaaaaacaaaagttgcttaatttttcacaaggaatccaaataaattattttcagaacaaaaaatgaattatttcatggaaaaatttcgtaaatcacatacattcannnnnnnnnnnnnnnnnnnnnatgaacacatccaaatcaacacactaaacaaattcatcattttaaattcataatacatgaaactaaatcattaccattgctctgaggccaattgttgggaatattttatcaggatctagatttactaacaattatgtcgaattaacatcacaaatattaatatcactaaaacaatgaaattaaacacataagactttagaaaaccttacattgattgcagtagaatttaatgactcactatgattgagaacttgacttgctaggtgtggccatgacactctatcactcaaggtttgaatatgaagaacaataaaggaggtttgaaaatcactatggaaggaactctc

SEQ ID NO: 141881 - DNA, 762 bp, Cannabis sativa
ggtaaaatatttccaacaacctctctcactaacatgaccaagcctcaaatgccataggtatatactgtcattgttgacactattgacagtaggtgatgctgttcctataacttcagttccaatcatgtagtgcatgctatttttgagtttacctctaacaaccactagagaaccttgtaagatattgagagtgtcatcgtctatttttacagtatagccatgattatcaaacataccaattgacaacaagttttttttgagatcaagcacatacctcacattttgtactattcaagttatgccatcatgaatcttcatgtcaattatgccaattccaagaatcttgcatgtcttattgtttcctagaagaactgtaccaactgagttttcttcatagctggtgaacagatccttatttggagtcatgtgaaatgaatagccaaaatcaaggatccattctcctcttgaatctttaattgagacaacttgaacatctattgaatcatagccactagatgcaacatctgcttcaccttttttttactcttatctctcttaagcttgttctttaataggtaacattcatttctgaaatgtccatctttcttatagtaaaagtatttcttcctagttggaattttgtttttggaatttgacttgtgtcccatcttggatttcttgaagtctctcttttcagttcttccttgagcaaacaacttttgtacccctgtggaggagaatgaggtctctcctccacaggag

SEQ ID NO: 141882 - DNA, 651 bp, Cannabis sativa
actaaccgaaaatatgaaaatatgaccccaaaaccccaaaacttagactaattttagcctaacataggcctattttgcacaaaaaccctaaacacgtcacggtatgcccgaattagaatctaagcctataaaaacccattcagctcttcatgcaagggggacggaagaaacaaccttgagattctttctaagctttcttcttctaagagaaacctagaggaaaaaacactatagcaagatttaggcttcttcaatttgtaagacccatttgtaatacatcaagccttcttaagccaatatattgactcttggactaggattaattgatatcagaaccacgtaaaaatctccatctcattacttgattacttatctagcttcttaagctcttacttaatttttttgaaaatctcagtaaacactactcatcattctcatatgcctccctcttcacccgcctaactccatctctcctatgaatctaacaaccacaactagtccgacgaattctctccctctctccatcatcctcatccctagcgtcgccgacttcgtcagcccaactcagcgtccctgacaatgatcccgatgtcttccctcactagcattctctctctctctctctctctctctcttcttcacttctgaaaa

SEQ ID NO: 141883 - DNA, 565 bp, Cannabis sativa
cattctcgataaaagtatgataactgcgaattcagcatatactcagtactctagtcgtactattgtggtagcaattagttcatactatcttgaagcctagcatatatctgttgatatctcagtgcaactctatgtacacttccctaatgtcctgatatgttaatctaatagctatagatttgcttaatatatatttttgaccatttctgtataactttatgtacacctcactgataccctgatatgttattctgacagctaatatgcacgctaacatgtatacatatgcaattattactaatcttaccttgattccgaatacttaatatattggattattaaataatcatggtttaattatgagattgaattattaattatgatttacacatttgtggacacttattataattcaatatgtattaattatgctatgtgtgagttttctattttctgtatttgtgtttggtagcagtggaatacgacgttaggccattagagagtcacgttgtatatgatttagaatattattagtggggcatcattgttaggcattggaagtatc

SEQ ID NO: 141884 - DNA, 987 bp, Cannabis sativa
  modified_base (281)..(283): a, c, t, g, unknown or other
aattttttgaaaacaaaaacagaaaacaataccaaacatgctcttagatttttggtccttaaattttaatatgtactaaattatgctcttagaacttttatggccgttaaaaattctccctaaactattgagattgttagatttaagaacttttgtctaatttcatttaattttattatttcagtgattgtttatgtactaaactatgctccccaaactttgatatctaccgatcatgtccctcaaacttagataagtactaaatcatgctccctgaactnnnatccatgttagactttttttattaaaattagacgaaagtccttaaatccaacaatctcaatagtttagggagcatttttaaccactttaaaagttcaggagcatgatttagtacatgttaaaatttaaaaatcctaattagcctttgaaaatattagggcaactacaaccataaatacttgtatttgtttaaaaaaaaaataaagtaattttaatatgatattacttttctattccaaccatcaatactaaactttacacaaaaataattttttaattaaatataatagttttttattatattattgcaactggtaaagaatatatttgaaaactattaatatataaaataattagcgtaaatatacgaattattaaaaaatttcacagttacataattatgttaggtttcatttaccgttaaaaattagtattttacctcctaaattttgactaatacgaaattttgcccccatttattaaaactaaattaattttaaaaattataaaattctttcttataaaccaattataatattatattaattctgaaaaaaaataaaaaaaaattattaaaaaatctaataaaaatattaaattaattaaaaactattagttttactaaaaaaacttaaactattcctaaaaaaatattttcaaaatttattttatttataaacacatatcttaaaaaattaaattaaa

SEQ ID NO: 141885 - DNA, 1384 bp, Cannabis sativa
ctaacatctcaccactccaaaatatctatctcacaagagtcacaacaaaatagatacaataatcaggtacacatcatccacttgtctaagaaatcacttatcctctgatgaagtgactctttgtactcaaaatgtaacattgacttataaatgtgcaactaagccgaaagaaaaacacttggccttcaaattggccagagaaaaaagattttgatcaacaagcaagttttagtactttatacgaggctaaattttgaagccattcattcatcactaaacgaaccaaaagaaaagaaaacttacattttttattacaaacccaagtttcatcaacaatgtctggagcttcagaaaggttaacaacatttggagttctgcaccaaacatataatataccgcgtctctgttttttgtctacgattttccttttttaggctcttttgatgaataaacatatttgcatgcatatgcatatttgcagatatgcaattgtaacaggggcgaataaggggattggagtagagatagtgagacaattggccttgaatggagttattgtgatcttaacagcaagagatgagaaaaggggccttgaagctttggagaaactcaaagagaaagagaaaaacctctctcacaaagtgctgtttcaccagctcgacgtggctgatccagctagcattgttgctatggttgatttcattaaaacacatttcggcaaacttgatattttggtaaatattaaatttcactttcgaaagagtttttctataatttctggtttttattaatcttttatttgaacaaattttaaatttgattgatttaaacgtgcatttaaggatttaaaatggttcagaatgagaacaaattaacaatgattcttttataagaagggtaatttcgttttatttttaattaataattttataattttacggtctaaaattattattttacgaaaaatattgtaaggttttgaaatttaaaatatgcacgtagctaaaaaaaacaactaaaaataataaaaatcagcttcacaaaataaattataaaacaataaaaaataactaaaaaaataatctcacgataattataatataattataaaacaataaaaaaaatcatttattatttttactttggtacaatacaacaaatgatgaaatgttaagagctctgcaggtgaacaatgctggcgttggtggaacagaagaagacatgcatgcaattgtagcttctttaaatgctaaggtaagatattgaattttttaaataggtgatttactgtttgttatgatccttttaatgaactacacactatctttatttatctattgttgtttggttaataatatgtttgaagagttataatcatattata

SEQ ID NO: 141886 - DNA, 994 bp, Cannabis sativa
  modified_base (746)..(751): a, c, t, g, unknown or other
  modified_base (777)..(787): a, c, t, g, unknown or other
gatccaccacacacaagaaatagtctggactactaggataaagtgtatatgaagttcttgtataaatctcaacacacgagcaagaacaatttcttacaggtaaaaatcctttttaggctttttgaaaagttacgttaaaaacctctcctaaaattttgttatacaatatatttaaataaacccaataaatttttttatttaattgattatttaaattcaaatatgtttattaaatcatatttaattatttgaataaataatataactgaaatcggttatatatatatatttatatctaataactgattgagggaatctctcaaccacttgagagaatacctcaactacttttcaattcaaatatttatccaattaatttattaattaacccaaaatacaaaactaatagtgacaccctacatgtggggagcatgcactatgtttggacacattgcatgtggtacctcctatgtcttatttaagacaaggaatgtgccttttgtcctgacaacttttgtcttaacaacttttgtctttttacctttttaattaatttgaaaaataaatactaatttgttaattcaaaataggtttttctgaacttccatatacaatatttatcccaccccttgatagtgtttcaaggtggcaatccggggaccatggacctataattttaagctccaataaactaaatttatttattgaatctcatcaatcaaataatcttgtttattaattccatnnnnnntccactataaatatagaattgaactnnnnnnnnnnntagaattatatttactaagttttactgcagtgtctatcatataatcaattccagtaattagtcctctttgtgtcggttcgtaattagttttggtaagattaacgttttacccttctaattacttatgtatcttttagtaccgttaattcactagtgaaaatgtaatttagatccaatttgaaattaacctagatatttttatagata

SEQ ID NO: 141887 - DNA, 598 bp, Cannabis sativa
tgattggtgatttaggcaaacaataaaaagagtatcgtactgatcttcaaagaacttgggatctccaaaaaaaactatttgtagtaataaaacagaatgcattcaccagatgattcaaacattattatataaaaagaatttaaaatatacatatatagaatgaatatactatcatgcatatgtttaatcaagtcatgacacattaaaatcttctataataataaaaattaaatgaaagaaagttgtgtgttatgtttttttaaaaaaaaatactataaattgatcatagaaatataagtataatcgcatagtgaataaatgtataagatacatacacatatgggaaaaaaatgttaaaaattaagtactcataaaaataactaaacaaaaattgcaaactattgatgcactaaaaagaaaacaaaaaaaaaaaagaataaataaaacttttacctatagatgttgattgatatggtatgacataagaatgaaaaaatgaggaaaaaagaaaaagaaaacctacactatgaaattaaagtgatgtttatgtatctttatatattaaaagtgtctatttaacggcatttcttggtttaac

SEQ ID NO: 141888 - DNA, 547 bp, Cannabis sativa
tcatcaactattggttattggcttgattctacattcgaattgtatggtgatgatacatcttgccgtgccatcatgctttgttgggcactttggaagtcccgaaacaaacttgtttgggataagaaagcttcatctccaactcaagttcttaatttagcatggactacacttgaccattggcgtactgctcaagataaatctaacttattatcattgtctctcttacaacatgataataacattgagcattggactaaacccgattcaaatacagtcaagttaaatgttgatggagctttgtttgagagagaaaatgcttatggctttggcattgtagctcgcgattcgttgtgccactttgttgatctccgagcaagatatcagggaggaagctacccagccgaggtggttgaagctcttggtatcaaagaagcactaagttggttgaaagacaaggaatggaacaaagtcgacatagagactgatagcatggtaacggtacaagcaatttagtaatcaaattatgtcttctacttttggtttgatt

SEQ ID NO: 141889 - DNA, 500 bp, Cannabis sativa
atcaacacaaactctcctctctcggcaagacattcaaaccccaaagatcctaagtctctgcctttgccgttgccctaaccgcgagcagtaagactctctcttgctcgcagttagggcaacggccaaggcagagacttaagatctttggggtttgaatgtcttgacgagagaggagagtttttgttgatctgtattggtattggttttggataatattcttgggcttttaaactatgtatatatactagttgttgttgttctttttcgttttcctttctcctactttcataaatgttacttatatatatatgtttacccaaattttgacgacgataacgtgtcaagaatagcaccgcgaggcataaaaatatcgggactaaattaatgaagaaggtgtaaagtcatgactgttgagatgccccctcaatttgggtggttgttctactccccctaaaaaacttgggttttggggggggaccccccccccccccccccccccc

SEQ ID NO: 141890 - DNA, 506 bp, Cannabis sativa
tcgtgggatcaatgccgaatacaaggatcatgagattgaggctgaatacactgatagtgggatcgtgtgtataccatatccacgtaaatttctccctgagttatagggattgtgtgatgactcacgaggcgaaagctgaattcgctaagtgttggttgctctgtgcggattgctgagtactttgctctaggcatgccagcgaggtgtcctgcttggactatgcttcttgagcagatgttccaagtggattgcacgtgtcaccattcatgtgatgcttagtcagagtgcgaaaattgggataacaattttaattacttcgacttcacttttataatttttttaattgttttaatgtaatttttttacattttatttaaaatgtaatttaaaataaataatattcattaggatttagcttactataaattaaacaacaataaaataatagagctgtaaaatataagaggctttttttcatttttacacttcaaaactttttttttttt

SEQ ID NO: 141891 - DNA, 870 bp, Cannabis sativa
aaatggacattgataatgctttttggcatggtgactttgatgaaaaagtttacatgacactccataaaggatatgttcatgagggggagctccccctaaccctgcgtgcctcttacataagagcctttatggtcttaaacaggcttctcgtcaatggtttgctaaactaagcacaactttacttaaccatggcttcaaacaatctgcctttgaccactctctattcataaaaaagtcttcaacaagctttcttgctttacttgtatatgttgatgacatagtcattgctagtaccgatgatttcgatgttgctgcctttaaaatctttctaaattccaagttcaaattaaaagatcttggccctctaagatttttttaggcctcgagatagcacgatcaaaagctggtatttgtctcccaaagaccattcaccattcaactcctcactgaaacaagtctccttggatccaaggcagtgtccacacctatggatgcaaatacatcccttagcaaagatgttggccctttagtaaatgatgctacttcttatcgcagcctcattggaaaactcgttttcctaaccatcactcggccagacatttcttatgttgttaatcgactgagtcagtttgttagtgctcctcgtcaacctcatctcaaagctgcacatcgcattgttcaatacatcaaaggcacccctagccaatgacttatttttcactccaacaactctccttctctctctgcagctcgacctttccaacttcaagcgtatgctgatgctgactggggttcttgcattgttaccagacgttccataacaggcttctgcatcttcttaggccaatcacttatctcttggaaatcaaa

SEQ ID NO: 141892 - DNA, 653 bp, Cannabis sativa
gcaactactgctatgttgtcctctgctttagtaaattctacacccgcaactactgtgaaattcacaccagcacttctcaatgggcttgtcaacaagcaatctgatgtaaatttcaacaaagttggctcttctccgactgtccttcctacaacaaatcatgccattgattcagttgatgtggatgatctcagtaatattttcataccagatattggtactattgctacatatcctcccaatccaactttgacttatgctccacatcattgcaatagcaaccaggcgctgaaaatctcaacaaatgtagcaactgatgcagttgtttgttcatcagtcaggcagtctatggacaaagaaaatgcatccccaaaccggttctttaagaggcaatccgacaatatttcactaaggaaaacattgaagcgatgcagaggaccaacacaagctatgtactctccaaacttgtctattggggaggatacaaacctgaatgtttctgaacaattggaggatcagacgggtttcatggacaatacagcggaggctgattctcagccccgccctcagccatgaaaattgttagttggaatgcgcgggggctggggaacccgagcgcatttcgtcatctacgtttgcttgtcaaagagcaatct

SEQ ID NO: 141893 - DNA, 922 bp, Cannabis sativa
tttatttttgtttattgatatttgtagtatcaaattgaacaaccctcaccccaatcctcaactactatatacctttgcaaatgaactctatagtgagaagatatttgctggtcagagcgtcacttcacacttacttttgatggacttaaagttccagaaagaaaacttgctgggtattattttattaaaagagcaatgggttcagtttattctcattagcctttcacctgagtataacaaattagttgtatcatacgtgatcaataactttaactcgtcgaacatggataaactagaagttgaatcgcgtgcttatgagcggacattgtcacttgcaaggagggctcgctctagagttgcagataagggaaagaagaaagttgaaggtattgaggatgatacctctgacaattcttcttcttcgagttcaattttaaaagctaaaattcaaattgaaccggtaatagagacaatgaaagaacaactaagtagacgtattcttctatgttctcactatggagagaagggacattttaaagcaagatgtccctgacttttgaaccataagaacaaaggtaacacttttatttttgaatcatgtgttttggagaatgacaaatttatttagattgttgattctagatttactatccatgtttgctcttcattgcagctgcttgaaacttgggattacttaaatccaggggagttgaagctcaagattaggaatggcgaattagtatgtccaagctagaaaagctcacctcaagtttcagaataaattttttattttagacaatgttttgtttattttaaattttagtagaaggtgtttcatgtttacaaacataaatttgaattttttgagctctattttcactatttctcgcaatggcattcaattatgtgttgctcacatgga

SEQ ID NO: 141894 - DNA, 605 bp, Cannabis sativa
  modified_base (293)..(294): a, c, t, g, unknown or other
aaaatcaaaacagtgtttccacgtacgtaactctatctatatgtctcttaatgatttaatatgaataaattcaccattagaaatttagaaaacaacaaaaatacacaaagataaacattttattataatatttatgtaattattttattattatacttgagttggattgtttgggaactccagctcaactttttgagatctgtctttcatggatttaaaaattgaagtcaggacattagttttatgcaaattaaattggattttcagttaaattttagtttcgtagtagtttnnctacactttttttatgaattcgaagcaactcctgttttgattgattctggttgtcttctcaggtgaagtcgtcggaattaatggtggttctctttctgattgaattttttgtttctgttgcgttgggttgctgcgtagttgcacgatggttgcacgatagttgcccaggaagcatggatcttgggttgaaggtgtgtgtaagtggtatttgtgtaatttttttatttgctgtacatttgtttatttggccagctggaaatatttttttaatattcttactttttttggttaaaactgaaaaaaaaaaaaaa

SEQ ID NO: 141895 - DNA, 1700 bp, Cannabis sativa
gagacccaaacctgaaccaagacttggactcaaacccgaacatagactaggacaaaaacccaaaccagaactgggactgtgacatagaattgggatagaggcctaagaaccggaacaaggaccgggacctagtacccgacccccgactcggacttgaacctaggacccagctcgtgactcagcacccgaaatggaaccaaactgggaccgaagattgtgattcggatctggacccaatgcttgaaccgaactcatagccgctgtctgcatctggtaaccaaccccggacctgaacccagacaaggacacgaacccagacccagacttgaacccagtcccagacccaaacctagacccgaactcgtacgctgtgacccaaaattagaaccgaaaccggaagtagaccaggacccaagaattggaccaaaactaggacatggacctagaatcgtaaccggacctagacctagactcgaaaccgtaaccagaccaggaaccagactccaactcaaacctaaacgcgaactgggacccagacctggatcccaatccagacctagattcgggacccaaacccgcaaccaaactcctacccaaacgtagaaccagactcgggacacaaaatagtggccgggacctagaaccgcaccccagtctcaatcctaaacccaaactcagacctaggacctaagacctgaaccagaaccagaaccacactgggacccgtgagggatccaaatcttgacttgagatcctagaaatggggcttggaacaaacccgtagtcggtgtttgaatctgggactaagactaggacctgaacccagaccaggacccaaaccctgacccaaacctagactcgagacccaaaactggaacctaaacaagaaccgtgagaccaggaccctggaacaagacttggatcgtgcgaagacccagaccttgacttagaaccaaactcagacctagccctagacccaaaccgagattagaactcgggctcggagacagttgtgtagctagatcggcaccgataccaggagttggacctaaatttgggattcgatcccaaacatagactcagacccaaatagggatccggataagaacctgaacttggacccaaacccagaccgggattgaaacttgggaccaagatctggtccgagatcttgacccaaacccaaacctaaacccgcacctgggacacaaactcggccccgcacctaggacacgaactcggaccttgacccgaaccaagatccagactggtatccagacctagacccaaaccaagacctagactcggagaaaacccgaacctagacccgaagccgaaattggacccaagcctgggactcaaactcagacccagacccagaatcaaacccaaacctagacctgcacccggaccaaacctcgaactcagactgggatcagaacccaagacttacaccgaaaactaaacccaaactcagatcgagatcgaaacctgggactcagaccagaaccttgacccagacccaggaccctaacccacacccagagcccgatctagacctagatcgagatccgaacccaaactcaaactcggaccaagactcgaaccctaacccaaactcgaacttggaatcacaactacaactggaaacggactaggtaatgaccaggaccaggacaaggaccaagacttgaacccaa

SEQ ID NO: 141896 - DNA, 504 bp, Cannabis sativa
ggaatgattttccatataaaccacaattgcatcttttcatttttgtacattcacaaattaaagcatattaagtttatgttctcataaggcgtgtgaagctccctgtttcctctcatggcgaagaagagacgggtggtttcgaagcccaccaaagtcgtagcagctactgggaaagacgagatcgactctacggagaaagacgagcctgacctcccttcgatccaaaccgaagtggaagagcaacctgcacctgagatattccttgactcctgtgagaatctggaagccgatgtagtggatgagagcccgattcagaagaaggatggttcgaggtcaatgagctgggcagaggctgctgaggaagatgattttcatgccaaatctagggaaatctggggcaaatttaaagcaaatcaggttcgtacaccctctactcgtcttgaatatactgaaccaatgaaagtaggggatcaaattgttgcaaaattggatttggaggaggtc

SEQ ID NO: 141897 - DNA, 513 bp, Cannabis sativa
catatgtatttagttattaaatttttaatgtgtgtatgtgtacatatgtatttagttattaaatttgaaacatgtaattaaaaatttagtaaagtaatacttttttttttaaaaaaattcaatttaaataataaatacttagaaaaatatttaattatgacatgtaatataaaatttaaaatataataaagtgatattataaattttaataagttagtaattttaatttaattaataaatgattaaaaaaaataataaatgattaaaaaataataaaattaaaaaatataatatataatttaaaatgtaataatgtggtattaaattttcttaaaaagttagtaattttaatttaaataataaatgatttagaaataatacaattataacatgtaatatataaattaatatatgataaattgattgataaattttaaaaagttagtaatgtaaatttaaataataaatgattaaaaaataataaaattcaaaaatgtaatatgtaatttaaaa

SEQ ID NO: 141898 - DNA, 533 bp, Cannabis sativa
tgtgaatattaagcagtgttttgggataaacagttattggtttactgttgttgtgacatagggcggagattatcggggatagttctccacttgggttgactgaagtgtatgaagctggattaaaggcaagaaaagtatattgtactacatagtacgttgtatgtaatacaattagtattgcaatgaattgattaatatttagatatagttaatattgttatataatgaaaagactgattggttgagtatcgataatgtgatgatattatgcatgtgatatatgggctcacctaattaagtgatgtgatttcctggcgatgtacttggtgtaagtacgggcgtcagtgatatatgatgagtatcgagcgtaggtacgagctcacctaattaggtgatgcgatttcctcgtaatgtactgggcgtaagtatgggcgttagtgatatatgatgagtactaagcgtaggtaccagctaaactgattagacgatgtgattttctggcgacgtactgggcgtaagtacgggcgtcagtg

SEQ ID NO: 141899 - DNA, 582 bp, Cannabis sativa
tctctctctctctctctcatgagcaagtcaaacagacatgtgaaaacatgtggaaagtgatgaatgctataagtgaagtgaaaagaagaactattcaaaggaaaattgttaagcttagcctgcatgcatagattgtgccaatgcccactacaaaaagtttttaacgttttgttttaaggtccctttggcttgttgctttcccataaggcactatctaaaaggaacaaaataaatgtaataaacaaataaaggttgaaaataaataagtacgttaagataatctctttcgtaacacgtagccatttcattttcaatatttggggtgggccggggaatgtgttgggtcggaccaactcatatttttcaaaactttcaacatatagaccctacagtagcgtctcatgtcgagttaatatttcgaagaatagattcgacatagctgtagactcattatttttggtagggtttttataaaaatattggattttaggtgaaatattttaattttgttgttatatggaaaaaattatatttatattgtttttttttcttcttttatattgtaaacacaaaaaaaaaaaa

SEQ ID NO: 141900 - DNA, 983 bp, Cannabis sativa
  modified_base (41)..(60): a, c, t, g, unknown or other
  modified_base (615)..(616): a, c, t, g, unknown or other
  modified_base (943)..(948): a, c, t, g, unknown or other
tatatcaaatactgttgtatatgttgggttttgtgtcctannnnnnnnnnnnnnnnnnnnaatcagatttactaattaataaaacatcagagatcattttatgttgcatggttcacatgatttatttcatgattttatactcttaatgtataattttattaaatccaaaacatatatttattcatgattatagtgttatcaacacagtggaatataatcatgattatatttttaaaagtttaagtcctatgattagtcagtacgctggatttagattgacatgataatcagcgataaggtatacttacacttggataagtgttgtgtcttttccacgacattgcaaagtatgatagtatcagatgtatggagtatacatcacattggaccgatattgaacttgaataagatatcgtaaacttaccgttatgtctttctaagtcaatatcactggttgatcttagatctatagatcttaatcttgagatggttagattcgatcttaatgtattatttatgttcttcaatgtgttcgttaaagtcgaccaattgaatcttctcgtgacatacaaattaaggatatggtagttcaattgagtgggagcactaatcatnnatatggaatctatagcatctataagtatttagaagtgaaacgataatttcttttgagcttggctttaatagagataaatgattgaggcctcattttagcaattatattagtttactaaaatatcatttataggtagtgttatacccaaaattcaactgtactccagaagctaacacatgtccaacagaagaaatatgaatcaattctaagaatataataatattacatcaataattgcatattaaataactcgctattcagtacatagaggtttgatagataaatattcaaaactcattgactatatagtcactgaaacaagagctnnnnnntttacttctatttaactaagcttgaagggaatcat

SEQ ID NO: 141901 - DNA, 522 bp, Cannabis sativa
tagaggttctcccaattgcccaacaatctcgagcaaagacgtttccccccagtatttgatgtccaaacccttcagttgaatccacgttggcacgctcgtgactgcctcctttgtaaagtcatccacagaattccatggtttcattaccctatgctttctatcaaagaagacatacccatgttccattatttgtctctcatttccatgttctgaaacctgataatgaagacgccctttgctaacagacctactttcaccaccacatccttccatattctacgaacaaatccataaagtatgttaattggaggattcgctccaatcacataacaaaccaaggaagggtcccaatagctcacctcttctgcaatgtcctcaaaattaatcttaacactcttctttcgtgcagatctagcatctaccgtttccttttctgcttgtgcaaagctagcttccaggttcttgttcacactagatctgagaattggaggagagatcttcttccccaaactcacatcctga

SEQ ID NO: 141902 - DNA, 624 bp, Cannabis sativa
tgattatagggaaaagaatcttcacacattaatgtatccacctgccatatatcctggcattactcaaccagtttggcacaattttgtggcgagtcgaactacactagaatttcaggtgagaagagagtacagaataaagatattatgatacaaatacatatagatttttttaagaaggaaacaactaacatgtttactatttatttaggcgtgctacagtgctttcttaattactgtgcaacctttgctaatcaaagggtttaataaaaatcgtgatttaaataattttgttttttataataatataaattgtacaacatgttacaaaaatcagggatcccgttttacattttatagataaatacataatagcttatgaacccatgttgtctcgaagatcagaacactctaggtctaaccgctcagatatgtacaaccttcactaagctccagactcactaataatcaatcagttcaagacaatccttcctttacctgcacatcaaaatgcagcaactgtgagacaacagactcaataagaaaagcatgaaacatataacataatatcgactattatttaggtgcccatacacctatccacggggcttaccaaatgattaagaa

SEQ ID NO: 141903 - DNA, 502 bp, Cannabis sativa
gctcctaatatagtgagaatttgaaatatgccttatttaaaaattctaaaagaatttaatacatgtcttaagtgatataaatttaaagtcgcgcgtactatatgccaaagatctttctatgaaataaagacatgtaagtaaattattatttgaaaaacacgtattgtctatgcaatataaattcgtaaattatacgttgtgatagactcttgaagagtttttaaatatattataaatgattgaagagcaaacttttatttcttttatatatatcgagaaatattaaatgtataaagtttgttcattagtagagaagtcctgaagtccttcatatgcatccagaattatagatatatgatcatttgatatagaaattaagatcatacaacaatataaaataaatatattgtcttggagtaccatcattgtcacaaatgaaaatttatattatcattaatgtgttatgttcatatctacttaaaattttaaattttagtatgaa

SEQ ID NO: 141904 - DNA, 754 bp, Cannabis sativa
taaacaacacaaaaatgggaagaactagggttcccaatttttccccaaacggcagatcggttctacaaccgcaattctggttttgggaggaacccagaacaccaaccggaatttcggttcttataggccatactgaaccggaattccatttcagtgcaagaaacctaaaaatttttcataactcatgcaattcaacccaaaacttcatgcaaccttccagccctactaattagaccctaatgaacatttccaaagcaataaaaccaagctttaatcccaaaaacgagattcaccattgaaggttcaagatttagttcaaaaactcaaaacttgactaacccttcaaacaacccctaactcatgcattattttgcataaaaactcacatttaaactgcagaacacaacaacaataaccacagcagctacatcaagctaaaacaacaaatacccataaaaaccaagttttagctcaaaactccatacttgcttaaaatcaactaatcatgcatcaaaacctactctattctactcaattaaacatgtttaatcttaagaaaacaacaataaaccataacaacagccacaacaacagccacaatttcattaaacatgcaataaatctctttttcttaaacttcaagaaaatggcataaaagggggtactaagggtattttgggaaaactctaaattcctgacaaatcccgacattcccaatgtctaaataaactgtcccactatactagaaatacta

SEQ ID NO: 141905 - DNA, 777 bp, Cannabis sativa
atgcggaaatggtaattgttttagagagttcttatgttttgaattatgagtttttcttttggtgtagtttaataaggaagaagggcacattgtcgaggaatgcaaaaagttgttgccttttcttttggtgtagtttaataatgtaagaagttgttgctttttctttttcttagtaacatggcagagacttatatttcttcaaggttatttggatatgttttcttatgtaatagatgaaaaaatatgaaacggatgactccaatatttaaaagagatagtcattattttaagaatatattgttgtgttgaaactttaatctgtgtttaaaccttaatttatatatggttgaaatatgtgatttgcttgaacttgattcataatttttgtattagtattaggtgtgctcaattttgatgtaataaacatcaaaattattttgggatattattagggctttggtatattgtggtagcaatgaacatcaaaattgttttgggatatttgcaatttttctttaccaatatttatgcttcaatttataagcgacgcaataggtaaaaaaaaagtattttcgcaatagatgtgacatttttgaactgacgaaataagttttttgtgacagttttaaaatgccataaacaattttgcgtcatttctaaacacacgcagaagatcaaatagaaaagtgtatattttgcgttggtttgtaaatgtagaaaattgttttttgtgtcgtttttgaaacgacgctaataaaaaactatttgcgactacgg

SEQ ID NO: 141906 - DNA, 1140 bp, Cannabis sativa
  modified_base (765)..(765): a, c, t, g, unknown or other
  modified_base (1112)..(1114): a, c, t, g, unknown or other
tttgttattttatggcttgtggtgagctttatttaatgtttgtttgttttttttatgaacttttattttatgttattttaatgaactttatgttatatatatggtttatgttattttaatgttattttatgttttatttcttgtttttttcaattgcatcgatatattgccgacatactatcgacaaaatgtcgacaagctctaaataataggttaattgctttacgtcgacatgctgtcgacacaccgtcgacaaaatgtcgacaacttctaaataataggttcattgctttacgtcgacatgctatcaacaaccgtcgacaacatgtcgataatggtcatcactgacctttcctagcagaatatcgacaaaccatcgatattccatcgatatatcatcgataacaactggaaaaacccaaattttgactgaaaaccagatctcaaacatttcagaccaaaaaaataccagttccaccaaatacgacacatataacgaaagcaaactacataatgtctaacaaaatgcttaaaacacaacttacccattgtaatggtgtaagattcttgagtgatattttggtgtgctccgattttccaccaacgcccaccgagaaacaaccattcaatggtaaaccaagacaaggacgagagagtgggacgataaagaaggaaatttttcagttttttctagagagagagagtggtgcaggagagagagggaagagacaatttcagtttttaaaaattttatttatttttttnttaaaaaaagggtaaaatgggaagtatttgtaatcaatggactaaatttgtacaaattaatggagggtataatttttgatatggagtatttttattaggggcaaatagtaaaatttcaccaaaaaataaacaaacgtaaatttgagttgacacctaaatgggaatgcaaataaaattccacaaaataaatattcaatatataagaacaaataaaatgaaaatttaatgctaagaaaacgacaaactgtatgagaaaataaccaattcaagcaaaagtagatcatcaatgaaatgagagcaacaatctatctatatatctatacctatatatatatactagtaaaaannnacgtgcgaggcacgtatattaaattt

SEQ ID NO: 141907 - DNA, 656 bp, Cannabis sativa
aggcggtgtgggattgcacagcttacccactgttttcccttacggatcacgggactactgactctcacaagattcgatcttgcttggatcaacaataatcccattcttcccgacaatatgtccaagaaaagatacctcagacaaccaaaattcacactttttaaactttgcattcaacttatgatccctgagttagtgcaataccattcgaagatgatgcttgtgctcctcttctaattgagagtatacaaggatgtcatcgataaacataatgacacacttatcgaggaagtccttgaatactctattcatgaaatccataaaggttgtaggaacattagtcaatccgaatgacattacgagaaactcacagtgcccatatcttgttcggaacgcagtctttgccatatcctcttcccagattctgagttgatgataatcagatcgtaggtcgatcttcaaaagtaatgtgtttccctgaagtttatcgaacaaatcatcaattttaggtaacgggcatttattcttgatcgttaactcgtttatttctcggtaatcaataaacattctgagggaaccatctttctttttcagaaacagaaccggagctctccagggcgatacactgggttgagtaaacccaatatcaagcatcc

SEQ ID NO: 141908 - DNA, 562 bp, Cannabis sativa
aagccagatgcctctggacggctactcaagtgggcggtggagttgggccaatacgaaattactttccaaccccgaacagcagtcaacggccaagccttagaagactttctagtagaatgcataggcaagaaagaaagcataccagaaagcaaccccgagtcggtacaaacaccttagccaagtaacaatgaaaataagccgacctagaagctacatgtagatgggtcacctacagattagctatctggtgcaagaatttcccttgtcatgccttgggggcagcacctgcacgctgcagtcaagtttggatttaaagcatctaataacgaagctgagtacgaaactctaattgccggactaaaactagcacgggagatgaaagccgaacacattgaaatctacagtgattcacatcttgtggtaaatcacgtatccagagaatacgaggctcgggagaaaagaagatagaatatctgagaaaaatacatgatctactcgcacaattcaaaagctacggtctcagacaaattccaagggaagaaaacacaactgtagacgcgtt

SEQ ID NO: 141909 - DNA, 779 bp, Cannabis sativa
ttaatcattcaaccattattaatttttaaaaaaaaaataataattttactgtgatttatggtgctcactaaaattaatagaacactgtaaacaatctcatttataaatttaggtatgcagtttgattagattatataagtgtgaaactacattattcttggcatttacagaaatggcaaaagtgaattatattttagcttggtatcttttatttacatttttgttaaagataagctcttttatcatcaaatggacatggtgtaaattcttcataacataaatagctacaaaactaagccctcctatgtcttatatgtcttattcgatattcaatattcattgaaattaataatcactctctctttctctctcttcccacaattataataattagtattattcacatgcattatgatctattataaataagcatatctttttttttttttaagcataaataagcatatcattaattatatatacgccacaatatttttcacttctatctaaataccaattcttactttgctaactcatatttaattatatgtacacattattcgtacatggtaggtggtttttaggtatcacttctactagaaatgtgccacgttattccaatgtgtcactttaaaaataatttcttttaacaaattaatttaaaatagtatatataataaaatttaaaattattaataaataattttaaataataattaataaaattatacatttaatttttaataaataaaattattaataataatatgaaataagat

SEQ ID NO: 141910 - DNA, 769 bp, Cannabis sativa
ttgatacaaaatctatggtataattatctctgcaaagagataacaccacataaacacttacaatttaaatttaatgtttatgaataattgccaattcttaagcaattgttaagattttgtttaattaaaagatctttcgatctaataggaatggaggaagttattaatatatacagttcaaagatcttttatatctattaaactctagactatattcgaaactctacaaaatctctataacacttaggggtggaagaagttattgatatatgcagtacaaacaatttttttttcattcaactctagattatattcataacatcacaatatctctatgacacacataatttgattagacatggatataatataataaattaaatagcaaactagtaaaacttattcttgatcctgtaagtattcaaataaatatgttaataacgtaatagtaaatagatgccttggacatagaatcatagtaccttatcttagtgggaggattttaaaagtccagcccattattattttgatgacactagtgacagcctactatgatatgttcaagaaagcaactttaaaataaaactaagagaagttcatctaaccattcatatggatagtaataatttataagaagtataaggatggtagaaaattttacaatgtttattcaaaagactcaagcaaaattcctggtccttatgaaattttttatggtatgtgttgacctcgttgttagccaactacaacgagtctatttttataagcg

SEQ ID NO: 141911 - DNA, 959 bp, Cannabis sativa
  modified_base (927)..(933): a, c, t, g, unknown or other
aggtagttagggtgttacaaaagagttcttagaatagtccaagtgggttatggtcagagaatacaaaactcataatccatgcataaacatacagttttgatctaattgacagaaaattgatattaataacttgtgaaagtcatactgtattgtccaatgtattctaggaaaccaaaaaaaattctatttgtaatctaaaattaaatgtcaaagacataaatttataccaattatttcttgagtaattattctatcttggaccaacactactaatctaaatgtaagtttaagttgcctaaagtaaacatataaaagtgggggatttctaagatcgatgatttatattattttgggatagaatgtcgggaatatagtcatttgcgccattcaatttcatagaaaaaaaaaatagaatgacatcataagcagatgatttataaataattcatcaaatgatataatatttaagcaaattctaaataaataagctaagaggaaaaactaaagcatcatttcatattgtacatccatagatgacaacttagactagtatttacaatatgaaacaatgaagaataaaataagaataactttgactctcgactaaatgggacatcatttgattcttattttaatagaaattatgctttagtttttcctcttagctgcatttacaaatacttatctttcgagatctaacactattatgtttgtctaacggatgacaatcctttgggatttgtcccattaaaaacaacaagctaagtgagaccaacaataacgattcaaaattgaatctacaacaattaataacagaaaataacatggttcaatataaattcatacattcagaaattattatgaatttagcaagtaaaaaagacatgtgaaaatacaaaacaagcacatcttaaataatttctaagnnnnnnnacaaactgatacagtgtctcggtagg

SEQ ID NO: 141912 - DNA, 1001 bp, Cannabis sativa
  modified_base (388)..(390): a, c, t, g, unknown or other
aaaaaaaagataaaaaaatggcttaatatcacttaagtggccgaccactatagtagaccccactaaatttcaattttgctatttatttaataatttatctttttctttcacaaatgacatattttaattttaaacctttaaatgtcaaatctatttatttaataattataactaattatcaaataaaattgccatttaacttatttattaattagaccttacaaagtctcttaattgacaaataaactataaaacctctttccttctgaattaagtcattccttagtgaaaattcataaataagacattgtctattttaaaattctaattggttaattaaaactaattaactgagtctacaagccaatattatctcaactagtatggnnnccatgggcctatataatcaaacttccaataagtagatctagaatttaccgagtaaatttcctaacttcttaattcttcctgactccactatagattcagaattgtactcttaattatatagaacactctatatattccaagatataaatacgttattaattatccattgttataatccaaataatcaaagattctccatagatgatttacattgagtagggataaatttaccgttctacccttcaatatattttatccttaaaatacttagattcctataaatgatatttcagtaaactaatataaagactgaaccaagagctcttccattaatctctattaagtcaagctcgaatgaaatcatcatttcacttctatgtcaagatagaagctatagattttgtaactatgattagcgctcccactcaattgtactaccatattctcaagatataagtattgggtcaatctaattggtcagctttaacgaacaactctaagaacacaagtaggaaagttgagatcaaacctaaccatctcaggattaaaatctattaatctaagatcaactaagtgatattgacttaaaatgatataacagtaagtttatg

SEQ ID NO: 141913 - DNA, 520 bp, Cannabis sativa
taaaactaacctgaagccattgttagagattgcatagaaagttttgatctttcaagatatatataattatatcaatatatgctttaaataatatatataataatatataataatataataatacattaatattatgtataataataataataataatataaaaaactatatatattttaaaacttacagttaaatatataataactatatatataacttaagttttctttagagttttttttatataattataataatactatataattgtatatatataaattttacttcactactaagaaacgtaatataatatgtatgatataataactagtaaaagaattataccaacctggattaaagtagttttccttcttgcagttccccggcaacggcaccaaaacttgttgtataccgaaagcggtacgttttacatttatcaactcgcaagtgcacaaatctttattgttatagtgagatttctctcacctagaaactcgagactagattcctccttaaa

SEQ ID NO: 141914 - DNA, 524 bp, Cannabis sativa
  modified_base (395)..(396): a, c, t, g, unknown or other
atctagagctcaacaatgaagaccacaacaatattaagcaattcatacccaaatccatcaagattaaacatcaattctcttaacatgcaaatctcaagaacaactcactttcatgcttttacaagaactaaaaatcagcaagaactcaaataaaaattagtataaaactacctcaatttcttgcacaaacaagctccaagctttcaacacaatctcccaacaatcaagctttaaatcaagctagttttcaccaaagtcaaatttgaaattcaagagggtttgagagagtgagagggtttggggtaaggggaagaagcagccagaaaatacacttccttttctctaaaaattctattaatcaaatgtaaatcaataaaggtcaaaagaccaaaatnnccctagggccaaataacatccacttcaacatacaaaggcataattgtcatttcatactcatttattttcaaataaaaattcagattatccaataccaaataaaatgccaatatttaattcccaaaatt

SEQ ID NO: 141915 - DNA, 1062 bp, Cannabis sativa
attaaaaaatttattaatttttaatttaacttgaattatttttttaaaaaaataattttacttacgaattttgctatcatttttatactaattttattttttaattttttaatcacaaaaataaaagtataatttttattttcaaaaatacgttttataattgattttgcttttcaattttaaaaatagaaaacaaaagtatgctatgtaaaatttatttttctttttattttttgactttatttaaatcgagtctggattcgagaccagatcgggggctgggttcggcgccagggccaggtttgggtttgggtctgggtctgatcggagtctaaaatattgattaaaaaaatagttttaaaaaaatattgaaaatgatatttttttttgttttcaaaatttttaaaattttgattcaaagttaaaaaatagaaaattgaaaacagttttataaaatatattttttaaaaatatttttatttttccaattttaaaaataaaaactaatattatcaaacaccccctaaatatttaactattcttgatatgagttattaccgtcttaattaatttgtttttatgctaaaagtagttttgaattcaatattttttttttctcagaaaaagtaatagataagtaaattttagaataattaagaccacctatagtaaaaattttattggtattagatatgtattgtcacgtatatattttttttattgggaatgtattgtcatattttttttaaggatgtattgtcacatttttatttcttttagttaagcatataatattatatattttttactttcaaattacaagcttattaatgtaattaattcaagattgcaatttacttataaatataaaatattaatgtaaaactgataaaaacaaaattatatttatgtcttatttacgttaaactaataaataattttaaagtttaagatatatatattttagaaatttttacatgaaaaatcacttttgcacaatttattacctaaatattcttacacgcctatatctacttttttacttacaaagtttgttttatt

SEQ ID NO: 141916 - DNA, 769 bp, Cannabis sativa
gtacatatcgcaacagtacaacctggagggttttggcctgaaaatattttgagttaacttttgtggtcactatgtgacatgtacaaaaaactatttttgatattttataatagtaaaatattttggaatcgggatctcgacttttgttaatatacaagtattttttatatatatatattttatggtgtaaattttataattaaatatttttcgtattgggcgttacaaaaaatgtcataacgattttagttagaaatattgatgagattattgggataagtttattttagaaatactgaggtatttttgagtacttggagttgaccaaatactctagagatatatatatttttagtggctaagaaataataagataactatcaataataaagtttttattaatattattattatattattataatatcaaatacataataagagtcttgtttatatcctgcttgttttacaattagaccctcttattttaatttttatgaagggcttttatgtaattttcataaagagcttttatgtattttcactttataataaaatgtttcttttaataaatatatatttgtctttacaattcagcctctctctttttaataaatataaaaaaagcaattaaaaaaaacctacatttgaaaaccctcaccgactttgtgttcttatgtcatttagagtatatatcacacgattcaaacatttatcgtttgcttggaagcaaatcagacgaagcaaatgttagggtttataaaacact

SEQ ID NO: 141917 - DNA, 962 bp, Cannabis sativa
gacggacaacagcttgcacttcttcaagcagggatccgtacagggactccattctggaacgaattacaacaagaaggggcttcaaacctccaagatttccagaagagagtccaaaagtacatcaacttagaagaggccaaaatagtggcttatgggggatattatccgaccggagtaggaggatacgtgcccggagtccaactcccaggaaccctaccttcggctactccaccaatgagcggcatacaattttctgctaccccaggatacaatcagagccaggcgttggctctcgcatcttcgcactatgggaatccttctgggatgagcggacatgtccttactcactccgctcatgcggcaagcctagctggaccttctcaaggttctcggagcaaaaggtcctcaaaaggtagcaaacggacagaggacaagcgacagaaaagggggtacacccctcaatacacccagtacacggagctgacggactcccaagaacgtgtgtattttgccactaggcaaaatacgcagtaccggagaccgcctcctctatatagagatagctcccgaagggatcccaacaaaagatgcgagtaccacaacgatattggacacaacaccaatgaatgcaaaaaccttaaagatgagatggagaacttgattcgattgggtcatctctatgagtggatcaagaaccggctgccccatctcaacccggttccggcagcgggacctctgccccaaagaacgccaaggggtgcgcccggagcattggcaccagtcgctcccccaggagaacctcagcagactcccggcctgccaccaagacccaatggaagagtggttatgatctctagagggccccatatcggagagactactcgaaaggaattaaagcgctacgcctgggccgtaaaacacaacgaggtttgggaagttactcagctcccagctcagaggcc

SEQ ID NO: 141918 - DNA, 1367 bp, Cannabis sativa
  modified_base (263)..(265): a, c, t, g, unknown or other
  modified_base (550)..(550): a, c, t, g, unknown or other
tggtctaattaataaattacacaaatgacaattttatttagtaattaattatagttattaaataaatagttttggcatttataggtttgaattcgaaaatattgtattatcgaaacgaagaataagtggttgaaataaaagaacaaaaatctaacaagagatgggtctactattgtgtacgaccataagtgatttttgcccaatattttattgttttttaatccatataattcaaccttaagtcctagttgaaacactataannngaacataatactctcactcatccacttgatgccttcaaccaaatcaaacctagttttctatatgagacaactagttgatgagcgagttccttccttagtgatttcgaacctccttcattgttcttcaccattcgaaccttgagtgaaagagtgacgtgctcacacctagcaagtcaagtactcaatcatagtgagtaagacggtagtaaccacacccgaaggagagaaagagatccaggttcagatcttaataatgctctgctacggaaaggaatcaagggctanagatcttgaacagaaggagtcataatattctgctgcaatcaatgtaaggttttcttaaacccttatgtatttatttcattattttagagaattcatatttaggatgttatgtgaattacgaaatttttcaacgaaaataattttattttcattttgaaaaagaatttttttagattcctagtgaaaaattaagcaattttggtttttactgaactcatttccgataaaacttgatattaatatggtggtttgaagttttgggtgcatcaatgtcgagcaccatgcgcgcatagcactcggacaaggtgatccgcgcacgcatgtgctagggcaaatcgtgtccgaacgctcgtgcgccccacgctcagacacgagcgtcgcccagggatgctgcatcacacccactcggaggctacaagcgcagagaaaacacggcgggacaccctgctgatgccctcctccgcgtgcgtccaggggcaatttacagcccctcttggctgcacgtgtagccttgctggcagccgacccaaaacccgatttttgtgggattttttcccaaattttgaatttttttaatttttaaaccctaaaattaaaataaatattattttttaatacatttaaacttaaatatgaattttaaattaataatatttcatttttaatagattattattaattctttgatattttgagtataaatttaaaaattaatgatttaattctttttatggttagattttaaaaatttgttaatttctttaatatttatatattatttaactgtaagatcagatattttaatattggacatatt

SEQ ID NO: 141919 - DNA, 666 bp, Cannabis sativa
tgcattaaactttctacagctcttcttatacattatttaactggttgccgaaaaccttggtcaacacttaaatcataataatgtctagttccaagtagtttttttaagttaagggttatttcaaaacccaagacatgagtttttaatttcctttatgaatgttaatttctagttttcatcatattaaattgcttctattcttctatgtttaatgtcatgattgatgtgttaatcttgtttagatgatcactaaattagtttttactttaatctattttcatcttatgattactattcacctaatagtctaagattctaagtgtttgtgataaattacaatttctaatattgtcaaggtatttttaattgtgataaagaatagaacttaggttaaatgaattatacattttattaatttatttcctagattagtctatctccattaatcttaaagcttcatctaagttaaatgaattacatgtgttgacctcgcttttagccaacgacagtaagtctaatttagtaagcaacaagtagtttataacgattgaaatataattaagcaatataaagatgcatgaattttatagaggttcagccccgagcaattcggtaatagcctaatcctcgttatttgtattaactcaagaacaaggagaaagattc

SEQ ID NO: 141920 - DNA, 1657 bp, Cannabis sativa
ttttatgctaggtgtatcttgctttatttaaaaaaaatacaataaataattaaagaaaaaatattattagttattgtttgagattattaatatgtatattcaatgaatataaataatgttgttaataattaaaagtaaatactgaatacaatatatgcatgtttaagaaatcttaatattctaactgcaatttattcttaagttaataaaaaaaactaaaccaaaaatcaatgttcgaaaaataaagcatacacaatttaaatttgagttaaataaaaaagaaattaaaatttaatctctaaattgttgataggtgaaaaataaggatacctttaatggttgggttttaattttcttttgcgagacaacagtgtaatatttgtattttgcactttttattctagctagatctacatataattggattattcattttttttggataatttgtatatgatagagtcgtcaaagttattatttttcatgtaagatggtaagatatagtgtaaataattaatttaatatataaaatctacttatgatatattgtgcaactgaaaaattttgctacctctttcttatgactgagttggagattctacaaaatataaggtctatatgactacatcaatatcatagtaaataaaatttgtacaaccataaggtctatataattgcaaaaatatcacaatatatgaaatttgagaaattctattagtaagaaattaatacaacaccagtgagatcaagccctccttgtttctcaaaagcctcaccaaatatcgcttcactgcttttacctggtatatattgcttgaagtcccctacttttctattcgacccaatcaaaggaaccgaactgaagttgatttgagtccaaaattgcacaacccgaatctgcaaattataataaaccaaagcacaaaacagaggcgtacctgggagaaaacggagaccggaaccagagccctcacctatggcagacgatgacgacgatgagggctttggggacttcaaattcgctccaatgactcctattcataccgcctcctctatttccaccaatctgaagaccaactcctccactgatttattcaccaacgatgattggggcgacttcgtaaccacccattttaatcagatcaatggtggatttgagttctccaatggaacaggtgttcattcgtcttttagtccttctcgaaaccaaaaccccttgtacctgtttgggaattcagtggatggtaataaatctatgatgtctcgggtttaatcggtgcctgtaacggccaacaaaaaaaattagagggtatatgattctgttatatatattgggatggaaaaagagataatgagatataaatgagttttgggatgatgagatatattgttattctcagctagctctgatataaattagaataggaatgtccaaattataataggaaaaggaatacattacaacagcaaaaaaatataatttcataaatatattttacagaagaaatatttataggacaatgtttatatacaaaatatataaaccggatttcacaatccttgaggagtggataagtttcttcaggtatttcactaacatcgctgcacaagtgaatcacattagctcgggaatcctaatcaatttcaaagaaatcca

SEQ ID NO: 141921 - DNA, 544 bp, Cannabis sativa
tgttgattgttgattccccggacgttccaacttagaatcctatccattgtttaaaggaggttctccccctcctctagttaatatctcttcatgcacttcttcagtcgcccgatcctcttccttctgcaattcatattcttcctcattctgtaaggcagtatactggttcgaggtagatgcttcagtaggagcatgctgatttttaagcttccaacccttcaccacttgctgaaacccatctgcatcttccccaggcagttcagtcacttgtttcttcacccctttcaccacccattcttgcttttttgcctccttcttcctacaatcatccaaactatgtcccattcctttgcaatgtttgcacaggataggcttccactcataattgacaaccacagaaacatcattaccaaactcattctcaaaatagatcaaggcaggaaactcttgctccattgaaacttcaataaggattctaggaaaaagtagcttatccctttccctagtaacctcatcaaccataataggttttcctagctgccca

SEQ ID NO: 141922 - DNA, 564 bp, Cannabis sativa
  modified_base (528)..(532): a, c, t, g, unknown or other
tatttgtatgtggactgtataaatatttaatgggccggcccatagtatttttgtaattttttttctttttttgtatttttctgtttttttccctaagaattataatcaaatagagtaagtggtatattgacacaaatattatatttttagtttatgagtaatttgtgacgtaaatacttaattttaactttcaattacaaataaatatctaagtttaatttttgacggtaataatacttaagttatatttttggaacttccgtagttacctgatcgttaagtttaatttctgatttagcttcatattgaattttctcaattttacaaagtaccctgcgaggtctttgttgggttttgtgcccttaataaaactctatttcaatgtaatctttatcatttaattatcaataaagagacagaagtattttcatcacttatttagtgtgtcatttgtttcatattatgatttacatgtttctttgatttataaattcatccaaacccttatcacattaatattcttgtttnnnnngttgtcagcacagtggaaagtaaagatgacta

SEQ ID NO: 141923 - DNA, 592 bp, Cannabis sativa
  modified_base (28)..(29): a, c, t, g, unknown or other
ttccgcatttaattaatcacttaattanntaattaaactgggaatattaaaatacggaatttcatccagaaacaattatcgataataaattgcctgatcaatgtgcagtggaatttgctttatctaagtgccatgttcctactcaatagaataatgatgaaaaatcactactgaacttgttaaaggagtgagcttcaaacactcaacaactcaacaacgagaatagaaaaagtagaaatggtgtgcactgccatagaaagaaaaatgaacttttttttttctctttaggtggctgatgatgactgtagccacttttatattatttattaaataatataatgttgaagattaaaattgtgatatataatatatattattatatataatataactgagaattatatacatgtaataatcacaatataatgtgattgggagttacatatagttgtaacataagaggtggagttaatatgttgtaacttccacctgatcactaattaagtgtgtaaagagtggttacacaacttaatttttgaaattcaaaaactataattcaaatatagttgttggggattgaattttatcattt

SEQ ID NO: 141924 - DNA, 686 bp, Cannabis sativa
atgatggttgaggcttggacaaactggacatcgaattctattgaatttttgcaaatatttgcctttcaaaattaaaaattgcaaaaaaaaaaaaaaatctaaaaaaattgaaaaatcttgtaaaaattaattcgatcgaaatgcatgtggtaggttcagcttatggttaatctaatgatcactttaataggatttattacaaaactactaaaccctaattaatagcaactcacttgcgtgaagtgaagataaaagcaaattaaacacttaattaaagttaatcacttaattactactaataggtacttaaatgcatttaggatttagtaccagtaccacaacacatattgttagaaacaaagtcattactaaaatgattaataaactcattcttttttgaaacaaagagatatttttgttatgataaatttgggaaccctaactccctcttgcaccaaatgaaaagagatatttttctttctatctctattattttaggttgctttacaattaacgattggttttcgttcttttgtttcaaattactcttcttttttttttttgatttttttgattttttgattttttactgctattaggttaattcctattagagtttttatggggttagaatttttagtttcatgtgttgaaactaattaagtttttccattagtcttgtcttt

SEQ ID NO: 141925 - DNA, 897 bp, Cannabis sativa
atgaatgcaacaatctaaagcgagaaattgaattcttgataaggaaaaataaccggcatgtacagaagtatgtcaaggctgatcaaaatcagagagttgataataaccaagacttgctacctccaccggtttatggacatctggaagtcatcattggaggctcgcccatagctggagattcgggcaaagctcgggagaggtatgcctgaacagcacagcacgagcaagaagaagtgatcctggccgtagaagaaaggaagccaaaaaatcctacgggcaggaggccccaccataacattcaatgacgaagatgtcgtcaaaattaggtttccgcacaacgacccgttggtcgtaaaggtccagatagccaacaagatggtggccagaaccatgatagataatggagcctcttttaacatcttattcaagactacctatgaaaagatggggctccagctcaaggatctaaccccctgtctcctggctatatatagtttctccggccaaggagtcgcacctctaggacgaattcgactacccctcactgttggacaagccccgacaagcatgactgtcatggcacaatttctggtattagatgttccttcagccttcaacgtcatgctaggccgactagctttgtatgacttaaaggttgtcacgtcgatattccactcatgcctgaagtttccaacgaagaatggggtagggtgtctaagaggaaaccagcagactgctcgggaataatataaccttgccgtggccaaggctaagaaggaaatatcctttagctagatcacagacaagagaaagaacatttctaagtagggagcttcccaaggcggagatgaagatgtggatcctcgacttagggacccaagcagcaatgttggacct

SEQ ID NO: 141926 - DNA, 1224 bp, Cannabis sativa
cccggagttcagctctcgggaaccatacctcaggctactccagcaatgagcggtatacagttctctgccactctaggatacaatgagagccagaccttggctcctgcatcttcgcactacgggaacccctcatgggtaagcagacaagtcccgtctcactccgctcctgttgcaagtttaaccggaccttctcaaggctcccagagcaagaggtcctcaaaaggcagcaaccagacggaggacaagcgccaaagaaaggggtatactccccaatacacccggtacacggagctgatggactcacaagaacgtgtgtattttgccacgcgacagaatacacactaccggagaccgcctcctctaagtagagatagttcccaaagggatcccaacaaaatatgtgagtaccacaacgacattggacacagcaccaatgaatgcaaaaaccttaaagatgagatcaaaaacttgatccgattgggtcacatctatgagtggatcaagaaccggctgccccatctcaacccagttccgataggaggtctattgccccaagggacacccggagctgcgcccagagcactggcaccagctgtgcccttaggaggacctcaccagacccctagcctgccgccaagacccaataggagagtggccatgatctctggtgggccccatattggagggaccactcgaaaggaactaaagcgctatgctagggccgttaaacacgatgaggtgtgggaagtcactcagctgccggctcaaaggccccgactcatggactagccaattactttcacggaagaagacgcaaagatggtgcgctttcctcaccatgaccccctagtcatagagactctcatcgccaacaagatcgtggctagaatactgatcgacaatgggagtttcgtgaatttattgtttaaagacgccttcacggcgataggcctcatggaccgggatctatcgccaagcggttcccacctcacgagattcaacggaaccacacttatcccaatgggaaaagtgaagttgccagtcaccctgtgtccgtgcacaccacagggtacttttaaatattgcacattcgtggtggtagactgcctaactgcttacaacccaatccttggccgaccggccctagtagactttggcgcagttacgtccatccgacacttgtgtctgaaattccccacccaggaggccggagtagggaccgtg

SEQ ID NO: 141927 - DNA, 698 bp, Cannabis sativa
ttctcttcctctatcgtgtctctcgtttttctttccaaaaaatcccaacaaccacctacaccaagattccattcgaactaccgggactccgtttgaactggtcgcacttgaggacaaaactctctcttcattttttgaaaacccaaagccccgaagcttcgaccgccactgctcgatcgataggtttcattctcaaatgccagaacccacccactactagtactgaaaagctgttaaaatctaattatgtgcaacttgccacgaaaactcattctaaaattgtcaaaaacattaaaatctaatcttcaatgttcgaataaaaatcgtcgaaaaatcattgaaaagttgtcaaaaacaaacgaatatattcatcttcaacctctgaacacttgtaatcataaacccatcgaaaaaatgttgaaaaaaatttgaatatagttatcttcgacctatcgacaccaataataaaaaaaatgcaaaaaaatatatcctaaaattttaataaaaaaaaagtaaataccattttggatcttgtgttttataaaagttaccaattggaccctctattttattaaatgataaaatagacctgtatttttctaaaattgtacaaataatagcttaaactggtttttcgtcaaaataaaacttaataataatctgatctaggaatgttatgataaaactggttatatttt

SEQ ID NO: 141928 - DNA, 502 bp, Cannabis sativa
  modified_base (223)..(227): a, c, t, g, unknown or other
  modified_base (456)..(475): a, c, t, g, unknown or other
gaaaataatatcagccaacttagttaaaaaaaaaagcagatttaataacttaagcaaactcacaaaaagacaaaagggtaatgggacaaaatgaccattttgcccccccccccacactaaaacaacataaaagggtacttaggggtattttaggaaattctaaaatcccaacaactctagatattcccaatgtctaacttattgtcccgctatactaaaaatnnnnngatgtgattctaatagccatacactgcgttccaatattgcggggcacaaaatatgcaaaattatgaaatttctatatgtaacataaaaatgcattccaaattcaaataaatcatcataaataattaattcaatattaatgaataattttcataataaaaccctaattatctggtaatttctaaattaaagttgagcggtctttacaattatccccccttaaaaggattnnnnnnnnnnnnnnnnnnnngaacaactctggatattgagctctcat

SEQ ID NO: 141929 - DNA, 1107 bp, Cannabis sativa
  modified_base (560)..(561): a, c, t, g, unknown or other
acctttcgcggatcctgcacctttttctttctccctgggatagaagtagggtttttctgttgattttctttagagggataccgtatagggcttggtttcttggacttatgtttctgagtgcttggagaggactcctccggcatttcctcgagtcctactgggatggccttagggtgtatgtgaatccctgctgtctccatggcaatctgcatggcgaccatcacctcttgtattttttctgttttgttcttttagggctgcgatctcagcttcatgatcggcaactttttgtcttaagagcaccagctatgtgtaacagccttcgtcgtaggcgtcatactcgtcaaagttttcctcgtatttgtcgtcgttggcctcctctcgctcctcagaatccacgttgactcttgaggccacttcttcgtcttcgggattttgagcatctggaggaggacggggctaacgtgtgttgcgagtttccaccattgctgcttcaatttataagattgttgtctgtttgaagacgcttcctttaagtctcaatgaaagcaccaaaatgnngaccgaggttttcggcaaccgattaaataatacataggttaggctgtaggaagtttaatgcatgagatttttacgtggttggggcattaatgcgccttactccacgaatctttgttattaatgagagtatttatttatagagaatgttcttggtgaatttctctcctactttctctctttgattcctctggacctagaatcctcgacccctgcctcagtgcacttgtggggtatttatagtatttttctggggtgatccctaagaatgaatcacttgtctttctatacaggcttaatagggacacatattcccagcagatacaaaataggaaatacatgacctttaccgtaggtatcttaggggttaggtggatataatcttttttctcttctggattgatgtgatttctcataaagtattcgtcattagcctcattaatcattgcacaatagctgagaaaggggggttacgccatctgtcatatcgtttatggtagtttcaatacgtcttcccccatgcggcattaaatgcgaggggattgttca

SEQ ID NO: 141930 - DNA, 720 bp, Cannabis sativa
ggttcgtggttgtgcaggagcgaagtgatgctcggaggtgtgcgaaatggaggctcagtggtaatggaggcgaggtcgagcttgttgatggatggacgagcgatggtgactcacggactggtgaaggatgcagagttggtggttcgaacttggtgaattgcaaaaacttgttggtgaattgatgggagtctgtgtgaaatttggtggctacgggttcgactgggtgatggagttcgaagctagtggaaatggcgagggtggtggttcgactgatatgcggatgggaacggtttgtgcaggggtgaatggtgcggctgggttcgagcttggagattgactggggctgagcaatggtggacgactacagttgttttgctgaaagtgttgggctgatttgggggtttttcttccttgtttttttttttatgcatataaatgtatttatcaattaaaaggaaaaaataaaagcatacatattaatataactaaaatctattataatttttttttatatgtatatcagataatctggatatatttgtatatatatatgtataattttttcttttttttttcttgttttttttttaaagaagagaacccctcaatccgtgagcagttatgtccacttccagtatttttggaacccagacctcccagtacagcatcactacagcatttcttcagcaatttcattttgcaaccatccctgcttcagaa

SEQ ID NO: 141931 - DNA, 772 bp, Cannabis sativa
aaaggacctgatatttcatttccacttaagagtatgtatttaagaaaacaacatttagccacactcctcaaaattaatatataatttttcattgaacctctgattatttttcatgataaatactagaaacatttaatgcccctatttaccctgtttaatctcagcatctcatttgaaagttaatgcttaattaaaacatgcaatatatgatcgtgtttttaaattaccagtttgatctggtttaggtttatattgcttgaaatggctccatatttctatactgtaggagtgttgttgtccatgccactcccaatggtctgaatgttgttggttcaacctttttggttaggaaatttgatctacttcatggttgttgttagttgagttgtttttaaacttttctattattttttttttttggttaaaattaggtgggtataagttttgatttaataattgtcatgttctatgtttcttatgacttaattagtttagtttttggatttattaatttggcatataatttttcaagctgggatacttgaaatctcattcttacaagctcaataagcactatagacctcttcataccaaattgttggtgctcattcatatttattacagctatatgtagttgttgaagtgtaaatcaagtacacattttaacgatttgatactgaaaaaagtgtacttttgggtacctgtgtttagattttcattagagaatagtaaaataatagttagtaggtctgtgaagcatgagctctctctc

SEQ ID NO: 141932 - DNA, 587 bp, Cannabis sativa
ttttttttttttttttgtcactttcaatttttactgtccaattttacaacttcacctatacctacgtaccatatattaactctagttagagatatacaaatatctattctatataaaatatggctatataatagaattttttttttttactagaaagtattaactttattaactaacaaattcagttaccaaacaaggtaacaaatcactaggaacagactccatattgaaggtacaggatacaaaataactgatctagcaaagctatgggccactatattaacagatcgtttaataaaaataacctcaacggtacataacccagcaagcaaatttttacaccaaaatccacctaaagtgtttttttttttaaaaaataaaaataaataaaaaattattaaatgtcagcatcgttagttaaatttaaatataattaatccacctaaagtgttgcaattaataataaatttgttcctattgtttatttttttattaaaaattatttttatattttgatatttagaatttttttttgaatatattttgtttttgttttgatatttagaattagttaaattttaaatatt

SEQ ID NO: 141933 - DNA, 518 bp, Cannabis sativa
  modified_base (151)..(161): a, c, t, g, unknown or other
tctggcttttgcaatatttgtcgtagtggctggtcggtatatacccgaataggatgagcttggaaataaggcctcaacttccttgttgcttaaatgaggcagtaggtgagtttttctatcaacggatatcggccctcggcctcaatgagtnnnnnnnnnnngtaatagactgggtgttgtacgtttttttcttctctgatcagcatggcactcacggcatgttccgtgacagttaagtatattcccagttccgcacagtccaaaggttttgaaagtatgggaggtttagcaagttgtgcctttagctcttggaaagctttttcacattcttctatccactcgaactgcttgtttcctcgaaggatgttgaagaatggaacacatttgtctgttgattttgaaacgaatctgctgagcgcgtcgatccgaaaagttaagctttgcacttcttttgtttttgttggcgagttcatatccagtagggcttgaatcttttctggattagcttcaattcctcg

SEQ ID NO: 141934 - DNA, 571 bp, Cannabis sativa
  modified_base (50)..(52): a, c, t, g, unknown or other
agcttatgcacatcaaagtgtaggaaagttagagcctagggctctaaaannngtgtttctgggttaccccgagggtgtaaagggctatagattgtgggtaaaaaggaaagaaggttttaaaacactcattagtagagatgtaatttttcaagaaaataattttccttgtaaaaatactaatgagcttgatgcaggttccacagaaactaaccctgcaagtacatctattggactcactcaaactggcccaactgaagtggagccagatccagattaggtggaaccaattcaactggaacctcatgaagcaccaaatcaggtggaaccagattaggtggaacatgaagttcaacatgaagaagacaggaatcaggaagacctcacagagtatcaacttacaagagatagagccagaagagttcctaaacctaaccagaagtacagttacaatgtgtgggatgagagtattggctatgcctatatgtgaaaacttgaagctgagatctatgagcctcaatcatatgaagaagctcttaaagacagaaattacaaggcctggttgaaagcaatg

SEQ ID NO: 141935 - DNA, 567 bp, Cannabis sativa
ttcatcaacatctgagactctcgtgttcttttttccatcattaccactaaggtttcactccctggttcatatgctaccattcctttcttgcaatcataactatctctatatttatttaatcactctaaaactcattttaccatccattatgtagtccattatttaataaataacctactttgtgatccaacatccaccaatcactcgaatacatgtccattaaattgcatctcaattcataagcttttccccattctgggtaagtatgcctttctataatttcttaataaagtaatcttttcccaaaatttcaatggtctccttatataccatattgactatccagtcaattatgaagtactctccatcaataccgtatcaccttaagtaattcaagtaatcttctttaccttagtgatatcactactcttcctgactttcttttatacgttaccttagcaacgtccccacttcaagtctctattgagcctttatagtcacataatgatgactcttatacacgagtgtatcactctagttgcttcttggactgacgaccgaccccac

SEQ ID NO: 141936 - DNA, 945 bp, Cannabis sativa
ttaacgttgctttcaatgttggatgggatatagatattttacaagtttcttagatatttatggggcaattctcgaccactacttttgtgactcaataatatttatttgtgcttttcttttttcttttgaggagtgcaaagaaagaaagaaaaataataatattaaaaataacactattttatgtacaaatattattattggtctaactaagtatcgaattctatttaatttaatgtaatagcttttaaagagtatcgctagctaatcacaatatggcatgcctagaagtgttagacactactggtacctaataacaatgctcttttattaattgatgaaatgttcaagctcacagagttaatgtgcacgttttcaaaattaaatcaccccacatcactacaaaaaatcttattttcagtcaaaatatgactaaaagtgaaaaaaaaaatcaaactaattataaatcatcattcttatgttgtgattaaaaaatttgtggctaaaggtattagtcacaaaaattaaaatttgttgcaactaaataaatttttagtcacaatacttattgtgactaaaactgaattagtgacaacttgtatctaaatagtatgttttagtcacgagtaactttttgttgtaactaaaaatcacatttagtcacgaaaaatttatattgtgactaaaaagttgtcactaaatataattttttttgtagtacatttaaatgatgttattgaaagtagataaaaatatatgatgactgcaaacactatataagttggaaggaatgatgaataaattttagtggaagtcaagttctaataattagtcacgtgagtcagatgtcttgaaaaagactttataagcatgaacacgatggtggattaggatttcgattgtcacttaggagattttagtttatctatgttgggtaagcaagcttag

SEQ ID NO: 141937 - DNA, 747 bp, Cannabis sativa
  modified_base (399)..(411): a, c, t, g, unknown or other
ttagaggagcaacttactcagggacaaattcaagtccagggccaaaacgatatcctgacgcaggcgcttgggacactagagcatcctggacgtgtcacagctgctgggtatgctagtacttgaaatgttgtttctttagttatacaaaaaaaatcataactaatttgtacttcatgttttgcaggttcttgaccagggcatctaaactgttcggcaggaagaaaatggaagtttctgatgttgtggctcggcaacagaaggagatttataaattaaagccgaaatccaatcccttaaatagaagaaaaacattgccaaacaagaggaagaatgagaggtggttgatcaggcgtatgctccacaacaatatgctagtgaggatgagggtccaccacaaannnnnnnnnnnnngtttgtttccctcaacgagccacctctcttgtacaattttgatgaccagagggccattgatcagcaagtatatctctgctctgataatattgacaacattgtggcccgagcatatctatacgagcatgagggtccaatcactgttcacttcaaggactacgatgattcaaatgtccgggttctgatttcgaaaatgctgcaagaggatgctaaaatcccaatctcagttgaagggtgcagatatattagggaagtagcaaacatgtcccttccttggcctaaatacctaattgcaacacccgaggtaacttttgttataaattaattattaatgat

SEQ ID NO: 141938 - DNA, 1280 bp, Cannabis sativa
gttctacgttccagtagttctttattagcgagtcatcaagtcgagccaatttatagactcgaactccaactactgcttcgatgacatatggaccctctcagctcgggttgaacacttctgctgatgcatctctcgtatttgtaaagacttaatcttaacaccaagtctccaaaattaaatagtcttttcttaactcttttgttgaactatcttgtgactaggtgttggtatgcggcgttggtgatttgcgactcagttcgttttacctcaagtagatccagggacaattttaaaagttctggtattcttcttgattataaaactctcttctgtgagtcgatatattcacttcaacaagcagcattgcttctgagccaaatgctagcgagaaaggagtgtgtcccgtggctgtattctcagtagttttgtgggcccagagcacctgaggtagctcatcaacccatctgcctttggcagtgtccaacttcttcttgatagtatccattagggttttattaacggcttccacttgtccattggcttgaggcctagatactgacgagaagcttttgataattttattcctatcgcagaatttagtgaacaagtcgccatcaattgggtttcattattggatactatcttcattggaattccaaacctatagatattattcttgacgacaaagtgaaggactttcttgtaggttatggtgatgaggggctcagcctccgtccattcagtgaagaagtcgactgctaccaccgcatacttagctcctctacgcccagtgggtaatgcgccaattaggttgatcctacatatagcaaatggggagggcaaggtcatcactctaaattctgttggtggtacgttaggtatatgtgaaaacctttgacacttatcacatttcttgactcatgtgtgtccttattgatcgttggctagtaatatccttgcctaatgatctttttagacagactttgccaacccgcatgatccccatagaagccttcatgaatttctctaatgattttgtttgcttctgcgggaggaacacaccgaagtaggggcattaaataccctcatctatatagtttgcctttgatcattgtgtagcaaggcactgtatacaatagttttagcgcctcgtttttgtcatttggatgtttcctatcgagtaaagagttgataataggcgtcatccatgttggagagctatctatcatctcgacgtcttcagtttcacatatacttggctcactcagcatctctaccgg

SEQ ID NO: 141939 - DNA, 983 bp, Cannabis sativa
tgattattaatgcataaattaatattaaaatagaaaatttatttacacccaaaagatattctattttaataatttttaagctaattagtaatttttctcaccgaattttgacatgtacatatcttctgaattttttggccgttaaaaattcctcagaactattaagattgttagatttaaggatttttgtctaattttagtaaaaaaattctaacatggatggaagttcaggggacatgatttagtaaatgatcacctaataggcacaaatttgacaaattatattcgtaaaagacaaattatagtaaatgatctcaaatcataggagtatgttagtatatgtgctcatttcaaaaaaaatatagcaaatgaccctaaatcataagaatatgttagtaaatgtctctattacaaaacttgtagaaaaatgacctttttaaactatttattatttatatggataaatggcggcaaaacttccaatactttcgttttggtttcactaaaccctcataacccaaatttctgcgggtaaacccccaaaaccactattctgttagcaatttaccatttccgtccaaatttagctgttgagtgccatgttggcttgtccacgtggacacaatatacacgcgacacaattttattggtccacgttaataattatattaaaaaaattaaaaaattaaaataaaattaaataaaaaaaatttctttcttttctttttctttcttttatttttctttctttctttttctgtctctctctgtaactccttcatctctttctctatctcaccaccaccattacccctcttcacaaatatcatcaccaccaccaccatcatccaccacaaatgcccaccaccatcactactattcacaaccaccgaaatcaccaccgaccatttctaaaatcaccaccacctactggtgccaaaaccaccaccactgcctattttcaaatccaaatcacaaaaaaa

SEQ ID NO: 141940 - DNA, 590 bp, Cannabis sativa
atatattgcgacgatataaaatgcggctaaaccctctaaaatgcatctttggagtcggttcagggaaattcctccgattcatggttaatcaacgaggaatagaggcatgccccacgaagatcaaagcattggtggatatgccatcaccgactaagccaaaagaagtccaaagcctcacaggtaaattcgcctctctaaactgctttatatcacgaccctttgttaaatgcaaagagttttttcaaattttaaaaggtaataagaagttccaatggaccgaggaatgcaaggaggcttttcaagcattaaaaacacatttgggacagcccccgatcctatcaaagcccatgaccggcgaggtcttatccatctacctagcggtgtcagaatatgcgattagttcggtactaattcgcgaagatcaaggacgacaatgcccagtatactatgtcagtaatcgcttgttggatgctgagacccgctatcctcaaatggaaaaattaacgttcgccctaataatatcgtcaagaaagttgcgaccttattttcaggctcatagtattgaagttttaacaaactaccctttgagg

SEQ ID NO: 141941 - DNA, 795 bp, Cannabis sativa
  modified_base (641)..(649): a, c, t, g, unknown or other
gatttcctcgataactgcatcatagtctttctcgatgacatccttgtatactctcagtcaaaagaggagtatgagcatcatcttcgaatagtattacagtgactaagggataataagttgtatgcaaagttgaaaaagtgtgaattctggttgtcagaggtatcttttctagggcatattgtcagaaaagatggaattatggttgacccgagtaagattgaataagtgaagaattggctgaggccaaaatctgggacagaagttcaaaattttctcggtttagcaagatattatcgacgtttcatcgaaggcttctgtaagatttctatggcactaaccgagttaaccaaaaagaatcagcgattcatttggtcagacaaatgtgaagcaagtttccagaagttgaaacaacgattggtaacaacaccagtgttagctttgccatcagatcgagaaaagttcgttgtttactgcgatgcatccaaacagggtctaggatgtgttctgatgcaagctgaacaagttatagcttatgcctcctatcaactgaaagattatgagcggcgttacccaactcatgatttagagcttgttgctatagtattttctctaaaaatatggcgacactatctttatggtgnnnnnnnnnagatttacactgatcataagagtctcaagtacgtttttacccagaaagttctagatatgaggcagagaaggtggctggaactggttgaggattacgattgtgagattttatatcaccccgaaaaagccaatgttgtggctgacgct

SEQ ID NO: 141942 - DNA, 882 bp, Cannabis sativa
gttgttaattaatttagtatatttattttctttttttaatttagtatattataacggctatattttaacggctatattttaacacatcaaagtactcaccaagtctatatataccaagttctattcttcctttcactcacttctctattttatacattactttacactctcattcatctaacattctcaattataatctattaaaaattaggcaatggattcaacaagttctccagatccttttgagaatatgagtgttactgatatcataatttcggaatgtaatgacgattctgatgaaatttttttaaaagaatacttagctgcgagtacctcaagaaggcgaggaagaaaaagagcccacattgacagaggtcgtgtagaaggacacgaacgcttgttccgtgactacttttctgatgagtcggtgtatgcagaatatcattttcgaagaagatttagaatgcgtagacatgtttttctatgcatagtgcaagctctagaacatcattcagagtattttaagatgagatttgatgcaatcggtagaaaagggctttcgccactacagaagtgtaccgctgctatgcgaatgttggcatacgaagcaccagccaattacgttgatgagtatgttcgaattggtgaaaccactgctattgaatgtctacttaattttgttcgtggagtgaatgaaatttttggggcagaatatttgagatgacccaacgtcggtgacattcaccgcttacttcaaatgggagaaaggtgtggttttccatgcatgttgggaagcattgattgtatgcactgtgttatcccgaaattggcactctgacgtggcatcacaagaatggtgacacgtgacatctacttagagca

SEQ ID NO: 141943 - DNA, 549 bp, Cannabis sativa
tgattaatgctcaaatttgtatattttaaacttttaattgtgtgaataattagagttaaattatttattttcatgagtttaaatataaaacaattatctaacttgaaaatatttaacttaatctaattttctattaattttaagatttgtgcaaatttgtgatagaaatgcaaaaaggcggtcataaaaacgagtacaacaaattgagcccatttggagtcaacatctcagcctaatcttattcaatcaagcaattgggcttcgtgttatattcgaccaaaaagaaaaatatggatcattctctccaacaagagccaagtcaaagttatctctccaatcactaaaccacccccacgttgtgagccaaggccaccttcatttcattccttttaatatgggaagttccaagtccaagtgagagtagcatctttcagccatgatttatatattgccacgtccaagagccatgtcattaagctgaatttattatcttgcacacatgactttacccataacagatcaattactccatcataactaccagttgac

SEQ ID NO: 141944 - DNA, 697 bp, Cannabis sativa
attctatttctttagctgaacgtatgttctctattaatagtgttcctttggagttgatgtctattcttacgagtgtttgctcgagtcaataaagaacacttcttttcaaaaaaaaaaaaaaaggtaaaagaccatttttttttcaaatctgagttttttattatagtaattttgaactattggagaaaataagagacaatttggtttcataacttaaaaactgttttccgttttttaaaactaaaaacagtttttaaaaactaataggggccgtttgggaaaaatttttaaaaataattttttaaaattgagttttaaaaaactagaaaacagaaaacattaaaatgttatttttaactttcaaaaatattttttttttgtctaacatattatattttatatttttgcttacatactcggatcctagacacgaaactatacccgaacattaacctagatggtttcatgtcatggtatggtgttaaaatattaattttttttgtaagaaataatctaaaaatagttttaaaaaatttgtgccaaactgttggaatatgtttttaccaggatctagatttactaccatatatgttatttaacatcctaaatataaaattctaaaacaatgtaagtaaatacatataaagtttcagaaaccttacagtgggtgcaacggaattataatggctccttccac

SEQ ID NO: 141945 - DNA, 620 bp, Cannabis sativa
tcgggttcgggtcgaacccgctcaaaatgttcagtcctacctacagaccatgctaaagatttttttcgaccaagtttggctttgttttcttattttcttcagtttaactatgtgtatgaatccaaagaaattatatgtggccatgcaagccacgattttctattgcctgtggactcggtgaatgccacgaccctatgcaggcgcctacagatcatgcagaagattttttttgaataagtttggctttgtcttcttattttcttgagtttaactttaggttgtcatccaaataaatcctatgtggccatgcaagccatggttttccgttgcttgtggaccttgtggataccacgaccctatgcacacatgggcgccaacgatccatgcaaaagatcttttttgaccaactttagctttgttttgttttttttttcttgttttcttgagtttaaattttagttttcatccaaatagatcctatgtggccatgcaagcctcaattttttgttatctgtggactcggtcgatgccacgaccctttgcatacatgggcgcctacagaccatgcaaaagatttttttgggccaagtttggctttgttttgttttgttttcttgttt

SEQ ID NO: 141946 - DNA, 673 bp, Cannabis sativa
ccctggttttgtgtccctagtctgtttccatgtttaggtctgagtataggttcgggttcaggtctggagtctaggtttgggttgggatctgggtctcactcccaatacgggtcaaggtctgatctgaagtccgggtcctagtccggttacgattctggatctaggtccaatttcagttatgattcaaagtccaagtcctagttcaagtccaggtcaacttcgggttttggttccaattttgggtcacaaggtacgggttcagtccacctttgggtttgagaatgggttcaggtccgggtgtgggttagcgtccttgtcagggttcgggtctagggttgggtcctaaatccagacactgactgcgagttttgtccaagcctagggtccatatctagatcccaatctcgggtcccagtctggtttcagttctggtgccgggtcatgagctgggtcctaggttcaagttcaagtctgggtcgggtactaggtttcggtcctacttctatttcccaggtccgtatcctgattctgggtcaaggtcccggttattgtgtgggtttggtcccggtgtaggttcgagttgaagtcctagtctcagttcgggtttagttctctgtctcaggaaagtgtttttactgaaatgagaaaggccattggaaatcccaatgtccta

SEQ ID NO: 141947 - DNA, 931 bp, Cannabis sativa
atacactattagttatccattgtttttttttatgaatcagtaatttcattgcactattaactcatttgattacaaactatagctcacaagaacagatatctatacatgtaaatttgaagaaaaattataatccactaaacgaatctatatccttttgatctacacttttgggcattacacaagtaattctattttttactaaccacttgatttcttgcactagtatattcggttcagtatcctcattacaccagaattttttgttccttgcatgccatattttgtacactacaacagctacacaggccgtatagcaattcttcttgaatttgctctgtcttgctctattaatccccctcaacatgctcagcagtaaggtattctttgacctccatcccagccaaattttcaactcttgcaggcagtattgtgcaaatttgcattcaaaaaacagatgagacatgctctctgctgcagtattacacagcaggcaactcgtgtcagttgcaatattaaatctctgcaatctatcccaagtcctcagcttgttttgtacaacaatctataacacgaaattatgttttggtacatttagtctactccaaaccagcttgctgaggtgaaaatccctctgttcctgcatcattagtttatatacaacagatatttgaaaatatgatgttgcaaattgggcaggaggaataatttgcttcaccagctccttcgtgcacactactctcctccaataccagctgctatggttgggagcctcatacccccaccaatcttcatcttcgatatatacactatgcacccacttcacccataggttatccttgttagtagcaatcgcccacacatactgtagcgccctgtccaacagggacgccacgtgtgtgcactttatttaaaataccaataattatataag

SEQ ID NO: 141948 - DNA, 756 bp, Cannabis sativa
tcatttatatgcggtctttacaatacttatttaaaaaatattaaaaaaattcttaaataaaaaataaaaaattattaacattaaatttatttatttattttctttttttttctctgtacttccatttcccttcacatttcttttttttttcctattcatcttctcttttaaattaaaatgaaaaaatatatattttttcaaattatattttaattttacatattacttagcataacttttttttaaacgtgtacttagcataactttaaatgtgtataatttttggctattcgaccactctattacatatagagaaatgctaaaggacacaagtgatgtctagcaccatcttatgtgtcagtattgctattggtacaactaaatatcggatcccacatagtttaatataataacttttagagagtatcgttaaccaatcgcaacgtgtcatgtcaagaaagtattaggcaccacttgtgcctaacaacaatgctcttacatataatgtataattcaaaatatagtacttttaatttgtttttagtattaatgctctttgtttcttttaaaaaaataattattaccaaattacggggcatatagtcaaagctagacttaaaccattgaaatccaggcataaaaactgttactcttattattaattattttttttgtcaattactctaacttcccatgccttaatgtctaccactaaatattattattattatcattattaatcatttcaatacaaaa

SEQ ID NO: 141949 - DNA, 792 bp, Cannabis sativa
aaaaaaaaaaagaggaaagatagcttccttcaaagactcctcctaggaccagctccaaagatagctcattgtccgccccgaatagttggtcactcaccttaagaagagatcggttcaagtaatactagagcatatctttacccctcttggcctccgtgctcagcgccacgaccgttgaaggggtcctagccggatcagacctgtccgagctacccctctaaaactctttgacttcgagaccttgtgaactggaaggtccacaacaggtcgctccttggaaaggtcaatgacctcgtcaactggcgccttctctttggacagagtttcaccgcctttagacttcttggccagaggagacttacccgagctgtctcccactatttttttcaaggcctgaagcatcttttgatacatttctacacagataaaatgaagcagttagaagcagatacaatatatgtgaaagcataatttaagagaaataagtgcaagttaaaatacccagcatgcgggcaggggaattttcccgaacaagcacagacgacacgtcttcatctaaagaatctccctcgtactccaccaggacaaccttcccatttccccctacagaggctgatggctgagcaggcatatcaggttccctaatcttgatagcatgttccactggtgcttggtcggtcgggggagctttcttcttcttctttctcggcttctcctgctttaaatattcttgagcataatgttgggctccgtcgtctccattcaacttagcctcacgcttgagttgaatga

SEQ ID NO: 141950 - DNA, 751 bp, Cannabis sativa
  modified_base (241)..(247): a, c, t, g, unknown or other
tgatcgaaaaatgtgtttgttaccgtagtaacttacatcagagctatttgatctaatttgatcttttaccttaacatgaaataaacaaattccagaaataagaagttgtactttaaatgatgagtactttgtttcttttgtcgaaacatctgagtgtagtccgcccaggaggccattcacttaggagtaaatgttcattcagtacttagtttggttgtccgacctggtactttattggtannnnnnncttaaatgttccccattccaataatgtggtactagaacgagttgcattttttcgtcatacttacctaatttgtatgctccggattcgagaacttcgaccacttgatatggtccttccaagttaggtccgagtacacctgtcgtactgtctttggtgtttaagaatacccatcttaggaccatatctcccacgaagaatttccgagccttcacttgtttgttgaaatatcgatccactttttgttgatgggccatccatttcaagtttgtggtggttcgtctttctttgatttcatcaagtgattcggctaggagtacgtgattggtatcttgattgtacatcaatcttctgtgggacggtggctcgatttctacatgcaacatagcttcatattcgtatgccatagcgaatggtgtctaaccggttgccattttctcagttgtccgatatgaccatagaacttcaggaagctcttctagctaatttcctttggcatcttcgagt

SEQ ID NO: 141951 - DNA, 840 bp, Cannabis sativa
tctttagcttgccttacaaatagacacagtagtcagtacaccaagagtcaccctcaagcttcttcttctccaagggcgtcgacgaacggacggcaactggttctcttctctggcagggtcacatccaagcggtgggctcagtccggcgtccctaacatcgtcatccaagtctaaactcgtcagaaaacttagagatgaaaacagggaaagatgatttctgggtagcagagacttggacaggtaggcttctattgtatttttacagtttttagcaaatgagattttgattttttgaagatgagtaatttgattctgaaagttttaacttctattttgataggccaagatcgagggatagatggtgaagaaatctctctgactccattgagtttatggtctactttgacaaaccaaaatggaataatattttgtctcaccctttttgtttttataattcatttcagcctataaattaaacattcgggctcagcccaatagaacccgaacccgaccatgcccaacctgactacacccaacccgatactcgacgcacctgaacacccaaaaaaaatgtaatcacaccccggttccaatcgactcccaacaccagaactgaactaagccacaactaaaccaaacaccacactgtaaccaacctaaccccacaccgtagccaacccaacaccactcagtggaataaacacaaccacaaataaaccaccatagagctcctccaacacaaccataaaccacctaaagcaagtcgattgaaccaaatgttagattttatgccctaaataaaactccatttcaatgtaatctattttattcaacatcaat

SEQ ID NO: 141952 - DNA, 575 bp, Cannabis sativa
gcctgttatatcttagtacctgagtcccgcagactttcaccctagataactagcactacctgtgtcctgagtcttcttcactttacatcctggacaacaatcaatctccatgatactcatctcgatgcttgtaatgaatctctagttcgttgagtgaaccgtgaaggtctcttccacacttcatctgttggcatcctcgacaacatgctcctacacaaatgcctgactgccccaactcttcatgcacaccatgccatctcaaagtgcatcccgcaggatgtgactcttgagtcaactaactcatatggcacccctgtcgatttccacatgcatgcaaagtccgctcaaccatccagctgattcacacttgcatcacgcccttctggctcccacgatgtactaagttccaatgatgcagccctttttccttcatgcaaactctagcacccttctccaacttcgcaggtaaacatgactaactaagtctcactgacacagccctctggcttccacacaaactctagcgccatctcaacgcttgcgctcgatcatcttagccctgatggcttctttga

SEQ ID NO: 141953 - DNA, 685 bp, Cannabis sativa
  modified_base (146)..(150): a, c, t, g, unknown or other
  modified_base (208)..(210): a, c, t, g, unknown or other
  modified_base (564)..(566): a, c, t, g, unknown or other
agcaaacatatagcctcacacaggtcaaatgattaggatgggccctatcatgttactaggtttacacatatgaaataaattgcaaaatttacctgttagagattacttataaaatctattaataattggactatgattaaaatcannnnnttggatctgtcaataagttaatcatagcaatttatatcaaataaataatagatttgtnnnaaaaattgaataaataaataaataaacaaacaatacaaacacgtaacaaataactggaaagtaggttaagatatttctattttaaaattaaattatttaaaatatatcttaactacaatttaaaatttaggttgttagagaatattttaaaaatatttaaaatataacaaatctcgtaaatatcctatgttatcccaattcttgcactctgacgtgggatcacatgaatggggacacgtggaatccacttcgagcatctgctcgggaagcatagtccgagcatgatgtctcgctagcttacccagagtgatgtttacagcaatctgcaaaaagcaaccaacacttagcgaattnnnctttcgcatcgtgagtcatcaacgcaatccctataacttagggatcagactacatggatacggaatacacacgatcccactattagtgtattcatcatcaatcccatgatctttgtact

SEQ ID NO: 141954 - DNA, 542 bp, Cannabis sativa
ttttttaaaaaaaaaaaaaacattctattattaaagataaatcaaaattattataattggtgtgaagaaaaaaaaaacaaatgatcagttctgtacaaatatgagaataataaaaataatacataacttaaatatttgtcatattatgtcatgaatctgttacataaaaaagaaacaattatttgtaaatatttgatatagtactttgacgatgatttactagcaatgaatgtacctaaaaaaatcatatattcttgttataaaatgaggatataataaagtatataaattaagtaatataatatgtagagtcttttgtcaaaataacttttatgaattttttatttataaaataaatttacaaaaaaaattattaataaatttacaagtttcactattatatatatgtgctgcataagttcaaccatacttgtttgactattttgatctccatgtatactttgaatctatacaattagatattaaaataaaaaattaaaaaataaaaatgcaacaaatatattgataatatttaattttga

SEQ ID NO: 141955 - DNA, 1373 bp, Cannabis sativa
tattttcttatctcaaaatattacatggacggtatccatgccctgaatgaagtagtattacttcacaaaatgtcctattttgttgacatcggtgtccatagtgcccttcaccacttaccatccaactgagagaagtagaaataccccgacctgctctacttgggagttgactttaggttgaaaagccaattggtgttgtgcggggatggctcgccccatccttgtgaggggtaaaggatgaacatgacggataaatagttgatgccctttagagtaaactgggtcgggcagaggttgtagaagtctgcaattctcttgaagtatggaagcaaaggcagcatttcaccctgcttggtatgagcgctcaaccaagcacaaaacccttgttttggactagttgcccagtgatttggaaaggggaagaagcattcgatatcccccaagtagccgtgtttctccaaattcttcattttggcttgggttactatggacgaaggagaaacccaccgagctcccagggcaccttgtcttctttgaggaacagccttggtgtattcctcagtaccgtagtctttaccctctaccaagacttcaccaacctcggacacaggttccccttcctcgatgaaaaccctaagggcaatctccgagcaactccctcctcctcggctttagatgaattgtcaagacagacttcgccctgatcctccacctcttggacttcgatgtcccctcattgtcttcctccttagcaacaggtcgtgcgtgttcagcgctcggtgtaacgtgcatgccaagatggcacgttacaagcaagtgatgcccagaagttagccaagttgttgtcaagtggtcgcccatgctggtagcatgctgatgcttagtttgtatggcagtggcattttcataaatatcttcaatattatcctgattgggacgggacttggtattcgccatttatttaggtttacgatttggttgtatgtctatagagccaaaatcttgtatgttcctggcagaaggctaaaagctcagaatgctctttaagggggtactctggtgtcagctttccaccaaccccttgcaccttggtgctaagtaagctactactagtctgcgggactagtaggacgtgcatatgaggaccacgaggggactcatatgtctccatgagttggagtactcatggacattatcgggccaacccggtagtgcatttaagaagctgctagaggttaacgggtacgtttccattagcttgccggtatgtcgcttccacgggacgtggcctaaacttccaagagatgttatggtgcgccttgaccaggagtctcaacacgagatgacacggatagtcattcgtgggctagttt

SEQ ID NO: 141956 - DNA, 520 bp, Cannabis sativa
aattaaaaaatttattaatttttatttattaattattattattttttaaaattaatttaaattatttttatatagatatttattttcaaacattcttctaatgtaggatttcttgaatgattttagatgctctttaattagaaccgtaccaacttgcttctcctaagctcaatttttttagcaaaaaaaataatatctaaccgaattaattaattttttttttataagtggcatctcaaaagagcagccaaacaagaacaagataaaaatcgctaaaaaaacagtcaataacaccagaattacgcacaacctaaaagcaaaacaaagaaaaaactaggtataaacataaaaaaaccagcagtaaattatgaaatgccaaaaaaaccgaagcaaaaaaaaaaaaaagagttttaaaaaaaataactctcttttgaaaataaataccaatataaaaataattcaaagtaatttttaaaaaaataataataattcaaaataaaaattaataaattttttaatt

SEQ ID NO: 141957 - DNA, 548 bp, Cannabis sativa
  modified_base (360)..(361): a, c, t, g, unknown or other
aagttaaggaaattgaaggaaaaaccaaacataaaactctctctctctctcttcctctctttcggatggggcaaaaaccagaggagatcacctcttttcatcatcaatattctagaattaagctaaagattaagttctcttgaagtggaggtaaccctagaactcttgtttatgtgttgttaagctttttacttagtttgaacttgtgattttgagaaattgtggctgataggtttaggtatgcttagggtatgttttctaaggttgtttagagttgattttaagccgtggatatcagttttgagctatggtgtgagaattttgtaagcttgagttttgaaactcaagtttaggtctttnntggcataatttgatttagtggttttttctgtgaattgttggttggaaaatgttgtaaatacattgtacaggtatactggaatgtttggttaagattggttggattttgaggtcatggggagaattttttgggttcccagcacagaaccagaattccggttctgggggacctgtagcaaccagtcgac

SEQ ID NO: 141958 - DNA, 788 bp, Cannabis sativa
tacttattgaaaacaatgtagaaactttatcagacgtaaagaagtggttagccagtaaattctaaatgaaggatttgagagaagcaaactatgttctcgaaaattaaaatctatagagatagaaagcaaagaacattaacattttctcaagcaacttatatcgataaggtgctcgaaagattctcaatggagaattccaaggaatgacagttaccgtccagacatgaaattactctatgtgaggatcaatgtccaaagactcctcaagagatataggacataagaaagtacccttatgcatcagcagttgggagcttgatgttacagtgttttgtataaggcctggaatatgctacgctgtaggaattgctagtcactatcaatctaatccaagtttggaacatttgatagctgtaaagaatattcttaactatctttagagaatgagagatctcaagcttgtatattttggtggagagttaaatcctactgcatatactgattctgatttttaattagacaaagatagtcaaaagtcgacatatgggtcagtatttactcttgtagtctggagaagaattaatcaaactagtattacagactcaaccatggaagccgaatgtagagcaacttgcttagcaactaaggaagcagtttggttgaaaaaattctacactaatttagaagtagttctaaaattagaaaaaccactggtgttctactgtggcaacagtggagtagtggccaactccaaggaactaaggagccataagagaggcaagcacatt

SEQ ID NO: 141959 - DNA, 615 bp, Cannabis sativa
aagtttgctctgtacataaaacaaataagtcaattagttaactactcactttttacaaataagtgaattattttgttataaattcatcacatgtattcccaaatacttaagcaggtgaattacttaatagatttcgaatctcaaagaaatttctaagcatagtcatataccgttaaaataaataaataaacgttagaaagataaataaataaattacttttttatttaaaattaaatatcaaagcacaataaatatattaaaatttaaaaatttaccaaactattagaatcatattttgaaaaaatatatgaaagaactaaagttgctaaaatagacagtttgtggttataaatatttaagtaaatattttattctttaattattaattaaataaaatttaaattgtgttagttgaagtatattagaggcacttttaagaaaattgttgacatcacttttgaccaacgacagtgagtctagattgtaagcaaaaagtaatataatgtatatgtaatataataaagacacaagaattttataaaggttcagcccgagcagttcggtaatagcctaatcctcttagtttgtattgacttaagaacaaggagtataat

SEQ ID NO: 141960 - DNA, 729 bp, Cannabis sativa
ggaaatctgatcttgatagcatctacatcgttaaaagttatggttggctctcctgctcgtggaactttggccttcctttcttccacagccaggatgacttcttcttgctcatactcagttgttcgggaatatctctctcgagcttttcccgtatctccagcgatgtgcgggcctccaataatgacttgcaagtgtccatctactggtggaggtacaagatcctggttgttttgaccttggttggtcttgacatacttctacatgtgcgggttttttttcttgatcagatattctatttcccgcttcaaattataacattcgttggtgtcgtggtcgtagtcttcgtggaaccgacaaaattttgtcatgtcccttttgttggcatctttcttcatggacctgggcttcttgtaccgaattaacgactgagctgccatatacacactctctatatcttcagttagaataatgaatgcagtgtgtttggcatgatcacggggagtctgtcaagatttctaggtgaactttcctttcttcctgtttccttgcttgtggttgttgcttgaacgcttgccacttgaattgttggaatagttgggtggacgttccagtggaaggagccttcattttgtgaggcttttgttcagcttctactcgttgaatggcttcttcgagcttgatgaagccttcggctcggtcgaggaaatcactcattgagtcaaccgaccc

SEQ ID NO: 141961 - DNA, 1296 bp, Cannabis sativa
  modified_base (709)..(715): a, c, t, g, unknown or other
  modified_base (1247)..(1250): a, c, t, g, unknown or other
ccaaagaggaaccacccgtgaaaacggtaaatgaaagtcaaggtatgaatattgaatattgaagttgaaattaagaatttagactttacataagagtatattttttttattctattttttgaaaaatattgtatttttagaaaataaaaaatattgtttaatacttaatgtttattcaatttatatatgtttttttaacattaatttaaactataactattttaatctagaaagacatatactatatattttttaaaaataaattatttgaacactaaaaactaacagcaataaaaaataaataaataaagatcggtttaaacgggttaacccgaccaaactgacgaaaatcattgggcgggttacacttttttctatttttgcattggacgggttacaattagatatttacaacccgacatttatattgaattggtaaaaatacaccatgacccgaccaaaccgaccgatatacacagggccggccttgaaatttagtgggccattggggaaaaaaatatttttgggccctcatttagaaaaaaatatggtatttttcaaaattgataaaaaaaaatgtgtaattttaaaaggggataaattttttttgggcccctgagctaggtgggccctaggcacaggcctagcccgcctatgctcagggccgaccctggatatacacccctagtattatctcaactagtgaggnnnnnnngggcctatataaccgagcttttaataagtagatctagaatttatcaagtaaaattcctaacttattaattcctccttgtgatactatagattcagaattacactttcaattatatagaatactctatatgtactaagatatggatacgttatgattatccattgttacaatccaaatagtcaaagatcctctattgatgatctacatcgaataggcacaaatttaccgttctacccttcaatgtattttatctttaaaatgcttagctacttataaatgatatttcaataaattaatataattgctgaaattaggcatcaatcatttatctttattaatccaaactcaaaagaattcatcgtttcatttctaaatacttatagaagttataaattctatatctatgattagcgctcccacttacttgcactatcatgttcccaagatgtaagtgttcacctgacaagattttaacgaaaaactttaagaacataaataatacagttgagctgaacctaaccatatcaggatnnnnatccatagacctaagatcaaccaatgatataacgataagtttatga

SEQ ID NO: 141962 - DNA, 946 bp, Cannabis sativa
cttcgtccataacccagcagctgtagattcctttgaaacctctctcaagaccttgtctccgaggctgagaatgatagcactgtgtgctttgtcaagaatttctgccttttctttatctgtttaatccttgatcttctcagctccaagtaatgcatcttgaataccctgctgtacgagtaaagctctcatcttcaccctccacaaaccaaaatcattcttccatgtaaacttttccaaatcgaacttcgcatttcccatgattcccaccttgcgttcttcacactatctgcaggagcttcttcctcgatctttgaagctcaagaacacttctttgacagaccaccaagctccaagaacgccccggcttgataccagattgttgggaaacaatcgatttctaatgattctgcataccatgcatgattgcacacttgaactgaaaccagttcttcaaactagaaagaaaattagagagagagagagagttgggaaagaatagttgtatttcactatatcaatgaatgaatacaggttacatactgaaatgtgtttgtacagtatatatagcttgcctaggaaataggaaagctaactaacaataactaactaacttccctaactgctaactgaataaaccgaccattacattaacatatacttttctctttcctttacctgcaccacgaagcacccgtgagtcacaaagactcatcaagaaagcaagtaatcacaaatagtaaataacacgagatagtataactatgcatagtatacaatttcatcatacacacctagcgtttataccattcataatcaaacatttgagtcaactattcgtctaataagacaaactgttcttgatgcctcataaagcatccttaccactcgtcattcacgagctatatatgtcattatcgttgcccgataaagcaaacgataagtaaga

SEQ ID NO: 141963 - DNA, 799 bp, Cannabis sativa
ataaattataaatattcattacaatttacgttttatattatattaggaaagtatgtagtatctatattaattgcaattcacatagcaaattaagagtaattattttaattggaacttactttgcaaatgcatttgattgctactaatatttcaaatgagatgtctcaaatgggctcattaatagcaatgtaaaccataataagtaatagtctatataatcaacattaattataaatattcattaatagcaatgtaaaccataataagtaatagtctatataatcaacattaattataaatattcattactaattatgttttatattatataaagaaaaccgatagtatctactctaattggaatacacattggcgaattaattgtaatttactttaattgtaattcatgtttgaattgctactaatatttcaatgagatgtgtgtcagaatgttcattaatagcagtgtatatcatatcagataatagtgaatataatcaacattaattataaatatttattactaattatatctatattatattaggaaagtctctagtatctacattaattgtaattcacatagcaaattaatgctaattccactaatgattcaaatgagctgtgttttaaaagctttatggttggtgtgttagtttataatagaaagtgtttgcttgatattttaaaatatagaactcttcctttatttctcaattattttttactttctaaatcaaaatggagcctcattatgatgacttttctgaaaccatcaagctccatcctcaagagttgg

SEQ ID NO: 141964 - DNA, 803 bp, Cannabis sativa
gttcgacgggcagcatagcttcataaccgtatgccattacaaatggtgtctgaccggttgctgttttttctattgtactgtaggaccatagaactttagggagttcttttggctagtttcctttggcatcttcgagtttcttctttagtgtatccttctagtttttgttgactgcttcaacttgaccatttgcttgaggatgtgccactgctgagaaacttttgatgataccatagttcgcacagaaatattggctgtcaaactatttgccattgtctgagactattttgtatggtagttcgaaccggaatatgatgttcttcactataaagtcttgaactttctttgatgtaataatcgcaagtggttcgacttcagtccacttagtaaagtagtcgactcctacaactgcgtactgcactcctcctttacctttaggtaactgcccgattaggtcgattccctaaatgacaaagggccacggactttgcatctgtgtcagctcgttgggcggagctctttgtatcattgaaaatctctggcacttgtcgcacttcttaacataggctcttgagtcttcaatcatcgttggccagaagtagccttgcgttagaattttctttgataagctctgtccagcggtgtgatttccacagaatttgtcgtgaacttcaaatagaagccatgcagcttcatattgtgtgacacagctgagtaatggcatcgagaatcctcttctgtacatgaccccttctactatgatgtactgtgctgcctttcttctcatcttccaagcttcattt

SEQ ID NO: 141965 - DNA, 699 bp, Cannabis sativa
aacatgactacttgttcgaaccaacggtctcgactaccaaaccatcgttggtaaaccgaagctttggaggcatcaacaaagcattgaacagtggatgggtcaaccaatgctatgggggcttttggacattttgatttcttagagcctttagacgactgcttgggagatgagtctgtagatgggactggaatgggtttggtcttggatttcttttcaggtggttgatacgtggtatcacgtgaggactttccttttgacttaaccctttcactggtttgggaaggtatggaaaccttagatggaggacaaggaggtcctacggctttggattgaggctgtagaatctacgatgaacgagtgactcattttgacacagacggagggggtgatgacagagaaggactagcctttttagacaggggaggagtcttaccttgaaacgtacgaggtttctgaatgattggcgatgaatgcggagatggagtcgactcaggactcgaatggaaagtagaacaaccaacctccgattggtaaaggacgatatcaggacagggattagacatattagtctcgactgtatattcgactgagaatcaatagtatttgacactgatggaacgaacatggcaacaaggggtactgcaatgggagtggtattctccattttagagagaaagttgtgaatgttgcaggacttag

SEQ ID NO: 141966 - DNA, 583 bp, Cannabis sativa
gtgccttctctttggacggagtctcaccacctttagatcttttgggcgggggagactggcccgagttttctctaactctcttcttcaattcctggagtaccttttgagacatttctacacaaacaaaacaatgcagatagaagcaaatataatgtatataaaagcatactacaaaagaagtaagtacaagctataaataccatgcacgcaagctggggcattttcccaaacaagcacagatgggaaatcatcgtctgaagagtcttcctcgtgctctaccaggacggccttcccttttccctccacaggagtggatgaccgagaaggcatatcaagttccataatcctgatagcgtgttccacatgtgcttggtcggttgggggagcctttttattcttcttgctcggcctctcctactttaaatattcttgagcgtactgcttggctccgttgtctcccttcaacttaggctcacacttgagttgaatgagctctccctcatgcttggcctcaccagctcggcctagctttgcctttttcttcttttccttcaagggcttttgcacaaagtcctttgggaag

SEQ ID NO: 141967 - DNA, 1079 bp, Cannabis sativa
  modified_base (699)..(710): a, c, t, g, unknown or other
  modified_base (857)..(886): a, c, t, g, unknown or other
attcaaaatccaatgtataataattcattttcaaaattcattaaaataaaataaaataaaactgaaaaaattattctaatttatgttgctctaaaattaaataaattaattttcaatataaataaaaatttcctatttaattaaatctcataagaaaaatatcaaatatttaagtatctcgaacaaaataaacttaaatattaattttctactttaattaaatatatctagaaacataccaaaaaacctagaaaaaaaatctatgtagataattcataaactaattacatattttctaattaaaatataatatattttagtgtatttatttcaattaatacttaatgaaaattttatatgatttaagttggtctgaaattaatttacagcttaaatctaatttttaaaattgaaaatttttgaaatatctacatttaaaataaaatgtaattcaaaatttaagggaatgattattaaaataaaataaaatatactctgaaaaattattcgaatttaagttgatctgaaattaaaaaatttcaaccttaaatataatttttatttaattaaatttattaaaataaaattaattaattatctagaataaaatcaacttaattattaattttaatttttgtatctaagaaaaataatctaaataaagttggtcaaaaattaattaacaaattaattttcaannnnnnnnnnnnttctaatttaattaaatttcatgacatagaaacaaataattaagtatcttgaataaaatcatcttaattattaattctatttaagttctaagaaaaaatattctaatttaagttggtctagaattaattaacaaattaattttcaannnnnnnnnnnnnnnnnnnnnnnnnnnnnnttagaaaatataaattagttactaaaaattactatctagaatcttttctgtaaactaagtgtgtttttctaaattaattttaaaattatcaaacaaaaaattaattccatttatttcaaaattaattatgttgctaatcaaattttaattaggttaaactagtataataagcctaatacaattatttaaataa

SEQ ID NO: 141968 - DNA, 643 bp, Cannabis sativa
tcactggcttaggaattaaatccttcggatagagcctgtacttcagacatttgtcttcggaggtaaactggatgatattctagtcatccccaggcagctgagcaagctcttgagctctatccctaagagtaagagtgtggggaggatggtgataagtagggattttctaaaaccaagtgtgggttgtgccaatgccatccaccatgaagtactcatcaacaaaacgcctaattttgctgatggccaaatccccggtgcctgtcaaccacttgaagtttggttgagagaaatagaagtaccttgacctgccttgcttaggggtgcacttcaaatcaaaaaaccagctaagctcatggggagaaggcatatcccacttctgcgaggcatagagaatgaagagggaagacagatacttaatgcccttggaagtgaactgggtcagacagaggcggaagaagtctaccacattcttaaagtatgggtgcaaaggcaacaatgccccttgctgagcatgatcacctgaccaggcgcacatccccctttcagggtttgtggctcaggcggtaatataacagtctaattcgcccaggtagccatcctggtcgagaacccgcaggcgcgcctcagtaacattggacggagg

SEQ ID NO: 141969 - DNA, 706 bp, Cannabis sativa
  modified_base (129)..(135): a, c, t, g, unknown or other
ggggaattgacctgatcggacaattacccaaaggcaaaggaggagtgcaatatgcagtggtagcagttgattacttcactaagtggtgtgaagtcgaaccactcacaaccattacatcaaagaaagttnnnnnnnttattgtgaagaacataatctgtcggtttggactgctgtacaagatagtttcggataatggcaagtagttcgatagccaatgcttcattgacttttgtacgaaccatggtatcatcaaaagtttctccgcagtgacacatcctcaagcgaatggtcaagttgaagcagtcaacaagatcttgaaggatacactaaagaaaaaactcgaagatgccaaaggaaattggccagaataacttcctgaagttctatggtcatatcggacaactgagaaaacgacaactggacagacaccattaactatggcatacagatatgaagctatgctacctgtagaactcgagccaccatcccacagaagattgatgtacaaccaagatacaaatcacgtactgctggccgaatcatttgatgaaatcgaagagagatgagccaccgcaagcttgaaattgatcgcccgtcaacaaaaagtagctcgatatttcaacaaacaagtgaatgctaggaaggtcttcgtgggagatatggtcctaagaagggtatttttaaacaccgaagacagtacggcagg

SEQ ID NO: 141970 - DNA, 739 bp, Cannabis sativa
  modified_base (708)..(713): a, c, t, g, unknown or other
ctcacccaggcttgtgagaagaccttgagttagccaaactcagggaagttgtagaccatgcaggcctaattgaagaaccacacactgctgactgcgatatattcgctcaatagagatgagaatcccttgaagaactacacactgctgatggcgatgtactcacttagtagaaatgcaaattccggagatggatggatgaccaagaacacatccttcgatctcaccaggcagagttagattgctgcaacagagaggccagcaatctaataaggcagttcaaccaaagaactaatagagagaggccaggatctcatcagagatccacttcaaaggagaattgttgatggatcagggagggtctataaatatgctgatcaacccagttcctcaggaactcggacagatcttcccttgccagagggattacaatactttccttaaaggtcaaacgacaaaaactggcaaatcttgacaaccaacaacatggggggctggccagggatctcaggctcaacaacagcccccttgtccatcctgtggctggccaaccaccagtaggagtcctcatggctggccacactcctccaatagtccccatggccggccatagaagatcactccctccccaaggggagtgagtcatccaaagatcgattttcaagagacgaggattgggagcatgtggaaactattgggttttatgccctnnnnnnaactccatttcaatgtaatctatttt

SEQ ID NO: 141971 - DNA, 717 bp, Cannabis sativa
tcaacatccaatcacaaatacgattgtgcaaactcgtagaggcctgactgatccagcaaattcacagacggtggatcctgcattgtagaacctaggaaacgcaaggattccaccaactattaatcctggacaaccgaagaacgtggggaatggtgtaacagttcctctagatgaaatcccgcctggtgtgcaagagactgggaataagagttccgcacccagccagggcattcataacacaactgtttcgcctggaaccaacgcccagacgaccatcggagatgccactgaattacaaaatcttcgtgatgctctcagactcatgcagggtcataacaataccctacatcatgatcaggacgaactacgcgctgtagtaaatctcgcgttcgacgaacaaaggcgtatgttcgtcgaatggagagatagagagatggaggcattaagggctcaccatacagagattgaaaatcatagtcggcaggctaccgtgctgatacgaaaaagcctaccaaactgtaggtcagcaactaccgaacatcattcccctgggtgagacggacgaagatccagcgatgaatgcttctcagactgcaaatggtcagccgcccaatctgcggtcacgagttccactcatgggcgaagcggtaggcgggcagaccttgtctagtaattcatcaggagaagtcatacctgatggttccaaccagataaatg

SEQ ID NO: 141972 - DNA, 1207 bp, Cannabis sativa
accgacgaggaagacccttctggcgatcttccgcctctaaaagcccttcttcctcaatcacggcacactccttccatggcttttgacctttggtgctgcccccacgagcggcgtcgttgggcgagatcttgcgcgatccgggtttcagagatccggagaatctagtagaggaggattctcgggaatggcggcccacggaggagtgtgagtgcggcggcgatcccatcggactaagcaccggcgtggactgaaacgacgttgttgtcttctccccatcgtgggagtcccttgatgggctttgcacgtagtagacatggcgacgcggagatctcgtcggagaagaagctgcgaggctggtcacctctgagtctgtcttggcgtgcattgcagctaattaatgactccgaactctctgaattgttcagcttcgaaaccgattgtcggtcgaagtctctctctcgatctcgatctcaatctcaatctcaatctcgacagtgaaagtttttagattggttttggttcgagtgggagactgcgagttggctttattaaaaggaaaattgggttcaggaggtggaagcttaccgtaacaagtagactaaaatattttaagccattatcgctaaacgaaggtcggtgtacagttttcctttgatcgagaaggacaaaaatgcccacacagcagtaggtattaatgtctttgaaaatagaaaataatttcttcattataattataagttattaatcgacagccacgttacagttggcatcactacccacccttttaaattctactttgaaatgctgaaagagttttatatttaataaaacataaaacacattgacaaaaatggcaaataacgtgggcttgatgattgatttatataaacctttcaaataatcttgaataaggatcaaaaggaaagtttaacttggaataagacgagttagaattctaacacacataaaacatgtaagcatttacatttcacagtaagggtgtatttagaagtaattgtgtaattactagataggataattactaaggtggtaattacctagtttagtaattacactatattttaaaatgcaatgtgtatttggatgttaggtgttaattacatatgaattcctaatattttgtttggcaaaataattagtaattacatggaaaaataatattttttagcagctaatgtttaatatg

SEQ ID NO: 141973 - DNA, 662 bp, Cannabis sativa
  modified_base (455)..(457): a, c, t, g, unknown or other
  modified_base (611)..(637): a, c, t, g, unknown or other
ttcctccggatctaggctctttcctagccggagtactttggtggagtcgaagtcgcacattgatatttcctcgacatcctccatgggttccacaattttttcagaatcttcttcagccttctctggttcaatggtttcccagaccatcagcacgggcaggtgggttgcgacattgtaacattgccttgcttccccctggtttcctctcaccatcccgattctggcttcctggctaggaaactttaagcacaggtgccgaatggatgtgagtgcgccaaaatccaccaaggccagtcggccgaggatcgcgttgtaagcggtcgggcagtccaccaccacaaaagtgcattacttgaatctgctcttgggggtgtccgaaaacaaggtgactggaagtctcacttttcccattgggataagcgtcgttccattaaaccctgtgagttggaaaccannnggtgagaggtctcggtccgtcaagcctattgcaatgaaggcctccttgaagagtagattcacggaacttccgttgtcaatcaagactctggccaccactttattagcaatgggggcctcgatgaccaacggatctgttggaattattttaccannnnnnnnnnnnnnnnnnnnnnnnnnnttattaacatcctaaataagaactt

SEQ ID NO: 141974 - DNA, 802 bp, Cannabis sativa
  modified_base (636)..(638): a, c, t, g, unknown or other
cctaacacaggagtaacacttcctattataaatatgaaatacattgaaaagtacttttcttagaatgataataaaaggtctcaagatctaaatatatacatatatataatagtaaaacttaatacatatatttatatcttcacattctctactctttgtattacataatatatattaactagtttagttttattttattaagatgagatctaagaaataaaagttaatatatataattctctactcttggtgtcatacaatatatatttatatatatatgcatattaactaatttagctttattgaaatgataaaacattctatactttttacattctacacgagtgagagtaaaacataacttgtaaaaaaaaaactaatactaacttaaaatgtaaatgccgttctatatgtatgtactcattatacatacctaaaatggcctattacaaagcaagcagtaaaaaaaaaaaacaacgacaatttacacaatcacacacttagaatatgtgtatgcaccaactggtacaaggaatattcattataaaagaaatgaagctatctcaaaacataactactagagacacacacacacacatatatatatagagatatatatgtataagataatacagnnnatgtgtattctacctcaaagacaagctattgtgtaaacgcttctaagcaagacagagggctaaaaaaaaaagggaaagcgtctataccatgaaattgtcaagggggagtataaacccaggtgttcgatggagagccttgatccttacaacgttgtttcatacct

SEQ ID NO: 141975 - DNA, 895 bp, Cannabis sativa
gcaagttttacctttttcgtttcagaatagttgtgacaatcaaacaccaattccatcttcttctcccactctaggtatgcttcaggatcactcttcccttaaaaagtgagaattttcatctttatatttcccaaataattatatacttggttcctaacttctctatcacgaccataccttctatggttacccgttcgtattccatcaaactcttcatcaaaaattatccattccccatctacttcattatcatccctttggtgaaccctgtttctccgtggcttctgttgggttccctcttctaccctatctaaccttgcatgtatttgttcacactcctctctcatcatcctcctcatctcccccatcaaagcttgaagttatagatttggaaccgtaggtggtgtagtttcattactggtattttcttctggaacttttgacatgattgaattccacaaaaataaatttagaacagataaagaaagacctcaccacactccctcacgtgtttcactcaaaataatttttcactcaatttcacttgtgttttcactcaaattcaatggcttttaccctcaaataagcccacacctcagcctttttccactcgtattcttctttaagttctttaaaaactagtcaaacagtataagagaggattcaagcagcaattccaataaacaaaccaaacgaacaccgatgaaaactaaaaaaaaaaaatttatgatttttgaaacacttgtgccgggtttcggcaaacaagcctctagactatggagactaagaaaatacaaaaaaaaaaaaaaatgaagagaggtttccagacccttttttttttttgctcttggtttccatttttttttttttttttttttccctctttttttttttt

SEQ ID NO: 141976 - DNA, 544 bp, Cannabis sativa
gggcatattggatttgattcgaggagataaaggtcaatacttggacagttggaagaataaggagagaatatatatggccctcttcttcgatagtgcaaggcattaggtgacactagaggtagatcattggttgttgaacatatttgactcgagcctcggatcaatttccccgagtgaattgaagagtcacttggcaaagtgggaaaagatactaccaactttgatgctgcaggctggcctattcgagagtcatgacatgatcctcctgcctcaacttaccgcctcagagagccaggttagaagttttacttcaaaagtcatggaccggagcattgttcgacagacagaatcaatgtaacttaattacaattgattttttattatttaacttgaatttaatttgcatacttttatttatttacattttattgtctcatacagcggtggctgtgggatgtatgtgatagagcacatcgagaatagtatgctagagactacgtttgataatgtgaacgatgacaatatgaagaaatttagagagcgg

SEQ ID NO: 141977 - DNA, 515 bp, Cannabis sativa
tcagcctcttcatcataaaattgaaatttctattatcaataataataataataataacaataacccaaacactccaaaggatcataacacacctgaatcgtcatcaaagacagagaagagaaatatttctaatggtaaagaggtaagaagaaaacgaaagtgttctaaatgtggatgttatggacacaacaaaactacatgcaaaaaataattattctttactaggtttgatatgtaatgttcttataattttgtgcaatttcaaacatgatttacaacttgttgaattttatgttctaagtatgattttgtacatatgaaaattttcaaacttgtagaaacctcaaattagttgttgatattcatatagattgttgggattaaactcacttaacttctcaagtcagtatgtcaatctattagctcattagatgaatttcaagaaagctgctgcaatttataacagttggctttaataccaacttaaaggggacccaccagcaactatatatagg

SEQ ID NO: 141978 - DNA, 535 bp, Cannabis sativa
atattttaaaatctcattaattaatagttagctgagactcttctaaaatcactctcttcgatgttatttaagcaaccaaacaagcaaagcaaaaatttaaaatttattatagacatactgaaaatgcaaaatattaacactctcaaattcttagaaagagtcaaaactctagttcttctctgtttaatattttatattattttattattagtttttatcaatattttatattattttgttttctgtagtttcatctttttaaagtttttaatataatatacgtcaaaaacaagtttttaatataatagaggcatgtatatgttaggtttacttactatacaaattttctatatttaaatatatagtgaaattttggtgtgaatccaaattggtaagattgtatgggttcgtttggtacgcttcgtattatattgtatagtattttattaaattgtatttcatgcaatattattatataaaataatgtgtggtattaacttttatagacacctaaatatataatattttagtataa

SEQ ID NO: 141979 - DNA, 572 bp, Cannabis sativa
  modified_base (472)..(482): a, c, t, g, unknown or other
acctgtttaaagtgtaaaaatgaaaaaaatctccaataattattgggagtttttgttttttttttttaatgaataattattgggattaagtatgaccttttttttctttaatacgaaaaaaaaaaatagagatatttgttagtagtaggatttttgtcgcttatgtatattttataatgtaatatacaaatatataggttggtttatataatatctttatcattattgcatgtgagtatactatatattatcgtatatttgaagtcatgtgtgttatccattccaattgattattatttgaaatacgcatataaaattaataattagtttgtgttcaaactaattaaatccaacaaatcttaaaagataacgctataaatataaatactagtggtgacgtgcacgtaacctgtcaaaatttgtagattaattttatattttattttttattaattatggtgccgtttggtannnnnnnnnnnttctaattttttaatcacaaaatgtaagtaaaatttttgtttttaaaaattttgcttttgaaaaataaaaatgcgttctttaaccacttt

SEQ ID NO: 141980 - DNA, 1319 bp, Cannabis sativa
  modified_base (219)..(233): a, c, t, g, unknown or other
  modified_base (784)..(786): a, c, t, g, unknown or other
gagtgaagctcggccgcttcccatcccgtagcacgaggtctatacccctcctgggcgacgggacccaccatcacttcttccatggtggccaagcgctttcctcccttcttggacgatttggaaccggatgtagacattttggttctgaaaaagagtaaaaattccagcagtcaggccccataccaaaccctaagtcaaaaaaagggaatgggggtcccnnnnnnnnnnnnnnnaggccccctccggacacttgtcaacaagaaagccttataaggatttcctggacaaaagtcgggtgcaagaatctcacagatagtgacattgcacataagcgaagaaaggaaaagaaagagaaagggcagaaatcgagaaagacaaagtcttctctgtgcccttgaaggccatcacgcaaagagcaagtgggcctttacaaaaaataatgtgctaaataagagtgacccaaacaccagagaagagaaatctaaacgtattacgcaaaaactcaaggcgaaaaaattcccagaaaacttcgaacgatgaacccagaaaaacaaatgaacagtaaaggatgccatgaacacaaacaataaagtgaggaatgcgaaaaatttacataaagtgttagaactgggagttgctgttgatcgacgaggaaatgtagactgacagtaacgaacaagggaaatctgtaagtgtttggaggttttctggtctaagggtttctttctctctggaaaatttgaagaaatttggtaaaaagatgaaagtaaccaaatgaaggaannntggtggcttttataggccaaggtgcatgtggaacatgcacaatcacccaccaatcgaacgactggggaggcgcacgattcgaattgccaagatccaacagctagattgatttgtaattaaggcggtggaaacgtttgagtatccgtctggcatccattaatgtgccgtatcaatcaatgggcatgaaacgaatcaacgcctgcaaaaagtgaatcactgcaataatggtgatcattaaatacgccttcacgcgcccgaagcacgtgccaggaaactgaggagtcaaccggaggcatctgaacaagccttgttcattctttttataaacaaggcttggggggtaaatgttgcccctgattttgcgcaatatacgtggactaaccaaacagggacacgtggaccaaaaggccttaacactcaaattaattgttaagcctttatgaagaaaggcagcatccgggacgtgcctcccggagaaggcatacgaagtcccctatgctcccggaggcctaagtagcatcaaaacatctccg

SEQ ID NO: 141981 - DNA, 743 bp, Cannabis sativa
  modified_base (271)..(271): a, c, t, g, unknown or other
  modified_base (337)..(337): a, c, t, g, unknown or other
  modified_base (454)..(456): a, c, t, g, unknown or other
tctagttgcaaaaaataatacgtagctatgaaattgagagagaagctacgtttcagctttacagtaaaggatcgatggttaatgtattatataatattttgtacgtgttagtggtgggatactacaatttgtgagagtgtgtgattgtaactgtaaattttaagtagtggggttgttgtattatatatttgttttatattttagagaaattctataatgcacccttttaaaagggatacaccgatacatctctatctgttttagtatccgnaataattttttagtcaattttttctcatggtcatgtaaattatacttatttaagacatcctgcaanattttaagaaattcggaaaagtttaacacgtcgaaaattgcgttcaagtagtgtgttgcacgcgtgactattttattttatacgcgtgtaacatagactgtttgaacattattttcnnnattgtaaattattccgaatttcttaaaattttgtgggatatcttaaatagctataacgtacatgaatataaaaaaaaaattagactaaaaattttttctggatgcctaaacaagtagatggtgcatcaatacatccattttaagggggtgcattgtagaatcaccctatattttatatgtatatatacaattgcttgctgtaaactttcccagaatttggatgtaaactttggatctcgatctgaaactatcgactttggggcaccgtgaagtcgaactatctcctt

SEQ ID NO: 141982 - DNA, 874 bp, Cannabis sativa
  modified_base (61)..(67): a, c, t, g, unknown or other
  modified_base (765)..(768): a, c, t, g, unknown or other
ttttcatattatttttatggaaaaccgtaaaaatgtcaaaaaaaaaaaaattctttaaacnnnnnnntgtaatttttttataaaaaaaatagtgccttgtaaaattattccaataaaaaaagtgagaagcccaattactctaagcccatgtcaaatatttcaatttttgaaagaacctttcagctacaacattgaggttatcaataagggataagttgaaaactatccctttttattacacattaactaaatataacttcaaaataattttaattaataaatatatatcttttataatcaaagtaccaaatataacctcacataatttatcaaaattagagtttctaatgcatataatagggatatgacctataaaactaggtataaattaaaaaataataaaataaaagtataaattaaaataagaattaaaaagtgagtatagagtgtaatttcctcgtcaatcaattgagtcaaaatatagaggaaattggactctatactctttttatattgttctcttttatttttaccatcttttttaaagtattattttttctaagcactttaccaattttgcccctgtcacttcgatatactctccatgtgacccccttatatcagggtattttgggtacagtacatatagaaaaaggtatgtttttgaatataaattagacataaatttagctaattgataaatagaaaatgtatttttcaatatactcccaaaacatatgcattagaggaaattacactctatannnnttttatattgtcctcttttattttgaccctcttttttaaagtctattatttttacctcttttttaactattataccaattttgcccctgtaacttcaagatactct

SEQ ID NO: 141983 - DNA, 1314 bp, Cannabis sativa
actacaagtggttgacgggcaccgcggacaaggtcgttagcaaaattgggcactttgttgacgagcatttcattgtggatggtgtgggcaccacttacactcgattccaacagatctccacatatcaccgccctcccttcacacttgcgctctgggatagagctcagaagcttgttctactgctaggtggtgcctagaatatcactttgttgatctttgaggacaactttgtggagtacgagctttacccgaaggatttcattccccggcctgtgaaggagaagaagaggaaatccagtgctggacgggctgagggagctcctcaggaggatgagcatattcaaattaggcgtgaagctaagttgaagggaggtgcaagggccaaacagtatgtcatgaccctttggatcctgaagatgaggctgaggaagagcaggttactccgctcaaaaggaggaagaaactttcgacccaacccaggcctgttgaacatgccatttgaatcagggagcccagtttacctgctcggccatcctctccagtactaggaaacgggaaggtcgtcctggcggagataagagacttgtcaggtgatgatgaactttcaagtctttctcggacaaacacttctcatgaagcgcaggatactccgtcttgtttttaaacttcttgattatcatacttttatacttttgatgccttttttcttctaaccacgttgcttttatcccgtgtagacatgtctcagaagatgctcgatgctctgaagaagagagttgggggaagctcaagcacatctgctccggccaagaaatctaggggcggtgacgcaaccccattcagggaaaaggcaccggccaaggaggttattatttttttgaggagctaaatgttgtatacccttctgctttgaaagctgctaagtcgaaggattcttgtggaggaagctcggacaggcctgaacagtcaaagggcggatccgagctggccaagagtggatctgagcagatgcgggctcctactccaccatttccattacatccagaagccaagagaagcaaggagatgctcactcactacatgaaccagttggttcctgaggtgagtgagcagttggtcggcgctgaaaacgaatctttcctggagctgctgatgggtgaagtcctaaaggaatttacaaaggtgagtctttcttgatagtttcctttgatccttcttaacttagctcagactctaatgttttttctctgtgtaggctggtctgaagatggcttacacctattcccgagttaagtctgctgcctccaagaacac

SEQ ID NO: 141984 - DNA, 711 bp, Cannabis sativa
cccctcgctacaatgtgggtccgcccctgagtatatatatatttcacatatatatttatgtatatattatgttgtttgcataatttcattgcatataattaattattataatccattctatatttataccacatgtctgttataagaactttatacctcattctctcttaatttgggtcatcagtattagggttgaacagcatgtaattcaatccaattacgaaaaattgaatatatatccacttactattagattggattggttattggatgtcaatatcaaaatccaattaaaaaccaatccattccaattacatttatgtatattaaaaaattatttatataataaaaatattttaattatatttttagtgaatttttttgtgttgaatatgtaacactaggttattttatgtatttgatcatgatattgtattctattttatttcttaacaatattattgttttagtaatttcaaatttttagttggcttacacttgtaacaatgatatttttatggagtattaaacttaaataaaatgtgatatttaatatttacgtttattttttttttcatatttttaagttaatattaaaattcaggtgtggaattagatacgtaattaaaaaattgatccaatccaattagtaattggattgaattttgaggtcaaattagattggatcggatgataatttttcaaattcaa

SEQ ID NO: 141985 - DNA, 1508 bp, Cannabis sativa
tcacatcaactaaattcgtttttttgcatccatctaagaaaatattaaattataagtggttcaaagtaataatttataataaacacattaaaaaattagaattatcttacagatgaacaatattatgaaaatactattatttagaaactaattaaaagaagtgggaacaaaaaaaaagacaaatgacacaaataaacatcaaaatggtttcacaataacaaatgaaacaaagagaaaagctagataattaattgacaataaaatgttaagacttacaaatataatataagaatcaaggagagagagggagagtgacaaatgatgtaaattaaaattacaaaattttgaaagacaatgaattctatagtaacaattcttcaatatatagcaaagtatgaattaatatatagcaaactattaccattgttaacttggtataaaacattagttcattattataaattataattattattatgtcattatttttttaatgaattagttaactgttactatttttaatttattattataaaaaactgaagataataaataaaaagtaaaaattaaaaattaaaacttgaagataatagaaaacgaaagacaatactataaaaattaaaaataaataaatagttgtagaaaaatttaagatgccattgccatattatactcatattcatatacaaatataaattatttatatttttatacaaattaatatatctaaatcaaaatgtgtaattactcattattaatcagtcataattttcttagataaattttgtcataagaattgatagaacgtaaatatttcattcttaataaatgaaacagtgggaatgagaaaaggttagccatttaacgttgaaaatttatattaaaatataggctaatgataatgaaataatattaaacttctttttcatataaacccattaaaaattaagtaaattatgtaagttaataataaggaattaaattgaaatggacacttagtaaatatttattaaaaaaataattaaatagtaagaaaaattgagatgtcaaaaaataaggaaaaaatttcataaagttcgccatatcacttttatttgtcattttctttatataattatataatataatatataatgaatataaaaatttaaataatgtatgcaagtttttattacaatctatctatatatatctatagagaaaaatttttaaaaaagtgatgtggcatcatatacgtggcatcatatattaattataacggtaaattgtttaaattttattagactttttcatttttaaagattgaaaatcttcctcaaaaactaaatagaatttgtaatactacttccaatagttatccaaattatagagattatggttttatttcttattgagattaatatgaaatgagattcagatggtttatatatatatttatatatatatatataaacaacaaaaaatcaaaatagaagatcaaaataaaaaatttaaacttatgaaaatca

SEQ ID NO: 141986 - DNA, 636 bp, Cannabis sativa
gggagtcgttatatttttcttgtcttttatgttgacaaattttacttgccaatagtgatttgttattactacatgagaccatatttttctttcgaccaattttgatatgaaggatattggagaggcatcttttattttgggaattgagatttatcatgataagaattagaacgttcttggcttatctcaagaagcttacattaatcgtgtgcttaaaaggttcaacatgaattatgtaaggctggttttgttcctattccaaaagaggacaaatttactaagcaacattttcacaagaacgacttggaaagagatgcaatgaagaacatcctatatgcaagtgtagtaggggtttttatttatgcccaggtttacactcaacctgaaattgctttcatagttaatgttcttgagagatatttatctattcctaaacatgatcattgggatgcagccaagaaagtcatgatacatttgcaaggaacgaatagttttatgcttgtgtataagcatgtcgagaatctccgagttcttggttattcatattcaaatttttgtggttgtgtagagaatttaaagtcaacttctcactatattttcactttggctggtgcaactatttgttgaaaaaatatt

SEQ ID NO: 141987 - DNA, 550 bp, Cannabis sativa
aagaaatggctcgagtcatgatgcaagccgaggatatttcaaaacgcttttgggtcgaagttgtcaatactgcatgctatgtgtgcaatagagtgcatcttcgtactggtacttcgcagactgcctatgggcgatggaaagggagacctccaaatgttagccacatggacattttcgaatgtacgtgctatgttctgaatgatcaagatcacttagccaagtttgatcccagaagtgatgaaggaacttttctgggttactccatcaatagtcatccatacagggtatacaataaaaggactcactcagttgtcgaatcaatgaacgtaaaatttgatgacttagaaggacatgaagaagtttgtgtcgaggatgatgcccttgtcctctctggacctagaccagtcatcactagaccgactcaagtatatcctgacactcctacagagtctctaagcgacgatcaaggaaatgtcagtgatccagatagaggaactgaagttaatagtgccatgaccaaagaacaccaacaagccaaattgtataaaaa

SEQ ID NO: 141988 - DNA, 734 bp, Cannabis sativa
  modified_base (478)..(490): a, c, t, g, unknown or other
  modified_base (610)..(611): a, c, t, g, unknown or other
tatttagagaatattttgtaaagtggaatattaagagtccttaatcccattttaagcatggattgtcaaatttctatattatttctatcattcttgctccactaaatatattatatggtttatgaaaatttaagggtatagcaattctttgcaataaaatcttacatattggttaatcttttagttttctattcatcactaaattataattcatctatccatttgtcaattgattatatccttaaataattgagtttgaatttaaagtaccgaaagtgtagggtattttaaataaatatgtaatattccgataagcctaatggtaaataattagagtttatatttatactatgggttaatcaggtaattagtgagattatgatcttactaatctatttcagtatacaatttaaattttgctgtaagtgagtaaataaacgtaattttttaattatggagatttatatagcatgtgtgnnnnnnnnnnnnnctatatgtggaataaaaatatttacaggttcgggaaccctgaagactcaataagtggatatataagcgtaatttattaattacagagattaatttaaaatacgtggatataatatgagtnntttgtgaaataaaaatattttcattttcggcgaccctgaagacctgattggaggccaaaaatatcacagcagttttagttagaaatattgatgggattattaggataagttgattttagaaat

SEQ ID NO: 141989 - DNA, 509 bp, Cannabis sativa
caattcatcgtcccggaaaagaaccccttgagtccttagggatctatcgagtcatcgcatgaaaaaactgcaagtcctaggaagacctagtattgcagcccttggcttgacggaccttggatgagcaacgatcggtcactccataactaggttgatgaagatggcacttacgacccattcagatacataccaatcatggaattagaaaatcaccatcttaggtgttgattggaggaagtaaactggcataataccgagttagagcatgaaatagctgcaataaaggcaacgcaggaggatggtactcaaaatcaacctgaccttgggagaagagatttgcgaggcaaacctcgcgactcacaaattaaggggcaggagatgacccagagatatgctcagaactcttaggagatgcaacctaaggaaactgaggaaagtcttggggtacagcctgggatacgtggaacattgaacaaaaatcacaaaccctttcttcagattcaacagga

SEQ ID NO: 141990 - DNA, 565 bp, Cannabis sativa
  modified_base (31)..(36): a, c, t, g, unknown or other
tggaccttactaagaataaaacacttacaannnnnnttatctttcgagattctacagcgttaaattgctaatgagcgtccatctattagggatgaagctcactaaaacaagaacgacgtagaaccaacaatggagatcgaatgtccttgtaacaaaagcccattatttgacacttcttttaatctatttattttaacatatatatttatttaattaaaattactaatttagataactctaaatataaattttaatttaatatttataaaagtataccctagaaagatctgaaaagtaaatttatttttcatcctaagtattaattttccaatagatattatgaaaattagttaatttaagttggtccaaaattaattaaaattaatttttcaactcaaatttattttttttaaaatatatataattgaattcaaaatctaatgtattaaagtaattcattttcgaaatcattttaaataaaataaaataaaactcgaaaaaattattataatttatgttgatctaaaattaaataaattacttttttttcaacataaatataatt

SEQ ID NO: 141991 - DNA, 973 bp, Cannabis sativa
tataaacaaatgtaagggaatgataccttaccattaattcccattacttattagtaaacatgccattacttaatagtgtgataaatcttgaactaaatttagtatatgttaaaagttatgctaaatttaacataaaatataacattgtgttaaatttagcatacaataaatataaatgtttaattatacttttgttattaatcattaatgatagacttagtatacacttttaattataatattgacattaactattgtttaattataatgttaaaatacgctactggtacctagcatcctcctcggtgtcataccgatattggtatcattaagtatcaggtctcatgtaattaaagaaaatagcttttacagaatatcgttaaccaatcacaaaatatcaccaaatcaccaataaaaagtgttgaccactactaactactagtgcctaatagcaatgctcttaatttattaatgaatattaatgatgttttattttttaccataatttgcatattaaaatactattggaagaccatagtaaatattgtagccaatataacatttgtctatttttgtgtcaaacttagcacaatatttataggggtgttcattgaaccacatctaatatttttaggcccatccagttctgatccaattatatattagatgatagattttaccatccgatccgatccaattaatttcagtcatccaattgatccaacatccattggatgtgagattggatcggttctatctattggatgtatttcatatatatttattggtttaatttataagtttaaccaatatttcagacctagtatttttgggatcggatctgatgcatccaatattttaggtttagtatgtagaattagactagatccatccaatctaaaaaaaagagtaaaattttaatgttaatttttatatatacatatagattttacatataacaatataaaattta

SEQ ID NO: 141992 - DNA, 513 bp, Cannabis sativa
  modified_base (101)..(123): a, c, t, g, unknown or other
  modified_base (335)..(357): a, c, t, g, unknown or other
ttggtccaaaattaattaataagaattaattttcaatacaaatataattttcctatttaattaaatgttaagaaaatttttcaaatatttaagtatcatgnnnnnnnnnnnnnnnnnnnnnnnttttttatttaattaaatatctttagcaaaatacttcaaaatttccaaaataaatgattaataaaataaaaataaaaaaaaatgaaaattattcaaatttaagtagttatgaaattaaagtttccaacataaaataattttctatttaattaaatttcctgaaaataataatacttaagtatcaagaaagaaatcaacttagatatttaatnnnnnnnnnnnnnnnnnnnnnnnaatacaagaattaaataatcaagtgtaaaagaaacttaattattaattacaatttaataataggaaaaatatttttaattaagttgatccaaaattaattaaaaaaattaattttcaacttaatatattttcctacttaaatattagaaaatataa

SEQ ID NO: 141993 - DNA, 863 bp, Cannabis sativa
aaaaaaaaaaaaaatcttatttccattaccaacaatactaaaagagtggagtttatttagttcgaattaattttggaaaaaaatgatggaaagaaacaacaaaactcagagaaggatactccttcctaagctgcaaagagtgcaccttagggcatggtcccatgtccattttctgaaacaaaagcgaccaaaaacaaggatatttagtgcagaaacaagaaagaaaagcaaatatttctgagaatcagtcaaagcttcaccctaatctaagcattcaaaatcacaagagctgccattcacaaatgaataattaataataaaactcaccgttaattggaaaagctcgtgaggacaaaggccgaccaagtagagacggcaaacatcgcgatcgtaatacttgcgactgacctctcgaacgtcgccgtttcggtttgcccccatcaactggtcgagctgcttcctcagggcgtccatggcttctttctctcactctctccctgagttggaagagttttcccgattagggcttggcttggctcgcaatttttcggagaattaatcaataaaaatatgaagcttcgaatcgataaagcactaatcacacgattttttccccttctgtttctgatatatatttgttttgaaacgcacttaagacgtttattattatagtcccttatctttccaaaacatgtcacataagtcctcaagttttcatttttcatgggtatgtttattatgaaaaaaaaaaaaaaaaaaaagggaaaacgaagatgtgctaaaagtataacaaattataccacatatcttttttaaattgatgcttttaatttttactttctttttcaaaatctgttatattt

SEQ ID NO: 141994 - DNA, 601 bp, Cannabis sativa
atatacatgtcattatgtaaatagtacatcatcaatcaaagggtttatatgtcaataaaactatcacttcattaagacacttttataatagtatgatatattctatcattgttattaattacataattaacaaagtaaagaaaaaaagatattgttttgtaccgcgccctttcctttatgcaggtacaaatattaataagtgttatttaaaaaaaatcaaatcaaattatatatcttagtaaatttaataataaatatagtattcattacttaatttaaaattaacgtcaattctgtttttataaagaaaaaaaaaagagatattctttataataatattaaatagacaattaatatgcatcctaatttaattttgaaataaataaagaaaatggtctaaatttagatttaatttcaataaactaataaacatgaaatcaatttaatgaataaaaatattgaaaccctaggcgtgtatgatcagatctgggttttggtttaagaagagggaccttttgtttagggaaatttacatggtatgttaacttttactatttttttataaaaatactgtcagacggtatttttttacttttttact

SEQ ID NO: 141995 - DNA, 870 bp, Cannabis sativa
tttcttttctctctaaaattggccgtcatttttaccatggattctgtccctatttatagatgtatgggatgacagttattcccttgggatctactcattattagtaatcgttcataaaacatggacattccccacgctttatctttgtgcacataagataatcttaaataaccgttcaaccattctttctctaaatctgttaacaattatgatgattttattagattgcactcgccagttgcatgacatctttttcaaccgcctttgtagggaaaatattaagtgttaagatacaatgcatctcgcagttctcctttggttgtttgatagatattagtgaggcggttacttccatacgtcaaaagcaaggtgagtaaatgttgaagttgtttccactccttaagcatactcacgagtatgtggatcaatgagctgcaagatcttactcacaagtatgtgggccaatcaattgcaagctctttggttagttattttgaacaactttcattgtgtattctatttatcccacccaaaatagacttgttgtttgtctgtctcgccagtcttacctacctgttaatagttattattcacatcttgcttttgcctaagcggcattgagtttgaatatttatattcattgttattcttgagcgagttatttagtgtgtatttaataatcacggcttaggctgattcatattacagttttgtacacgtgtcagcttcttattgttagtcaaaatttaggtataacaattgtcccttaaaaagtgcttttaagaaaacaaaattttaaatttcttcaagggtacaattgtatttttccctttaaattttacatgcttttattttggcagatcaagactt

SEQ ID NO: 141996 - DNA, 583 bp, Cannabis sativa
ggcataaaacccaacaaaagaaaggttggctaaccttccctctactagaggctggtggacctatgttgggaatagggccggccaggggtggtctgagaagactcctttggttggccagttcgttgtctccttgtcctgcttaagtatttggaatcctcgtcaagttgtacattgtgcattgtgacttggccttcttgttaacaagctatactcgacatggcataaattttgcctatgtagacatgccacattatgttggcaaaaataaggataacggaagagtaaaatagtaatttgacaaaaactaattacgagccgacatatggagggataataactagaattgattatatcaatggacatgcagtaaaactaaataaaaaaaattctaaaaaaactaacagttcaactccatatttatagtggagtatcatgaatttaataaacaagattatttagttgatgagattgattaaataatctagtttactcgaggatagaattgtaggtccataatccctggattgccaccttgaaacactatcaagggtagagatagaagttgtatatggaagttcgaaaa

SEQ ID NO: 141997 - DNA, 993 bp, Cannabis sativa
gacccaaaattagaacctgaacaagaatcgttgaaccaggaccttagattaagactagtaccgggaccaggacccggacccagacctagagtcagacccaaagtgagactcgaactcgggcccgtacacggtcgtgtacccagaccgaaactgagacgcggacctggacctaaatcagggacccgatcccaaatacaaacttggacctagatagggatctaaatacgaacttggacttggaccaagacccaaactgggatcgaaatgctggacctagatttgggccaagatcctgacccagacccaaacttggacccgcactcgtgacccgaacttggacctgtaccctacccttgacccagatgagggtcaagacctgaacacaaacccggataaagactcggacccgaactcaaacaccaacacctagaatcaaaccaaaagctagacccagacccagaccaaaactccaatccagaccaggatcagaaacaaggacttagacatagaactgaatccaaactcagatcgggattggaacttgggactcgacccaacctaaagtaagacccaagaggtgaacccacacccggattctgatctggacctagactgaaatccggaccccaaccaaaactcataccatgactcgaactacgacccgaactcaaaccctaactcaaaatcagaatcgcaaatggaactagaaccgaaccaggactaggactaggagcaagaccttaacccgaaacccaaacccaaatcaaaatccagaacaagacctaaacccgaaccgagactaggactggaactcgaacctagaccgggacccatacccacacaacaatcgggacttggacccggaatcaggatagcgacttaggaaaccaaactaggaccgggacctagtatccgacccagacccgaacttgatcctaagaccaagctcgtgacccggcaccacaaatggaaccaaactgtgacccaagattg

SEQ ID NO: 141998 - DNA, 1182 bp, Cannabis sativa
tataaatatattcaatgcatcatgacttcgaaacaattcaagaaatttaacaaataaaatttatcttggggagagacttgtgttgataacgtgttataaaataatatagaatagagaaaaaaaaataggagaagagagaagaagaaaatgagagaatgaattaaatttttctcaatagtttatttcaatagagtggtatcctatttatacaaaaatataattagaataaaaaacatcaatgataaaaaaaataatcatatatggtgttaattaatgcattaatttagataatttaatcatctatatatataatattttataacattatttattattattatttaataagtttttttttctctgtttttgtacaactttaatgaatattggtgtttattggatcacatttaatatttttagatatatccagattcgttccaattatatattggatatgttagattataccatccgatccaattccaattaatttcgtcatccaatcaatccaacatccatttgattagatcggttctatccattaaatgaattttatatatatttattagtttaatttaagtttactaatatattagacctaatattttttggatcgaatcgaatgcatccaatattttaggtccagtatgtattggattagactggatccatccaattcaagaaaaaaagagtaaaattttaattttaattttcatatatacatatagattttactataactatacaaaatataattactcatccaaactaaataaactaaatgaaaatactaattagtttgattatatgttggatgtattagatttttagacaccccatctaatatctgattcgatctaattggatatttgaaaataacatccaatccgatccgatcataattggatatcgaatatttaacggtcaattattattgaatcgattaatttttattggattggattgattcatgcacacccgaaatatagaaaagtgaaaggctaaacaagtaaatatgtacataactgaattgaatttagtgggtaggtggacatattatttttttccccaaaagaaacgtattggctttgattttataattagtttattattggtatgtgttcttgtcttattgctttcggatatacaaatagtcaagacctcattaatggttaattaatg

SEQ ID NO: 141999 - DNA, 590 bp, Cannabis sativa
ttttatctctgaactaattataaaaaaacatatattcttgacactctctctctctctctctcgcgatttggcttggggttgctagggctgagaattttgtttgttattcaagtatttttcagcaattctaagtctaattcaagctaaggtacaagttctagtaaccttcttgatgtgttcttaatttttgaagaaaagatgattattgcatgcttgagaatttgtggctgtggttattgtttgggtgttttagtgatttctgaagcttaattatgttttaatatgttgaatcaagcaagattttgttggtggttgttgattttaactaagtatggagttttgaacccaaaactatggtttttaaggtaaaatgatgaattttgttgctgtagttgttgttattgtttaactgtattttatggagttaaattatgttggaataagttgatttatgcttgatttagtggctgtttgaggggttattcaagtttttgagtttttgaactcaatcttgaacctttaatggtgaaatgcatttctgtgtatgaagcttggttttattgcttgggttttgttatttggggtattta

SEQ ID NO: 142000 - DNA, 577 bp, Cannabis sativa
  modified_base (543)..(544): a, c, t, g, unknown or other
aaaataggaagaaaattttataaaatgacacataaattcttcttgtgcttttctttatattatatatagatatagatagatagtacaattacatgtggtcagataaaaatgcttaatgtaataacccttaattctatacacataatattccaatccgcacttctattttttcttcttcacaacttattaataacaaaatatataagtaatgctaataataaaaagaagcgtgacttttatcaaagttcacaaactcaagcatcaatgacaaaaaaaatccaacaaagtttatagctaacaaatgattctaagtgctcggcatatgcattagtttctaggagcaaaattttttaaagttacgtaataatttatatatatgctgcaaacacaatatacaaaaaaataaagaagaatatggaagaaagaagagaccattattcacatttagaaaggcattagagataataataatagaaggttttcattttttttttcttttttttatcattttttttttctttttgaataaagataactatgaanntttaatcgtatagaattttattttaataaaata

SEQ ID NO: 142001 - DNA, 526 bp, Cannabis sativa
tcatacatactcttgtgatcattgcagttactcttgtttagtgaaaatggttccattcatctttaaataaatttttctaaaatagtttatctttctttttctctcaaaaacatttaatcacaccaaaaagtccaagagcctgtttattagttaaaatctgaaatatttttttttaaaaaaaaagactaaatttggaagcccctctccatccattatcttattcttcttctgcttcaatcaattttagctttcactattaacccaccaaacttctctgccactaaagtttcatctcatgaataataaacaacacttactaattttagaaaatttcattatgaaaaaatagtcaaacaaatagaattgataaatggttaaatagtttactgaacttgagcttagtacacaacttcacatatacttatattgaatttagcgaaaaagcaacaacttcctcaagtgaggattttctttgtaatgtaaattccaaatatcattagcatatagataattttctttccaaata

SEQ ID NO: 142002 - DNA, 545 bp, Cannabis sativa
tgaagaatcatcaatcacgacctactagttcaatgacacttctagaagtaaatgccaaactataataattattgacgaggtcgtggttgtggccaaagccaaggaagaggtcgtggtcgtggtcaaggacgtggacgaaatggtcataattcctgaaaagaaattctgaccaccaaaggaagagacaacatgcggatgagaatgttcatggtaactatcctcaaaatcttaaagattcatgttatagatgtggtacaaaagggcattggtctcgtacatgccatacgccgaaacacctttgtgatttgtatcaaatttctgtaaaagaaaaatagaaggaagtgaacttaattggacaatatgatcgtgtgaatgattcaactcatctagatgcttcacttcgtagacaatttcaatgataataatgagtccaatgactatgatgccagagaaaattaagtataatctagcattaactactatatttgatatattatgcctttatcttcagtttatgatattacttgtgatgttttgtgtattat

SEQ ID NO: 142003 - DNA, 723 bp, Cannabis sativa
ctcaattttaagtatattttttttgttaggagaatggccctaaggccaagacaatgggttccccctagtgacactttttgtaaagaaaaatatgcaaggttggatggccaactttttttcattttatctttattaaatgcctcgtactttaatatatacttattttgcttgtgttttttcttaatttaaacaatcatattttgatcaagtaccaagtactctagggatttccattgctcgtatatccctttgatattatttaagtagttaatagtctactatatgcatgagcagtttattatctgccatgcttttaatttgtgagcagttatcaattctgccttacaataacatttgtaatctatttcaagcaaagttgaatatacttttaatgattttgtcactttgtttatttttgattgcttatatgaatagatagatcatctattcatattctaggtttaagtacttttttcaagacacattgatgtctcgtttaatactttcctatacaatgctagtcgttagtattgcgcttcacattgtgagttatgagttatatctcatttataacttttgattttcttttcttgtcagtcaggttttaaagcaaaaagttattcataatagtttgaccgtcctttctcgtcaaaaaggtttgatcccaaaaactcaaaaaaaaaaataaaaaaaaaattctaaagtggtgggtttgcaatatat

SEQ ID NO: 142004 - DNA, 532 bp, Cannabis sativa
gccccggctaatggatcagcccattacattcacagaagaggacgctaagacagtgcgttttcctcatcatgaccccctggtcattgagactcccattgccaataagattatggctagagtcctaatcgacaacaggagttctgtgaatttattattcaaagaagccttcacagcaataggcctgacggaccgagatctttcacgaagcggttcccagctcacggggtttaatggaacaatgcttatcccaatgggaaaagtgaggctcccaatcaccttgtgcccagacagaccttaaagcactttcaaatactgcacatctgtggtggtggactgcccaacagcttataatgcaatcctcggccgaccggccctggtggactttggtgcagtcacgtcaattaggcacttatgcttaaaattccctactcaagaggctgaaataggaaccatgagagggaaccaaggggaggccaggcagtgttacaacgttgctgcccacctacccgtcctaatggtccgtgaaattatt

SEQ ID NO: 142005 - DNA, 506 bp, Cannabis sativa
aacgtaccttattatgccataagctgttaagcaagtttggggggaatgaattggtgtaagtggggaataattttgaaagtaagagattgaaaaataatagttgttatatgatgtgcctttattgtaaaaagaaagaagaaaaagagaaaaaaaaacaaaaaaaaaaataaatgtgttaatttcttcttgagaattaaatgtgtacaatgaggtaggcacatagaagaatatgcaatctcttgctattttctttgggatatatgaaaaagaaagaaatggataagtatgggtgcttgtttggtataattgtgcttatggtataatgtagcctaaatgacttctcatctacctgtttacctaagccatgctattataaccgaaaaagacctactgattccgagcaaaaattttcaacattagtggagagaggtatgtcatccaaacttattgaacatgggttagcggaatgtcggaaagtgtagaatggttgtgatatgaatgtcaaa

SEQ ID NO: 142006 - DNA, 771 bp, Cannabis sativa
  modified_base (60)..(70): a, c, t, g, unknown or other
atatgtattaaaccataaacatgtaacatacatgtaaacatacttcacttctaaattgannnnnnnnnnnattgtaatgagttttatttagggcgtaaaacccaacaacacattcagtaaagatgttttgaattgatctttactgagattcagtcaagtttaattataatttgtaaagatacgcggtctttttcttcttcaatgcaatcctttaatgtgtcggcgttatttgttaagaattatctaatttgattatcattctgaaatttgataatgcaggtgggaaaaattgaatgaaaatttgtaatttccccttttctacatttatgcttcattttataaccgacgtaataggtgaaaaaaaaatatttcagtaatttatgtgtcaattttgaattgacgtaataagtttgtagcgacggttttgaaatggcacaaataattttttgtcatttccaaaccgacgcagaagataaaaaagaagagtgcatattttgtgtcggcttttaaatgtagataattattttttgcgtcatttcaaaaatgacattaataaaagactatttgcgattatgatatatacgttagtttttttaaccgacgtaaattctttaaatcacacttataactgacgtgaattatactttttgtaatagtgattactgcccactatgtaattacaaatagtggcagacaagatcaagaaaggggacaaaaaaactcatatgaaagaggccctgaaaaatgctcaaaaatttgaataagattgac

SEQ ID NO: 142007 - DNA, 701 bp, Cannabis sativa
  modified_base (362)..(365): a, c, t, g, unknown or other
aatacttgaggtgggagagaggatcttctctccctgtatacatcttccatgttggcaatttaaacttgtggggcagcgccaggagattgatcttgggagagaaaggtgtgtcgcgtgcccggtctaactcaagatcattgtttctctacccagccatgccatggaatatatttttcagctcatctagctgtgcatgtacggcttggctaacttgctcgacattctggtcaatttgagtcacgtctgcatctttttgagcgggaatttaagcacgggctacgggctgaatgatcgtcgtgacattttgatcgtctactcctctccttctgttcagatcattccttaggtcatgagtcgccccnnnnctttcgaatacagaagcgcctggctgtcttagcgattgatttgcttggttgacaggtggaacggcaccattaatttggttggaaccatcaggtatgatctctcccgatgaattactagacaaggtctgcccacctatcgctggcccacaagtggaactcgtgaccagggattgggcagctgaccatttgtagtctgggatgtattcatcgctggatcttcgtccatctcattcagaggaatgacattcggaggttgctaacctacagttttgtaggctttttgtatcagcacggtagcttgccgattatgattttcaatctctgtatgatgagccc

SEQ ID NO: 142008 - DNA, 544 bp, Cannabis sativa
tctccttaagtacctaagctttgaaaattcaatcacaaaagattaattttcacacaactcaaattctcaataattttgataccaagcatatcaaaattaaacaccaattgagacactaaacatgtttaaattgcactttattttaagacaccaaagatgtcttaaacttttcacattagagtatcaccctcacactttcacatttcactatcaagacaatatcttgattttaaaatatagaggaccactttgtctctataatttctcttaaatttgatttccttgaaattattttcaccaaaatttgacaccaaatatttcaaaatttcacatatgcacatagccaaacttgatttataatttgaattcaaaattaaataaattaatcaaccatgtctcaatacattttgattaaatttgtgagtcacccccacatttctagcataagtgcatataatatcacttttgtgtgtatttctcttgaaatgactttttaaagtcactttgaaaataccatttgatatttttagttttctcaacaaaa

SEQ ID NO: 142009 - DNA, 580 bp, Cannabis sativa
ttgtatgtatacttactagagttagttttatttatcaaataaatggatggagagagagaagtaagtgtgtgatagagattggcttgtttattcaaaagagttagatagagtattttgttcttgttgcaaaatttttaaaacagggattgttagaggacaattaataaatgaaggttttagtgattgggtgtatattggtggaagacttagagagcatgagataagcatggttcatgttaaaaatatgacaacttggtatgaattgcgtctaagactccaaaagaatcaaaccattgataaatcaactcaaagactaattgaaaaggaaaaaagattactagagaaaagctttacaaagaattattttaatagttaaatttcttgctaaacataatttggcatttagtggatctaatgagaaattatatcaaaatagtaattgcaattttctaggcttaactgaaatgttggcagagtttgatcctattatccaagaacatgttaaacgcattacaaatgatgatattcacattcattatcttggacataacatcccaaacgagttaataattttgcttgc

SEQ ID NO: 142010 - DNA, 831 bp, Cannabis sativa
gttttttcgattcggtttgggcgggttattcggtttgggcggtttacaaatttttttgtacaaccctattcaatactattaatgacgtataatttagtgcataatttagtgtgctattaaagtgaaatagtatgtgtgaagattcacactgatttggtggaatagtttactattggagatgatttgagaagaataagtcaccaccaaacaattaaagaagagagaagccttccctatagtgtccaagtagtaatcacaaacattcgagagggcattacaaatatataaaatataatggtaatgtaaataataccaatcattaagaataataggtagcaaattacatgattaatgttcacatttattcttaaacaagcataaataaaatacaaaagtagatacaatgttggcaatttatttttttcaaatactattcttgacgagtcacaaattattagccaagtacaagtaactttcaacttaattattagttagttatcaagaatctctgatacaaacttgatcaaagagcaaagtccacccaagaaattatgatcaataaccccttgaccatccaccacatgagcaaagtcaatcaatttaattgtaacacatgatctatcctcatttggctttattttctcataaaccatcaaaacagaacaagaatagaaatgaaaaagagtttgatcttcaaaccatttcttgagcatcaacaattgtgccaacaccccattaggaccaccataaacacgttgtgcaaatgcacaatctgattctccatctacatcattcgaattcgagactgtgtaggtatgggactacacagtt

SEQ ID NO: 142011 - DNA, 1682 bp, Cannabis sativa
atttagggcctaaaagatctgaaaaaaattaggtgaatttgtttaacctgtccttcacatcaagaaaaagggtagtaattagcattaacagttgggtaaataaatcaacaggattctcttccctattttatcatcttgattaaatcttttgttgttaattttagtttcttgatactccttattttgtttttcaatcataaaattattggtttgccaagtagaattataaatttattctagtggtattcagtccaattctctgtggttccacctcacctgtgtgagtttactacttgattacgtgcacttgcgtattgttcatatttttcataacaagtttttggcgtcattgccaggaaattatttaaaaattgatattgcataagattagatcaaattctactttagttaatttttcttgttgattgctaacctgtttctttcatcattgtcttaatctatttcaggaattgaaggtgtatgcgacgtcaagaacatagtgtaatactgccgattgatcctgaaattgagaaaccctgttgaagaaacagaagaaataagaggcaagaaagagtttccataagtgttgaaacagaagaagtcatggccgataatgctaatggcggtaataatggcagcaacaatggtaataacggaagtgccgttgaagaccagggaaacagtcatagtctgagagactacattctcccaacattgatgggggttcagtcttgtataagaccacccaccgtagaggcgaacaacttcaaaataaagcaagccttactccagatggtgcagtctttagtccaatttggtggactcccctctaaagaccccaatttgcacttgtctaatttcatggagttatgtcagactttcaaggtaaatagagtcaatgatgatgccatccgcttaagactgttcccattctcgttgagagagcgagctaaaagttggttgatctccttgccaccaactctattgcgacatgaactgatttggcaacaaagttcttgtccaagttttttcctccagcgaagtctgtaaagctgcgaggagaaattaataatttctgtcagatggacaatgaatctctccatgaggcttgggagaggttcaaggatctaatcaggaaatgtccacatcatgggattgaaaagtggatgttggtccataacttctacaacgggctgattggtaacaccaaaacgattatagatgtcacagctggtggggcatttatgagaaaaagtgcaaacgaggcctatgatttgctcgaagaaatggccatgaataatcaacaatggccaactgaaagaagttaaatgaagaaggtagctggtatgcacaaggtagatgccatcaccaaattgatagcccaagtagaggccctgacgaagcttatggctgttcaggcaaaacaggctcaagttatttgtgagctctgtgggggccctcacacctatgatgaatgcccggtagatgtgaatagtttgccaatggatgaagcaaaagccatcggaaattattctcaaaataataactttgggtacaatcaaggagggaatcgatgaaatagtgattctaatcagcaacaacatgggttctatcagcagagaaatcagtgccaacagaatcaacaacaaccacagcaacaaggttctagtggaggggctagt

SEQ ID NO: 142012 - DNA, 546 bp, Cannabis sativa
attacttgtcgaaagaaatgattactttattcacaactgaagttcaaaatattacgccaatgatgcggtttacaatcattaatttaatctcataagaactctcccagttcaattgcttattttatcaatcttcaagtagcatctggttttgataaaatgggttttgatgctcagggtcaatccctaacatattctcacaattattttgatatccagggtcaatccttgccatatccccaggttctaggtgaattgatcctggtttcagttttttgtcccaactgccactgtttgacaaccggcttttctgtgttgcagctctatacgacaaccattatgagtcgatctttgattacttcgcaatacttttatgtaattgcttgaccggactaactgtcccttgtctaatttttttgtaacatgttctcctctcgagataaccgaggtatcctttcctcctacaaaggaaggttatggtccctagtcgcttgggttactaggcagatcaggctggtcatggacattgttctgcccctttacatattg

SEQ ID NO: 142013 - DNA, 795 bp, Cannabis sativa
aggattataccctctcttagaaaaaattcaacagagaagtcgatgaacaacaggtctcggtggtggagtattaagaccagagagattaataacttctttctctctcacagataaagcacaagacatagttggaataaaattatccatggtgaataatcaatcaaaagcaatcagacagaactggtgatggggaagacgaacatgaaagaattcaaaaaacagaggaaggcgggagtagttatggtatagttaagaaagaagataatgggaagaacagttaaaaagaaaaaaacggaataaactgccacagagcgacataaagggcagacaacgctcaatattagtttgattctttcagtttactcccgtaaatacaagtaagatttatatttgttatcataatcactttatattaaaaaaaattaattaaaccattaaattaaattgaattatatatggttatttattatatcattcataattaatatagaacataatattacattgaattttagaattgaatttggttaaacagattaatttaatcgatatactaaataaattatgtagtactcataattctcctaactctctttctcccaccatctcagtagttggaaatcctcttagcaaacctctcttcttcgaaaaaatctccttcaatatttttttctttgtgttatatatatatatgcaaaaaattctttgcaaatactgctacatttaccatgctaatactgattattgaagtgatttattcttattttgtatctaagagaattattttctaaattt

SEQ ID NO: 142014 - DNA, 1483 bp, Cannabis sativa
gcatacttagatcctcctcgcccagtgggtaatgccccaattaggtcgatcccccatatagcaaatgggtagggcgaggtcatcattctaagttcggttggtagtacacgtggtatatgtgaaaatctctgacatttatcacatttcttgacaaactcatgtttgtccttattgatcgttggccagtaatatccttgcctaacgatctttttagacagactttttcaacccgcatgatccccacagaagccttcatgaatttctctagtgattttgtttgcttctacgggaggaacacaccgaagtaggggcattgaataccctcttctatatagtttgccttcaagcattgtgtagcgaggcactgtatacaaaatttttcgcacctcgtttttgtcatttggaagttgctcgtcgagtaaatagttgataataggcgtcatccatgttggagagctatctatcatctcgacgtctttggtttcacatatacttggctcgctcagcatttctatcggaaccaaatataattcatccaggccattctgctaggccagccttgctaaggcatcggcgttggagttttgttctctcagaatttgttcgattttaaaataatcgaatctttccaagttcttccaaactttctctaaatacttcaccgttttcaagcatttggcctggtattcctcgaggacttggttcacgatcagtattagacttccaactgctgaagcataagcaacatttttcatatcttctatctcttggggataagtgggacattgttccttagatagacagatatcaggtctacaaggtaaaactgcccctttggtgtcgctcattaaaaatttctctagcaccttatgaatgtaagctgcttgcgagagagcaagtgatctattcatccagtttctaatgatttgaataccaagaacataactagcttcacccaaatctttcattttgaactgtgtattaagtcattccttaatgtcagtcattttcttgatattattatcaatgatcaaaatgtcattaacataaagaacaaggaatactaccacttgattatttttgagttggtaaacacaagattcatctttatttgtgtgaaagccgtaggttttgattattttatcaaacctttttttcaagagagagaagtctgcttaagtccataaatggacctattaagcttgcaaattttctcttcttcctggaagtttataaccttctggttactccatatagattatcttgtcaagaattttgttaaggaaagctgtcttgacatccatttgccaaattttataatcgaaagcaacagttatggagaaaattattttgatggatttgagcatggcgaccgagctaaaagcatcctcatagtctacttctctttgggtataaccctttgtgataagtctaggtttaaaagtttcgacttctccaccagcacctcttttcttcttgtaga

SEQ ID NO: 142015 - DNA, 743 bp, Cannabis sativa
gtcgcgcttttgctcatagtcccacattgcatgcagtcggccacacattttctgctgcacttgctcaaagtgagcaaagcgatctgcgggaggctccgtggctgaggtcgtcgcgagagcaggagttgtttttggagttcgaggtggaccaaaactgataggcccccgaggattcaatgctccttcttccttccacattggtacacccacctcgcgacaaagagcaatgatagtagctggcagaaataacttccctttcccccggtgcgcacagtcagcaattactttggctaggaccgtccctacatcaacatcccaacccattctaatgaagtataacatccatgcgtggtctttgctgactgtagaatcatgcgaggtggggcatagggcagtttgcaagaatgtatacagacatttcaaatcgtgctccaagtcagtgcgccgaaagcgaagatttccataattattgagatcccattcggaccttggcttggcaagcaccgacatcatgtcactcaaagtatcgtcgctcacttgccctttttgagcggagtaatggcattcaattgattttaacccaaacaagttgttgatttcttcagccaagaatgagactggtacttcacgcgcaaccacttcagtgggccattcttggtgttatcccaaatttggcactctgacgtggcatcacgagaatggtgacacgtggactctacctggagcatctgttcggatcaata

SEQ ID NO: 142016 - DNA, 591 bp, Cannabis sativa
taattaagtgatttaaaaattatttatttttattaaaaattcatttagatattaaaaaatatatatattaaaattaaatttttgtaaaaattaattttacaggaacaaacatgagtatatttttttctcaaaaaatgtagatttgtaagtaaacacaatatttttttagtttaatttataatttttttttcaaaacagttttatatttttattgaatttttaattattttttttattagttaagaaataagttaataaatataaataagtttgattttttcttcaaaaaattttagtttatttaaaatttttattggattctcaataattttggtttgattttttatgatatgtttttataaataaaataaagtttgaaaatatttttttagaaataatttaactttttttaagtcaaattaatatttttatccgattttttaataatttttattattttttcagaattaatagaatattataattgctttacaaaaattaaaaattattattttgaaaattattttttttaataaaaaggggcaaaattttgtattggtcaaaatttaaggagtaaaaatactaattttt

SEQ ID NO: 142017 - DNA, 584 bp, Cannabis sativa
gctaacaacatgtaatgtatgaaaaacatatattatagataggtagggcagaaattgagtataataatttgtgaagaggctggggactgagaatagaaaaaattgtggtaagaaaattacagcattttctttttctttgttggaatcagtttttgtctttcctatgtgaatcgaaatcaaaatagagatttaagagaataaattaaagaatgaaaacataccaccgtcgaatcgtctgaaggaactcacaggaggttttgaccactagaggttttgaggatggaactcagaaactgccagaggttgtacgaaggaactcacgggagaagagagaccacagaccaccgtcgaatcgtctgaagaggaggtggttagggtgagttctcatcgtcgtctgaagaggagatgcggctgaagagaatcgcaaggattttgcatttagagagagggctgaagaggagatgtggctgaagagaatcgtttgaagagagagggctgagaattttgagttttttagttttagggatttcacttttttttttttttgcgtcagtttattaactctcactattgtattttgcgtc

SEQ ID NO: 142018 - DNA, 613 bp, Cannabis sativa
gtctcttgcacactaggcgtgattccactcacaagagtcgtcacaccgtgacctacgatcgagggttgttcaagatgtgtggttggcagaaccctggtgttccccgggttttgcagtgtaggatccaccgcctgtggatttgctggatcaaccacgcctctacgagactgtaccaccattgtacttgtaattagatttgatataaatagtgatccttgattctactctcaatgaaagcaccaaaatgttgacctcgattttacccaacgacagtgagtctaatttgtaagcgataaatagtataataagtatgtaatataataaatcaaataaagacatgcgaattttatagaggttcagcctcgagcagttcggtaatagcctaatccccttagcttgtattgacttaagaataaggaaaatgatcccttttcttagagctctttacaatagtatctctgaatatgaattctaaaataagtttttcgaccctttgcccaatgagtatgaatcactatatatagggctataagcttaggagggaagtatttcccctctgattacaattgatctaagtggaaagattgcatagtaaatacaaaatatactgatc

SEQ ID NO: 142019 - DNA, 656 bp, Cannabis sativa
  modified_base (38)..(41): a, c, t, g, unknown or other
aatacatataaaaagaggtatgtttcaattaaatatannnntagaggtaaatttgattaattgaaagtggtatttttcaacttaccccctttatttacacatttttctctataattgcttcttcttcttcttttacttcttttttttttataactaagaaactaattttgtataatttaggggtgtacataaatcgattcaatacaattatgactgattgattcaattataactaactaaatgttagataaggtatctaaaaatctaatgtatcttatttcaaaaaaaaaaaaatctaatatatttatcagtgggggagctagcctaacattttagtaggggcaaaagaaaaaaattttaaaagcataataaaaaaaatataatttttattgtaaaaatacaaattttatgagaataaaaataaatattcgtgaatataaaagtgaaaaatataaattttatgggaataaatataaaaatatgtaaggacagagatgaaaaaaaattatttttatgggatcaaaatataaaatatttaaaattttatgtacaaaatttatacaaataaaaaattgagggagcaaatttatactctccatgtgactctcttatcttaaggtattttgagtacaatacatataaaaagaggtatgttt

SEQ ID NO: 142020 - DNA, 684 bp, Cannabis sativa
gtaccagctgctggttgtgggagcggtgtactcccaccattcttgttgtttgatgtacacacaatgcacccatttaacccataggttgtctttcttattaactacagcccaaacatgtttaactatggctgcaatgttccatgtagctatgttcattatgccaagaccaccttctttcttaggggtgcaaatattctcccaagaaatgcttccagcccctgtcatcatatatttcccagtccacaggaaacttctacatatggtttcaatctcttttattactttctttggaattatcatcatttgactccagtaaatatgaattgagataagaactaaattcataagaactaatctgtcagcaaaagaaaggttttgagttccccataccttgattcgagcagccattttttgagctactgcaatccgaagcattgatcttccttgcacagatagggactccaaggtatttgaatggatcactttgtctagtgaaaccatacatatctaatactctttggatgtctctatctgtcatgcccgagcaacacaatgctgatttctccttattaacattcaagcctgaagtaagagaaaaaaagcataaggccttgccataagaaataacttattatatgtattggttgtacatttaaatatataatatatcaagtcatgataatt

SEQ ID NO: 142021 - DNA, 653 bp, Cannabis sativa
cttagtgtttaggtttcgcctgtagatatatttagtaaaaattatactaaaagaactcaattttgttaaactacatattgaattttggcataattttaaaacatataatagaaataccacacacagatgctactttactatatatgtgtgcactcttaatagatatataaatagtattaggaaaatttgtgtttttaagcttaattttttatctaattagaaaaatatttatttttattttatatgagttgaagttggactatggactagaaaaaaaattaagattttttttttcatcaaaaaattaataaaaaaaattgagtttgatataatgtaaaaaaaatattttttcacatttatttaattaactaactaaatttaatataaatattaaaaattttcttttattatttatcattaaatcaaaatttaataatttaatatttttaaaattaatattatagttaaatttatttagtaatgtgtaaaacaattatatttgaaaaataactattacatatattttttttaacctattacataggggtgttcataaaatagccggtccaattcaatccgcacgatccaatccaatcatatccgcaatatccgcacttgtgcggattggattggattggaaaattcaaaatccg

SEQ ID NO: 142022 - DNA, 650 bp, Cannabis sativa
gaatggattcactttaggaaaagtcattccaattctacctctattccaatcaactaaacactaccctagttagttaattacaacttatacaacttaataaaaaaacaaactaaaataagcattatagtaatatataaattaatatgaattaattgtgaaaaacttagttagttacattgtgtaagtagtaactagttataattagttactaaatactgatttttttttgttaggatatttgttatggataaatcatggatgtgtgaggagagagacacactgcgatttcaagtagggttcgatgtatttttagagtttaccttaaagaattctaaaaatcctgaacgtattcattgtccgtgtatagattgttgtaatggatctaaagaaaatattacaatgattaaggaccatgtgtatttacgagattttaatagaaattatactacttgatattggtatggcgaatatttagctgatgatccatatccattaattaggaaagcagggggtagataatatggagggtaatgatttcgatgttcatccatttgacttgcttaacgaagcacatgaggaatttcttaatgatcctaaaaattcaataattttctaagtgatgtagataaacccctgttcgatggttgtaa

SEQ ID NO: 142023 - DNA, 810 bp, Cannabis sativa
  modified_base (526)..(527): a, c, t, g, unknown or other
gactagaccgatatgtaataacatctttcattaacatgttatttaccatgaaagagttattcatatcacaacgatgatcattagtaaatcagtctgaatcctgagtaaacgggaactcctatttgtgttcattgagttctttgattcactcgttaaagtttctcaaagaagatgattcttacaacttttattttaagagcttattaatatgagtggctaggaacatattatacaataagaaaattcaagctttcctaatgggtcgaatattagtttccttatagtgttaattctaggagtgctaacagttggatcaaaatctattataagttatagattaatttttcacattgaattaagatcaaggaatgattagaatggtaaaatagtagttttgaccaactctaattacgaactaataattgtagcgcgaactaattatattgattatatcaatggactactagtaaaaattctgtaaatataattatatattgtcaaagagtgtaattctatatttatagtnnagtaataatagaattaataaattgtattattctatagatgagatcaataataatcaagtatttaatgaagcttgaaaatataggtccatagtccccaagtcacctctatacaacactatacatgggaggttttatttgatgagtaaatttgagtgaaaattaatttctacgagatatagtacctaacgacaaaatagtaatttatgaaaattgttattttgaataattatgataattatgaatgttgaccgagattttcggcaactactaaaatatgattata

SEQ ID NO: 142024 - DNA, 553 bp, Cannabis sativa
  modified_base (68)..(71): a, c, t, g, unknown or other
taaataataataaagttaaaaaatatagttaaaaatatttataatattttaaatttaaatttctttannnnaaatatttacataatttttcattttattttaatttaaagctaaaccaataaatttaaaatagcattaaaaatatcaataatattttaggcattttaaatttttttctaaaaaaatctttttataaatatctatataatttttatttttaaatatatataataatatcataaaatcaataaagaatatttcgttaagtaataggatattctcttaaagttaacatagaaattaaaaaagtatcgttaaaccaagaattctgttaaatagtcacaatttatatagaatagatattaaaaatataaaaatattttaactaaattaagtataataaataataattaaatctcttatttattttaaaaaatagtttatatttaattttaatctaacgtaccacatcaacttagagtttttcttaaatacttgagcttttgatttttttttttttattttacatttgataaaaaatataatataaaaa

SEQ ID NO: 142025 - DNA, 565 bp, Cannabis sativa
  modified_base (515)..(516): a, c, t, g, unknown or other
gcaaatcgaacatacccacaatgggataatgttgcatcaatcaaactacattgaaaatgtcttgaaacacttaaatattgataaagtgaaccctttaagtaacccaatggttgttagatcactaaatgtcgaaaaagacccatttcgtccttgtcaaaagaatgaagagatacttggtaccgaagtaccatatcttaatgcaattggagctcttatgtatcctgctaattgtactcgacttgatattgctttcgcagtaaatttgttatcaaggtttagttcatcacctactaagaggcattggaatggattgaaacatatattttgttatttacaaggaactactgatttaggtctattttttcaaaaaagctcaaaccaagaattagttgggtttccaatgcaggttatttatcagatccacataaagctagatctcaaactcgatatatgttcacatatggaggcacaacaatatcatggcgttctcaaaagcaaactcttgttgctacatnntcaaatcatgctgaggttatcgcactacatgaagccagtcgagaatgtg

SEQ ID NO: 142026 - DNA, 1036 bp, Cannabis sativa
ttaaatacatgtaaatttagttatttcataaattaatttatttttttttttttctcaaatcataaagagggattgtatgtttttttgtttttaagtactaatatatgtagaagattaaattctggaataatgtaaataattaaatgtggagatattgtaaggcattaaaatcataaaattaaagtgagattaggaaatgtatctggatggtgttaagagcattcttatttctttcaaatcaaaaaattaatgttagaaattaacttgaatagtagattagtagggatttctttcttcaatgtgataaattacaaaagaatatctataaatagaaaagtgtaaaacaaattgcacattgttttgtctctacaagaaaacagttttaaagtttggagtattaagacttttttctaattttgctttatatttcaaatactttgcagaaatataagaatctctcaagaaaataagagtgggcttttggagtgtcatctaaagaggtactagttttggtattttactgtcccgttcaattatcaatttattcttttatctttaaaatctaataaaaaaaatttaataaaaaaatttacaacaaatttatttttttaatcaaaaatcttagtcaggagcaatcacaaatttaataaccatctaattttaaaaaaaaaaatcttaatattatagtttttgctttcgaatgataagtaggtaatggctatagtcagttggaatgtaagaggacttaatggagatgtagctttacgacaaacaaaattgttgttgaaatatcataaaacagatatcatcttctttatggagactaaattagcagaaagaaaactggattccatgaaaaaatgtcgtggttttgaagagggatatgaagtgccacgacatagtctaagcgggggattaatgttactatagaaagagaacgttgaaatctcaaatttacgatcctcttccaatcatattagttgttttatacgagtggaaagtcaagtgttggcatggcatttttgtggattctatg

SEQ ID NO: 142027 - DNA, 739 bp, Cannabis sativa
taataaactatgctaaacttttttctcctaaacaattaaactaaccctaaaaattttctctatctaaactaaattgcgttcattttttctagtaataaattaaacattaatattaaaactaaaatgtgataaaaaaaattatgaatctttttatatcaaaattttaattcaaaatatactaaggacattttctaatactttttagcgatgcacaccacaatataactaaaacactactacaaaaactacctttaaaggcagttttttagggctttcagcgtcggttttggcgaaattcgctactgacgctgatcagggtgacgctgtagggtttaatataactgatcccatatatacccctatggcgtcggttattagctaggagccgacgccataggggtatatatggcgtcaactcctagctaataactaacactatatatggcatagaaacttacgccatacatacccaaatttcaatttttttcaatttaattgaatttatttaaattatatattattttatttaatttaaatttaaattacatatttacttttttaaaaggtaaattcataaatattatttaaattaattttagaattggccaaaatacttaattttatttcataaaagtaataaaatattacacaaatattgtaaaattagccctagtattaacaagtgaataaatataactacaagttaacctaaaaaaataacctagggaagaaaaattct

SEQ ID NO: 142028 - DNA, 551 bp, Cannabis sativa
acaaattttcacaacatttgtcatgtgtacatttgggtacacgtgggtaatccaatgtggcacttaactgggattttggatggaagtgtgaagagcaaaacatgacctaggttcagcaagttttaccgtcaaaatattaatttttgtggttaagtattaaaaaatgtaagttcaggtggtttttttttgccaatatcccttttttaatttttaaattataaaagtgaaagtagaattttgttttatttttatttttgaaaataaaaatatgttccgtaactacttttggtttttaattttaaaaataaaaatgtgttctagaaattttatctttcatatttgttttttgcttttatataagtcggactcgaccccaaccaagacccaaaccttggaccgagacccaaaatcggaccccgaagcccagaccacagaacttggaccccggaccctagagcaaccccgaaccccaactcggactccgacatcggatttggggatgggtctagggtccaggtctaaggtcggggtttaggtccacattctgaggg

SEQ ID NO: 142029 - DNA, 637 bp, Cannabis sativa
aaagctttcgtgggacaacctcatcttcattgcgatcaagacggttaaaccttgtttcaacccccttaaaatacattgaacaaaatgtcaaagcctcatctacaacgtacctttccgctatcgacccttcaggacgtgctttatttcctacgtagttcttcaattttttcatgtacctttcaaatggatgcatccacctcataaaaagaggtccacccaaaattgcttcttcaggcaaatgaaggaccaaatgaatcattatgtcaaaaaatactggaggaaatatcgactccattttacacaagattaaaataagatcttgttgagaaacctccatgtctttaacatttatagtccttgaacaaatttgcctgaaaaagttgcacagttcagagatggtggtcgatatagcgttcgggagaaacttgcgaacactaacagaaagtaattgcattattacatggcagtcgtgtgacttcaatccgatgacatttgttaaattttcgtttactttctttttcaaattcgaacaaagccatagggaaatttcacatctttaataaatttacaaaattggagcctatcatcaggtttaagaacgtaaggtgcatgcggtttcaacagcttccccctctca

SEQ ID NO: 142030 - DNA, 752 bp, Cannabis sativa
tgatttaacatatttggtttaataagtattaaagtatctcgtaattaaattatgaaaattaaaaaataattaagaatttaattaattaaattgaggtttaatacttattattagaaataggcattagaaaaatattttttcaattatagagatatatatttgaattctagatgtaatatatatactatgaaattttacaattttcatgtcttatgctcagtaataataaaatgcgacgattttgctattagagttatttagatacggttgagtatcttaaaattatagtcgtgtaagataattagacatttggaatgtcgaaatttattaggattatgattttagaccatttcactcctagattataaacttactttataaggataagagcgaatttatattttgcttataagttgttaatggttctctttagtgaaatttttagtttatttttaagactaatgctgaatattacataaattaattaagaaaacttggtattatctctaagttagaaattaagcaaaactctctctttcttgaaatctttctttcttcagctgaaattcatcaagggccttaaatcatattattacatatttaaatgttaaattgtattgaacttgtgtgtgtttgatattctataaaaaaaaatgaaagtgaattaatatggtatttaataaatatatgaaagaataattaagcaaaagtagtttccattaattgatcaagtttcaaatgtaaacgagctc

SEQ ID NO: 142031 - DNA, 529 bp, Cannabis sativa
  modified_base (27)..(28): a, c, t, g, unknown or other
  modified_base (55)..(56): a, c, t, g, unknown or other
caagaacacacacttaatcttggtggnnacacacacttaatcttggtgggttgannaatacatacgcatttaataatcctgcttcagtagcaagtgaagttggtaaactcgaacaacgttcagagaatctatgtcagcgattaatgggtatgcaacctgaacacactacaagaaagcctagttttaccggcgcaattggtcaattgcgccagcaaaagttgtcagcataaatgaaatgctgaacttcatattggattcagcaataacttttaccggcacaatgaaatgcgccggcaaaagataaacaatgaaccgccaaatggcgcgaacacatatccacttctgtaaggcttttgccggcgcaaaattgcgccggtaaaaggtagcaaattttggtgggaatcttgaccgcccacgtgaaattttggggggaaaaaattccacgtggaaagtggtggtaggtgggattacttttaccggcgcattaatgcgccggtaaaagtgtttaacgaaacggtgcgtttgggtt

SEQ ID NO: 142032 - DNA, 631 bp, Cannabis sativa
aattaagaagaaaaaaataaactttattaaatatgtgcaggaacatatataattgcacgagtaaacttagattcgaatctgaattaactactcacatatctagctagataaatttcatctatataaataatacatagccaaattattaatgacaagtaatcagtgacggacccataatttaattggagggtggacgtaaatttttctttatatataaacatattctaaaaaaatatgtaaatataaagaacaattcaatatttcaatcaacttaaaagatattaaatatcaagcactaaaaatcttctaatagaaaaaaaaaaaaaaaaatctaaaacgatgttaaaaatatataacatactcaatatcctaaaattttagcaaatatatcaatttttaagctcatatctttagagttatcctcgacgagttttcatgttttgaaaacgatgaataataagctcgttgtcaatagcattgaatacatcctttttgagatatactgttaaactatcattcaattattgatctctcattttgttgcgctttgttgtgggaaattaaaataagggttaatttcacaaatgcacaaaaacaacaaaaatagggtttcacggaattttaaacattt

SEQ ID NO: 142033 - DNA, 720 bp, Cannabis sativa
actttgtctttctgtctgagctaaaagtggatccaaagcctctggtacgtactcttaagactttccacttttactttaatatttgtgtgtcgccttctggttctgctggtggtattatattggcttggaagtcaggttttatttttgaatgtatatcctgctcgtgcaatcatatctctggtttagtgtattcggacccaccttcccacccgtggttactctcttgtgtctatggtccccctatttgcatgcaaagaaatttttttggaccgagtttgtaaaattgggagacagatttggtggtccgtggcttgtcttgggggatttgaattttgttcttagtgattccgaaagagaagggtcctcgggcagggacccctttatcccgataatctcaaatcttatagaatcccgtggacttatcaatatgaccattcaaggagataagatgacttgggataatcatcgctctggtagaggtcatgttaagtctgcccttgataaaggtttagccaatggtgcttggtttgatctttttcctagaacgattctttcctcggtccataccagtaactccgatcacaggcctttgttcctccaatcgggcggtattgagactaaaattaagagatgcttcaagtttgaggaaggatggactcgtgatgagagaagtagattggtggtagcaagtgcttggaagtcggttaatcactcttgggc

SEQ ID NO: 142034 - DNA, 643 bp, Cannabis sativa
actaacatgacctgggatgccttttggaccctcttttatgaagtattacaatgaatacatccaagctactaaggcagaatagttcatatggttatcccagggcagtatgacgctgacagagtatgctacaaaatttgatcaattggcaaagtttggccttgacgaaatggccactgaggctacaagtgtaacgccctaatgctaaggcacgcgacagtgatttttcaattgcagcactatctttgctaatcaaagaactttctcaaaaatcgtgtaaatttaaaacttttaacattaattgtgaaaaattataaactttagtaaatcatttacaagtgtcgggatcccgtttctaaactttttacaaaatatacaaaatacattattcaggtcgcacagcgactacaaaatgacaaccctagatttccggagatggaacactccaggtcgcgctgacatgatatgtacaatcccatcccagctcaaactcactcttgctaagccttcgcctttcctttacctacacatgaaagtattactgtgattcgacagactcatataacatatcacataataactacttgtatctaggcgcccatacacctatttacaaggcttaacatatgagtagtaacgttctaac

SEQ ID NO: 142035 - DNA, 1253 bp, Cannabis sativa
  modified_base (179)..(190): a, c, t, g, unknown or other
acttaggggtatttttgtcaactcaaaaatctcaactattcgcgacattctcaatgtctaactataatgccacgctaaactagaagtactaagatgtgattttaataaccaaacaccgcgctccaatgttgccggacacaaaacatgcaaaataatgaaattccatatatgacatatannnnnnnnnnnnaattcaaataaatctccgtaaattaataattcaaaactattatgcaagtttcataattaaaccctaattatatgctaatttccaaatttaagttaaatagtctttacaattattcccccttaaaaggattttgtcctcgaaatctaacttgaaccactctgggtattgagctctcatgtcggattctaactcccaggtggcttcctccaccttgctgtttttccagagtactttgaccaaagctatggtcttattctgaaggaccttatcctttctgtctagtatctgaactgttgttcttcatatgacaagtccggttgcagctcaagattttcataacttagtacatgggcagggtttgaaacgtatttttgtagcatggaaacatggaatacgttgtgaactgctgaaagagctcgaggtaaagctaaacaatatgccacttgtccaaccttctcgagaatcttgaaaagtcttgtaaatctagggcataatttgcctccttttccaaaacgtttgatcccctttactggagacacccgtaggaacacatgatcccctacttgaaactctacatttttccattttggatctgcataactcttttgcctactctgagagggaagcattctagctttaatcttctcgattgcttctttactctactgtactaattccagacctaagtatttcttgtcccctgttccatcccagtgaatgggagatctacgttttctgccatataacaatccatagggagaaatccctattgtactttgataactgttattatacgagaattctatcaacggtaagtacttactccaggagccctcaaaatccataatataggctcataacatatcttccagtatctgaattgttctttttgactgtccatcaatctgaacatggaaagctgtactgactttcagtttggtacccatagcccactgtaaacttttccagaatttagaagtaaactttggatctctatccgaaactatagactttggcacaccatgtaatcttattacctccttgacgtacaaatctgcatact

SEQ ID NO: 142036 - DNA, 1529 bp, Cannabis sativa
  modified_base (883)..(884): a, c, t, g, unknown or other
  modified_base (1016)..(1018): a, c, t, g, unknown or other
ctttttatcttttatttttgcagctttaaaatagaagaatattagaaaatatcgaaggaataagatggaaaaaaaagataaaaagatctcacaaaaagatgaaaaataaaatagagaaaattattcaaaaactaacgttgaaacttcaagcctaaattaaactatgttctgattacattttggaaaaagtcaaagcataaaaattctagatcactctttcatttttccggaacatcttgaatcgtccaattctaagcaaaatcaagagagttatggcaaaaatacgttcagtcaacgcaacaaaatactcactgcccaaataaacgtggtgcgcctaggcatggaaatcatgggccgcggcccgccccttctaattctaagcaaaatagtttttttcaacatttttttttatcttttttcacaaattttttggctatataagaagtggactttaatagttttgaagcaagcaaccaaggaggacgaaaattagagataaaaatcaatcgcgaaggctttttcaacggggttttcagcattcttttcttctctattctcttcttctttcttaaattaatatgtgtgaatttgctacaatgaacatgagtagctaaaaatttaattatggtctagatggagattgtttcacattgttttatagttctaatatgattttattttctcaaaatttctatgtattctatttcattcgtacttaattacttttaattgtccgatcaccaattaactgtctataattttgatgcgagatctgagaagtgagtgtcaattatgctatcgtgaaatagaatataatttcgatataggacgagagtacctgtatggtttagatctcttataagatgtaaagaccgcttagttnnatttagaaattagcagttaattaagatttaattatgaaattattaatagatatttaaataattatttatgttgttatatttgaattctgaatgcatttttatatcatatagtgaaatttcataattttacannntcggtgcccggcaacatggaacgcggtgtatgactcagtagaatcacaatttagtattttagtatgttgggcagtttatttagacattgggaatgtcgagattagtcgggaatttagaatttctcaaaatacccttagtacctcttttgtgctattctagtgtggaggggcaaaatggtcattttgccccaatcatgttttgtcctttagtgagcttattaattagtaattatgtgatttatttgatgtttatttggctgaattaattgggaaaatcttctctctatttcattttactcaaaattagaaaattagaaaaaaattaagaacttcattctctcaaaactgtctctctctttcggccctctttgagcagcaagaaagtggtgttccttggtaattcaagctgtgttttgctttcattttgagtacaatccaagctctaggtatagctcttactctttctctctttagtttcttgaaaatcaagtaagaaaatggttgcatgctt

SEQ ID NO: 142037 - DNA, 522 bp, Cannabis sativa
gggtttattggcacggctagtagaaatgggaaatggcaacttgtgatttttccctaattgacatgcattgcagaatgtaatgttgccagtatgaggaatatgttctaacactctgtttaggaccatattgccaggatgtcctaacttgcaatgccaattatttatatcatttgtattgtgggaaagaaaaacagtaggagaagtagatgacaaacaaccatttttattcatgaagggtgaattacaagtatttagagattcagggatctctgtagtacaagaacagtgaagattacaatctttatcaacagaaaaaccagattcaacatgaagacattcatcacttgagcttgatgaacaagaagcatcaccaagagagtatagaccatgcttacgttttcctttgagtagcacacctcccgtttgtttgtccttgacaaaacaacaatgcttgtgaaattcaaggaaaacatttttatcatcagtaagtttagaaatgctaactagatttttggtaatgga

SEQ ID NO: 142038 - DNA, 665 bp, Cannabis sativa
  modified_base (339)..(339): a, c, t, g, unknown or other
  modified_base (382)..(382): a, c, t, g, unknown or other
  modified_base (411)..(411): a, c, t, g, unknown or other
  modified_base (438)..(438): a, c, t, g, unknown or other
  modified_base (615)..(618): a, c, t, g, unknown or other
taatacgaatagataacaaaaaatataaatagttttgtcataatacctttagatcggattattattaaattttattttgacaaatatcagtagggtcctatttgtaccattttaaaaaatacagggtctattttgttatttaacaaaatagagggtccaattgataatttttgtaaaacacatggtctaaaataatatttactttttttgtatttttaattgatgcttattattagaataaaaaaaaaaaataccacaaaaaaatgtcataacatagtattatttacatattctctttcttatttttttattattattttatcatattaagcaaatttntattttatcatattaagcaaatttgtttatttaatatatattnaaatttgtttatttaatatatattaaatnttgtttatttaatatatattaaataanaatataatattattttaataatttctagagatgtttactattagattattttaaaacttaaaaataatgtagaccaaagataaaataaaataatataattttaagtgatgtaaaaaattttgacactcttagagtttgtttggtacgccgtattataccgtattatattgtatagtnnnntattaaattatattttatgtaaaactatatgtggtattaatttttat

SEQ ID NO: 142039 - DNA, 544 bp, Cannabis sativa
tttgagagatatcttgttgtgacatattatcttagtttaaaactataagtttctagactaagtcatcaacacagcatcctagtattttagattgagtgtaaaataaccacattttttatgaggattaggaattcttgcccaagtcattcgaatagactatgcaagaatactattttcataatactgataagtcatttctatccatatgaatggttagtttactttatcaatggtgttcacacgtatcaaccaaatgaagatgggtaaagaattttaaaattatcccactcaaataaggtagtgtgatacaatgtcaaggaactttactggtgtcaatttctattgcaacaataatagaacattaatctagatcacgaatttatactgataatttgctaattcatttattacatccatgtttcaaatatgtgtgtcatatagtattgtgtactgaaatagtccagagttcaaaatgaactacatatttcaatagtatagtccacccctaagtatttaaagattatgatccacccctaagggatat

SEQ ID NO: 142040 - DNA, 738 bp, Cannabis sativa
agaatcaccaagatacacatgttcttctccatcacctactgggtttattggcataccttttatttttgttttgtgatttgtaccaaatttgcatttgctgccatttctctcactttggtagcttggagttccttgcagttagtatcttcaataatgatgtgggtaattagatctgcaatggacaactgcttatacttgtgctttaggtgactcttatattttttccacgattcaggactcaactaatagtctagtcaaaaaaatttctggtaggataatgctctctaccttgagatcttcattgagtttgtgatacttattaatttgaaccttgatgtcttagttatcctccatcctccaacgatcaagattgccaaccacagacttttattttccagcatcttcagcagtgtactttgcaatcatggagatatggaactctccttggcttccttgtaagagcagtagacatcaaacaaattattagaaagtgtactcaaaatagtgtgtctacatactttattggaatgagtccaagcatcaacattggtgtttattttctcttcagaaaacgcccatgcaacaatatgtatatcaaggagtgaaaagactcttgcttgccatcttttgaaaaattgaccatcaaatatttctattttcaaattgtcacggaatgacttggagaatggaacagcagcagcagatgaaggagcagaaagattgattgctccaatacca

SEQ ID NO: 142041 - DNA, 522 bp, Cannabis sativa
  modified_base (27)..(29): a, c, t, g, unknown or other
  modified_base (454)..(463): a, c, t, g, unknown or other
actaatcagattgtaaagagttttatnnngggcataaaacccaacacatacaaaccccagactcaggcactagcatcatgccccaaggggaagacctctagaggtgagaagcaaagttacaagggaggaaaagatgatccatagttttctcttcctccccgcaaagggggcaagacaccttctcagaatgcattcttctagccaaagctgatctgatcaatgttttgctttgtttcccaaataaaactatatttcaatgtaatctttcatattcatttgtcaataaagaaacagatttattttcattgcttatttaatatgttatttggcttatgtgatcatttatttatttatttggtttataaattcatctaaatccttatcacattgatattcttgtttatcgtattgtcaatacagtgtaaagtaattaagattgtgtgattaaatgtannnnnnnnnnttatcagtacacagggtttaactaataggataatttacaatgtactttacttgcacctt

SEQ ID NO: 142042 - DNA, 765 bp, Cannabis sativa
acattatagccttgatcttcaatcatggtcggccagaaataaccttgccttaggattttcttggataaactctagccagccgcagggttgtcgcaaaatccatcgtgtacctcggacaaaagtcgagcaacttcttcttgtgtaacacatctgagtagtggcatggagaatccccttttgtacataactccatctacgatgtgtaccatacagcctttcttctcattttctaagctttgttcctgttatctgggagttccctagtgttgaggtaggctactattggcgtcatccagtttggagatgtgtcaatcatttcaatctcctctgtgccagtgatactaggtttttctaggaatttgatggggattagattagccttatcatttatgttactgctcgcaagtcaggctagtgcatcagcagttgtgttttcttctcttggaatttgcttgagggcatagctttcgaattgtgcgagcatgtcatgcattttgcttagataggctatcatcttttctccccgagcttcgtactctccagatacatgatttaccactaactgcgagtcactacagatctcaatgtgttcggcatgcagttcccaaacaagttttaggccgacaataagggcttcatattcaacctcattgtttgaagccctaaactcgaatttgactgcttcgtgtagatgttgccccccaggtgtgacaagggcaatccctgcaccagacaattggtctgtggccgacccatctacatgta

SEQ ID NO: 142043 - DNA, 2253 bp, Cannabis sativa
ctagatgcttctggaagattgataaaatggtcaaatgaactggggcagtttgacataacttattacccacgaacatccatcaaggaccaggctttgacagatttccttatagaaggaataactctggaagaaaatccgcttgtttagcgagacgcagatacttggaatttgtacgtggatggagcatctgatgagcatggctcgggtgcagcggtaatactaattttgccagaaggctttcagtttcactatgctttaagatttcaatttgacacttcaaataatgaggctgagtatgaagccttgatcgctggtttaaagatagctgaagtgttgatggttaaaaatcttatatgccatagtgattagcaatttattgtaaaccaagtactaggggaatacaaggctaagggcttaaaaatggcaaaatacctagagaaggttcgaaagaacttggaaaagtttgattatttcaacatttagcaaataccaagagaacaaaactctaatgtcgatgccttagtaaaactggcctcacaaaatgaagatgttgagatgatagatagctcgcccacatggatgacacccataattagctatcttctcaacttgcaactcttaactgacaaaagcgaggcacggaaactcttgtattcaatgccttgctatacaatagtagaaggaaaattgtacagaagaggctactcaacgcctctcctacagtgtgttcttcccgtagaagcaagcgagatcatcaaagaaatccatgaaggcttttgtggggaccatgcatgtttgcaaagcttgtcaaagaagattattagacaaggatattattggccaaccataaataaggacacccacaaatttgtcaagaaatgtgataagtgttagagattctcacatatacctcgcgtaccactaacggtgtaacgtcctaatagtaaggcacgctaaagtaatttttcaatcgaagtgctatctttacaaatcaaagaattttcttgaaaatcgtgtcaaattaaaacttttagaattaactatgaaactttataaactttttctaaatatttacaagtgccggaatcctattatttgaactttttacaaatattccaaacacaaaagtcaggtcgcacaacgactacaaaatgaaaaccccagatgtctcgaggccgaacactccaagtcatgccaccatgacatgtacaacatcatcctagctcgaggctcactcttctttagccttcgcctttcctttacctatacatgaaagtagaactgtgagtcgacagactcagcaagaaagcatataacatatcatataatatcgacttgtatcaaggtgcccatacacctatttataaggcttaacaaatgagtaataacgttctatactagggtacaatcactgtaccacatacactacgtaccaacattgtacgagtgttggtagggtttgtttcgtaccctgagtactactaagtgatataccacacacaccctatactctcctgtacttatgctggtaacaccgtaatttactctttaaacaacatatactataccaatgcactctgtaccacttccgtacaagcgttggtagtgtataaatcataataagcatgcacatatatttcacacatacatacactcgcatatgtaccacatattatatgctattcttaccttgttccctaattcaagtgagttggccgacctaaacggaaagtctcgtactggatggatgccctaatcacataataaaacaaggtaaataacacgccaaaaccctaattcgggaaacccgaacctccaacttaaggttctgctattactaactggaactacaataccctaaaaaatagggaatcacccatccaaggctctaaaatggacacgaatcgaggaaatgaattgtttggggaatcttccgaaacaggttaacctgttttacaggtcctagaaaaccagttaactggtttgcaccaagtttccccaaacaatttcaaaccttctcaaaaaatgtccaaatgccaccaaactttccaaaacacctataatgagcttacataatatatttcaaccaatagaaactagaaaaatacacaaactcaaaacatgccatggatgaaccaagctttatttttcaaactcaaacttgtgcatccactaccccacaaccataaactagcagctagatcatcacttaaactcaaattaaacttagaaaatgaattacaatacttccta

SEQ ID NO: 142044 - DNA, 945 bp, Cannabis sativa
aaaatacagaatccattttgtcatttaacaaaacacagtgtccaattagtaacttttataaaacagagagtccaaaatagtatttaccctaaatttatttataaaagaattatattcaaataataaatttaaatatttaaaattaattaattaatctaaccgtattaatcttaacaaaactaataatattattgatttaatagttgaaataataaagagaagaacgagaataaaatataacatttcgactcaaatatcaggaaaattaaacttagtttaaaactgaaaaaagaaatagtcgactaaaactcgagcaaaacagactactaaatcatattgtataaaaagatttgattgattttaagatatgcaaataatgcatcccacttttgattcattttaattgcagcaaaagccttggacatgttaataaatcacaaactcaaaaagtacaaaaatacacttggggataattaaaacagaaacatgtaaaaaaaacattttatcatccaaaaatcgatttttatcaggttataatttgcattttatctcacccaaaaaaaaaaaagaggatataaggatagacatttcaaaccaagtacaaaaagaacaagacatacagaggtctcccacaacacttttcaggtaaaattgaaaatgtcctagatatatctatttcaaaacaaaagtggtcatcatgagatttttatccataaataaatcccttttcttatgcccccaagtcccattaaaaagtaaaagaagaaaagagaaaagaaaactagagggggagcataggaattgcctgaaatttacatctaaggcacaacagtgagcaaaaaagaaaggacaagaaaaaactattaatggaaacaaaatccaattattcatgtcaatttcctgctttaaattaaagaaaataacccaaaatctaaaatagagcat

SEQ ID NO: 142045 - DNA, 805 bp, Cannabis sativa
  modified_base (315)..(315): a, c, t, g, unknown or other
tggtaaaataattccaacagaactaaacttggttccagtggaaatggtaaatgagccaagtatatgtgaaaaggagacatgaagatggtagatagctcgtccacatggatgactcctataatcaactatcaactcgacggaaaacttccaactgacaaaaacgagacacaaaaactcttgtattcaatgcctcgctacattaaagtagaaggcaagttgtatagaaggggatatttgatgcccctccttcagtgtgttcttcctgcagacgcaaacgagatcattaaggagatccatgaaggcttttgtggggancatgcaggttggcaaagtctatcaaaaaagatcattagacaactatcaacaaggacccccatgaatttgtcaaaaaatgtgataagtgtcagagattctcacatatacctcgcgtacaaccaacggaactaagaatgatgacctcaccttacccatttgctatatggatgattaacctgattggggcacttcccacagggcaaggaggagccaagtacgcagtggtggtagttaatttcttcactaaatggactgaggctgaacttctcgtctccataacctacaagaaggtcctcgactttgttgtcaaaaacattgactacaggtttggaattacaatgaagatagtatccgataacggaactcagctcgatggtgacttattcacagatttctgcgagaggaacaaaataattaagagcttctcgttagtatccaggcctcaggcgaatggacaagtggaagctgttaacaaaaccttgaaggatac

SEQ ID NO: 142046 - DNA, 610 bp, Cannabis sativa
  modified_base (27)..(47): a, c, t, g, unknown or other
gcacttagtgcggattggatgttgttnnnnnnnnnnnnnnnnnnnnngatcggatgaacacccctaatggcagtcacgtcatcactccgttactaaaataaacagaacaagatagaataccataaattaagcattgtcaatagttcgagggaaatttttaacgtcaaaaatagttcagggggcatgatttagcaagtgtcatagttcgggaaaaaaattataaattagcctaaaataaaaataaaacaaaaaataataaattcaaaggaagaataaaaattattgcatgcataaaaaatatttaattttattttaaattatattttctttataaataaaaatgaaatatacatttgatttactaagttttgaaatatatttgtacaatagattttatatatatataggacaagactatggtaggacttagcataagtttcctaccggtagggaagttttttttaccattgattttagatcatgtggttattaagatgtaaggcttatatttttatgataaaactgtatgtatacaattaaaattttatacatattgtaataatatttaattatatatttattttaaaaaataaaataatattaaaaatta

SEQ ID NO: 142047 - DNA, 1325 bp, Cannabis sativa
tgtttacatttttcatatagtctatctatatgtaaatctattggtttattttagcattttgaaacaaacttttatttttcttttcatatattggaacaacaatttattttttgtttcaaacacaatgtgtgcctataaaataacaaattaattagtctatttttttaggtcgagacatcaaatctagttgtatacaaaatacatgactataacatgtcttacacagtaaacctggataacaatctatacacttgttaaagatttgaatatgataaaatatcttgctcacataaaatgcattgctcataagtttatttgtcatatatcccaaataaactttttagtttattttgatatattaaaacaaatttttattatttgtttacatagcagccttttcgtatagtctaccatcgtatatactaataaatctattagtttattttggcatattacaataatttttatgtttctttttgtatattggaactacaattcattttatttcatatagcctatcattatatatgtcaataaacctactaatttttgtttgtgggaacagcattttttttttttcaatacatagtaaactataatcaaatagaatgatatacgccaataaacctattaatttatttttcgtatattggaacaataatttatgtttttgtttcaaacacaacctatcattatgtatgtctattaaataacaaactaattagtctattttttttaagtcaagacatcaaatctagttgtatacaaagtacatgactgtaatatgtcttacatagtaaacctggataacaatatatacacttgttagagatttgaatatgataaaatgtcttgttcataagtttatttggtatatatgtctatactcatatatgccaaataaacttattagtttatttgcatattaacaaaaataaaacatgatgatttttatcaaactaagaataaaaaaaatgagttcttcataaataaattaacaaacaagttatccatgtgtataaaatttatatttttgatttttttaaactgaaaactaaatgatatataacatgcattttacatagagaaatttttatatttatgacggaatccgattcagaatatccctcccactcctaacatgtatatatatattttttggtaatctaaattagtgtagaaactaaactaattagtttagttatcatagtatactataatataatctaattaactaaattctaaaacaaatattaattaagattaaaaaaacaacagtaactaattagtatatgattggtatcatgagcaatctaataattttt

SEQ ID NO: 142048 - DNA, 674 bp, Cannabis sativa
cttagtttgtttatagtttaatctgtttatgtttgatgtgttttgggatttttattaggtatagttgtttgttgttagtttttaggtatcaatacgattttagatgtttgcagttaatattcgtatagttgtaactgtttgtgagtttgtttttagtttttttatagttttattatagtttgtatacttgtttatttgcaatttatatttattgttgccatgtctgggattacaaatttagtccctctaattattacagatctaaatgtggttgcactagccttttttctgttatttataatattaagaaaactttatctgtcaatttactgtctatgttccgtgagactcaatttggtcattttcttgatatgcctgagtatgttttccatccccaagttgttcatagtctattgttaagggaagtttaccagcccaatcctaaagaattttgggctaaagttgctggtcgttgcatacggtttagtgctgaggagttttatttgatcactagaattgattgttttggtgattgcaacaagttgttgttttcacaggaatcaaatcagttggttgaaatttgtttccgtggtgtgaaaaccattgaccacaaagctattgaggatgcttttttgagtagtaggtggggtttggatgagtctcttggattgaaa

SEQ ID NO: 142049 - DNA, 543 bp, Cannabis sativa
tgagctattgtgcggattgaattagatccaaaaaaataaaatctgcactaattagtgcggatcaaatgcactatgagcaaaatagtacgtattggattgagcaaaatagtacggattggattggataaacacccctaagcgtgtcattataacgagcatttcataaataaaataaaaaaaaaattgagtttttttaataaccctttatattctaactaggcaatatagccgctcttcgcgcggttattttaattttattttagtataataattttttaaaaaaaattacttaagaaattaataaataataacttaaaaaattattctaatatataataaaattaaaattataccatcaaattatttatgaaaaataaaattttaaaaattttattttatttattaaaaaatttaaaatttatatgaataatgtataaatagaattttaaatttatatattaaaaaagtattaatataaaataaaataaaaatggtaatataaagaaaaattagagtattattattattactactattattatt

SEQ ID NO: 142050 - DNA, 503 bp, Cannabis sativa
aaacgagatttgcgcgaggatatggatgttctgatccatatgttaaggaagagaaagagttagtagctattcatggtggttctggatttgatttaaacttatatgatattcctcagtttgagttgtctgctttggtaagtggctaattatttttattttattctttttcttgtataaatatacattttagtagtgtgtgtaaatgtgttaaaatttatatatatagatattaggatggcaaagtaaaattggcttgtgagagaagcgaggagcaccgtaagttttcagaaatttctgcgttgtatccaatagtttgttcgacactctgttttattagagagtcctcattttattcttgcgaagaagttgtgactaaatatatatttgacagctcactaagttgtaggtaagtaattactattatctcttattaagaattatgtttgtaacttaatttgtcaacaataattgtgttactttaattatttttgtgttttcctttt

SEQ ID NO: 142051 - DNA, 925 bp, Cannabis sativa
gaccctccctacggcggcttgggccttgatgtaggcaagttcttgttccctcctgaagaggcacttcttatactgaccctccgcgaaagcaatgatgtccgcccgaagcgccttctcggagtcaggattgtgaacgttgggacaaagaaccttggataaattgaaatcatccactgactggccctctgtgatcaaattggcccttctacagtgtacaatcgtaaccaagtccccaacattcagcccatccttgtcgtacgtgtagaagaccttggcgtgttgaaggaaaagttgtgtggggctggtgcggtgcattggtggtaccctgacccactcagtaagtagctccaagcgctcaatagcttggaaactagaggagaagaaaaactggtgacgatattccttaacatttttttggaagttaaaaggaaccgaaccctcattagcaggatgggcccggagtgtgaaaaaatcatcttttgtctcccttcttagggacagatacaagttcataaaaaataaaggatttcagccggactgggcggagcccagcctctggcaacgtaaaaaataaacaagcctgagagcaggcggtatgcttggggataagatggtacggcgcaaggccaacaaaaactaaaaatttatgaagtaatcctgaagcggtagcattgctcaggacatgagatgagtctgactccacactctgaaacctccgtagttacggttgggcgtctcttcatctctgagaagacggtgaaagactccagaagcagagggcttgatcccgcccatagtgaagatcttttccagttggtgggcacaggttagagttgaatgcaactcatcaacctcccagtcggtgtatcggcaagtgtatttctcctggaccataggtcccttcatcacttcctccagggtggcc

SEQ ID NO: 142052 - DNA, 554 bp, Cannabis sativa
tagtggatgttcaaaacatatgacaggtgatgatagtttactcactagtttcaaatctttaaaatgtggtgttgtaacctttggtaatggtatgatcagcactgttcttggaaaaggtaccctcaatgttgttggattaccaaaattggaaaattttttacttgttgaaggactgaaagctaatctaattagcataagtcaaaattgtggtcaaggtttcacagtaaatttttctcataataatagttttgtgcgtgaccaatgtggaaattgtgtcttgcaagggctcagatctagtgacaattgtcacactcactacttatactacttgtcattctgccattgataattctagtgctatacgtgtttcaaaaaatcttgttaaacactctcgcacaaagcccatagacatccgtcattactttattagagagcttgtgcaaaattaaacacttgtcctagaatatgttgaaactagcaagcaaatagcagatatttttactaaagctcttgactcggtccagtttatctctctaaggaaatccttaggggtt

SEQ ID NO: 142053 - DNA, 527 bp, Cannabis sativa
tgacatggttctttagttttttctggttcttttttttttttttgttacttttgggattttgctggttgtggtacgagtatggcagacggtacagaggtgcatattcctattgaggaggaggaagaggttatcttgtcttatgatgttagtgctacggatggtaatgactatgatgataggtggtgttcgaaggttcttgactgacagacaaattgattttgaggctatgcaacatatgatggcttcattgtggcaactagggaaggggatgtttgtcaaggaattggatactaatcgctatctctttcaattttatcatgagattgacatctaacgtatgatgaatcgaagcccttggacttttaataggttcttgtcaattttcaaaataatgcagcagggggaggatccaaaattagttaccttgaatgaagttgatatgtgggtgcaattgcatgatctcagatcagggtttaaaactgctacggttgttaaggatgtcacaaactatgttgggaagtttgttc

SEQ ID NO: 142054 - DNA, 559 bp, Cannabis sativa
aataataataataaatgacaagagaatttttagcatggttttgaagttaattcttcatactccatgagtccatcttattcagggatttaataaattgtataaagaatacaagagtacaaggaagtattgatataatatctctctttttctcaaattagccatcctttgttctctggattctgtccctatttataggagtttagggtgatggttattccctaggaatcttatccgtgtaactatttgtaaaacgtagacaatccccacaattcatatttacatcatataggataataataaataactgctctttgaatctatctatagacggttatcttgactatgctttattctgaagagagttttcagcgcctaagttaacttcaattaatacttctagtgtccttctatgaatgttgagtgaagcaaatgcgagacgcttatcataatatgacaattttgagatgaatcatgctgagaatgttcctcttagtctttcaacatactcacgagtatgtgggtcaatgagctaggagctctttgaataattcattatcta

SEQ ID NO: 142055 - DNA, 504 bp, Cannabis sativa
aattagatttttaatttaaaatttagattctacacaaaattctaccaaaatttaaattttgtttcaatgaaaaacgatttttgaatgaaaaaatatgtagaaaacaaatttaatgcacaggggtatgcaatgcatacccctgcgcgcgcggatggtgaatgatggccgagcaaataggctgcgtgcagcctgtgatggccgagggagctcggcatgagcaggccttcagagagggccatgtccgagaaacctcggtctgcccttgtctgaagacgcgtgctgtccgagtgaaaactcatccccacacttgcatccaaaactagatattttcatctaaattcaaaaaatcataactaattcataaaaaattcaaattgcgttctgtaaaagcctaaatttattaatttttagtccactcttcaataaaaatatttctagaacataaataaaaattatttttacaacatacaccgcgattttcaaacaatcatcatataagcacat

SEQ ID NO: 142056 - DNA, 706 bp, Cannabis sativa
  modified_base (378)..(378): a, c, t, g, unknown or other
gtttgctttgtcagctatgatactgatcgataggcgagcaagtgcatttcctgtagcattctgttctttttaaagcaagacttagttctttgaagaactaatgaggtaccgagtttgccttggttgtgaaggcatagttggctaattgaatgagtgcatcgattgttgtgttgtctttgtgggctagccttttagtatagcctttgagctatcttaatagatctagtaggccatcatcttcttgtattgagctatatattcacctaggacataacctatgactagctgagagtcgtggtgcatgtttaggtggttagcccgcactttgtgtgctagcctagggccagcattcagagcttcatgttcagcctcattgtnagaagctttgtaaatgaccttgttacctcatgcatcagttgccccaggtgccttggaggccatgcttgcatcaggcaggtggtcaacgcacctcttgggctcttattctcgcttcttctctggctcctacttttctcctaaactctaagagatttgggcagatatgcttctatgattagccatgaagctggtgagagcttggcctttggtggccatgcctagctatgaggtgcttttatgttggtcgagtctcaatggttcacttgagtagttggcctgatactctaggtttctgtagaacctgccgcaactgctgatcggtgtacac

SEQ ID NO: 142057 - DNA, 738 bp, Cannabis sativa
ctgcaacacgaaattaaagactccgactaggagaatatgcatagaaaaagaatcatttgctaatgataccaaataaaattttaatgtatccaaataaattaacatatgataatgaaaaaaagaaaatcaacgataaaagcatgaagaagaaaatcaataattataataataataataataatagatgctgaggagtgatatctgtagagatccaaaacacaacccgatgaaacaacttataatttctctttcgttatgtgctttgcggcacaacaccacagtgggtcttacgcattcttgcactaccttcttcctccttcatctcctcatcccacaaaactaccctcttattttttgagcatatatatgttgacttagtttatttatttacatttaattagttcaaaaataataatctttttttgtcaaaaaagataacataattattgttttaaaaactaattagaaataataagcctacgttcatgtatattaggaatttgctaattactctatgttataaataaaatcaataataagcctacgtatataaatagacaaatctgtatattaactgtacgatgaatatagaggaatttcaaaaacaattattaaatttccaattcccatcaacaacatgggataataaggaaaataatgaagttattcctgatgaggatgttggtggtttaattgaagagttatattacgaagatgatttaataagtaataataatt

SEQ ID NO: 142058 - DNA, 539 bp, Cannabis sativa
tatcaaacttcatggagttatgtcagacttttaaagtcaatggagttagtgatgacaccatccgtttgagactgtttccattctcgcttagagaaagagccaagcgctggttaatctccttgccaccaaattctatagctacatggaatgacttggctacaaaatttctgtctatgttctttcctccagcaaagtctactaagctgcgaggagaaattaacaactttcgtcagcaagagaatgagtctcttcatgagtcttgggagaggttcaaggatctcacaagaaagtgccctcatcatggtattgagaagtggatgctggttcacaacttttataacgggctggtgggtaacactagaacacttatagatggtgcagttggtggagcatttatgaggaaaactgcgaatgaggcttatgatttggtggaggaaatgaccttgaataatcaacagtggccaactaaaagaagccaaacaaagaaggtagctggtatgctagaggtggatgctattaccaagttgacagcccaggta

SEQ ID NO: 142059 - DNA, 655 bp, Cannabis sativa
  modified_base (42)..(42): a, c, t, g, unknown or other
  modified_base (226)..(230): a, c, t, g, unknown or other
ggttgctagcatgacggatacagaagatgattccagcgatgngtctgctagcaaatacaagcaattaaaagctatgaataaagttcttgggagtcggtcaggctatctacgaggactgagttataaattcaaagacagctcggaaacaagctctagtactcaaagtcgagctcaatcacaaggacctacttcatccattactccgaaagatatgggagtcttcgcnnnnnttatgttaaaaatgcgtgataagatcgattagtctggaacctccagtgacgcgtctctgcatgacctgcggtttgacaattttttacaaaaatttttaccatcacaaccgcaaggtagcgcgtccatttcagcccccctcaaacgtcagtgccacaacaacaacaaccacgatcgcctcagatgcctcagttctttcaacaacaacaacaaaattctcccaacatgtctgctggctcctcataatcgcctcagttacattacatgttcgggcttccctcatagtctcctcttatatttttttcggacgctgtaggaggatctcaaacacaacctatggttggcaattttggaggctcatcccaacaacaataccctatgtatggtcaatttgggtcatcctaacaacaacctgtgtatggtcaat

SEQ ID NO: 142060 - DNA, 513 bp, Cannabis sativa
tttttagaatagcacaatttctcccaagctgtcacaccaggacccgtggctttatcttgccctgtccatagaaaatttctacaaatagcttcaatatcatggacaattttcaaaggcaagatcattacctgagaccagtatgcatgaatggataagaggacggagttgatcaaaacaactcgggctgcaaacgacaagttcctcgatctccaagttcggattcttgctgtcattttctccacaagagcagaacattcattcttagatatctttttagcacaaataggcactcccaaataatgaaaaggcatctgcttttgaatgaatcctgaggcatccaaaatcctagtgactttagtgcttgccatgttactacaatatatagttgatttttggggattaggttgcagacccgatgattggctaaaaagctttaagccttgcagaaggtagtacacactcttgaaatccccattactgaaaagaaggacatcgtctgcaaatgctagatga

SEQ ID NO: 142061 - DNA, 1378 bp, Cannabis sativa
accataaacatgtaatatacatgtaatcataaatcacttcaaaattctaaattgataactaattagattgtaatatgttttatttagagcacaaaacccaacacggagtaccattatcaacctcatcttgagaaatttcaattggaaatgtcgaagatccctcatcagctttggcaactttagacttgcctttgcaacattcatggatagggggagcggcctcagctgctttgcttcctttccaagacttcttgtttctaggagcagaagaagcagcaaggataccatgcacgacctccctgatggaaggctttgtctcctttggtgcggtgatctttctctttgagcaagtcgccatggaaataagaaaactcatgttgtctgcagaaaagtggtgagtacaaaaaaagagatgtaaaataaggtagcaggtgaaaactacaaaacatggagcatcaatgacttgttaattccccaaatttcgctggctttttattaacaaaagtaacactagtagttaatttggacatccatgattctagtaatggtttacactaagtatacaaccatttcatcattctgaaaattttccaatcactagggtatatccctagaaggacttaggcaactactagtaactaattgtagaccttttactttcatcaaaatgcaatctaaatttctagggaggtaagtttgaatacaattcaaagttcaacttaagtatctttgaactgcatatccaaatatttctctactcctattagttcgcaagatctttaaccacttaccttaatgtttttcagcattgctagaaatccatgaaatttctcaaacatttcaaatttctggcctctaggtaaaatctagagtgatcgtcttaagaatttaacaataactcatatccaccgctgaatgtacatccatattcgaatacagatgatcctactttcaagtggatataggcatattactctttgtagtgaatgatcttgtcaaaaccactatgaacaagatacaaatgccacaaatttataaaatatggttgtggtattttaatgaaaaagggcttagttattataaagagttcttagaatagtccaagtggatcctggtcacagaatgcaaaactcagattccttacattaacatatagtttggatccattgatagaaaatggatattaatagcttgtaaaaatcatactgtattggccaatgtattctaagaaattcaaataaaaatgtatatttggaatctaaaatttaaagtcaatgacttaaatttatatgaaatatacaatgagtgattattctctcttggaccaccactactaatctaactctaagtctaagttgcctaaagtaagcatatacaa

SEQ ID NO: 142062 - DNA, 592 bp, Cannabis sativa
attgttttattttattatagtttgatgcatttacatattatatatacacattcataaaataatacaagttttttaatataattcattaccatattaaaagcacaaataatttgaataaatttaaaaaaaaattattttacattttttatttaactaagaaaattttattcttatattatatgatatttgatacaatactctaattttttttaatttttaaataattataaaaaatttaaaaacttatttaaaaaaaaaatgaagttcggtttaaactgaccaaaccgtagattaaaacggtcggttttttttacatttgtataatggtcggtcgattttcggattataaccataaaaactaaaaatcgaattttagattttttttgtgtaaaaaactgaccaaaccgaccgttgctcacccctagatataataactatttttcttcaaaaagctttacatttatgatgtgacactctaatttttacatttatattagataactaggtgattgttacgtgccaagccacgtagtgttagttttatttaatattttagttttttattttaattaataattaaaatagtataatt

SEQ ID NO: 142063 - DNA, 1286 bp, Cannabis sativa
cagtcttggtctttgtggccttctcttgacatcttcaaggcttttctttgacctctcggcttcctgtttgagacgggtgatttcctgctgagcatcattcccttgtttaatcacgacctcacattgggctagtgacttttggacctctccaggtatttgagccgctccaggatcaccgatgggaggaaaaagagaggaaagaagtctggataattacaagcaaatgaatttaagaaacaggcagtaagaagaaagaaaaaataatatggattaatacaaaaaatttaccatgagggcataatgcaagttcctcgaaagcatctcttctgaactcccaagattgattagatcccaatcgtagggaaggagagccttgagttagtgctagcaggcagttccaaacactttgacaaattctgaaccagccttccttgttgcagcagacaatgtttcaatggcctggctcgaggaggcagaggcatgagttgtatcaagaggaggtgctttggtgttgggatcaactggaggaggagtagtctgttcatgggtcgcagtttcagagacctcgaggtcaataggctcaaacactttcttctttttgtgggcagtggttttcttttgacttttagaaggctccacctcagtatctgtaggaagccctgagttggttccccttttcttccctttccggtgcataacatccccaaaatgcatgtctgcgaggcaaaataaagtgttaaaattatttaaagaccaatgaaagggaagtgtggagtgtaatcttctacttatgaaatttaccaaaacaactagaaggcgagatatcactagaagaggaggtaaaaagaccgtagtatcaactaaaattcctacaagctgtaatcttgaatatattaaatgggtcgattgattctaaatcctagcttgcatctacatgacttgccctatctatcacggtgccatattgctcggctataccatcatacaactcgttatagttaatctcgacgtgaaatctagggtaccagctatcaaacctatgagaaattcggtctacgagaagggaattcctaatataaaaattaaggcggctatctcgaaaagtaattaatgtgttacgttcagccctaagtattgtcggtgaccaaccacattgattacctcgggatgctccttcaccggcttcccgagggaaagtgttttgaaggttttgtgcccgagtcacgcgatcccaagccttatccccctctggaatgggaacctactgctaagaagaatacttggga

SEQ ID NO: 142064 - DNA, 665 bp, Cannabis sativa
  modified_base (503)..(508): a, c, t, g, unknown or other
  modified_base (629)..(634): a, c, t, g, unknown or other
aatctactcccactcatgttgatcagacatgaagtgtaacttaccctgtcttgtgatgttctcacactcggcatccaatagggcaatctggccttatcacaagttctactcacccctgataggataacctgcaagtaaacctatacaagcagccaaaaatatatattctcacacaaacagtcaaaagccttatcactaacgttagcataaaacaacaatccaaaataaaataaaacatgtaaatacaatcccataatacagttgtatgttttaacatacacactaagcacaaatgtccactcttcttaccttagtggcaaagtatattcttttttctccctcgaacctctcgccgagtttctttattgagaagaagatcctaaatccaataacacttaaaacatattcaagcataacctatgattaacaatgaaatcttatgtcaaactacacaacacgtagatcaatttcacttgcatgacacaccaaacacaatcatttannnnnntgattcacaccaacacatataatgtactcaaacgaacatctttaacgtaaaacatgaactcttacaaacactttttacgtgaaatctcactaaaataccatttattaacaaaatatacaannnnnnaattatttaccaaaatcagaagctagcatat

SEQ ID NO: 142065 - DNA, 1185 bp, Cannabis sativa
gtacgcgatgtatatgtgaaaacctgtgacacttaccacactttttgacaaactcgtgggtttccttattgatcgttggccagtaatatccttatctcatgatctttttagacaggctctaccaacttacatgatccccacgaaagccctcatgaatttctctaatgatctcatctgcttttgtaggaagaacacaccgaagtaggggcatagaataaccccttatgtatagtttgccttcaattattgtgtatcgaggcactaaatgtaagagttttcttgcctcgttttttttcagttggaagttttccatcgagtagatagttgattataggggtcatccatgtaggtgaaccatctatcatctctatgtcttcttcacatatacttggctcgcttagcattgccactggaaccaagtttaattcatccaagtcgctctacgagaccaattttgctaaggcatcaacgttagagttttgttctcttgggatttgctatctttccaagttcttccaaaccttctctagatacttagccatttttaggcccttagcctggtattccccgagaacttgattgacaatcagttgtgagtcactatgacatatgagattcttgaccttcaacgccctgactattctcaagctggcgatcaaggcttatactcagcctcgttatttgacgcgtcgaattgaaatctcaaagcataatgaaacttaaagccttctagtgaatttaatattacccctgcacccgagccctgctcgttggatgcaccatccacgtaacttccaagtgtccgcatctcggtgaacaagtaaattttcttctagagttattccttctattaagaagtctgccaaggcttggccattgatggatgttcgagggtggtatgttatgtcaaactgccccagttcgattgaccattttatcaatcttccagaagcgtctggttttaataaaacttgtctcaagagttgatcggttaacacttttattgggtacacctggaagtaaggccgtaacttacgagacacttggattaggcataaacaagtttttctagaggggggtacctcgactctgcccttagtaaccttttactgacatagtaaataggttgttggtgcttatcctcttctcgcactatagcttcactcattgcatttttcaagatag

SEQ ID NO: 142066 - DNA, 595 bp, Cannabis sativa
  modified_base (329)..(330): a, c, t, g, unknown or other
ttgaacctaggagaggtcaaagggcgagaaagagaaaggtctaaataaggatgaaatatattctcaactaatttctttctacgtggtagaagggactagagaagaaataataagaaaaattcctttaatacttcttattgaggatgatcctaagacttttctagaagccatgcaatctagagatagtgcattttggagagaagcacttgatgatgagatgaagtcaattctctccaatgacacctatgatattgtgaatcttccacaaggatgcaaagtaattgggtgtaagtggatatttaagaagaaatatcacactgatggctttnnacaaacctttaaagctaggttagtagctaaaagttttaggcaaaaggaagatattgattattttgatacttatgctcctattgctagaaaactaccacaagggtgttatttgcattggcttcattacacaacttgtatgttcaccaaatagatatagaaacggtattcctaaatggtgacctcgatgaggaggtctatatggaataacccgaggggtttgtcctaccaaataataaacataaagtgtgtgtaacaccctaactaa

SEQ ID NO: 142067 - DNA, 746 bp, Cannabis sativa
aaattattaaaatggggtgtacttataaatttttggggtgtaaataaaatttcccaaagagcttatatttacggaaaaaaaatttctgtccccaattacctgtcacatttctgtctcttcaataaatagctgtcatgtgtctttctcttttcctacttaactaattcaattttcaagattaactctgttagttttcatctcttcttctctttcctcataactaattatttcctaattaattaacgagtatatttttttaaaaaaaaatacatattctatgacatttaatatattcatcgaaaaaattatgatatattcatacaaaaaaaagtttctatggtatatgcaaatgcaattttaataaaatttatttaaaatatttcatagcctaaaaattaaataaatggctactatattaatagaaaactaaatattatcatttgagtataaaaactaattgtattattatgtacaatccatttaatttattttcgaaaaaaattgcaataaataaatatatatataatcagacctaaatttttattttgtaaagacttaattattgtaaaaaaaaatattatatttatattaactataaataaatattacaataaagtagaatttagaaaatatatataattaaggtaaatttatataatttttcaagccttaattgttataacatatatctgtgggaactttttatttattattttgatgatattattatcaaattaaaaatgatt

SEQ ID NO: 142068 - DNA, 596 bp, Cannabis sativa
aattttacttttatttttgtaattaaaaaatttaaaaataaaaatattatcaaataccgcctaaataaaattatatttaataaaatgcgcatagaacatatttaattttttacaaaaaaaataaaaataaaaacaaaatcaagtgtgctattattgaataacgtccatgtcaacattttttctattattttgttttgtaaaaagaataatttttcataaaaaaaaatgcttatatttttggcaatttttagggttgtctaacaagttaatattatttaaacaaacgttgtttggataagtagcgactagggcgtcacaggctagggcatcacatttatactcgaaaactcacccacccgataaatctacccagcccgaaactcaaaaaatctaaaaaaaaaacaagtttcaaaaattagaagcctggtccaaattacactcgattaactactgggctgagttcgggtttcattaatttgaaatctaataaaaatagggttacacccgaacccacccaaaacccggatatatataatatttaaaaaaaaaaaagttatacattttctaaaacacataaacttttttttttaaaaaaa

SEQ ID NO: 142069 - DNA, 641 bp, Cannabis sativa
aaaaaaaaaaaaaaaaagcaagagtaataaattaatcgtgatttttcagactctgatactattttataacgttatcgctttaagtttttattgggcccttatatctccataaaatgatggctctgttaggattttatgtcctaaataaaacatatttccatataatcttatttgttatcaatagaagattagaagtcatttaagtttatatataattttcatatttatggtttgacatacaatttctgttaaatttaaaatatattgtaactcacaattagagtgatgtcaacacagtgaaagataattgtgattatatgtttcaaattttaatgtctcgtgattcattagtgtgctgaatttacactgatgtgatagtcagcgataaagcttgcttacacattagataattgttattatgtcctttctagggcatcggtaaagtatgctagtatcggatgaatggagagtggatcgatattgatcttggtaaagataattataaacttacgcgttgtatctttttttaagtcaatatcacttggttgatcttagatcaaaaatcttaatcttgatatgattgggttcgatctcaagagtgttatttatattcttagagttgaattcgttaaagcttacca

SEQ ID NO: 142070 - DNA, 1167 bp, Cannabis sativa
gacttgtttttgtctttttctattatttccttttacaatttttttttaattttttattttattttgtggtttttttataagtttttttttttattttttttaattttgttttattttatttttggtaaataattctttttttacttattattggcattcttaatgtgcttaatgccttatcgttaatgtgtttaatgccatatcggtatgatcctattttttttttatacttttttaaatttgttttaattttattctttttaaaaaaaaattgtacttgcttttagtatttttaatgtacttaatgtcatatcgatatgatactcaataagtggtttgtaatttttttttctcttgtattttttttttatttgtatagatgatctttgtactattgactattatttttggtaaataattattaattagttagtaattttttatgaataatttttgtaccatttactattttttttttatcttttatgttttttttgttgtattttttttaaaatgattttgtgtactcgttattggtactcttcatgtacttaatgctatatcggtgtggtacccaataattggttattgtcttttttttttattttactttttttttaataatctttgtactatttttttggtaaataatttttgtactatttattgctatgtgacaccttaaggtgttcaatactatattgatctggtacctaataattagttgccatgcactaatattaatatgtacttatctttagtaactttaattaaattttaagtttttttacctttaatctgctaatttaattagatattttatctatttatttaaatacaattgataaaaataaaaaatatgattaattcattaatttcagcaggaattacgtgcctttggcacgtttttaaccacctattatatatatatatatatgaatagaagaataatgttcttcatatgttttttattcgatacattttatttttaaatatcattcatttttatccaataccatataaatgtatatatagataaaattatatgcaatattttaataaaatttaatacagctcacgttcaaaaaaaatacagcaatattttatctattccagtaatattaaacccaaaaattggaaggagtagacattacccccaaatcaatg

SEQ ID NO: 142071 - DNA, 775 bp, Cannabis sativa
ttcaggccacattgtcttgaaaaacccagctccatagccatctggaccaggggacttggtgtccggtatactgaataaagcctccttgacttccttggtagtgaaaggtttgattaaagccaattgttgctctctatttagcttgttccccatctccatacactctacttttaggtcttgagtaggcattgtgcttgtccccatatagccctgaaagtgctttatgaagtgcttgacaacctcactgaaattatctacaacctctccatagtcattggtataagtaactatgctattttccattcttctttttttcaggaaagaatgaaaaaaagcattgttctcatcccctttacttaaccaagttactttgctcctctatctcaagaagttgtggtacatcttctcatgggtattaaagtttaaggcatcctctttttctatttgttgaacagtggtgtcatgcggttgatcttgagcttgagttctagctttaatgtacaggtccctcgcttcttgataacttctaccaatatccccaactctttctctattaaacctcttgatggagtgttttaatctcataagtttcaaattcatgcttgtcataccctctcttctcatcggtttctgccagctatcaagaactacatctttgaattctgagtgatcagcccaaaagttgtagtatctaaaaggtttgaacccaatctccacattagtcgtagttgacaccacacataaacaatggtcagagtgttggaaattattttac

SEQ ID NO: 142072 - DNA, 1128 bp, Cannabis sativa
cccttgatgtgatggtggcacctcaagaaccgtttttcttataaatgccctattaattccctaacctccctctgtgttttggcggcgcactctcgagtataagactcccaatttaaaaaattcatttcatgtttttctctctgctgctcgtttcaacttctctgtgctagatcttgctgtcttcaggtatatatattatgcttctctatttaacttaagttttatttcttttcatccctttttctttctcccattttttttatcttcccttcatccttgcctctttttcattcatttttaccccttttatatgtgttgttttaattactgtgtatatttttgtattttcgcccttccattatcttccctcccatttttcttctaggatcttcccctttcttctaccttattctcttatttcccctaccattgagatatttagggcttcctggttctctggcccgttttctctacttcccctatttagtcttggcatttcccctcctacggccctttcagggtgttagtcttgccttttcaccgttatgattagatcgtaagggcagttcccctcttagggttagcctctctccctccttttttttggtaggcttcggattccgattgtcgttttaactgtggtataatgtcaaatgcggattgtccaggtgtctctccttcggtttctgattctctttcctcgagtattgctcttggattcgtcgagtcgtttttagtctctgatactcctcctatggagactgagaatgttgaagtccccgacagacccatctgagggggttacactagcgattcccccgttgaagaaggccaaaaagaaaaaacatgccctggatagttcctatttggatgttaggtcgagttgtccgtcggtactcacccaacgtgaactcaattccttagttctgtcatgttgttttccgtcgggggtcgaagttaggcttcctaaacagcatgagagggcggattcctctcagaatgagtgggtatgcctatactcatactggtttgagtcaaagattaggctgaggttacccattcctagactcattaaggaatttcttatacattattcgcttgctcctgcccagttactccctaatgtgt

SEQ ID NO: 142073 - DNA, 555 bp, Cannabis sativa
  modified_base (77)..(77): a, c, t, g, unknown or other
aattatatttacagaattcttacctgtagtctattgatataatcaatataagtagctcgccctccaattattagttnataattagagttggtcaaaatatcgtttttaccttctaattgtctcttgattccttgtgtaccattaattcaacgtgaatagttaatctataacttattattgatttggatccaactattagcacttccagaattaatactataagaaaactaatatttgatctgttaggaaagcttggattttactattgtatagcatgtttacaggcactcatgtttttaagctcccaaaatagaagttgtaagaatcatcttcccagagaaactttaatgagtgaatcaaagaacttaatgaacacaaacaagagttcatgtatattcaagatttaggatgatttactaatgatcatcattttggtatgataaactcttgacatagtaaagaataagttaatgaaagatgtttattacatatcggtccagttatgcatattctaattacacacagtacctttactacatgtccatctacatatgt

SEQ ID NO: 142074 - DNA, 666 bp, Cannabis sativa
  modified_base (620)..(621): a, c, t, g, unknown or other
ttcctgcaagtccactacgacacctgtaacaattagagtctcgtgatttgaaagggaaagagcaggagctgtacaatcccacatcggatggggaaggtcatgtgtgatgattctgaaactgtgtaggtatggactacataatggaagagagctcaaatggattgattgatactacctatatcaataaggtgcgtcatgtttttcggtagcccatcacgaaagaactccacagttaaacgtgcttgacctggggtaattttaagatgggtgaccttttgggaagttttcccaggaagtgtgcgagtgaggacaaagcacactagaaacactcgtgttggtttctagggtcagtcgtcattccatgaagtagccaaagtgacgtactcgtgtataagtgccatcattccatgggtgtaagatcctaatggaggctaagtggtgacgttacaaatggtatcagagccttgacccagtcagaagtgtgatcgacgaggacgtcggacccacgaagggggtgattgtgatagttagagtcccgggatccgaaggggaaagaccgggaggtgtagaatcccacatcgcctggagatggtcatgtgtgatgattctgagactatgtnngtatgggactacatagttgaagagagcttaaatggattgattggt

SEQ ID NO: 142075 - DNA, 525 bp, Cannabis sativa
taagaaccacttcaagatcttgataggttcaagatcactagacaataatggcttcaacacgattcgaggtagacaagttctcgagtacaaataattttggcctatggaggattaagatgaaagcactactagttcatcaaggaattcatcaggccatagacaaagaagaactaaaagaattgggtgaagacaagaagaaaatcaaggagatcgagatcaaagctcacagtgccatacttttgagcttgggagatgaagtactcagggaagtttcagatgaaggtactgcaatagggttatgggagaaacttgcttcaatttacttgaagaagtctttagcaaacaaactctatttgaagaagaaactgtacacattgaagattgatgatgccaagaacctcaaaaatcatcttgatgaattcaacagaatcattcttgatctcagcaacataggtgtcaagattgaagatgaggatcaagggatcctgctgttgagttccttgccaaaatgttatgaacattttg

SEQ ID NO: 142076 - DNA, 670 bp, Cannabis sativa
ctacttgaaattttaaattttagtatgaacaaagttgtatacacacatgaatgatacaattagttggatatatattgatatttcaggaacccctcatccataagaagtcaacacatactctagaagagttataaaaaatatatgatcatagataatatacggtgatattttaaaagtgataataataatcttatgagatatattatcaccaaaagaattatggatcatatgtgcatgagggggaaacatattcatattgtactctttttcccttagctcaggttttgttccactggattttcctgacaaggtttttaacgaggaaacttacaaataattatgaatatgaaatatatattgcacactttttttcttagctcgaattttgtcccactgagttttcctaacaaggtttttaacgaggtaactttaaatcatgttaacatagttgcactttatgaagcaagtataaaatgtgtgggagtgagatcattgacataatatattcgggaaacataaggattacactcaatagagaagtatcaacacatgcagttctctatgaagataatatatttgtatcgctcaactaaaaggagggtacattgaaggagatagaattaaaacacatttcaccaaatttttctttatacatttcaagagaatgtat

SEQ ID NO: 142077 - DNA, 1140 bp, Cannabis sativa
aaaataaactaaatcaagtaaatagtgagaatagaaagcttacccactacaagaaacctttggcaaagagagtgggaagcttggaacattgaaatggcgcaaaaatctcaagagatggagcaatgtggggctttgacctatagagagaagtatgagcttttaaaaattactttttctagtgggagaatgaaatgtgaaaagtgaagagagttttccctccattaggcttatatagcttatgtgggaccacttctttacttaccatgcaatgttcaactaaaaagcacgtagaagtacaatacagttaacttactctaacaaatgagatcagaaaatcaagacctgttatttcaaaaactaaatatgcagcaaaatttactcagttaaggctacatcactcccaactaagtggaaagtccctatctgcacagacatcagcatagggacttgggggaaaatgctatcctaattttcacccacctaacgtggcatgtatacatggccaatatcagcaccacatggaaataaagctcgccaaaaagaaggtcaagtcatctactcaacacttcaaccaacggggagtcctggcactcaaacaggacgtcgaatgacaaaccaactaccttaacgaggggtggccgaccctatggccaggataggtcggccagcttttggacagcacaaggtcggccagcatgcatcatgcaaatgcatggccagccaaacattggcctggcaggactttggtgcacaactttatacgtggacagcaagctagacttggaatttggccttacaacccacgaaaatagagggaaaatatctattttaagaagcattttagtcatttgtattttactaatttaatatgtaaatatttattttacctaattgaagggtttaagctctcctatataaagagccttaaccaaactctaaaatcctaagtgataagcctgaagtcataagtgagaggctcaaaaccttaagttctaagtctgatctcactctctcacacacacacgcccactgttgctcttctccactgatatttgtcaactctgattcctacattgtaaccttaagagagctactacagatcccacctatagtgatctgagtagcattatctctcggtat

SEQ ID NO: 142078 - DNA, 507 bp, Cannabis sativa
gctatatgtggccgcggcaaggatggtcagacaggtttaaaagggcaaagacattacacaatttcaaatacactctcattcaaaatccttaaccaccaccttcgaaaatacctccccaaatactttctttttcatctaatctcatccaaaaccctttttcttcaaatctaaccataaatcttcatcccaaatccttctaaaccattaatcctctcatcaatcactcattccctctcaaaattaaccccaaatccctaaaacctcaaccaaatttcaaaaacccctattcatcttcttctttctcaagagtttcaagttttcctacaatggaggttgaataaaagtggatgctcattgaggtaataattctaacactctctatacaatttttattggataatttgtggattgttggagaattttggaatttttgttagatttttgggatttttgctcaataaattgttcaatagagttgttgtaattaggatttggtttgtttgtgag

SEQ ID NO: 142079 - DNA, 955 bp, Cannabis sativa
  modified_base (900)..(901): a, c, t, g, unknown or other
gatcaaaataaaactcaatgatatatgatcaccttatttataaaatggtgactcgtgtgacttgctttgaaataaaatagaaaaaaaaagttacgatgatatttggttattgtaagtgttttgatattttttttaaaaaattgaacagtaattttgctaatcatttatattattaattattaaatttaataataaataattaaaaaaaaagtaatcaatgacttacaaaataaaaaaaaataaggaaactaattattttttttgaacatttactctacaagtaaagtttgttttaatattatttgaaatttttttaaaaatattttacattgatcaagggaggccatttagtaacaaactcttaaaattagattatatataataaaaattagaaaataatgcatatatactaattggggtgggcggccaaggccacccttggctgcaatgtacctccacccttgtatatatatatatatgtatatatacatttcatttacatgcatttgtttgtatattattgcttgaattttcttatttgtagttgatatatttatgtacacataactgatatgtatataatatatttttaattatttactgttcatatttaatttgtaaatgaataacattaacattctagcattcaactatttgtattaattgcatggtataaattattaaaattgaaaagtctcatgtgtcatttattaagaagctcaaagaataagattagacttaattgtattaatatatttttaaaaaataaaaatatattaaaaaattgagaaaaaattagaaaataaaaaagtgtgagaatagctcatataggccgccacatcatctatcctaacaataggattatatctatatatatattataattaattatcaaataanntattgtcatttattttattaatcaaagtttcccaattaataaatatgcccttta

SEQ ID NO: 142080 - DNA, 784 bp, Cannabis sativa
  modified_base (734)..(736): a, c, t, g, unknown or other
accagccagttgttcactgacctcaggaactagccagtacatgtaatgggccagcatctccttgcccttcttggcctctggaagcatcggcaaaggtggagtaggtggtcgcacctgttcaggatcactcctgactagttcagacccaacctttggtggcccagacctgtccaaacttcctccctgagactccttggacttagcagctttgggggtagaggggtttgcagcagttaactcatcggaaagatcaattacctccccaacaggcctattatatttagaagaggacccctcaccgcccttagacttcttggccggaggagaggcactagagcttccaccgattctcttcttcagagcctcaaacaatctgccgagacatgtctctacagaacgaaaaacaacatggttagaaaacagacatcagaaacataaggcatgaaagtcaagaagctcaaaaataagataaaatagtatgcaagatgacggctcaaacaagactcgaaagttcatcatcacctgacattgatcttatttcagacataacagctttccctttaccaaacacgtgaggggatggccgagcaggtgaaatgggctcccttatgcgaatggcatgttcaacaggcctgggcagggctggaagattcttcttccttttcagtggagtcacttgctcttcctcatccccatctttaggattcaagggctcctgagcatactgcttggcnnntgcacctcccttcaacttagctttgcgcttgagttgaatgagttcatt

SEQ ID NO: 142081 - DNA, 512 bp, Cannabis sativa
tttagttgttctactattgtttttaattgttctgttatgttgttttacggttattttaggttgttttataaaaagaaaatatttttgtaaaaaaatttgtgtagctgtaaaattgtaaacttttgtccaaaattcaatatttttgtaaaaattctttttaataataattgagagttaataccattttaaactcttcaatctttattaaaaccatggaataattaatatagcatcaattttgacgaaatttaccgacgttgttttagttgacactatatggatatgaaaaaattgtagccatagggatcctacaacgttggttatttcatatgaaagggtccctgtagttagaggtgagcataaaatctagaaaatcgaaaaaatccttcaaaccgacccactgaataccgttggttggaaccgaaaccgacaaaaccaaaaaccgaaaaaatcgctaacagttaaaatcgccattgaacggtcgattttttttggtaattgttgcccctgat

SEQ ID NO: 142082 - DNA, 761 bp, Cannabis sativa
aacttattatttcttaaaaaaaaatttaaaaaaaagtttctcactctcagtcatagtctcaatcgtttcattctcacgccaatcgatctcttcactcttcccctccattctcagtctcactcccaatcgcagatcgtcgaaaccaacagcccgacgtaccaaagcttcctttcaccgactcctccatttcactctcccaaactcaatcggcttatgatccagttcgagtgagaaggcgagcccaatcgttcagcacccaggtaagccactccttccatttttcccttatctaaaatttcagttaaaaatttgattttcctttttagaaaaaatctcgttcagtgattgggtgtgattacatatatatattttatataacccatttaaatcggcttacaatcccgtttgagcgagaaggcgagcccaatcgttcagcacccaggtaagccactccttccattcttctttcatctgaaatttcagttgaaagtttgattttctttttttagaaaaaatctcgttctgtgattgggtgtgattacatatatatatatttatatatctgtgtgtgtggcaccttcgatcaaaaagtatagaattttgatttgcaattttcgaatgattctcttattaactaatttgagcatttgggtattctttttgtgtatagcagttgttaatcttgagatacttggccagatgtcccagaaactgcaatttcctttatagaggacggtagaaaagtgccagctgcttaacgt

SEQ ID NO: 142083 - DNA, 618 bp, Cannabis sativa
tcaaggaagcacctcctttgctcaaatatctcctcggacctgattcaggccaaaaagggattaaattcagaaaaaatattagagcttacaactcaatgtttgcgtttacatcaatgggaggtcgaatcgataacttaatcaatcaatcacaaggttcgtatgtatttcggatgagcggtcaaaattatcaccacattggttcgttgttgccagaacatggaaaaaatccacagttcgctcagctctacatatatgatacagaaaatgagacagaaaatagaatcgccacaattcaaaaaaccaagccaacaactgagattgaacatgatattgtcaatcaattatctcaaatgttggatcaacataatagtttggtgaaatcctttagaatggcaagggatagattcaaagaacaaccagaatgtacgttccgtttacgacttttaagtactcgaacaaaagatggtcgtcaatacaacttgccaacagtatctgaagtagccggcttgatagtgggtgatttcaatgaagagaactgcgaacgggatgttattgtagagcaccgaactaacggacttcaaagaatcacagatttacatccaagttttatgcctatga

SEQ ID NO: 142084 - DNA, 554 bp, Cannabis sativa
actttgtcgtcaagaacattatctgtaggtttggaattcccatgaagatagtatccgataatggaacccaatttggtaatgacttgttcactgagttctgtgagaggaataaaattatcaaaagcttctcgtcagtatccaagccttaggaaaatggacaaatggaagccgttaataaaaccctaaagaatactatcaagaagaagctagatgctgccaaaggcagatgggttgatgagctacctaaggtgctctgggcccacaaaactaccaagaagacagctacgggacaaactcctttctcgctagcatttggctcgaaagcaatgctgcctgttgaagtgaacatatcgactaacagaagagagttttataatcaagaagaaaactaggaacttttaaaattgtccttggatctacgtgaggaaaaacgaactgagtcgcaaatcaccatcgcggcataccaacaccgagttacaagatatttcaacaaaaaagtcaagaaaagactattcattactggagacttggtgctaagacgagtctttacaaat

SEQ ID NO: 142085 - DNA, 1241 bp, Cannabis sativa
tatctgaaatggcccaatgaacctagggcttaacttgcccctttttccaaagcgcttaatgccctttaccagagaaactctcaagaaaacatgttcctctgcctgaaatgtattgtctctgcgtttcggatcagcaaaacttttatgattgctttgcgatgcaagcatccgtgccttgatcttatctatagcttcattggtcctttgaactaacttaggacccaaatacttcctttctatagtttcatcccaatggattggggaacgacacttcctaccatataacatctcatagggatccattcctatcgtactctggtagctattgttaatgttataggagaattctattaaaggtaagtatttactccatgaaccctcaaagtccatgacacaggctcgcagaaaatatgctaatatttgaatggttctttttgattgcccatcagtctgagggtgaaaagttgtactgaacttcagctttgtgcccatagttctctgaagacttacccagaatttaggtgtaaactttggatccttgtctgaaacaacggatttaggagttgcatacttgggaattaccaactccaattcgtacattgtaacctttagagagctacttcagatcccattactatagtaatctaaatcgtattatctctcgttattaatacaactaaagttcgactctataaaatcatgtgttcatttacttttattattctaattatgtaacatgtggcaagcattggcattacattcgactctgctgttggttggtcaaatctgaggtcaataatatggtactttcattgagagcgagtcaaactcaagtaatatgatcaaactctatagttaacacgagaagaattccaactacaacctctgcctcatcaggtctccttcaagaccctatgatggtagatcttggtgtcggtgttccaatcataactagaatttccacgaaccctatgacagtgaaatttggaatttttgagtttcaccgattttagaaattcctaagagatcagaaattgtattttttgtcataacttttcactcgggtgtccgttttggacattttatatactgttttgaagctttcaatgagccctacaatatggtgtatgttttagagccaaaatataatttttatgataatgtatttataccgcaggatttggtacaaaatcctagattgtcttatgtgaatattaagcagtgttttgggataaacactt

SEQ ID NO: 142086 - DNA, 1229 bp, Cannabis sativa
  modified_base (287)..(291): a, c, t, g, unknown or other
  modified_base (815)..(818): a, c, t, g, unknown or other
cccattaagagcatacccatatatgtatattaacaaatatatattatatgtatatgagatatgtaacgtatgtatttatgaatttaatattgatattatgtgcatgttacacatatgagatgttgttttgtaacatatatattatattagggtaaatagcagcataagtacccaatgtttgtaaaactgtaattttcttttagtgacaaaattgtaactagagattggtccttttagtgaccggccactctagtgaattttcgtccaatattttattcttttttaannnnnataattcaaacctaagccctagttgaaacattataaaaggaacatgatgctctcatctcatccaactaaactattgccttcaaccaaatcaaatctagttttcatactcagacgacgagtagatgagagacaccttctatagtgattcaaaccctccttcattgttattcatccaattcgcccatagtgatagattgccatgcccacacatagtaagtcaagtactcaatcatagtgcggaagatggtggtaaccaaacccgaaggagaaaaagagatccaagttcagatcttgataatgctcagcgatagaaaggaatcaagggctagagatctgaacaaaaagagtcataatattccactacaatcaatgtaaggttttataaactcttatatgtttgattttatcgtattaaagatattcatatttaggatgttagttcaacatatatggtagtaaatctagatcttggtaaaaaaaaatcctaacaattagcctcagagccaggttaatgatttactttnnnnaaatatggatttaaaatgatgattgtgttgatttggatgtgttcatgttgatttatatgtgatttgatgattgaatgtgacttatgatattttccatgaaaataatttatttggattccttttgaaaaattaagtaactttgctttttacagaactcgattctgataaaaaatgagagctatggtgatttgaaaatcggatgcatatggtgtcgagatggtgcaatctagtgactaatttatattttctaggtagtgaaaatattctagatagtgaaatctagtaactaatttatattttctaatatttaattaagtagaaaatatatatttaagttgaaaattgatttattaattaattttagatcaacttaaattaggacatttttcttagaattaataattaagttga

SEQ ID NO: 142087 - DNA, 798 bp, Cannabis sativa
tactttattctaatgaagatgtgaaaaattgtaatgtggttcctacaaattaattagcaaatataaaagatttctttattctaataacgtatttctacgtaagtcttcaccttctcagcgtatttcaatacgtccaaagttttgaaaatacgtacgtcaaggtctgtacacagtatgtcacttccaaatttggataatgcgtgacatgcggagcatatttgggttttatgagaacaaatgaaaaaacattttcaatttaaaaatctttttgggacatttttgcgtcttctgcttgcggttgttttaatatttgatatggtatttttctaggttttgaaagtagatcgtacaccgtactgatttaaccttatacagattgatgggaaaatattattaagataattattttcatgaaaaactaaaaaggtagttgtcagttatttcatatcgtacttagggttttttaaataaccgcaaagactctaacatgtattgtttaaaaattttattggaaagttgagaaaagcttatgttgactttgtgttgtattgggtatgtctttccaaccctaaactcaaatttcatttggaataatactttgaatattgaacctcctagaggcagagccttaacaacataatcaattaaatgaaaatatgtttggaacgtatttcaatgtacgtcagaagttggatctcccatatttcaatatgttcaagtttgaaaataacgtacatcaatatttgtatagagtacttcacatcgtaaatacaatatggtatcacttgtttactcaat

SEQ ID NO: 142088 - DNA, 2597 bp, Cannabis sativa
tttataatatgagtttgtatttttctagtatattagtatcatttttataattctttaagctatattttgtataataattagtattttgaataatgtataatgtgcaatattttaattttttgtttcactttaaataaattaatagaattcttatgttaagtattagaatcaatctttaggatgtatttgttaattcttataaaagtaggtcaaagaaagcatacctaattctactaatatttcagcagcataacaactataattgaatgtttccaaaaaatttaaagttattaataacaacaaaacataattgaaaataatataaaatactcacaacaacatttagcaatataaaaatttaccatccatccaatcgcagtacatgtattctcagaacctacttcactacggatgaatatttaagatattcaaactcgtctaacatgcatatatttctacccatcgatctgaccgcaatataatatatcgcaaaagctactaaattactagttagtaactaactatagtatactaaatataatttgtaactaactagtaactaatttactctaaaatactaactatataataatcggcgctcctcacgcatccatgatttatccataacaaaaattaacaaaaatcctaacaaccaagtttaagagaaacttatatcaaataattttaatctaattttactgaaattttggcaacataacggctataattgaacattcccaaaaaatataaagttattaataacaacaaaaaataatctaaaacaagataaaacaagtgatgataacttagatgatttctaatcatcattgcatttcccattaatattttaatttgggttttccgagtcaagtgtgttctaggataatagaattttagggttctagttctagaaacataattatcttaactttagtttaagtttgatgatacatctttggtatgttcaaaatttatgcgatattttattcgtccttagatattctaaaatattatttcaatataatttgtgagacttacgcatcaaatgcctcgagatttacgaaataaataactagtaactaagtatagaatactaaattactaactagtaactagtcctaattctaccgaaatttcaactgtataacgactataatagaaggttctccaaaaatttaaagttattaataacaacaaaatacaatctaaaacaatataaaacaatcacaacaacatttagcaatacaaaaatttaccacccatccgactgcagtatatgtattcgcaaaacttacttcactacagatgaatatataagatatttaaattcatctaacatgcatattattctacccatctgaccgcatcattatatatcacagaacctacttcactatggataaatatttaagatattcaaactctactaagtattcatgattaattaatgataaaagttagtaaatgtgtacctcgagctagctagaaactgatcaacactaaataagctcgatccttgcaaattgaccaagcaacactacaatgtaaaaaatactacaaaattagaaacttctttataattaatgagtaactagttactgatgagtaactagttactgatgagtaactagctagtaataaaaatacattaataggaatgaaataaattagtaacttgttaagtagttgtacttaactatttactagctactaaaaaaataaaaacacatgaataaaattaaaaatagaaaaaaataataaaaaaaatagaattaatttctaaactaatttttagaaattaatttatgaactttttgttttaatactctcctatgttattctcgttcacaatatttaacaaaactatttgtttaaaatattcaatatctacatatacaatacataaaaaatatacaatatgttatacctaaaattcggctgccatctcagtggagggcacgtgtcaatataaagggaatacggatcgatgaaatcgctttttatggaataactcattaattgcgtaaatatcatagtatttttgtaacctgctgattgtaaggtcttatgcgaggaatcaatatacaaaatgttacttagtatattagcaagaaaccatatgtcgctaagtgcgaatagcgaggcatcaagtacgttatagacgaaagcgacacatatcaactacggaagcacttagtgtataatgaacaaactaagtgcaacagtcgggttggctcgagacctagtaagtgaggtgcctatctcgctgtgcgaagacttccagtaacttcacctagttaacttcagacattttctcggtgaggcttacaatcctgacaagccagaagctaacatttaaacgagcctcgaagaactctttgtaaataagaatcgtgatcgccacaagacgtgtatcgttaacctcgaaaggaaaaatggccgagctcgctattgtgatcactggaaccaaggttctgtcgagacatccccacatacaacaattaaagacgtgtttaaatacacgatcgttttgacccagtaaaagcggaaaaatcacagctgtatgattttctaaataataaccacatttacactac

SEQ ID NO: 142089 - DNA, 627 bp, Cannabis sativa
gaggtagctaaagtaagagctgaggctactttagctaaagccgaaaaatacaagagtaaaagtgaagtaggaggaagtcaaaaagatgaattttctctcacaaaatgcatgcagatccttgaaggaattgaaggagttgatgatgatatttacatgaaagctgtcgagaagttcaaagattcggattggagagagatttttattaatatgtctactgctagaaagagggcttggctagataggctttgatattattatagtttgttatgctaagatgattattgatacttatttctttttatttttatatatatattattatagtttgttatgctatgatgatgttaattggtacctatttctttttttgaacaccggatgactttgttattaatttcaaacattatatgtcttttttatatatcttttttcttatatttttttcctaagttaattttttgcatgctaatatgattttcaggactaagaacaatcaaatagatgattctaggtctagttcatcttctacagatagcgatttcgatgacttttcagattttttgatgctataccttctaagtgattataatgagaagtttattgagaaaatccctcaacgaacatctg

SEQ ID NO: 142090 - DNA, 719 bp, Cannabis sativa
  modified_base (169)..(178): a, c, t, g, unknown or other
  modified_base (510)..(510): a, c, t, g, unknown or other
aagtatggtataattattttatgatttatataattttgttaatatggtacgtacaatttttttttaataatgttattttattttattttttatcgtaggtatttatgttttgcagtatagtatataatttttgttgtctataaaatatcatttatttaagatgatattnnnnnnnnnntttattatatataaattttttagtttgtatacatattttaacagtggtatatatataattttattagcataatatatatatatttgaatattaatttagtattgttataattttttgtcgtatataatttattactacggtatattaatttttagtgatacgatatatcaaatatattgttgtatatgtatttaatgatctaatatatttaattatttttgttacaatataataatatgcaatactaaaaaaattatacaacttaattaaatattacatatattttttttaaaaaaaaaataatatgtaataaatgtatttttataattttnattagctaatttattatatttagtatttttttttaatttttttttttaaatatttactaaatttctaaatttaaaatagagaaatgttattaaataaccctatttctaactttagtgatagttaatgtcttttttttaaaataattaaacaaatatcctattttactttttaatacctaaaatatatttcattatataaaaggtattat

SEQ ID NO: 142091 - DNA, 743 bp, Cannabis sativa
tagaaaactggtaaaacaatttttgattttcttattatttttgtactgtatagaaaaaaaaagttttttttcggggttcggcccagtggccgcggccagagatagcttggctgcggccatataagaattacagagaggcatttttgggtgcctatctggccgcgacgagggatagtgctgccgcggccatataagaattacagagagcacattttttcgtgctatctggccgcggcgagatgagtcacacgggatttaaaaggcaaaaattcaaaacatttcaaaacccaaccttttctcaaccctaaccacctccacgccgaaaacacctcctccacaccacttttcttcttgaaatcccatcctaaacccttttccttcaattctaaccataaatcttcatcccaaatcattctaaaccactattcccctcatcaatcactcttttcctctcaaaatgaaccccaaatccctaaaacctcacccaaatttcaaaaaccactattcatcttcttccttctcaagaacttgaagctttcctttaatggaggttgaataaaggtggattctcattgaggtaataattcaaagactctctatacaatttttgctggataattttaggattgttggagaattatggaatttttgttggatttttgggatttttgctcaataaattgttcaatagcgttgttgtgattaggatttggtttgtttgtgagtgggttaattcccgggaa

SEQ ID NO: 142092 - DNA, 743 bp, Cannabis sativa
catgaacatcaaacccacaataaagttgtatgtttcaacatacaccctatgcacagatgtccactcttcttacctcagttgttgagaacacttttttttttttgctactccaagcacctcaatgaattttctttttgagaaggagatcctaaacattcattaacacaacaatacactcaaaatacattcaagtatgaatctctgtactcatacagaaacttacgtaaaaatacgtaacacataagtcaatttcacttgcatgacacaccaaatacaatcattattcactataattcacaccaacacattgcatttacccatatgaacatttttaacgtaaaacataaattcatacaaatactttttacgtgaaactttactaaaatactatttattaacaaaatatacaattatgtaattatttaccaaaattagaagctagcatatttcttaatcatttatacagattataaaacatatccaatctgcttaaaaatatgtgtgaaataccacccatgattatgtataaatttatatgttaaaaatatataaaattctaaataattaaccaaaaatagcaaaacatctcaacatgatctcaaattaattccaaacattataattgtattttagtattatattgaaggttccccaaacagtgaacacaattttttttttacaatttattctatttaaaactcaattaaatagttaattagtcgctaataattataataaatacc

SEQ ID NO: 142093 - DNA, 1576 bp, Cannabis sativa
ctcgggatgctccttcaccagattcccgaggggcaatgttttgaaggtactgtgcttgggccaagcgatcccaggcctagtccttgggtggaacaattatttgctgttaagaagaatacttgggaaccttgtaatcacaagtatattctttatcagcgagaaggcccaccgattgcaagtgaacttcgctcaaaaggaagttgcatgatcggagatcgtaaggaggagttatcaggcgcctgtgcctactaaccctctcgggggtaagggtaggtctcgtcagaagagctgtcagaacaaacaaaatattagtcaaaaacttgaaaaaggaagattgatgtaaataagtaagaagagaacaatgacttacgaagtttgtaaaacgtggttgtaccaatgggggaaagaccaaatatctagaagaagctgtccttgaaagacactttatttggcaagtctacaataatttttggctcactagcatgagtaccaacatagtgaaagcccactggagcgttcttcctcgatggaatgccttaactgagtaaagatactcaatctctactggtgcgggacacccccaattcataattttgtacaagactttcaaactagcgagaatccagtaggagatgggagtcagctggaatggggcaaccccaatgtgatttatatagtctttgaagtagtcccaaagagggaggatggcccttgcactaatatgctcaaggctccaggcgcccatgctagttgaacaactagtactagtctcaccactggttcctgagttactcctggcaaagcgtgcagggggtagcaactgaattcaccctctcgtactgacctaacttggcatgattgcccaagttcaattttacaggtcttcaacatctcgcgtgtatagcctgagatagatcgcatcttcgattctatcaactcagcctcaaaggtgacgctgcgatcttggggagttttagacgtacgtggcttgggaggcataattttgaaatccaagtcacctggttcaaaggaaattgtgacgttgggtaaaaacaaaggtttttccacaggaataaaggatacgctgggtggttccggccaggctacctctcgtaagaatcggcattttccttcagatatttcttacaagaagcgcctgtagtgattagaaatatcttcttgttgggttctcactatgtgttccctaaccctagcatcatttagctctaatttggaggtgggttttgaggggttaagtttatatgggatggccgattctgtaggaaactcaactctaaaacttctggacaataaattcctgaactagtgtgggacattgctgccagcaaaaatcagtcccaatccttggagagaattttatcaaaccagaaggtaatgagttggagatcttaaaaaacctacatattgcttgaatcctagtatgaacagttttaaccctacaaaaactagaaaaaccagatgagatggtaacgatacaaacaaatcaagtaactgatccacactatgtaacaaacatgagaaagaagaaagcaacttaccgtttgaagttagggct

SEQ ID NO: 142094 - DNA, 839 bp, Cannabis sativa
tctcgtgatgtggtgtttgatgaaaagagttttccttatgctaactctgctgccagcttcaaactctcttcacagtttacacaccatgttcacacagaaaagtctcccactacacctattcaaacaccctgtcccatcattcctccaacttatcacaatatctctcccataaactcaggtgctactgcatctgctactcagcaagtgtcatctgacacttctcacactctaaattctgtctcccaaccaccaaaccatagtgtctctctaccaacaccatgtactcttagcagtacaccaaatgaaccaactaccagcacttcaggtgctccatctgtaccaactacttctctcaataccacaactgcacctgttacttcaactcacccaatgcaaactcggcttaagtctggcatcacaaaacctaaggcattgttggctgtttgtgaacccaaaacagtcaaagctgccttacttgaacctcattggaataatgccatgaattctgagtatgttgctcttaaaaggaataacacttgggttgttgttcctagacctgttgacagggttcccattggttgcaaatggttgttcagagtgaaactgaataaagatggatcattaagcaggtacaaggccagactagtggccaaaggatttagtcaaaaagctggttttgactatgaagagacatttagcccggtggtgaaggctgttaccataagagttttactcacagtggctgttacaaagggatggaaaataaggcaactcgatgtcaataatgcctttttaaatggtgatttgcatgaggagatatatatggaacagccacctgg

SEQ ID NO: 142095 - DNA, 702 bp, Cannabis sativa
gcagaaaatgaggttcaaaggatagttgatgcctctgaattcggtagaagcttattatcactccgatacttgaaaatactgatttgtgccaaacaattactacctatagttgaattaaacaaaagttctacaacatatttcttacttattaattaataagttgattataattattccactcgtgatgacggtgataggtataaaattcatattcttcaattagtggtaaataactttggataatactcaacataattgcaacaaattatcttactaattaattaggttgattataactaaatttgagacgaccgtgagaggaaagttcatattcttcaatcattgacaaataatttgttggacaatacttaacgcagttaccataaaaaaaatatataaaaattctgaaattaatgttgtaattaagtaatcatttcttatgagtatcagtttcaaattttcaatcaataacggatagatctataagacacacacgtacgtaaacacatactttacatgcaatacatttattaattttaaaatggattccattgtaaatatatttttcacgtatatgttatgtctttttattcttttttgtactgtagtaatacgtaactatcaaaatatatattttggtaatccaaaatatattagttatatatatacatttgttcttttttttttttttttttttttttt

SEQ ID NO: 142096 - DNA, 949 bp, Cannabis sativa
  modified_base (764)..(766): a, c, t, g, unknown or other
ctctctctctctctctcttctctcgaaaatcctagggcagctagggttggtgttcttcatctttttccctttgattctctactggttgtagtagtctcaagccaaggtataatctctttaactcctattcttgttttcttgaattttaagaaaatggtattttgcatgaattagagttttgtgttctgtagtggctattattgtttgggttagtttttgggagtttaaatatgtttagaaatggtgtttggagcatgattttagggttgttagtgagttttaaccgagttttgagtttagaactcaaacttggagctttaatggtgaaatttgattctgagctttgattgttgttctatcacttgaaaaatgtttatcggggtgtattatgaaggtttggaaagtttggttgggtttggaaacgatttggttagggtttggagctttttggtttttctgggtaaaaccggttaggttttacaagcattgtaaaaccggttacccggattttgcagcagggaaatccaaaaattcagcttgtcgtttcgcgtcagttttattccctgctagtttagggtattgccatattaagttgcagtagataggtttttggtttaaaacccatgtcccgggtgggatttagcgagtcacttattcgtattgttatcaatgtgatttaggagcgtttaattcgccgagaagttgttccactcaagttgaccagcacacctgaattcagtattgaggtaagattagtataatannntgcatatgttattacatgtttagtgtacatgtgtttaagcctgctagaatacattgatagcagtaatagtatacatagtgttgtgttgattactgataaatatatgttggctaaaatactgatcgatgttgtcacatcaatatggctagagtatgactagcatattgagtataggctgacatt

SEQ ID NO: 142097 - DNA, 628 bp, Cannabis sativa
ggttgtggtggttatacctccggcgaccgtttttagtggagaaaacattgtatctcaacgtctattaaggtataaatttaatttctactaattttagtaatgtacattgctttatttttcattctataattttttttaggatttttctatattattaaatatatatcgtgttgtattgaatatgtattgtttgtatatatattgtgaatgagaaatgtaatataggagattatatatgtatgtatttgtgttgtattgaatatgtactgtttgtatatatactgtgaatgagaaatgcgatatagtagagtattttatatattgtatatgtatatattgagtattttaaattaatagtttagttaaatattgtgaatgagatatgagagtattaaaataaaagtatagaaattaatttctaaaaaactagttttgaaacaaaagtttagaaattaactctattttgtatcatttttttttctatttttaattttattcctttgtttttatttttttagtagctagtaaatagttggtcacaactacttaacaagttactaattttcattcatattcatgtatttttattactaactagttactcattagtaactagttagtaataaat

SEQ ID NO: 142098 - DNA, 594 bp, Cannabis sativa
gggtgtgtgggaaatgattcaaagaatggaagataaattaaatggattacttgagaaggatgagcaatatcggagacagagaagtcgggctttgtggttgaaatggggggatagaaacactaaatatttccatcataaagcatcctcccgcagaaaaaagaatgaaattaaagggctgcaagatcatatgggtgtttggcaagatgacaaaggactggtatgcaagattgttgaagattattatacaaggttatttactagttctgagactaatgaggctatatttgaggaggtccttgaggtggtacaaccaaaggtgacttcggatatgaatgatgatttaatggttgcgcttacaggggaagacgttgttagagcagtgaaagatatgaatcctactaaagccccggggccggatggactccctgcacttttttaccaaaaattctggtctaagctaaaggaggatgttattgctgtatgtttgaatgtcttaaatcatggggctgatttgaaatgtcttaatgatacggtggttgcattgatcccgaaaattgataagccgcaaagaatagaggagtttaggcctattag

SEQ ID NO: 142099 - DNA, 594 bp, Cannabis sativa
aaaaaacatataccttacaaagttagttgcaataatagatagaaatatatatataataacaataaataaacataaaaatatatgtaatattttaataaaattatatgtcacgtcaacaaaagtacaatagaaaatagaacttaaatatcattttaaaaatatgatatactgtataacaaaaaatacatatatcattcaccaaaatatatatcctagcaataataaaaaaaaatatatattaaaatactatactatactaatcaaattatataccacaattaaaatatatattatgacaacaaaattatatgctgccattgtatataataaaataaaaactaattaaatattatttgaaataaataatatatcatacaattaaaatatataaaaataataatgaaatatatataacaagccaataaaattatatacctacattaaaatgtttgtattatacgaacaaaattatataccgctattatacatagtaaaataaaaaataaatatcatctaagaataataatatattatataacaaaacataaatatattgtacaacaaaatatatatatatcaacaactcacaacaac

SEQ ID NO: 142100 - DNA, 560 bp, Cannabis sativa
gtttattattgttatgttggctgattatatgtgacttatgcatgttttcttttatttcaaaagttagaaaaaatcaaagaaaaagcaaaacctctctttctctctttttttctctcattcggttttgagcagctgggattggggggaattctttgtgtgtttctagcaaaattcatcaaggtttttgtgatctctaagtgttggtaaggtatctatatctttccctcttgaatttgttgaaaatgatgaaaagatgagtgttgcatgttggttttgttgtgatacttgctgctgtatgttgttgttgatttctgtagttagaacttgatttcaaatgttgattcaagcatgatagggttggtgattagttggttttatcaagagatgaaaattttactcaaagctatggtttttcaaagtgaaaattgtgagttttgttgctgtgtttgttagggtcaatttcctgtgtttccagaggttatattatgcatgtttaagtaggtttgaactgatttgaatgcatgatagtgttgtttaatcaagtttgagtttggaactca

SEQ ID NO: 142101 - DNA, 1234 bp, Cannabis sativa
  modified_base (1100)..(1119): a, c, t, g, unknown or other
  modified_base (1162)..(1173): a, c, t, g, unknown or other
  modified_base (1199)..(1201): a, c, t, g, unknown or other
ggtaacgaggcttacaaccctggcgattcagaatggttctttgtaaataagaaccacgagcgacaccagacatacattgtcgaccttggaaagaagaatggccccagttcgctattgggatcactatagccaagtttatgtcgagacatctccaaatacaacaactaaagatgtgtttaatacacgattattttgacccagtaaaagtagaaaaatcacacctatacgattttcaaatcataaactgcatttacactacgcgatatgtaatcaaatcccacgattttagggataattgttgtaaacatattccggtcaactttgtaattaattgtccactatgtaattataaatagtgacaaacaagagcaaaaaatggacgaaaaactcatacaagagagttcttaaaaaaatcagaaatctgaataagattgactcgtggactatgcagatttttaactgcaaaatcacgtaaaaaaccccgtgttcagatattatttttctatagcttttattttttttttgtgtaatcaatatcgtgaggctcaattttagttaatgaaaatctgcgttaacactagcctcacattaggatggagctctagttggctagttgtccctcctggaaaggtagtttcggataatcgactctagtagactatatcctatctggaagcatcttcagcaagtgtccttggtatgtgagttcggaagcttttatatgctccaggaggctctgatactatagctgacgtggaaacttcgctcaaaagagaagttggttaagttagtcattgctaactaacttaacaaccttgcagccaccgactttaggatcttgattctaagtccttaaataccaccttcacttatccttttagaggtactggatacacgagtttaagaactcatagagatgagattgagaggatgaaagataaaagattgagaggtacagagaaaagaaagagattgggtttgggttttgtaagaagaatcttctatatatgaaaaagattctagggtgtaagtgtaagagttgaaacacttagtgaggactcaacagattgtttggtttgcgccctaaataaaacccattnnnnnnnnnnnnnnnnnnnnaattaataaaagatcaaaaattatattttatgttgcatggttnnnnnnnnnnnnttcatgattatgtttaatgtataaannntattaagtccagaatatatataaatatatattt

SEQ ID NO: 142102 - DNA, 632 bp, Cannabis sativa
aagtgaaataagttgaaagattttctagaaaaaaaatggctacactcgttgaaaaattaaatatttaaagtagctcgcaacttcttcctttttctcagaatctaccaaagcgcctatagtgtgcatcagacgatgtgtcgtcatcaggtacataacaactatattttcgagttgttttgtaacttagtgcttgttctaattggtcgtataatctttttatttgtgttcataaactttcaataaaatattttgtgatagccatggagttagtggataattttcaaatattaaaaggagtatttaaactctataaaaagtggtcactttctttttagagtgttctcatagtgttgtatagggaataatttgttgttgggcaaagtcgtctgagacttgtctaggccttgcaaatcctttgaatattgaagcctttacgcatatattctccttcgaaaaagtcaaccacaacttcacaatagttttacctcagaatattttagtaagtagtatttaaacaaacttttcttaaggtgcaaatattgaatcaaatcaagtacactatattgagaaaatgtctttataataagattatgtatttcaatatatatttgagttaatcttaaagttagcat

SEQ ID NO: 142103 - DNA, 1938 bp, Cannabis sativa
  modified_base (27)..(27): a, c, t, g, unknown or other
  modified_base (933)..(937): a, c, t, g, unknown or other
  modified_base (984)..(995): a, c, t, g, unknown or other
aacataaataactgctaatttccaaantaactaagcgggctttacacccactttatcttctttggaggacccactgatgggccttggatgatgatatgtgctatactcgaaattcgactggaggacacgtgtcaagataaagggaatgtgaatcgatgcaatagctttttatggaataactcattaattacgtaagtatcagagtatatttgtagtccgctgaccgtaaggtcttagacgaggaatcaaatgtacaaactggaacttagtatattaatgagaaaccatatgtcactaaacatgaatagcaagacatcaaggatagaacacattggaagatgaaaggggcacatatcaaccgtgaaagtccttagcatgcaatgaacaaactaagtataaaagttggatcggagcgaggtgactgtctcgttatgggaagactgcatataacatcttcccgttagcgtcagcgaggcttataatcttggtgagccataatatagcatttaagtgagcctcgaagaattctttgagaataagaaccacgatcaacatcagacatacatcgtcgacctcggaaggaaaaatggctccagctcgctattgggatcactgtaaccaagttgctatcgagacatctccacatacaacaataaaagatgtgtttaatacacgattgttttgatccaataaaagcaggaaaatcacagctatacaattttcaaatcataaactgcgtctacaatacgtgatatgtaatcaaatctcatgattttagggataattgttgtaaatatattatagtcaactttataatttacagacccctatgtaattataaatagtggtagacaagctcaaaaaagggaggaaaaatctcatacaagagaggcccaaagaaaaaacacaatcaaaaatctgaataagattgannnnnggactatgcagaattttaactacaaaaccacgtaaaaagccttgtgnnnnnnnnnnnnttttctatagcttttattttttttatgtgaaatcattactgtggggctcaaatttagttaacaaaaatctgtgttaacatttcggtgctttcattgagagcctctgtgaaaaaggtgagaaaaaaccctcccttcttttgaagaaaaacaacctccttcatggctgaaaatttagaaaatgttaacaccccacatgagaaaaccaatcatcgttctgggaaagagcccatgggctttaaaaggaccactcattctaggagggctcaacctgagggtagtcccagagcacggaccgcacgttctcggagaactcgacccgacgttggtcctagtacgcggacaacacactcgaggagaactcaacgtgggaatggtcagaaccccgggacgagggatgaagagtttaatcattgaggtgcccaatctgtgggagaaagaacttatgaaacaaaaagccgtcacttgagatatctcctggaagaggcacaatgtcgaaacactaggttagaacgtgaggcagcctcggccagggcggcataggggacaaatactcaaaatcaacctgagcctggagtgagaagacaggaaaagacctaggaagaacaacccagggaaaatgagacaccccctgaaaatcaagacgaacagccagatgggagacaaccggaaactgatgaacgagaaatcccgcatgaaaatgaggaggatcttggtactcaaccggaagaacggagatcaccttctagaaatcactaatgttcttcccaaaccaatagagtgaggactcgtacatacccttctgggggaaatacgataaaccgctcttgggaggaaggaactgttgggttttgtgccctaaataaaacccattgcaatctgattagttatcaatttaagagatttgacgtgatttatgttaacatgtattttacatgcttatggt

SEQ ID NO: 142104 - DNA, 681 bp, Cannabis sativa
atttgtcattctctaaaacacatgattcaaaaacaaaagcattaccttcattcgaattgtttagaattctgggacatcgttctttctgatgccccttctcattacgatttgaacattgaagagtactactatcaattgtttcaggatttgtacttgaagaagtagcattgttagaagcttcatacttaatccttttccgcttacttaggtctacaaaactggaaggtggcctccttgtaggtaagctccgttcataagcacgcaattctgcttctagcttgtctatgtcggatgagttaaaattgttgatcatataagatacaacaaatccattatactcaagaggaagactattaagaatgaattgaaccgattgttctctagataaatcaattcccagcaaatttgctttctggaacttcagattcatcatcaataagtgtgaattaatgctcttaccaagaagcattttcacactacagagttcatttgcaaaggcatttactaggagagggtcggggtgtgggttgtccattttgacactacaaatatcaataagcagaaataaatcatttggttctgtaaattcatgcacaagtttagaaaataacaagtatagcaaatatatttgtaaaaataccaaaataaaacatatttaatattttccaaggttttcaacaa

SEQ ID NO: 142105 - DNA, 760 bp, Cannabis sativa
gggcataaaacccaacaatcctgccccaactccactgcccatttgagaaaccttccaaaggcatcaagtttttgcagtacctggcgtaatggttggtcagtgtacacccaaacacgatgagcctgaaagtaaggccttagctttcttactgctaagattaggcaataagtgagattttctatcaatgggtatcgccccttgacttcaatgagtcttttcttgatgtagtagaccagatgttggatattgttctcgtctttgatcaatacgacacttacagcatgttctgtgacagctaggtatatccctaattcttctccgtctagaggttttaagagtgtggggggttttgcgagttgcctttttagctcttgaaaggcgttctcgccttcctttgtccactcaaattttttgtttcctcgcaagatgttgaagaatggaacacacttgtctgttgactttgaaacaaatctactgagtgcgacaatctgacaaggtaaactttagacttctttggtttttgtaagcgatttcatatccaggagggcttgaattttttctaaattggcttcaataccttgggcgttaacaataaagcccaaaaacttacccgagctaactccaaaggaacactttaggggattgagttttatgttgtatttcctaaagactttgaagcattcgtcaaggtcatctatatgccccccagccttcatggatttgacgagcatttcatccatatatacttccatatttcgtc

SEQ ID NO: 142106 - DNA, 648 bp, Cannabis sativa
attctgcttgcttttagaaatacgagttttgaaattacctgtaagagttcgaccccaagaatccaaagcaataccacaagcttgattctttcagcaagagaaagacgttgattattgttccagcagtcttctactaacttggagcaaaggggctcacagctccaacagttttcatactgaaaatggtatgtttttttagacatccatggaggtttcggttcaaggaagatcggagtgtgatcggatgaagagaagtctccattggtaagagtagcttggggaaaagattgaagccaaagatgggaaacaagagctttatcgagccgaatttccacacttgatgaagttcctttgctgcgttcccaagtaaaagggtatcctctaagatcaagatcaattaaatcacagctttgaaggacatcttggaaaccggcaataagagaggggggataagggcggccacctttcttctcggcttgcttggcttcctatgttgtttgttgagagagatcaccaattaaacaccaaggaagctgagaaaaaatagcaaggtcatgaatgagcttccaagtattgaaccgcaagcttcggtttggttcaccgtagatgcccgtaagacgccatggaatcgtattgtgcattacgatt

SEQ ID NO: 142107 - DNA, 572 bp, Cannabis sativa
  modified_base (530)..(547): a, c, t, g, unknown or other
ctatgctagttagggtgttatagctttccatcctcagactggtggacagtccgaaaggaaaattcaaatactagaagacatgttgcgagcctgtgtatggatttcgagagctcctagagcaagcacctgccactgatcgagttttattacaacaacagttatccgagtactataggaatggctccctatagttgttgtatggcagaaagtatagatctcctattcacttggatgaaatgggagaaaagaaatacctagttccagaatcagtgcaacggactaatgaagccatagaaaagatcaaggccaaaatgcttgcctctcatagtaggcaaaagagttatgcaaatccgaagcgcaaaaatgtagaaatccaaataggagatcatgtattgctacaggtgtctccaatgaaagggatttgacgttttgagaaaaaaggcaagtcatgccctaggttacagggccttttgagattctcagaaaagttggactagtggcatatcgtcttgttgggttttatgccctannnnnnnnnnnnnnnnnnataattagatttacttattaatata

SEQ ID NO: 142108 - DNA, 695 bp, Cannabis sativa
gacgggtcctgttgagtcgtcgtctccaaatatggacgggtctagttgagttgttgttcagataagtgtatatatttttaactccatttgaggttttgatgaaggttgaaattattcagttgttgaatgttggaagatagatgatgtttatggaaaccatagctaacaggagaagaagattcggatgtgaaacctttgtttattcggatgaggtttgatgaaggttcatcatgatgggtttcaactcgaaaaagctgtaagatttgaagaagagagtcattgtaatattttttttttgaagaacaagatctgtaatattgatattattacaattttttgtttagagattatgatattaatttagaaattaagttgtaataatgatgattattatttattttgaattgtattttttttgactaatattgtatatattgtgaattataaaaatatattaattttatttattttaatttatattattttaatttttgatgaaaataaatattataatacatatttaatatttaaaaaatatatatcaaaaactaatttaatttcatttatataatatttttaccaacaattataaactgtcatataaagtaatttttctcaacagttgtaaactgtcatttaaagtgactttttgcaacagttataagctgtcttttaaagttccgtatttttatgac

SEQ ID NO: 142109 - DNA, 686 bp, Cannabis sativa
  modified_base (613)..(614): a, c, t, g, unknown or other
atccaagttctgaggcccaagttttggtcctagtttggggtcccaatttcggggtttgggtcccccatctatgtccaggtcctaggtcccgatccgggtccatgtttgtgtttcggttcaggttatggtcttgagtccctgtctgagttcaggtcccagtttgcgtttgggtcccactactagtgtgggttcgagtttcagatcccaggtccgagtctggttcttatgtcctgcgtccagccccagtttttgggtctgggtctgagtttcgctctgggtcccggtctttgtttaggtccaaagtgacaggtcgcgatccaagtcctagtctcggtatgggttctagtctgagtttggtttaggtttgggtcctgctacttcccaggtctgggttctagtcctagacctggtctgattcctattctgagtccgagattgtgtttggatcccattctgggtccaggtccgtgtctgggtacagatccgggtccgggtcttggattcaaacacttactaagggtttggccgaaacctcaggtctagattcggatctcggtcttattccagtttaggtctaaggacttgggccgcgtcatatgaatgtatttaggtnnaggtttggggttgtgtcccggtacttaggtcttgcgtttcgggtccaaggttgtgtcccgtgtctcgagtct

SEQ ID NO: 142110 - DNA, 563 bp, Cannabis sativa
acctcggggtatggaaaagagtctgccagcaagaagtggacacaacaaatgattgataagctcgcgaaattgaaaaagactcatctcaaagagatgcaacgctttattgttatagggggacactttattaccgatcatcagatggggtattagcaagatgtttagaccaagaggaaatctctacacagatggaagaaattcataacgctgtctgtggagtcgaaggccccaaattgtcaagaagattacgaagggccggttatttttggctagaaatggaagaagatgctacgaatttgcaaaaagattgtccgcaatgtcaactcttatttaataaccatgaggcaattttaataaccaaagattacgattggaggagaccatataaagaatatttacgagacaaaatagcaccatgtgataagaaaaaaaaaaagaaaagctacttagacacataagtagttatttcttgaaaaaagtgttgggttttgtgccctaaataaaaccgtttacaatctgattagttatcaatataagaaatttaaagtgatttatgtttgcat

SEQ ID NO: 142111 - DNA, 790 bp, Cannabis sativa
attattttattcatataaatttttatttataaaaaaatttaccacacttaaaatttaatttgtgccttaagtagaagtgtagtaatatttccaatttgaataatattagtagaaatttgaataataaagtactttttgttttattttaatattttattatagataattttcgacataagaaaaaaatcgttttaaattttagtattgcatataaatatgtactacaaaaattttatttgatactaaattaaaatttggcccccctagcatttaagtcctggctccgcccctgctcctatggtatggttactggttagagctgctctctccaaataattaattggtagttttgaatctcatgaactggaggctttagcattgtttaatggattaaaatatgatttccaactttaactacctttaaatcacattgaaccagatgctcttcgggtgaagaatgccttatgcaaatattcagctgcaatttcttcctttcaagatttaattgtagatatttttagtcttttgtctttttttcttaatatgaatgtatcttatatcaattgtacagctaatatggttgttcatgatctgataaaattaatattaaggataaatgaagattattatttgttggattgtattcctttatctataaacgttattgtggtaaatgacttattcctttagagtctgtttagaaacaactgtgtaattactatgcagtgtaattactaccctaataattacactgtatagtaattacattgtattttaaaatacaaggtgt

SEQ ID NO: 142112 - DNA, 621 bp, Cannabis sativa
agcagaaatagcattcaagtgagcctcgaagaattctttcaaaataagaaccgcgatcgaagccagacatacatcgtcgaactcggaaggaagaacggtcccaactcgctattgagatcactggaaccaagtttctgtcaagacgtctctagatacaacagttaaagacgtgtttaatacacgatttttttgatccagtaaaagcgagaaaatcacagcaatatgattttcaaatcataaactgtatttacattaggtgatatgtaattaaatcccacaattttagggatgattattgtaaacatattccggtcaactttgtaattaattgtccactatgtaattataaatagtgacaatcaagatcaaaaaggtacgaaaaaactcatacaagagagttcctaaaaaaataagcagaaatctgaataagattgactcgtggactatgtagaattttaactgcaaaaccacgtaaaataaccatgtgttcatattttcatttttatagctttttatttttttagtgtgaaatcaatattgtgaggcttaaatttagttaacaaaaatctgcgttaacacttacgtcttgggaacatggtagttcaattgaatgggagcgtt

SEQ ID NO: 142113 - DNA, 613 bp, Cannabis sativa
accattctttcttcttgactaggagaatcaagctagaataagggctagtacttggttgaataatgcctaccgttaacattcccttcactaatttttcaacttcatctttaatactataaggataaggatagggtcgaacactcaccggagatgcatctggccgaagaggaatggcatgatcatggcttcttggcggaggaagagatgccgttgtattgaacacccttgaatatcgttgtaatactttgttgacagccgcaaaatgtttcgcttccacatgacaaactgacacacaacccaattccacccatactccttgtttctcatgttgtagcaaacgaatcatacttttcagcgaaacccgggccttatggagtagaggatcgcccctcaagatgattggttgacccccacctttagcttcatggtatggtccttccaatggtgagtagtctcccctaaggtcttaagccattgcacaccaagtataacatccgtactaacaacctgcagtggaagaaagtcttcaacaatttccaactcctgtagcatcagtgataccgctcgacaaatcccttcccctctgactgcttgcccacttcccatttgtacc

SEQ ID NO: 142114 - DNA, 753 bp, Cannabis sativa
gcaaacactcgggcaggagcgggtgtatcatccttcttttgctctagctgtagcagttgtagacaattcctcttcatgtgacccactaccccacattggaaacaggccctagcctgacactcgctctggtgacgccttttacacctcgggcattcagggaaagtttgccaattttcgttcccacctcgatggaaaccttggttaccctggaaccttttgtttgggcctacagttgatgattcactaggtctttccttgcagtcaccgagatcagtacccctaccagaaccagcacctgatgttttcttccatgaatctcttctggcaatatttttctttcgtatctgatcttttgcaccctcagaaactagggccagttcaactatctgggcataagttcgagcaacccccggttgtttagaagcaacaatcacatcccgtgcgatatgttcatccaaccatcgaatgaactttgctttcctagcagcttcagtagccacctcatctgaagcaaattttgccaatcgatcaaacttagtgacatactctgtcacaatcatgctgccctgagtcaatcgtataaactcttctgcctttgctgcccgaatagactcattataatccttctcataaaataaggcccagaagacttcccaggtcatgttattcaaaacatgaccctgagacacaatctcccaccaaatacgggcatcatctcgcaacatataagtagcacacctgactcggtcatta

SEQ ID NO: 142115 - DNA, 767 bp, Cannabis sativa
acatacaatttttatttctccttcttacaatttgttattttttttatttgtttatttaatttattattggagagatagaataataataacttgttttattttattgtatatgctatgtgaaaataatttatattttaataataattaaataatttgatattaattaaaaagtaattattggaactgtcagatgaagaggatgaacaagttgcagacaagctagggagaaggatgtctgaatcgcattctggtcttcaagatgtgtttcaacctccacaagtgaagtttcatgcttacgcagattcagactgggcagcttgtcctgatacgaaaaagatctataataagtttctgcatctttattgacacatctatcatctcatggaagagcaagaaactacacactatttcaagatcttctgtagaggcagaatacagagcatgactaacactacttgttaaattgtttggcttctttccattcttaaagaattgaaggttgagcatgaagggcctgcattgctatattgtgacaaaaaatctgctcaacttatagctgcaaatcatgttttccatgaaagaactaaacatgcactttaaaatagactatcatttggtaagagaaaaatgtgcaacaaggtcttatcaaaatagttcatgtttttgcaagagatcaactagctgatatcctaactaagtcacttcttcctaaccaatttaataccttcaaagacaagatgggtttgaaagatatctatactccatct

SEQ ID NO: 142116 - DNA, 537 bp, Cannabis sativa
ttatactgaatacaaatataaataactttttttcttataaaatgaaatgaactaccattaaaccatcaaatggaataacatctacaaatcagacaacactaaaaaaaaatgaatagttaaaataattgatttttcttttaaaaaattcttgtacaatgtgaatacactatataattgaatggttgtgtagagtggatatatagctcgtagaccctcgtattaataaaatttaaattgtttaaattgaactctctcaaaaaaaaaattgtttaaattgaatttgcatagctgtattacatttgtttctttaaattctcattttgtataataaattctctttattttattataaattattagtttcaggcttgccaaagccaatattcacatattaaggcttaagcataaaataaataaaatagtatttttatgtgtacggtgtaatctgtaagggaaatttcaatttttgaccctaataaaataccccatttcaaaatatataccctccactaatttatacaaattgattccactatt

SEQ ID NO: 142117 - DNA, 631 bp, Cannabis sativa
atcactatttatagggctgtgaagttggagaggaagtgtttcccctctcgttataatggatataagaagaaggattaaacgatccctacagtatacattgatggtgggatatatgcagaatacattgatcatgggataaatgcagaatacactgatcgtgggatcgtgggtatgccatatctctataatatgatccccaagttatagggatttcgttgatgagtcacaatacgaaatctgaatttgctaagtgttggtttctctatgcggattgttgaaagctttgctctaggtatgccagcgaggcatcctgctcgaattgttccctccgagcgaatactccaagtggattccatgtatcaccattatgcgatgccacgtccgagtacaaaaattggcataacatttgcccccaagtctatacgggacttctgaagttgcatgtagacttcaaccgagctgcttctgcctttggatggggacacgtgtcaagcgcggctgttcgagactcgatgtgaggctgactgtgcatctctatagtatgatccccaagttatatggatttcgttgatgagtcagaatgctctaacaattaatatttcaaaatctaattttctctcaccacggctga

SEQ ID NO: 142118 - DNA, 665 bp, Cannabis sativa
  modified_base (97)..(98): a, c, t, g, unknown or other
aatgtaaggcttactaaactttatatgtgtttatttgattgttttagaattcatattaggttgttaataaagcatacatggtagtaaatctagatcnnggtaaaatatttccaacacgatcctcacaagggatccttgagggtatagatcttgtgagcgatcttaaaggtcctcctcaggctgatgaagaattccagaggaagattggcatggtttcaagtggatttgggaaggaagttggcgtggtttctcgagaatccagccaacccaaggcccaaaccagcgccagaagacttttgcgcccacctctttctggtatcaaggaaattcttgaggctggtaaaaagatctctgcttcagaaaatggtacttctgatgatgaggggaatgaggtttgtgcagagatcaaggctctctacatgtagctggtctttctcaagctatgtgtagtcggtctttctctgagctacgtgtagatggtctgtcttttttaagcaagctatgtgtgtgcagagacagtctttctcgagttcatcggcttcctctctcatccttggtttaagaagatgacttaatggtttgcccctagtgggatttttgtaaagacaaagttgttactagttttaggtttttccttatcttaaatgccttgtactattatcatt

SEQ ID NO: 142119 - DNA, 1292 bp, Cannabis sativa
agttacatgccacctggaagtttttttggtccccaaaatagttgaatcttaatctttgatgaaaatagagaatatcccaatataatttttagaaaaacttttcgtaactggcccaggttaacaaaatgtcaacctgggtgctgcccccttattctggcacccaagatgggctgtttcttcctcaaaagcacttatttcccaatttttaatgaagacgagaaagattcacgagtcatattttctatatgatgcttagaagttgtccatgttgaaaaattatcaacctgggcaccgggtgctctggatgttcataaatgaaagttctctgaatttgattttgatgcctcaaatattttcatggtatgtcttgttcatggggttgtcaaccttggcactgggtgaaaccctaggtgcccaggttgatttttgagtgttgattcatatatttttagctcccgtggcctagtcttggttgcttcatgtcatcatggtaaaaaaaatactaaaatatagagagttggaaatgacttattggaatccaaacactcaatttggagttcctagagtcaacttggggacaaggctagggactcctcccaggtcgaccactatgacgtaggagtactcaactctgagatgtcacatttcttgccacgtgtcaaacattgatgtctgtatcaccagggaaagtttccaggttagcattttccccccaagtcaacttcacacttgtgtcgggctaagggattttaattctctgtacaactacttgtcgcagcctcatgtatgaataacgaattttctgatatatatatataaattattcaatattaaagattaataatttaacattcatacatctatcaaaatattcaactcttattaataattataaatgtccttacatgatttttagggcataaaccctaacaatctcccatttttcctaaaagcaaattgggcatctcccttagtcccatgttagttatatgacccataaaagatttcactggtagcgtctttgtgaatggatctgccaagttatgttctgatgcaaccttcaagaccatcacatcacctctctctactatatctcttagtagatggtactttctctcaatatgtttgcctctcttgtggcttctttgttcctgtagagtttgtcactgctccactattttcagagtacatcactatgggcccgtttggtacgcaggattggagtaaaaaggattggactggactggacaagattggattatgctgaaagtaatcctgtgtttggtttaaga

SEQ ID NO: 142120 - DNA, 509 bp, Cannabis sativa
tatcataagaacttttaaaatctcataaaaagtgtaatttcctcttctttttttcatcaagcgtccctttctccatatcatataaatatatatatatatatattaggggaaataaatacaaaaacattacttaaagagcaagctggactcagaattaaaattaagagaggtatatttttttttaagtaatttgcagtaaaagtccttaacaagttcactttgttacaaattagtcctcaagctcgagaaatggcgacaatagtccttaaggtcacactctttataagtttgatagtcctaaatttaactgctctgttaacttattcaaaagtaccacgtgctgaagtcttattggtccaaataataattttaattaaaaaataatttaaattaaaaaaataaaaataaataatgtattctgaaatcataaaaactattattattattccccttcttctccttcctccagcaacacccaatcccaactcttcatctctctctctctctct

SEQ ID NO: 142121 - DNA, 535 bp, Cannabis sativa
gaaaagtctattggaggattgtcccctcacatatggactaatcataaaaatggcttcatcccaagatattaatgttttattactaattattattataatttgagcaatataagatgagtaatgttgccacatcacttcacttttagagtgttctatttgaaagtaattgtgtaattattagttaattaattacaccctttttttttaaaaaaaaaaaatacaatcaaaatgcatttagatatgaaataataataatttcatttactcaatcaattgaatagaaatagcaactatagatcattgatttgaaggtaataaaataaacaaaacaaaggccataaatttacatttttattttataatcctacctactattaatcatcggccaagtggtagaaatataaataaaatatatatttgggtagattagaattttattcataagtaagcaataatatcatttgattaaaaaatcctaaattcttagaagcataaatttatcaaatcaaatatatttaaagggtaaataccattt

SEQ ID NO: 142122 - DNA, 547 bp, Cannabis sativa
tgtagtatatttattacataaaatgatcatatatttggttaataaaaatctgcgttaacaaccctcttcaagggtagttatattactaatagaataatattgtaaggttaaaccctcaaaataaataaggtaatgtttcacattaccattctcttgctaatattaacccattccaaatagttacttaatatttggagagaaaaccaaaaacttaaaaaaatttattaattgatcagtataactagaaacaatatttttgatagtggcacaaaattggggagaaacaatattaaaaaagatactatcatcaacagatagtaaataaatgtgtaatatcaacatggatagaaaaattaattgatatattacatggagagcaatttgagtactaaagaaagatgaatgagagggaatttgttttacttaattttatttttgtttgtttacaaattttttttcttcacgtgtttctttttagaggtttgtttattagtatatcatatatatatatttaaatatatagattattgaatttatatataataat

SEQ ID NO: 142123 - DNA, 719 bp, Cannabis sativa
  modified_base (328)..(335): a, c, t, g, unknown or other
ttttagaccaacttaaattaggatgattttcttagaacttaaatagaattaataattaagttggttttattcaagatacttaattatttatttctatttcattaaattaaattatattagaaatatatttaagttgagaattaatttgttaattaattttggaccaacttaaattgaaatattttcatagatattaaattaaaattaataattaagttgattttattcaagatacttaattatttctattttaatgaatttaattaaattagaaaatcatatttaagctagaaatttttcaacttcagatcaacttaaattagaatannnnnnnnaatatattttattttattttaatagtcattttatttttgagaattttgaattacattattttaaaatgttgatatttcgatattattcattttgaaaattaggttaatgtaaaaattattttaattaactttagatcaacttaaatcaagtaattttcattaatgattttatttaaataaaatgactaaaatatattacacttagtttgtatatcatgcaatatacgctaactatttttgtcgttatcatttctcttccacgcgacgaggttgaagcctcgtcattcacacttgcacgtacatgatttctcgtcgatacatgagttagcagttcgtacatttctgtctcgcagaagactgttcagctagccgagttataaacat

SEQ ID NO: 142124 - DNA, 1178 bp, Cannabis sativa
  modified_base (654)..(661): a, c, t, g, unknown or other
  modified_base (1121)..(1133): a, c, t, g, unknown or other
attggtcggaagctcctcaaccctggaatccatcatttccaactccggttgaggctgaagtctgtaggaacaaatattaaatggttggtacatttgtgtattatgagtctggaaggataaactttagaactcagaagagatattttggtaggaatgaagtaatccattgtgaaaatggatttcactacagaagccagaggtttatgaaaaatgacaagcttgagccgcccttttatacacgaagtttattgacaagaaagccaaagattgagaaatctaacggttgggaattgtgcaaattatgaataggcggttcataataacttttgaaactgtacaactgtcagaatcaaaggaggcgccattccaagaaaggattttggcaaaaatgccctctataattattaaaaagctctttttactaaaaaaaagaactttttaaggggcaattgttatacccgaaatttagctggaggacacatgtcaagataaaaggaatgtaaatcggtgcaatatctttttatggaataactcattaaatgcgtaagtatcagagtatatttgtaacccgctgactgtaaggtcttaggtgaggaatcaatgtacgaactggcacttagtgtattaatgagaaaccatatgtcgctgaaggannnnnnnnaggcaccggagaaaagtaacacataccttagcttagaataagcaaactaagtgtaaaagtcggatcggctccaagaacaagaatgcgagatgaccatctcgctacgagaaaacttcctatagtttcatccaactaacatgagcgaggctcatagccctggcaagtcagaagatttctgtatacccgcgatcaaggtaagacatatcttgtcgacctcggaaagaagaatggttccagctcgccattgggatcactacaatcaagtttttgtcaagacatctccagattcaacaattaaagacatgtttaatacacgatatttttgacccagtaaaagtgggaaaatcacagctatatgattttcaaaattatacaccatatttacattttgtgatatgtaatcagaccccacgattttaggaaaaattgactgtaatcatattttggtcagctttgtaannnnnnnnnnnnntgcaattataaatagtggcaaacaatctcaaaaaagggacgaaaa

SEQ ID NO: 142125 - DNA, 806 bp, Cannabis sativa
  modified_base (177)..(177): a, c, t, g, unknown or other
  modified_base (222)..(232): a, c, t, g, unknown or other
aattgagactaaaattccaaatctatagtggcgcaaggaagaattaataagttaacgaatttacttggtaaattttggatctacttataggaagcttgattctataggcgcattgtccccacactagttgaaataatactgcttgcagactaagttaattggttttaattaatcaantataattctaaaattagactgtctcatttatgaattttcactaannnnnnnnnnnattgtgaagaaaagaagttttagggttaatgtattaattaagagactttgtgtagcctaattaatagataatataaatagcaattttatttgataattaattaaataaatagttttggtatttataggtttgaaattagaaaatatgttattattgaaagaagaataagtggttgaaataaaaaggtaaaattgtaactagtaaaaagcctttaagtttccggccattatgtgtgatttttgctcattattttattctttttaatccatatagtttaaatctaagccctaagtgaaatactataaaaggagcatgatgctctcatctcatccaacacttttaacctgccaaatctagtttctaactctgtcagacaactagtagatgagcgacaccttctatagaattttgaaccgtccattatagttcttcacctatttggcatatagtgatagagtgtcatgccaacacatagcaagtaatgtactaaatcatagtgtggaagacggtggtaaccaacctgaaggagagaaagaggctcagatcttgataatactctactactgaaaaaaaa

SEQ ID NO: 142126 - DNA, 617 bp, Cannabis sativa
tccaggaaatggaaaggtgctatgaatgaagagatggactctcttaagaaaaataaaacctggataatggtgcttaaacctaaaaataaaagtgtagttgattgcaaatggctatttaaagaaaaagaaggcagaactaaagaagaatctataaggtacaaggccagattagtggccaaaggatttacacagaaggaaggggttgattttaatgaagtatttgcaccagttgcaaaatacaagactataaggatcatgctaagtctagctactcagtttaacatagaaatagaccaaatggatgttactacaacttttctacactgggaacttgaagaggagacctacatgagggaacctaaaggatatacagaaaagggaaaggaaaactatgtctgcaagctagtaaagtcactctatgggttgaaacaatcaactagacaatggaataaaaggtttgatggatttatgctaaaactgggtttttctaggagctattatgatcattgtttgtactacaaggggactgatattaataaagtcatacatctacttctatatgtagatgatatgcttataatcagtaaagaaagagcaagagtaaacaccatgaaggg

SEQ ID NO: 142127 - DNA, 830 bp, Cannabis sativa
  modified_base (44)..(52): a, c, t, g, unknown or other
  modified_base (770)..(795): a, c, t, g, unknown or other
tttttaattgtatcacttttaaataacatagaaaaaaactagcnnnnnnnnnagtatacgtgcctcgcacgtaattttttgctagtatatatataagcctttaaatcaatcaaataaaataatgatatattatattttaattaaaattttaaattcaaattcaaatataataatatctataactgaacaaccaatttgagttatatctttattttaacaattattttttattttaaatatcttatccaataaaatatttaatttaaataattaaaaaaataattattacttattttgattaacctcattaaataataaaataaacaaaacaaattcatgggcttttatatgccactctacacgtgtgagcaatattttaaagcctaaaattaatttttcaatttttttttaaataagatttattatttattttgaaataaataagaatttatcaacttatattaatcttttacttcacttggattaattaaatattattttacactaaaataatatgtttctctctcataatattattcaataataatattatatatatttaactaattaatatagttttatcaaataaaattaaaaaatttaattccattttaattactcaattcaatattgacataattatacaaaattactatttttccctcaagaattatttcttattgaaattaattatttctcaattcattcctcaaattaaaacttcccctatatagtgttgtatatgttgttttttgtgccctaaataaaannnnnnnnnnnnnnnnnnnnnnnnnnaattaataaaagatcaaaaatcgttttatgttgca

SEQ ID NO: 142128 - DNA, 680 bp, Cannabis sativa
  modified_base (645)..(646): a, c, t, g, unknown or other
taatttattaaaaatataaagttacttacatgcagttgttgtgtgtgctcgtcgcgccacttattgttcttgcagtgaaactttgcaaatgtatccacaacattgggaagctctcccgtctgcggatcagtctatttttttcttataaaattggatttagaacaatattattaaaaaatttccaattgaaccatatttttatcatatattgaaaatttcataccccgctgacaatggtcgaaactatggtcttagatccccatccaccttgaaccttcatgttacctcggtttttcgcattttgctcaactcttgcctgtaatttaacgtatagttattgttagcaaattgagaaaaaaaatattaagtaaaataagaaaaaatattaaaactttcaattaatacctgttgtttcgggtctttccagtatgcgataacctctgcccacacctccggtgtcaccatatctggacgtgagctcctgttcggttcttcctccccatatttttcaatattatatgtaccacctatgtacttttattaatgttattattcattcaatgttattttatgctataatatataccacttatgtatttttattaatgttattattaattcaatgttgaatgttatttttaattnnaaattttttcatttcaattatggtctttttaatt

SEQ ID NO: 142129 - DNA, 796 bp, Cannabis sativa
ataataataataacaatattaataataatacatattttgcaaagatagaaatgaaagaaaaacaaatctagatccaccttcctccttcatcttcttttttcggctcaactcaatctaaaagaaatcagtggctagcatcttttcttttagaatttcagctaggatttgaggtttattaagtgaaagtaagatcttacaaatcctattcttgatattgatatggttttgataagtttagggttgttgattaaaggattttgggttctgtttagttgagtttcgtttaggggtgttttcaacagatttgaattgatgattgagacttctttgagctgtagttattgtttaattgtgtggttgagcaagtatgagttcatagaactcaaagctcgcttaacaatggcactttctaattcttggtgtaattgttgtgtgagctgtgaaatatgtttaatatgttatatgttgatgccctggaaagtttggtggtgattggagaagatttgagtagggtgtctttaccacaaagtttagtagaaaaaccctaggttcttttcgagcattagagaagtgttctagagtaaacacttatcacttttatgttgtgacatagggcctccattcagcgcgtaattttccactcaggttttccagcacacttgaattcagaaacgaggtaagattaccatagaacatattatatacgcatgttgtgtttgtgattgtatatgttttgggtgatatcatagcagcacaaccattgtgtcggttcggtagtacaggcatcgtactggtt

SEQ ID NO: 142130 - DNA, 505 bp, Cannabis sativa
tccaattcacccccctcttggaaacatatcttgggctaacaacttctactttttatacctaaacactcataatcgtttgatcaaactgccaaaacccaaagcatgcatttttttttcaaaatttgattaagacaaaaataccctcttaatcatttaaaaagttcttattaattaaaaaatactttttaaggggcaattgttatactcgaaatttagctactcttcagaagttgacacgtgtccaatatatggaatatgaatcgattctaagtgatataatgacatcattaaatgcatattgaataactcgttattatttaaaggataaatagatgatattcaaaacttgttggctttagaatcaaaaacgagacaagaataataactacttatatgagatttacgagacgtatgcatgcctcagaatatacaaacaagaaggggatattcatccacccgagcagaataaatgtatcaacataaactgtctcgcattacatatagc

SEQ ID NO: 142131 - DNA, 727 bp, Cannabis sativa
gttaaaccaagaaatgccgttagatgggtacttttaatatataaagatatatatctaatttaagcatatatattaataatatactattatatgtcatcattcatgaatgttatatcaggtttatttctcgattttaacaaaaacaaaatttatttatgaatattatttatatgatattcatattaggtctttactttttagaagcacgtgatttcatattagaattcgtcttatacgatgtgtgatcatgaattgaattttgtctatacttgcgatacacatatttatatatgtgtatatatgatgcaatttattttgagataatcttcagtaacaattaaattcaaattttaaatttaaatttagttaaagatatctaatatttaattgaattaatttaaataaattattactaaagtgatctttttggtgtagattaatttaataaaaatattaagataattttgtgtatgtaattcataaatttattaactaagctaaaggtgagttaatatttggtagaatttcatgcatgtctgtagtgataaatgtgtgacaatcataatgtattttgtgtgaataacatgttagtccaaaaattgtatattgtttgtgaagtaagacactgtccaagtcgagtttcttggagtgcttgagtgagagaatcgggttgtctcttgtacaaactctgaggctgtgtatctaacttgatgttgattgtaactct

SEQ ID NO: 142132 - DNA, 814 bp, Cannabis sativa
tataattttgggctaatctcaatgaggagataaccttaaaattatgagaaaaaataatcacattattttttaagtggtgatgtgagtttgatatttttattttattgaaaaaacaaaaaatatcaaatggtattttttaaagtgatcttaaagagtcatttcaagaggaaaatacaaaaaaaaaaaatatatatattttatatacactttatggtggaaatgtgggggtgagccacaaacataatcaaaatgtagtgagacattgttgattagtttatttgattttaaactcaaattctaagtcaattttggctttgtgcatatgcaaaattttttgacatattttggtgtcaaattttagtgaaaataatttcaagaaggaaattaaatttaagaaaaattataaagacaatgtggtcttctatatttaaaatcaagatattatcttgatagagaaatttgttaaagtgtggaggtgatactctaaatttgagatatgctttgtgccttaaactaaagtgttttagacatgtctggtatctaaattagtgcataagtttgatatgtttggtatcaaaatttgtgagaaatagattaagtgtaaaaattaattttatgtgatttaatttcaaagcttaagtatacttaaggagaaaagtggtcatgtaaaaatagacactaattttgactagcaagattcatttggaatcgaaaagtgtgcggtcataacaaatcgtttaatctccgtacaggattaaagcatgaattttgagggatgggacctaaactcccttagagttttactcattgatgg

SEQ ID NO: 142133 - DNA, 778 bp, Cannabis sativa
ttccttaagtcgaatgtcgtaatttggtatgccattaaatttcaaactatgcaaaaattcaggtggatacaaaagatcatcatcacttgtccttacacttgctttgcataacagtgtttgagctgtaatatattcgcccttcgcctggtataatattcataatcatttcattcaattcatggaccatttcattttttggtgttaatattgctttctttcaaatatgcaagatcgttgtatttttgtaaaagtgatgggtaaataacttcaactatggatttcactggatcttgagatggatttttgcatatatcagaaggaagtttaattaattctctgtcaatgtcatcatataatgaaccatctcctatctgcaacaaccatttatcaaaagtagctattttagcagcctcagatccacttaaacttccattatatagcctcatattttggttaagctcatatattttaaaaaatggccacaagtatgatgagttgagagaagcaacaacgatgttagctcttgtaccttttgaaacaactagtaatatttgtcgaaaatcaccatcgcatactattgtaactcctccaaaaggttttttagagctactttcaaaccttgttcttagaatatctcttaaggtcttatctaaagcttcaaaatagaatttatttaccataggcgcttcatcacaaatgatcaatgaagttttcataagaagtctagctaatagggtaccttgacgaatttcacaagttgactatgttgtaacatcca

SEQ ID NO: 142134 - DNA, 744 bp, Cannabis sativa
ggcgggtgaggtgtcacttaatttcttaaaaaaaaattatttaattaaataaagatttattttttatttattaattaattttaacgttatcagaagtagtaaaatgcgatcaatcaatgatttgctttttactgccatgatccaacttctcctccatgataatagtacagttttcttaccatttattcttggatcgacttccttatataagttgtatcagaacaacaaaagaacacattctcttcaactaaagcttctaccgacaaggacaaagaggttgaacgcgagaagctagaaaaggatttggacttctgggtcgaaaatgactttctctgtaagaactttattcttaatggttaatctgacaatctgtatgactattaaaattcagataaattgacaaatgaaatatgggatgctctgcaaaagaaatatgatactaaagaggctggaactaagaagtatgctatcagtcgctacctcaagtatcaaattggtgaggactcacacattggaccaccacacgcgcgtgccgccgccgccgttcgaccgagccgggctaggcttgcgggtgagatgtcacttaatttttttaagaaaaattatttaattaaataatgatttattttttatttattaataatttgtaacgttatcagaagtagtaaaacacgattagtcaatgatccactttttactgccatgatccaactcctcctccacgatagtattactgttttcttg

SEQ ID NO: 142135 - DNA, 510 bp, Cannabis sativa
  modified_base (465)..(465): a, c, t, g, unknown or other
cgtgatgagaacaaaattaatcgacatagtgtgacaaaaaaaatcaattgatataatagggataaaaattggtcggataataagcgagaaatgttcttcatcctcatccccgccatgaaggaagccacattgttttaggtgaggcaattaaataagatatcataaatttacggttatatctttttaagtcaatgttactagatgatcttatgtcaataaattttaatcttgatatagataggttcgatctcaactgtgttattaatgttcttagagttgttcgttaaaactcgaccagcctaatacttacatattgggaacatgatagtataattgagtgagagcgctaatcatagatatagaatctataggttctataagtatttagaagtgaaatagtgattttattcgagcttgccttaatggagataaataattgagatctcattttagtaattatattantttactgaaatatcatttatagatagctaagtgttttaaggataa

SEQ ID NO: 142136 - DNA, 564 bp, Cannabis sativa
tgagggactttctgctcttttgcgagcaaaacaagatattggtctgcttaagggtattgctatttctcgaactgccccatctctttcccatctattttttgctgacgacagtcttattttttgtactgctaatagagtttcctgtttagctcttcaagatgcttttgatgtttattctaaggcttcgggtcaggttattaatttttctaagtcttctattatgttctcgcctaatactcagtctgatattcgtactacttttttcaatacttttaatcttgaggattgacctttcatctgtaaatatttaggacttcctcaatgtttatctagatctaagtatcattcttttgctttcttgaaggatagggttatttctgtgcttcgagggtggtctgttaaatgtttttctagggctggtaaagaggttttactgaaggcagtcattcaagctattccagcctatgccatggcttgtttccgttttcctgtcaaattgtgcaagggtattaaagctgtgatggccagattctggtggggttcagttggaaattctcataagat

SEQ ID NO: 142137 - DNA, 518 bp, Cannabis sativa
aaagaaaccctcgaaccagaaaactctcaaacaccatagatttcttactgatcttccttcgccattgtcagtcaactttttaccgccgatcaacaacaacgcccagttcttaagctctatgtaagttcttcgtatcccgtactttattgttgtgctcatcgcatgctttactgttcatctgctttttctgggtttgatgtttgaattttttgggaatttctggcttgagtttctgtataatacgtttgattcctcttttctagtggtcaagttacttttattctacgtatttttttattcaaggacccatcttttctttacgcaatgaccttcaagggttcagagaggactttgtctttcttgatttttacccttttttccttttctctgcttattcgtaatgacaccatctgtgggattctcgcaccaaaattttgtcaaggaaaaccttctaaggctttcttgttgacaactatctagagggggcctctttccaggggttaggggacccccattcc

SEQ ID NO: 142138 - DNA, 943 bp, Cannabis sativa
  modified_base (311)..(318): a, c, t, g, unknown or other
  modified_base (739)..(741): a, c, t, g, unknown or other
ccatactgttagcagtaacaaatgaggaattaattatattcttgaaaaaaacatctgaggccattaataatataaaattaagcgttactcaaatttactctgtggatttattgcttaaaagtaaacaattctaaccaagaacttaaaagagcattaaaaaataccaaataacagcattatttcctactatagccccaccactgacaaagtagctcgcgacctctttccttttctcagaacctacaaaagtgcatatacatagtgtgcatcagacgatgtgtcgtcatcaggtacataacaactctattttnnnnnnnntttgcaacttattgcttgttctaattagtcgtatgatttctttatttgtgttcataaacatccaataaaatattttgtgatagccatggagttggtggataatttttaaatatttaaaggagtatttgaactctataaaaagtggtcacttttttttagagtgtactcatagtgttgttgagggaatagtttgttgttaggcaaagtcctttgagatttgtttgggccttgagttgtccggcaaaatcttttgagaattgaagcctttacgcatatattttgcttggaaaaagtcaatcacaacttcacaaaaattttaccccagaatatgtcagtaagtagtatttaaaaaaataactaacaaactttctggcaaggtgcaaatcttgaatcaaatcaagtacactatattgagaaaatnnntttataataagattatgtatttcaatatatatttgagttaatattaaagttagtataaatcatgaagaaaataagagattttgtctaaacatatgatgtgagaaagaaaaacactccataatctttaaataaataaataaatttaaagtagtatcatttcaaacttttataaattatagtcaattgaaaacttgacaaatct

SEQ ID NO: 142139 - DNA, 645 bp, Cannabis sativa
ttaaaaaattaattgttaaaaataaaatattaataaaatacttatggggtaagacattagtcaatcacccttaaaatataaaaaaaaatcatagactaagaaaagaaatttaactaaagtattatttataaccaacaaagataatacctaaaaactatctaagcgatgtgagactttagttggcatatgtagattattttaccaacaaaataaggagaattgtcataaaattagaacaataggaagaaaaaaagataagatgccacatagactacttttatactttcttttatatatatattgatattaatatgaatttcgatatttttgtgatttatgccaagtaatagtggaaatgcaacggtttggccaatagcgtcacatagttatggtttagcaccatttgtttagcagggtaagataattggacatttggaatatcgagtttatgtggagtaatagtttttggctattttacccgtagatatttatgttgcttaagagggaagaaagcattttggtctttttccctaagttgattattaagtaagtttagtgaattttctagataataccctaatttatttgtaaagccctaatctatagggacgtcacacatgtgattttataaactagtttaatact

SEQ ID NO: 142140 - DNA, 588 bp, Cannabis sativa
gtcccaggtccaggtctgggttcagatttggttcttcatctaggttatggtcctagtctgagtccctgatatagacactgactactagtctgttccaggctccgttactcgagtcccgagccaagatctggatcactgtcacgggtttcggtctggttctggttcaggtcccaggccccatttctaagtttgggttcgggatcgagactggggtgcggttctaggtcccgaccctggttctgtgtccctagtctaattccttgttttagccagagttcaggttctggttcgagtcgcgagtctaagtttgggtttggatccgggtccagctccaaattcgagtctaagtctgatttgtagtccgggtcctggaccagttacggttctggatgtaggtccaatttcaattatgattccaagtctaagtcctacttcctgtcctggtcaacttccggtttttgttccaattttgggtgagagggtaagggttcgggtgcacttttgggtttgggactgggttcaggtacgggtgtgagttcaggtctttgtcagggttcggatcccgggctgggtcccaaatccaaacac

SEQ ID NO: 142141 - DNA, 699 bp, Cannabis sativa
gagacccatctaatataccacggaatcacagaacaaaatcgtgtccttatatatatatatgtgagtgaagagtttgcatcattgccatctccaactaaattcaagtaagtttttattgaaatactttaatttatctttcttttttctttttttccacaaagttgtctttagaagttatttagatttgtattgcactaatatatatttatagttttatttattatataaaaattattgtgttgctcacaaaaatatttttgagtgtgtaatttgtgtatatctatattcctttttttttaaaaatgttcttcaatattataacattattaggacattcttatatccacaaggggttggaaattaaatatacaaatcaaaattttggaaagtttgtctcaacagcaccaaaccaactgtgcattataggaactcaaaaaaaaaaaaattgagatttatgcatgactccatgttttatgtatatgcatcttataaaagtgaagtaaaagatattaatttctattgagatatataaacggtatgatataataattcaagtaatttatcggttaatatatatttacacaaaatatttaagctcctatttaattatttttaggggaaaaaacaggaaaattccaaaaagggtaaaatattacaaaaaaaactgtgggccgacccaatcaacatttgtacagccca

SEQ ID NO: 142142 - DNA, 994 bp, Cannabis sativa
tctaatcattaaatctgaactctttaattcataatttaaaactctttaaaattaataggctaaatttaaattaccaagttaattttaaattaatctagccagtttacatgatttaatttcaaaaataataaacacataaatacataggacaattcttatatcatatctctactatgagataggactgttcaaaaaaatttacaaaccgcccaactcgaataaatcgcccaaaccaaaccaaataaaccgaaaaaaaatacaactcgaataactttacgaaaaattcaaatcacccaatgaatatattggtattttaacccgcccaaataatccaaattaattggacaaaccgatttacatattttttaataaaatttataaattatgtttaatagttaaactattttatatttaaagtttgtatttttataatgtttaatttaaaatttagaatttatagttgataattttgattgtatttgaatattgaaattgaaacttagaatttacatgagtatatttttttattctattttttgaaaaatattgtttaatactttaatgtttattcaatttatatttgttttttaacattaatttaaactataactctttaatctttaaaggcttatactatacatttattttttcaaatcaattatttgaacacaaaaaactaacaataatgaaaaaaaaaaagatcagtttaaacgggttaacccgaccaaactgacgaaaatcattgaacgagttacacttttttatttttttcattagataggttataattagatatttccaacccgatatttatattgggttgataaaaatatactataacccgaccaaaccgatcgatgtacacccctactatgagatgcatgataatataattgtgtgagatttttatgtatgacatgtaatttactaatgcatgaacatgttattaatcaactattaatgaatatttatttaaaagtaataaataaacaat

SEQ ID NO: 142143 - DNA, 1053 bp, Cannabis sativa
aataatttgttattttttttttatttaaaaaaaaaggtcacccaataatttctcataaaccaaaaattatgttatataaccacattttatatagaatagatatttactacacgtttggaggaggtgccccaagcaataatcttgttaaaatttgtatgttataattattggtaaatggcggaaaaaccccccaaaactttcattttcgtttctcacttaacccccaaaacccaaatttgggcggtaaaactcccaatactcgggttctgttagcaatttaacacttccatccaaatttagcttttcactgccatggtggattgtccacgtggcacaatattattggcccacgtaaataaattatttaaaaaaatttaacaaataaaataaaattaatttaaaattttaaaaaaaatataaataaaaaaataatttttttttcctttctttcttttttttttctttcttttttttttttcttttctttcttgcaaataccctcttctctctctctctctctctctctcgcaggtaggcagcaacccaccatctctctcgatccccctctctctctcagccatctcactcgatcgccccccctctctctcagccatcactctatttttctcttgttgtttcaatctcttttgcactctctctccctcgttctttctctctctcatgagctctctgcccaactccggtcgagcatttacaggcgagcttaggcatcaatcttgttggagtcggagtcggagttgctcgtttccaatccagccaccttcggaccccatggaggtaaacaatttcagatctgatttgtggtttttttttggttttatttgtttagtattttaaaggttctgattcagatatgaaaaaaaaagtaatgatggtaatgggtttctgggatttcaggggtggtgatttcggtggtagtttttttttggatctgatattcttgtttttgaatttaatttgggtttttgtttgattttgtgagatttagatctaatatcgtgataaatgtggtgtgtatatttgtttgtttgt

SEQ ID NO: 142144 - DNA, 1255 bp, Cannabis sativa
  modified_base (234)..(236): a, c, t, g, unknown or other
tgagtatctttactcagttaaggttgttccatcgaggaagaacgctgcagtgggatttttctatctcgttactcaccccaacgagcctaaaattattgtagacttgccaaataaagtgtcctttaagaacaacttcttctggacatttcgtctttcccccatcggcacaaccacgtttcacaaacttcgtaagtgatcgttctcttcttacttatttacatcagtcttcctttnnnaagtttatgactaatgttttgtttgtcctgacagctcttttgacaagacctactcctaccccgagatggttagtaggcataggcgcctgttaacccttccctacagtcttcggtcatccaacttccttttgagcgaggttaacttgcgatcggtgggccttcttgctgataaagaatatacttgtgattataagattcccaagtattcttcttggcaacagattattgtgtcgcccgaggatcaggcctaggatcgcttggctcaagcacaataccttcaaagtactgcccctcgggaattcggtgaaggagcatccaaaggtaatcaatgtggttcgtctcctactatacttaaagctgagcgtagtaccttagtcacctttgaagactcccgccttaatttttatatttggaattctcttcttgtggaccacattgctcataagtttgacagttggtatcctagattccacatccaaattaactattacgagtcattttatggtatagtcgagcaatacggtactatggaagatagggcaggtcacatagatgcgagttgggatttataaccaatcgagccttttgatatattcaaaattacaggctgtagggattttagcaaatattacgatccttcttccccttcatctagtgatagctctccttctagtgattttggtaaatcccttaggtggaaaattatactcctcccctttttaatagacctttataatgattgcaacgcctcgtcttgttttgcagacatgggttatgaagacatcacggaccgtaaggggaagaaaaggacatccaaccctggagtccctactgctgccgaagtggttcctcccaagaggtaaagaaaaactaccgcccataagaagaaatcactagccgagcctatcgatctcgaggtttcgaatgatgagattcaagagcaagttcctccttcagtagtacccgaattctcctcgtctcgaggcgacccccgctactgcttcttcgagccaggccat

SEQ ID NO: 142145 - DNA, 526 bp, Cannabis sativa
  modified_base (28)..(29): a, c, t, g, unknown or other
tccaaaacaaagacccatatgtgagggnntatgccactctctatgggcggaagccgctctttaatgagcacttctccaaaagtcaagctagtgactttaaatcagcctgttcttgggaggcaacccaagtttttcaactttgtttttaatcttataactctagttgatttcctttgaaaaaaagtaattatgtttaatttttgttgtcaatttctagtttttatttttattttgtgtgtggattttacacttgatttggtgtttcaggtatttttgaagcacaatttagagttttggatgtgatttgggggtctgaagtttttactaaaattttgattcaattttgctacagcaaaaactgggtatgaaaaaaagtttcttttcgttgacttggaaaactccgcctgctgcagcatttttctagcaaaaaattagcataagtggtacaaattaaatgagcagtcaggaaggtttttgctaaatttttgcaaaaaaaattgctacagcaagcgtgtttgagtttgtt

SEQ ID NO: 142146 - DNA, 550 bp, Cannabis sativa
  modified_base (279)..(293): a, c, t, g, unknown or other
ctcgataagtggatatataagcgtgatttgttaattatggagatttatttgaaatatgtggatataatatgagttagttgtgaaataaaaatattttcatgttcgccgaccctggagacccaattggatgcaaaaaatgtcacaacagttttatttagaaatattgatgggattattaaaataagttgattttagaaatatcggagtattttagggtactcgaagttggccaaatactctaaaaatagagatttcttagtggctaaaaaataataagannnnnnnnnnnnnnnaaatttttattaatattattattaatatatcattattaatattatattattattattattattatatatatacatatataataatagtagagaagaacgaaggaacaaatatatattaagttttaatatatatatatattaagttttaagttataatagtagagaagaacgaaggaacaaatgaacgaaccttcgttttccttcattcgataaaatcttctccttctatatctattttccttgattttcaatccaaa

SEQ ID NO: 142147 - DNA, 630 bp, Cannabis sativa
gcagcgcgaccaggagtgttcggtatcgagacatctggggatattattttgtagtcgctgtgcgacctgattatataatttggcatattttgtatagaagattagaagcaagatcccgctgttcataaatgactatgtaaattataaagtttaatatttattataaaaaatttaatttgacacatttttcaagaaaattctttgattagcatagatagcactgtaattgaaaaagtactgtagcgtgccttatcattagggcgttacaataattaaatcatgattatattttctcaatatttaagccttacttcaatcaatctcatgtctatgcaaatttggtacaacaattcattttgtacaaatacatatatgaaaatttctcattagaaatatttatttgcacaccctacaagtcttagttcactttatgcgagtaatcttgcctggactgtgtcataatattttgacaaaaaacaaaatatatgtcgataattctcgacaaatgtaataccatgatctttgccatcccatgttagtttattgcatatgcaaacattaaacatctattgtcgacaaaaatttcattatatgataatttcctcccatattgacataacttatagatat

SEQ ID NO: 142148 - DNA, 578 bp, Cannabis sativa
gtatatttaatttatacacatttaactatcatccactatttcattcatttcaagataaaattaaataaaatagcaaaataaatttatccaaatggatttaatttatacacatttatcaactatcatccatttatgtcgctattcatccaaatagatttataacccaaaaaaaaaaaattaataatacatgtaaattttataatttatattttatccttatggtcaaattcctaactcatttcttttacatgtggaatatatttaaaaaatgaaaatagacaacattttatttcacaataacactttatttattattgactagttaggatttttgctttttaaactttgacatgcacaaaataatgttctctaaactcttgaaaccattaacatttctctcaaactattgatgttgttagattcaagttctatctattttcgtttaaatttacaaacacggcgaatattcatgtattaaattgtatcccccaaactatgacatctaccaaatcgtaacctcaaactttgatatataccaaatcgtgttctttaaattttcatccacattaagcttctgt

SEQ ID NO: 142149 - DNA, 1289 bp, Cannabis sativa
  modified_base (1224)..(1226): a, c, t, g, unknown or other
aaccaaggatcacatcgaggctcagttcctggccatatagttatcaatcgtgatcgggaaaatgctgatcgcaatctcttcagtgactattttgcaaagaatcctcaatttccagagtcgatgtttcgacgacgatttcggatgggtcgttctttattccttcatatttttgatgcaatagcaatgcatgacgactactttgtccaacgaagagatggtattggtaaactcagattatcgggtttacaaaaagtaatagctatatttcgaattttggcatatggtgtaccagcagatgctactgatgagtacattaaaataagcgaatctacagttttagaaagtttgaaacgattttgtcgtgctgtttgtggaggtgtttggaagttgctatcttcgatcacctaacgctgatgacgttgcaaggctactccacattagtgaacgacgaggttttctaggaatgttgggtagtttagattgtatacactagaagtggaaaaattgcccaacagcttggggaggacaatatgtgggtcgtagtggatcaccaactattattcttgaagctgtagctgactatgatctttggatacggcaggcatattttggtctaccagaatctaataatgatattaatgtgttggaggcatcccatctttttgctaatcttgctgaaggtatagctccacttgctaattatgtcattaaaagaaaatcgtacaatatgggctactatctagttgatggtatatatccaaagtggtctactctggttcaaagtattcatgagccacagggtccaaaaaaaattatttgcaatgaaacaagaagaatgtagaaaagatgtagaatgtgcttttggagtattgcaatcaagatttgcaattgtgggaggaccagcacgcttatggaataaaaaaatattacatgacagaatgacttcgtgtattatcatgcataatatgatagtagaggacgaacgtgatgttaatgcaactattaaagaacaagttgaagtgcctagtccaaaagttgagatggtgggtgatgacaatgttcgattccaagaatttctcgctcgacatagaaaaattaaagataaagaagctcacattgaacttcaaaatgcattaattgagcacctatgatacaaatatactaaaggacatttgatattatatgcttaaaactaatttatccactaaaaatatgctagcatannntgcatcatgcaaaatatactcacactatttttctatccaattttacccttaaacaaataaaaa

SEQ ID NO: 142150 - DNA, 656 bp, Cannabis sativa
aaagcactattaaaccagtttgtaaatattttgaaaacagggggaccctgtagttaatattacttatcctttattataaagaagttttatatatctgtttttaattataaaaatttaatcacccacagtttgggtataattatatagcatatatagtaagaattttataaaagcacacacacgtggcgtccctgttggacaaggcgttacattattggtgcggtatgttgtatcaaaagcaatagcttccctgaataacaagtagtctcctctacacataccatcagcccgaaaaaggaatgccaatcgatttttgtcatcaatctcttactcggcgtagaattcaggttccactgatgataagccgtccacgaaaccaaatgtcccttctacatcacttgatatgttctcttgctttcttaaactagccactttgttctacacacctcttagttggaaaggaagattgtcataccctccagattgtagggcaatatgtgcaacaacgaaagaagttttgataccacatctattcatgctaattacttgtggagctactccttcaagaacctcgcggtttgcctgaatgaattgcatttgtgatggtattattaaatcatgattatgaaatggtacaaattcttgacaccgccaaa

SEQ ID NO: 142151 - DNA, 987 bp, Cannabis sativa
  modified_base (295)..(297): a, c, t, g, unknown or other
agtttataaaatcacacacgtggcgtccctatagattagggtgttacaacttggtatcagagcagccatggttttaaaggccctgaagactggttgaatatgtatatttactgcgaggacaggtcgactcatggtatagtaagtatttatataatttgctattagattaccttcctaggctattatatagtatgttgaagaagtagtatagtgacaattttgataagaatatgtgtatgttatactcatattgatattgatatccgtcttagttttaaatggttagaaaatgtgnnntaaatgtgtgataagttatgcagtacgggcaattgaataatctgattagcgagctatctgggcttggggaaaacggtaagaaagagaattctttattgccatgatgttgggaacatgtaaattctgttatgcaagatatgattagacaataagggaaaacatatccgacatctaaaagaataataggctcatcttgtgtctgttgttgtactaccgacacttcttgttgtaccactagatgtggtggaatatatgaagtcaacttactagtagatcaggaagcgaaagctaaatgaaccaccaattatgggtcaggataaaaaggttccagggtggtcatgatagcggtcaaggtgagaataagaaatggtgaccttatcctgagtgttcaagatggaaaaagttgtcatttgaactaatgtaaagccaaatcttattttactgtgagtagtgagtcatctgaaaagaacctgcctgtagttaagaaagactgatgttaaaggagaaaagtgtacgggtcctgcccaagtgttgattatgattcaaggagacccggatatcagtcattcggccgactcaagttagaatttatgggcaatattataattgctattggtattaagcattgcactctcaatgggggaaacatcaaaagatctaaatggattatgtctgcatgttatttagtgg

SEQ ID NO: 142152 - DNA, 575 bp, Cannabis sativa
  modified_base (525)..(533): a, c, t, g, unknown or other
cagccacaatttcacgatgattataaacagggaatgaaattcattaaagataataaaagcacataataccgggattaaaagttgcctggtcagccttttgtttctaaaatgaaacataatttcaagtttaaagaccgcttggccggtcatgatgtcttaaaaaaagggccttaaggccgaataagatatataaaaaagaaggataaaaagagaagtagttaaacagctggagtcccaggctcttggttcgggtcttctgggcgggtaggagctagaggatctgttgactgagtggaaggaacatcaacattatggccagaggtagaagtagtcgcctcaggttcaccataagccacttgggaagcgcagaacttgagatacatgtatttggcttcacccaagtaatcaaaatttgccttagggttagccttccaaaaatcataaaagagctccaggccggctatctctaaggcatgaactttctcttccagcttcaccacctcagctgtaagctcctcctccttnnnnnnnnntcctcttccagccgacggaagacagctcgaagggccgtcctt

SEQ ID NO: 142153 - DNA, 506 bp, Cannabis sativa
agcatcaatattgactttaatggtatttgcaccaggcctagaccaagccgaatgcccatcttttgctgtgagataagctgctgtaggaaccagcattcggtcttgagcattgcaccagttggagagagtattcttggccaaaaagacaacaacagctgctgtcgatgaagtgtccaaccacaccagatcgtttttggtctttcaaacagcccaacaaagcactgcaacatccgctaactgatctttatccaactgcagaaacatggcttccaaccaacccgcaaacgaggtcacggctgggatagttttcttcaaaccagcaagctcccaacaactattagcgaaagaaaaatcaaccaaacaatggtaaggagtttcagcatgaagcacacaccttggacagttataatcaacttgaacatgtttagtccgcaatcgtgttttagtgggaagacaatccgaagccgcacgccaaactagatctttgactttaggaggaacatgca

SEQ ID NO: 142154 - DNA, 680 bp, Cannabis sativa
  modified_base (464)..(474): a, c, t, g, unknown or other
  modified_base (574)..(574): a, c, t, g, unknown or other
ttctttttattatagatttatgagaacatactacaataaattagtcatatctcaattaaattaatacacaaacattttttaaatttgtgggttaaaaacttacaataccaaaatgtaacaccctaactattttaggcatgttagcgtaatttttaacttattgtgcagctcattgctaatcaacgaggttatcgaaaatcgtgattaattaaaattatgcttatttaattaaaaacataaaatagcatacatataaaattccgagatcccgtttacaaaaacctttacaaaattttaactatacaaatacaatagtctatcgcctagcgactatacagcaaaaaccttgatatcccaaaaattgtacgctcacggcctaaccgccccaacatgtataatctccatctgctcagccttagctctgcccttacctacacatggaaatagcaattgtgagtcaacannnnnnnnnnngaaaagcataacataaaacataataacatcccgggttataatcaggggcatatacacctaaccataaccctatccccgtgtcccacacggtactgtgtcnagaacgttcatacgacaatactatagaccataatgtcaatctatactcaatatgctagtcatactctagtcatattgatgtcatagcatcgatcagtatttcagcc

SEQ ID NO: 142155 - DNA, 833 bp, Cannabis sativa
cctatcgcaacttacctccaaactggatccttgccagacgacaaaaatgaagcaagcaaattgagaagaaaagctgctaggtacctgatcctagatgggacaaagtacagaaaaagcttgtccgtgcgtctcttaaggcatgtcaataaagccaaagatgaaaagctgatgatagaagtgtatgaaggcttctacggcaattatgttgggggcaaagcttagccaaaaagatactctgataggggtacttttggccaatgatgatcgaagactcgatagaatatgtccgaaaatgtcacaagtgctagagattttcaaagataccaagagctccacccaatgagctcacgatgatgcagtctccttgctccttcgtagtgggatagacctaattagtcagtttcgaaaggaaaaaggaggggtatagtttaatgtcgaagcaatagactacttcatcaaatggacagaagctgaaccgctagcaacaatcacctcaagaaggtccttgactttgttgtcaagaacgtcatatgtcggttcggccttccccaaaagattgtgtcagacaacaccatgtagtttgacagtgacatgttcactgctttctgcaacaaacatggcatcatcaagcgcgtctctgttgtggcccatcctcaagcaaatgggcaggtagcagctgtcaacaaaaccctcaaggataccttgaagaagcgccttaaggaagcaaagaggaacatgcctgacctgcttttagaggtcctattgtcgcataggactaccaagaatatggccactactccttttgctctagcttatggctacgaggcaatgtt

SEQ ID NO: 142156 - DNA, 768 bp, Cannabis sativa
gaccgaacagtgctccccgttgatttttggggtagtaaacaatgtaagtccgcttacaaatttgtgaaagacaatgggggtcccaacagcgacaaggtacatcaaattttagttatattatgctaatgttattttatttgatattaattattttgggtttgaaaaattaaatttgtttactttgttatgtttaacagataatgcttacttcaaatcccgtaatactgcccaactactactccgactcggaaggaagaaagagcactgaccactttgtcagttctatcaatgagttgaaggagtacttttccaaggagttaaagtctcagttgagatcattttctttgaaagttatggacaaaggagaaggtgtacgtggtattgactgagagttggaggagaatgttgttggggaagtggggaagaaggcggagtgcagccaggccgtggaggagtccccgtcgaagacacctgtccgttcaaagaataatgctgttggtaaatccgaggaaaatgtggtggaatcagtatcaacgcctttactatctgctacgaaatcggttgaagatgaatgttatccagataagaccattgaggatgacgactttgatatagtcgaagtggcgtctttttggaataaaggcaaatctctcgtcaaatcgaagaagacataatctgagaatgtgcctgtaacgccctaaataattaggcacgctacccaagatacttacgaaatcctaatcccctaattgggattactaataagat

SEQ ID NO: 142157 - DNA, 1024 bp, Cannabis sativa
aataattaaaagataattaacttaatttaatttaaattattttaacttgataaaataattaaactaaattaactatgtgcctttatatgtcaccctacacgtgtagaatgagcctacacgtgtgggccatattttaaggtccaaaattaatttctacattttcccataaacaaaatttattattcattctgctaataaataataatcaattaattcttcattaaaaaaaaacaataatcaattaattctcattaatctcttattttacaaggattaaaataaatattattttctctaaaataatatatttctctctttaatattatattagaataatattatatttaactaattgatatagctttatccaataaaattaaatagttaaatactattaattatacaattcataattatcataattaatcaaaataataatttcacaaattactcttttgcctttaagaaattaattgttactcgaaattcattcatcaaataaaatctttccacgtacaatgttgtatagaggtgactcggggaccatgaacttatatttcaaagctccaataaacccaagattactatcaatctcatcaatagaataatctagtttattaattctattattgctccactataaatacagaattgcactctttaacaatatagacttatatttacagaattcttacttgtagtccattgatataatcaatataagtagttcgccctccaattattagtttataattagagttggtcaaaatattattttacccttctaattatctcttgactccttaggtaccattaattcaatatgaatagttaatctataacttattatagatttagattcaactgttagcactcccataattaatactataagagaactaatattcgatccattagtaaagcttagattccactattgtataacatgttcccagtcactcatgttaagctccaaaatagaagttgtaagaatcatcttttctgagaaactttaacgagtgaa

SEQ ID NO: 142158 - DNA, 1327 bp, Cannabis sativa
  modified_base (459)..(476): a, c, t, g, unknown or other
aaaacgtaaacatcaataaatgagcaacaatttctattcactaaatacaacaacgtatgcgacttctaatgttcgagttggctgttcatattctggtgtaagctcgcgggcttagcatatacctaacatttagttaagtgtaggatgtctgcgttcttgtatagtcgcacttacgaacatcgtataaagagctgatagaacctagaaacgcgagtctatattggtttattgaggttgttgggtcatcgagaccagctcgcatcatagagagttgatctctatgctttcacaggaggatcgagaggatactcgcacatatcctggtacatgcgagttaagtccgttccttggtcctacataatgcgggccatacgaatacgactagacttggtcatattcgcatcatctcgctgagtctagctcaggcgaggtttaaactcgaggagtctctcattgacnnnnnnnnnnnnnnnnnnaaaattgagtacacgtgtcctccacacaggagtctggtctcgagtttctagttgagagaaatctcaccataacacatgcccctagtttcgcgacttgacaggtgcggtcatgagggaaactatatgcgagagacagattaaaggttgtcacgagaaggtgacctttggttgtccaatcaagggtttcaaaaaattacggctgtagttattttgttttatcttatttatggtgccacgtcatgaaactcttcggttttcgtgtaggcgtgcccatggctgaccgttggataggacgaccttaggcattcttgcagccacgtgtcataatcccaatttatgagggatatgggtatttaaactctctgatacgaaataacttcctcattttccctctcgttctttacttcctcttccctttttctctaagatttgaagaaatcctcatccatccttcacccagattcacttttcttcccatctttctaaaatttcaggagagattgaaaccatttgcagggagaaattagaaaagctaaaggtcaatttctaatccactcgtgtacttggttttttgaaaagatgagaattatttttctgggctttttgacattttgagaggcttgaatatgtatgtttgtagggaatacacatagggctatatttttctgtgtagaattggttaatcttagaaaaataggcctgaaatttgtaaaaccgtgaactttaggaaggaaagtttgaatatatgcacctttcttacttgtttatttcttgaatacacgcgggtattcgaatgaactcttcgaatactcgcatacctgcttcctttaggttttacagagactttatca

SEQ ID NO: 142159 - DNA, 858 bp, Cannabis sativa
tttggtcatatctttcagagcttctggcttttgaatcttcccaagccacttgactttatttctcatgcctttcattacagcaaccacttcaatagggtctattgttagagtgtactccgggatcggtgctttatcttgatagcctctaaacttttgggatgattttccccttacttgttaatcacaggatcgttggggcggagctcttccactactttgaaatgatctggatctgttgttggggtatggttcaacatgataagatgacttgcgctctactcgtcttggccctcgattctcacgagaacttgaatagttggagatcggtttgttattcgattcatcttcctcccatttgatttgagcgcatgatttggcaagcacatcctccttagtcctgcaagggtatttagttaattctttatataggtcaaattctactagaaggccttttcggaaggttgtaacgactgtgtccacgttgcaggctgtaatggacaccttctaagcatctctctccaagctctttaaatctcctcaaggcataatagaatggctcattgtgttgttgggtaaaatcttcaaggtatagcatctgtgactagtgttgcacataaacaccacggggacgaggacccgcgggaatccgcccctaatggggcgaggattccccgacttagcggggatcagatgcgggaacggggttgattttacgtacccgagtcggaggcggggcggggtcggggaaagtactatctgccacaacttatccccgattatatattaatacatataaattataatagttaattacttataataaatatataccttggacttttcctcttctcaatatat

SEQ ID NO: 142160 - DNA, 628 bp, Cannabis sativa
ttttttaaaaaaatatttaatatagtggcacttttggtgtgtcactataactctaaaaatattaataaaaaagaaaaaaaaaaagaaaaataagatatctacttactaatttgttaaaaatttgttttgctaaacgaacttcaacaatctcaaaatcacctcatcgcataaacatccaataacatttaaataagatataaaaataatatgacaatgttagaaaataaagattaatgaaaataaaaacttaaatatgaataaaaattaataatcgaataaatatctcaaaatattgtgctatcattaataggtaagttaattaaatttggagttatgaattgaaagtcattgaatagaatattaactatttcttcgtgtattctcttaacttaagttgtaggcaaaataacattttatattcattaaaagtggtctatattcacgtgtggttgtaataatttttaaattttgtactctgcaaagaaccattactcaattagttcataaacttataaattaaagtttttttcattgtgcattaaatttcatgtaaaacaaattacatgtcagtataatatgattgacaaataaacaaatgaaggaaataataatataaaaaaaaattatt

SEQ ID NO: 142161 - DNA, 753 bp, Cannabis sativa
tagctaccagaatacaatagggatggctccctacgagatgctatatggtagaaaatgtcgttctcctattcattgggacgaaactggagaaaggaagttcttaggttcgaaattagttcagaggaccaatgaagatatagataagatcaaggctcgaatgcttgcttctcaaagccggcagaaaagttatgctaatccgaagcgcagagatgtcacatttcaggcaagggaacatgttttcctgcgagtttcacctgtgaacggtattagacgcttcgggaagaggggtaagttaagccctaggttcattgggccctttcagatacttgagagagtcgggcaggtggcgtatcggctagccttaccaccagcactgtcggctgttcataatgtattccatatttcaatgttgaggaaatatgtttcagacccgactcatatcttgagttatgaagccctttaactacagttagacttatcttatgaagaacaaccagttcaaatccttgataggaaggaaaaagttctttagaacaagacaattgttttggtcaaagtgctcaggagaaatagttaggtggaggaagccacctgggagttggagtctggcatgacgactcaatacccagagctattcaggttagattttgaagacggaatccttttaatagggggataattgtaatgaccgctttagtaatttggattagtaaaggcaatttgcactaatttctgatatttttataattattt

SEQ ID NO: 142162 - DNA, 1302 bp, Cannabis sativa
ccatgttcttgttatacattcccatcttgttggctcccttaatagttatgtttaaaacttgatagcggccttcccagttgggtccaaacactcctagtgttggattggttgtgtttaggaacaatcttcgtagcactaggtctcttatgaagaatttcctatccttaacttgtttgttaaagtgccttgcgatcttttgctggtaggcatgtagctttagcgtggcttgatctcttctttcttctattttctcaagggattcttccagtaggatattgtttgtatctggtcataggttgtcctcctgtgagatggtagcattggctctccatgcaacatcccctcatagccataagctagagggaatggagtttgcttagtggttgtcttctgagtaatcatgtgcgaccataagacctctaggagcaattcaggctaattacctttttcctcttcaaggtgcttcttcaaggtgtccttgagggtcttgttaataccttctacctacctatttgctagaggataggccatgagagaagctttttatgccatgtctattgtagaaatcaatgaacatgtcactgtcaaaaggctttccattgtctgacacaatcttctgtggaagtctaaatcgacatatgatgctcttaacaataaagtgaaggactttcttggaggtgattgttgctaggggttcagcttctacccacttggtaaaatagtctacaatgactacgataaaatgcacacctccttttccttttggaaattgaccaattatgatattcctcataccgcgaagggccaaggggactgttgttggaatatattttaccagaatctagatttactaacaactatgtttttaacaccctaaacatgaacttctaaaacgataaaaaataaacacgtaaaagatatgagaaaccttacattggttgaagctgaattaaatgactccttccgctcagatctctaacccttgttttctttctgtagcagagtatcaccaagatttgagcccgaaactccttctgttatttggattcttcacagtcttacacactaagattgaggactaaatttctatgggtggacatgcaatcaatcactaaggctcaaatttcatagttaataaggctataggatttcgaattagaaggaagaaaagtagaagaaaaagaagaagaagtctcagaaaccaagttgtcagagagaatgaaaactaggtttaaagcctttgaagcattagttggataatgagaccattcttttctttttatactaattcacatagggtta

SEQ ID NO: 142163 - DNA, 596 bp, Cannabis sativa
tggtccactatcaatattcaaggttgcatcaaagacaccctctacaaacagtcaacaacaacaaaccaacagaatagtacactggttgtccccaccctgcgcaatgctaaagctcatggtggatacaacacaagacaaaatctcaaacaagattgggctcgcctgggtaattcgaaataatgatggtgaagtctcctcagcaattgcaaaatcctagaatagttgccactcaacttccatcatgaaagtgcatgccctattgcatgctctcaattggtggaatggcaaccattttgacattgccatcgttgaatcagattgcaaattgctttgcaaacattctcttcgtgcgagaccttattgaagacataaatgcctcttattcgagctattttgtccgtgaagctaatgttttagctcacaatctagaaaaatatgctttaggcatatagagagcataaccaccttattgtatcttgtattcataatagaaaatctatcgtttttaaactttcttgtcttgaattcttgatcttgattggacaattgtcgtaataggtaatttcactatttttaaggccctgatagttacttcc

SEQ ID NO: 142164 - DNA, 554 bp, Cannabis sativa
gtgaggaggcaggaggacggagagagagaacgaaaccgagccgtgaagaaaaagtgagatttcgggtttgtcgtttgagagtttgtgggctgctctaaatcgtttctttgattctaaatcctctcataaagcttttagaatgtgatttagaggttggaaattaaactgttcgaattcaccatcatttacgttcaaaaatacggttcttgaaacggacccgaatttgaacgtgtttaagttgtttcggagatcaaaggaggttgtgtttaagtttatgggaccccaaagatcagttttgacgtgaagaaacggggtaaaaggctctgaaacgaaaaatcacagttttggacaccatttttgccggtgtaccgtgtttggagaagacgatctcaaatcggccatttcgagacgaaatatcagtggtgtttgactcctttaaagttctgggatccttaggaatattttccaatcgaaaagacgcatcgaaacgggctgtagaaaaactttggagctcgccggcgccggagaagacaattacgccggcgtaactccgg

SEQ ID NO: 142165 - DNA, 625 bp, Cannabis sativa
ttatatatatattatttttttttgctgttgtttgaatgttatttttgttattatttttatgtaatttttttttattatttttatgcattgattatgtaattatctcgaaaaatatatgtgttatagtataggtgcttaccagacaagttttaatttacagtcatattttttaaaaataaattatttttcataattattaaattaaaatatacaattattgttattagacacttcaaacaatataaaatcttgagataatattaagcatcgagatgattgtgtaaaattctcagttatactacaagagatatcaaattgttattggtctaattctatattaggtctctcaaattttataatataaaaaattaataactactcacaatgcgctacatgttgttgttgagtaccttttaagatgtctagtaataatagaatcgcaaaacggattttgacacggcatacgaacacgaacatgacacaaattttatgagttacgatagggtagggaaaattagacgcggatcaaaaatagatcgacatgatttgacacgaaataaaaacaggtcaaacacgatacaatccgtttaacacgaatttaacacgtttgacacaatttttttaa

SEQ ID NO: 142166 - DNA, 1150 bp, Cannabis sativa
  modified_base (338)..(338): a, c, t, g, unknown or other
  modified_base (495)..(495): a, c, t, g, unknown or other
tccatgcacaattctcctcctcacgccaacttccattacatttgggagacttggtcgaagttaagcaacgaccaggcgagccactccgtgcgtacatcaatagattcatgacggaagcgaccaaagtttcacgggtaaccgaggatggaaagttatctaagatactggggggcatcgaagtcgtcggtgaactttgggaggatataagaaagaatgggccagtagactcaatgagtaatttccttgaccgagtcgaaggcttcatcaagctcgaagaagccattcaacgagcggaaggtgaacaaaagctgggcaagtcaaaggctccttccactggnacatccgcccaacttcccaactacacaaataattcaagctcaagtggcaagcgttccagcaataaccacaagcaagggaacgggaagaaaggaaagttcactaataaatccagacagactccctgggagaatcatgccaaatacactgcattcactnttctgactgaagatatagaaagtgtatacatggcaactcagtcgatggccccgtacaagaaacctgggcccttaaagaaagacgccaaaaaaagggacatgacaaagttttgtcggttccacggggactacggccacacttacgaatgctacaagggaattgaattgctaataaggaaaaacaatcaacacctgcagaagtatgtcaagaccgacacatgttaaaacaaccaagatttgctacctccactagtagatagacacttgcaagtcattattggaggtcggcacattgctggagattcgggcaaagctcgggagaggtatgctcgaacagcacaacacgaacaagatgaagttatcctggccgtgggagagaggaagcccaaagttccacgagcaaaagaaccaaccatatcattcaacgatgaagacgctgtcaaagtcaagtttccacacaacggcccgctttttgtggaggtctaaatagccaaaaaaatggtggccaggaccatgatcgacaatggagcctcttccaacattttgttcaaaactgctcacgaaaaaatgggactccaactaaaagatctaaccccatgcctccagcttgtctatggtttctccggtcaaggagttgcacctctaggacaaatttg

SEQ ID NO: 142167 - DNA, 517 bp, Cannabis sativa
aatccaacatacatgatagtaaatagatcctggtaaaaaatttccaacaataagtgtcagagattttttcatatacctcgcgtaccaccaacagaactgagaatgatgacctcgccttacccatttacaatatggggaatcgatttatttacggcactacccacaggacgaggaggagcaaagtatgcagtggtggctatcgatttcttcacaaaatggatggaggctgaacctctggtttccataaactacaaaaaagttctcgactttgttgttaaaaatataatttttaggtttggaatacccattaagatagtatcagataacgaaactcagttcgatggtgaattattcactgtgttctgcgagaggaacaagataatcaaaagcttctcatcaatatccaggcctcaggcgaatggacaagtggaagctgttaacaagaccttgaaggttactatcaatgtaacaacctaactagcataggcgtattacgtgattttaaacatactgtgca

SEQ ID NO: 142168 - DNA, 696 bp, Cannabis sativa
aacatgtgatttagaacctaaaagatctgaaaagagttaggttaatttgtgtaatctttcattcacatcaagaaaaaaggatagaaattaggcattaacaattgggtaaacaaatcaacaggattctcttccctattttatcatcttgattgaatctttcgctgttaattttagtttcatgatattattgttttgtgtttaatcataaaactattggtttgccaaatagaatcataaatttagtctaggggtactcaatccaattatttgtggttcgacctcacgcgtgtgaatttactacttgattactcgcacttgcatattgtttataattttcgtaacaagtttttggtgtcgttgccggagaattgtttaaggatcgatattacataacattacattgaattctactttggttaatttttcttgctgactgctaacctgtttctttcaacattgcctttgtctatttcaggaattgaaggtgtatgcgacgccaaggacagagtgtcatattgatggtttatcctgaaattgagaagacctgtagaagaaacaaaagaaacaagaggcaagaaagagtttcagcaactgctgaaatagaagaaatcatggctgataatgccaatggcggtatcagtggaggcaacaacggtaataatggaggtctcgttgaagatcaagaaaatggtcgta

SEQ ID NO: 142169 - DNA, 1574 bp, Cannabis sativa
tagtttgggtcgggggcaggtttcaggtctgggtctgggtccaacttcagattcgtgggtccaggtcaggtcctggttcaggtttgagtcccaaatttagatctgggtctgggttccgggcataggtccgtagtctaggtcccccatccaagaacggttcctaggtcctggtctaggtccaggttcgggttcaggtcacgagtcttggttttattctaggtctcggtcttagttcgggtccaggtttcaatcccagtcttggtctgggttcaggtttgggtgcttgttggggtcttgatcctggtctgcgtcgcgggtctcaggtcccggcgagggtttaggacctagtcaggtctaggtcccggtccgggtctcggtcgaggtttaggtcccaagtctctggtcccagtcctagtcaaggtctcggtccaggttctggtatgagtttgggttatggtttgggttcgattctggtctcaagtttgggtcctagtcatagttccaattatgatttcgggtctgggtttaatctaggttggggtcgggtaatgagtcttcctccgagtttgggtacgggtttttcggatcacagtctaggtccaggtttgattcctgggtttgggtcccaggttcgtgtctggatctacgtctcgctccgggtccaggtccagtgttttgatcccggtctgggtctaggtcggtattcgggtttgggttcgtgtccatgtctaggtccgaatcctaattttagtcaggggctttatttgattccgggatagagtcccaattttgggctaaagtctcagtcctagtctgggtcggggactgggtccgaggccgagttctggggttgggttctcgtgtaattcaggtccccgcccaggtctaggtactggtcacagtcccggtcctgttccagggtcctggtcacattctgattcaagtttttgtttcgggtccaaggtctaggtctgggtccaggtattggtctagcttcgagtctttgtccgagtcacagatcaagacatcgactatgggtcttgtccaagccccggttctcggatcctgggacaagatttggatcctaatcacgggtcccagtcgagtttcaattcatgccccaggtcccgctctgggtatgggtctaggtgtgggacggagaatggggtccagtttttggtctcaatcccagttctgggtcccgagtcctgttcaatgttcgagtctgagttcaggtttaggttcgggtcctgagtcccggcttaggtacaggtttaggttttggacccaatcccgcggtgggtctaatccgagtccgggtccaggtccggttacagttttgggtctggatccaagtcctggtcctggccctattcctcggtcccgatccgcttctagtttcggttccagtttcaagtaacggggtacggctttgggtcaagttttggttcgagtctaggttcggttcctgatttgggtccggggcaaggttcaggtctgagttttggtctcggttagggtccgtggctgggtctggtttcgagttcggattcgggtttaggtcccggtaccgt

SEQ ID NO: 142170 - DNA, 634 bp, Cannabis sativa
ttattttttaacacttttaagtgtcaaattaatatgtcagtcaaagattggttcaagttatttagttttttttttcttttaaaaaatgtaataacaactataaattaatgattgttaactattttcgctcctcgttgaaatcatcttcatcaatctaaagattgtaaaaaaaaatttatcaaagtagattactaattaattgaaatcgttgcttccttttcacaaacaagcataacaatagaataatagtaagcaaattattaaaaatcaaggagaaatctaacggtagctggttgaatagagagataggtttgtggcatagatgtagaagattatatcaaagtaaaaaaatcacataatgttaagttggaataaactgaaaccctaattttttattttttatttttataaaagaaaaagataggtcaaacggttattgcaagctaataattagatgccatttttaaaaattaattaagtattcaaaaatttattttagaaggggtagaagtttaaattttgtaaaaaaataatttcattgtaaatattatagtttaatggtttaaatattaaaaatattatattagggacttaaatataaaaataaaattatttataaatattaaatatttaa

SEQ ID NO: 142171 - DNA, 930 bp, Cannabis sativa
ttaaataaacttgttagttgttagtaaagtaaatctatctaagattaagattctggtaaaataattccaacactatttcctacaaaatcctggcaagcttaagggttttgtacaaaattttaggatgggagtgtcccactccccttgaaatattctatttctactcggtcaaggcagtccctgcgaggaagaatgatgcaggaagcttttactatctcgggactcacacaggtgatcgtaagattatcgttgggttaccaaataagactcctttcaaagaagacttcttctggacaactggcctctccccaatcaatacaaccacctttcgtataatacctaagtaaatctgcaccaaacttgggtttagttattccatgtctttaattttggcctcgctgacttgtagtattatcttttgacagcggtctcgtaaagaccaactcctactcccaagatggccgagcaatgcaggctcttgctgggtcttccctttggtctccgatcagccgagtttcttttgaacgaggccaacctgagatccgtgagcctcctcgctcaacacgagtatacgagtgattataaatatcccaagtatgcgttgtggcagtaggttctggtcccaagtgatgaggaaactcaggactatgcagctcggacacattatctccaaaatacagtccctcgggaagctgaagaagaagcatcctgaggtcatcaatgtggatggtcacccatagtgtttacggctaagcgtaacaattagtgtctttcagcaatagtcagtacaatttttatacttggaacccctttctcatagagcgcatagcacataggtttgatagttggtacccagagttcaatgttcaaattagctgcactagttcttactatgggattgccgagtagtatgggactatgttggataga

SEQ ID NO: 142172 - DNA, 552 bp, Cannabis sativa
  modified_base (103)..(103): a, c, t, g, unknown or other
tctagaggtggtcggattttttcggatttttgcggatttttgtagcattttatcgcctttatcgccggattgcgtttataaggtaaatatttattaacttganatataatatatatgtatatattttgtgttttactattgaatatatgtatatattttgtgttttattattgaatatgtgtttatatattgtgtgtatatatattttgtgtgattgtattgcatatatatttattgtgaatgagaatgaggtagtaggaatttaattagtttagaaataaagtttttaaaattatgttagtgtgatatataattgattttatatgtatatgtatatgatctttttaaaaaaattaactataaaatttagtaattagtaacttgttacattttttaataactagtaagtaattaaataattaaataactagtaactatagaatttggttgtatattgcattatattgtaggttgtgagctaatttttgaggttcgacatatttcggtattgatcgaattttaacgtgctataggtatatacattaactaact

SEQ ID NO: 142173 - DNA, 1327 bp, Cannabis sativa
  modified_base (71)..(71): a, c, t, g, unknown or other
  modified_base (442)..(455): a, c, t, g, unknown or other
  modified_base (879)..(893): a, c, t, g, unknown or other
taattttatatcaacttaaatcaagtaattttttttattaatgattagttaaaataaatagactaaaatanattatattttaattagaaaatcaaggattagtttatgagatgtctagatagtaattttatgagtagacttctggtatttttctaaatatatttaattaaatagaaaaattaatatttaagttaattttatttaagacacttaaatattaaatatttttttgagagatttaattaaatagaaaattatatttatgttaaaaattaatttaattttagatcaacattaattaaaataatttttccaggtttattttattttattttgtaattcaaaaatgtatttttaaatacattagattttaaattatgattagagatacatatttatagaaaattagatttaagttgaaaaattaattttaattaatttnnnnnnnnnnnnnnttaagtaattttcataatatttatggaaaattaatactaaggatggaagataaatttttattttcagatctgtccatgtatatatataattttataaatattaaattaaaatttgtatttagagttatctaaattaataattttaattaaataaatatattaatattaaaattcatatcaaatgaaaatataatcctttaaaataatgagttttactataaggatattcgttctccattattagttctacatagttattgttttaatgagattcatccctaatagatattcattcattagtaatttaacgctatagaatctcgaaagataaatattattgtaagtcttttattcttggtaacgatcactccaatagtgactgctaagagtagggcttacaagtatgaaacaatagtggaagctnnnnnnnnnnnnnnnccttgactctcgcctaaacacgacaacgccaaattcttatcttgattgaataaaaggttgctagaatggtatccattttagaagagttgactactctattcaatgaataatatctttgactctagcctaaacgggacactgtatcagtttgttggataccttagaaattatttaagatatgattgttttgtattttcacatgtctttcttacttgttaaatgtataataattattgaattgtgtatgaatttatattgaaccttcaatttgttttctgttattagttattgtagttttaattttgagtcttcattgtcagtctaacttatttgttgaatcgtgcaaattgaattaaattggttattttacgaacaaccctattaatgagagttcctctctctctctctctctctctatatatatttatatatat

SEQ ID NO: 142174 - DNA, 515 bp, Cannabis sativa
  modified_base (31)..(33): a, c, t, g, unknown or other
ttttaaatattattttaaattaaatttgaannntttgatagtttaaccagatgagcattttcattaattccaagattaatttaagacaaataataatttttttaattactattacaaagtataatggtaacttttgtttttatttaaatcactattatgcttttaaatttcaatgattatcactaaattgaatattattaattttaaaattatgatattaaaaaaattaaaaactaaaataaaattaatatacgtgacttgccacgtaacatctatctagtctatatatatatatatacacttattcgttttatataaagtttgatttaaaatatctttttgagaaaaaaagtactaaaaatatttatataaagagcgatagaaatataatgaagaataaagagtatcacatgagaataaggaagaaaaagttacaatagtttttcatcacttttcatgaatttatcattaaaagatcacttttttacattaaataattcatactaatgagtaaa

SEQ ID NO: 142175 - DNA, 776 bp, Cannabis sativa
atgcttaaataacctacttcatgcatccaaatcctcatacaaaaaaccaaaatttcagattgagaaacacaacaatatcatgctccaactaagcaaatcccaagctcaagaacaagagcttaatcttcaaccatttaagcaattttccagccaacaaaatatcacaatatcacatgattcaatactagaaaacaccctaagatcaaaatccatgctcaagaactcaaatccaaagattaacacactgaattcatcaagatcacaacaacacttacgaacatgcaatcacaagagcaaaatacaattcaaatcatgcttttaccataataaattcagaaagataccaccattaaattctacaaaaaaaaacacagtaagaagttacctaaactccaagctcaagatccacaactccaaaagcttcaatcacaaccaaaaccaagttctcttcaacaattcaagctttgaaatcaaatgggttaaagggagagagagagttcgggtgagagggagaaaaatccagaaagtttattcatttttcctcaaaatcacttttaattcaatataactcaattatggtcaaatgaccattttgccctttgggctaaaaaaacagacataagcatttccaagggcataattgccatttcccaatcaattatattcaaaaaaaatttagattatcacatgtcaaataaaatgcaaaataatcaattcaatttgcatttcgggctcgaacccggttcggcccaaaattcctggttgtgactataccg

SEQ ID NO: 142176 - DNA, 624 bp, Cannabis sativa
ttgaaaatcaaagaaaatggatagaaaggggtaagggttttgttgaattgagagaggagggtttcgttacataagttttagtttataaatttaaaacatatctataaacagataagaatcatttatatataataatatagtataatattatttaatactattataaattttattattaatagttatcttattatttcttagccacttaaaaatctttatttctagagtatttggtcaactcttagtacccaaaaatacctcgatatttctaaaataaacttatctcaataatcccatcaatattttctaactaaaacaattgtgatatttttagtctccaatcgggtctccaaggcaggcaaacctgagaatagtttatttcacaaataagtcatattatatccacgtatttcaaataaatctctgtaattaaaaaattacgcatatttcttccattatagcaaaatttataatttatgctaaattaagtcagcaggatcataatcatatgcattactacttaattcacccacaatatataataaatcctaattattcataattaggtttttgggatattacaaccatcccccctttatagaaattttgtccttgaaatttatt

SEQ ID NO: 142177 - DNA, 683 bp, Cannabis sativa
aggaactggcttgtcatgacttcgagatgatcgaagttccttcttgacagaagcttgctgggcacgagtgcgagtggaaggaccagttggagtagaagcagcgacttcctttactgatgcagtaggaggagaaactgcagcatgtggaggagattcctttgaagatgaagacgatgaggtccaagtttcgtatgggcgcacagattttcgagcaactcgtttaggaattcgtttgggcttcacaggttgagatttacgctgaggaagcaatgaatctcctgtttttgtagcaacaggaggaggattcgagggggttgcatcagtttcaaccacctttttgggatgccctaggttctttgttctaaccatggtgatctgaaagaaagaatgaataacaaacaggcaagaagacaaagaaatagaatcgggtaggtggttagaataaatgacaaaaaattggtttaaataaacaggggagatttgagcaaaaaggaaaccaatttcaaaattatgagtgaccaccagcccacaaccacaaaaggaaaccgcccacacttgcaaaaataaaactttctcctttccttcttttttttaaaaaaaaataaataaaaggaaactagaaaaaccaatattatttccaaaaatatctcatttaagacaaactttcaagattaaaaacacat

SEQ ID NO: 142178 - DNA, 1178 bp, Cannabis sativa
aaagcctagataattctcctccacgagcatcctccctatcgaaaaaagagccaaagcaattcatggcccaacgaattgtgaataatcctatttctaccgtgatccatcaaacatatgaagaatttgacaatcagtcttcttcctctgaccaagaagagacttctaaaacttagtctcaagattcagatactagtgatgagtctcaagattcagatactagtgaagatgacgttcccccacattttatggctcaatctgtagaagaagcatactctcaaactgagcctattgtcaaaccagaatccaatcatcatcaaaagagtaaatattctaagtttcaaacttttactcttgatgacattcccccatctaaatggcgagaaagattacaagaattccaagcttggcttagcctggaaacacaaaaattttagtcacagacgaggacgatcctattgagttttgtctaaagattcactggaactttgcaagattggtggacaagcttagatgaataaacacagatgactttcttgcaactcccatctgtcgcaaatgccctaagccatctctatgtcgagttttgtggccaagatgcacaagtaactgaaagacctatgagcagagtttttcaagctcaaatgtttttcaatagataaaagagacttggaaaaatattacaaaagaatgactaaatgattctaccaaataggtggcattgatgatccaaatctgaagcaagccttcatttcctctattccagagccatttggcgaagaaacttttaggctactctctggatcgggaaaaagcctaacagatgctacaattggaaaaaattttccaactagtcgtcttaaaggcccttgaaaaaatgtgctcccaaaaaaaatttctttaggaatttatgaagcaatctaaaaaactaggcaaagtttgtagcagacgagatttactcatcaaatgcccttctaaatcttcgtgttcttgcaaaaatccaaagcattaaaacaagttcaaaacgttcaagttctcaaagcacaaatgatgtaaaataaaatttttgcgaaggaagcgcgagtttcataaaaaaaaactgatcgatgctatgtgtgtggcaaaaaggggcattatgcaaaacaataccctaaaggaaaaacagtcaagcttatctcaca

SEQ ID NO: 142179 - DNA, 1036 bp, Cannabis sativa
  modified_base (739)..(746): a, c, t, g, unknown or other
caaagtaatgtttcttttctttacaacgaaggaaacgctgcgttgcatcaacgctgagttgctaacagtgaccggtgatagccggtggtttttaccatactgaacgcaaaaataaaatatatgcttttccatcattgcaatggatggattggacccctttttttttaaaaatgttatagtagtcttatgaggtgtgtaatattacaactaaaatattctctctctcaaatgtagaaggaatgggtgcatcggtggaccttttttaggagtgtattgtagaaatatctaattacatttatatattttaaggtacttctacaatatattctattaaaataggtacgatgcacccctatttatattttacaaaattttaaaaaatttagaatcatttataatatagaaagcaatacttaaatagtttattttacatgcgtatataataaaagaattccatgtgcaacaaacaatttgaattcatgttaaatctttttaaatttttcaaaattttgcaaatatcttaaataattataatatacacgaatataaaaaaaattgggttaaaaaagtctctctaatgtaaaaacatatagagatgcatcaatgtttatttttaaggtagtgtaatgtagaattttcttatatttaaatttacttttgtttttttttaattggataaatactatttttgaccctatattttgtaaaagttactgattggactctctattttgttaannnnnnnnatagaccctgtattttctaaaatgttaacaataaagccctgagcttaatttttgacaactttttttttaatataaccaatttgaagataattcttaatacaaacaaatacaaaaagtgtagacagttttgtcaatttttagatcggttataattaaattttattttgataaaaaaatcaattcagggtcctatttgtactgttttcaataatacagggcagcattttctctattttattaacctaaccatctgtcaattttaactataaataatcagataacacacaatt

SEQ ID NO: 142180 - DNA, 822 bp, Cannabis sativa
caagtactataacgaggcagtcagaagtcccaagagaaaagaattcacccacatgactcagaatgaaaatatgagtgttattgagtatacaaatcaatttgatcgcttggagaggttggcctcgggaattgtgccaactgatttcagtaaaaaggagaaatatctggattgattaaatgcaaagattagacatgatttaatgattactactgacgaaaaaactacctatgctgaaatgctagagaaggcactgcgagctgagggcacagttggatgcatgaccgagtctgttgggactcccgtggttggcggagctcctacccctcctgcagtaggttttcagcaggggaggtagtggtttggccatagatcagaaaagaaaagcacccactgcaaccggaggctcaggtcagaacaagaggttccgggggaaccagggtcgaagcaatcgccaaagtggcatcgaaactcgatacacttatccggagtgtcccagttgtaaaaggcatcatctgggggagtgtagggtggtgtgctttcagtgtggcatgcagggcattacaagagggattgccctcaactcagaaccgaagcaccgaagactccggcaaaacccactccagcaagggtgttcgccataactcaggctgatgcagaagccagtccttcagttgtaacaagtcagctctcggtcaataactctttttacttagtactgtttgactctaaggccacacattcttatgtggcagccagaatttttagtaaattggatagaccgcatgatagttatgaatcaaggtttggaaccctattacctgg

SEQ ID NO: 142181 - DNA, 1030 bp, Cannabis sativa
  modified_base (156)..(159): a, c, t, g, unknown or other
gacaattaaaccattggttaaaattagaccattggatctatcaacaagttaaccatggcaatttcgatcaaacaataatatgttttataaaacttgtttgaataataaacaatataaaactcacacatgcaacaaattggatagttggatataggnnnnatttaatttaaattaattaattttaaaaatttaaataatataatattattttcgaaaatattcaaattaaattaaaaaaaattaatttcaaaattaaaccaataaatttaaaaaaaattaggttttctacaaacctaaatatctattcaaaagatgctaacaacttttcaaatttaatgttactttgaaaataaaattaaatatccaataaaataaaatgatacataaatatcatttatctaattttataatttaatttaaataaaataataaaattttcaaagttagcgaaaaatcttgttacaattttaaatttatttattaaaataatattattttaaatttcaaataaggtcattttataaaattaattaaataatttaaaatataatacatctgaccttaaatttaaaaataagataaaataatccaaattttaaaaaaataagataaccaactaagaaaaaaaatagatttttacctattttcaaggttaaaaaactactaatatctaaaattaattaaaaaaaataattaatttaaatctgataattagatttgaaaaataaaaatcaaaatacaaaactacacaaaaacttcgaaattaattccatgaaaaagcatgaaaaaatgaaaaaattgaaaaaaaaaattgcatttggctcgggcgcatgcaacatgaggactggggctgatttcccgcacacagatgcttccagcagtatttcagcatgcgcatagcccccattcagacaagtctcaccaatcagaccaagaaaactcggacatgagccatgtctgaagcgcgtgcacccgagaaacatgggcatccgcgcgcgcatggaggtgacacacctcttgattttttctt

SEQ ID NO: 142182 - DNA, 655 bp, Cannabis sativa
  modified_base (117)..(117): a, c, t, g, unknown or other
tatttaccattaggcttatcgggatattacaaatcctatggaattttaagctctttttcacttcatatgtagatttcagaaagcagttgtcaaatggtaagatatctttaaaagaanctaaaaatttagtaaaacatttattgctcactccattttctactttgatgttgtaaaactttaccattgttggtaatcttagttttttacaatcattgaacaagagtttatctgcatcacttagaaaattatcgaattttttatgatcattaagaaattcctcttgtgctttgttaagcaagtccaatggatgatcatcgaaatcatgccctccatatcatctagcccttctttcctaatgaatatggatcatcagctaaatgttcaccatgccaataccaagtagtataacttctattgaaacctcgtaaataaggttcttaatcattgtaatatttcatttagatccattacaacaatctacacatagacaatgaatacgttcgagattttttagaattctttaagccaaactctaaaaatgcatcgaaccctacttgaaattgcagtgtgtctctctcctcacgcacccatgatttatccataacaaatatcctaaccaaaaaaattcagtttactacttacacaatgtaactga

SEQ ID NO: 142183 - DNA, 762 bp, Cannabis sativa
tttttttttttttttgtagtgattggtattaaaccatttacaccgaaacaatgtcactaaatacaccagtaaatgttaacatcattacatcttccaatattccataataattaaatctttctgttcccgccacagagactcggctattttgactggtacgcttcttatcgcgttcaactacgataaaacgaacaccattcactacaacaccttcgtaatgtgttactaagtgatctgaaccatatgctaaagctagcaactcttcaccattctccaatgatccaagcttgtgtaaatcatatatctaaatgaacaaaattatattagattgattaagaagtaatcatgatgattttgaaagcttaagagtctcatatcaccttcttatgaaactatcgctggaaattttttttgtgtaagacgttatgatctccatctgggtatttaagctttatctcttctaagtgttcactgtcagtcatataacatgaacatgttaaataagactatctacaacaagaccaaatatggattaataaaggaaaaaacttactctaaatattgtctaatttcagatgaattgtcaaagatgaacaacttagccttttcacgagtcttttggtccagaggcatgatattttcttttgttaggggatgacattgtgattgaaagatagtaagtgtaacaccctaactagcataggcgtgttagcgtgatttttaacgtactgtgcatctctttgctaatcaaagaggttattg

SEQ ID NO: 142184 - DNA, 716 bp, Cannabis sativa
  modified_base (642)..(657): a, c, t, g, unknown or other
aactttgaaatttcaaaggatcgacatttaatttaaattgtatatctcctatcatttctagaatgtgatcatcttcatagtcaaaattaacacacataaccatgttagacttagacgttccctctcccagaactctattatttttcctgtggtgaacccaaaccttataactcttgtctattctattcctaaataaatgctcctttatcctagtaatatctatatgctccatgttatcagatttaagacaaggacaaataatcaatttaggatttttggcatacttctgacaaaagtccaagaaatggtcaacaccttcactatattccgttgataatctattcgcactaatctaatttctatccattttgaaacttctaaaaaaaaaaactttattcaattatttgtttgaatatgtgtagtaaataattttttaaatacatatatatattttagtgaaatttatcctaattctaccaaaatttcaaagcataacggctgtaatcagacattcccaaaaattaaaaacatgaaaaaaaaataattaataaataaataaaacaatacaataataacaaaataacattaacaatattaaattatccacccatcaaactgcagtacatgtattcgcagaacctnnnnnnnnnnnnnnnnatatttaagatattcaaactcatcgaacatgcatattccacccatctgactgcagtaca

SEQ ID NO: 142185 - DNA, 783 bp, Cannabis sativa
tagtccaattgtcaatagatcttataaataatttgtaaaatctaaattttgtttttctttcatctgtgtaaacctaaaaacatgatagggctcatccaaatcaatttgacctgtgtgagcctatatgtttgcttttgagcttagatgcatatagggagcccatttatttctagatacttaaatggactaggttgctaaaataaaatgtcacctatgacagtattatttaagcctaattagtattggacatatttaatgaataataattatttaatgaaaggttaaattcctctcctttgggcctcatgtgagagttggcggccattagtagtgggtacaatatactaaacctagccctccctcacatgaaccaccccaattgtgaatgcccatttgtcttatttaaataattttattaagctaattatactagtttaacctaattaaaatttaattagcaacataattaattttaaaataaatgaatttaattttttattacattattttgaaattaatttagaaaaatacacttagtttaaagaaaagattctggatagtgatttctagtaactaatttatattttctaatatttaataaagtagaaaaatatatttaagtcaaaaattaatttttttaattaattttagatcaacttaaattaggatgttattcttagagcttaaaaatagaattaataattaggttgattttattcaagatacttaattatatgtttctatttcatgaaatttaatttaattagaaaatatatttaagtt

SEQ ID NO: 142186 - DNA, 776 bp, Cannabis sativa
  modified_base (177)..(188): a, c, t, g, unknown or other
  modified_base (743)..(747): a, c, t, g, unknown or other
gttcaaagatcattaagttaaattttgaattgtatcgaaacttaccttcccaaaaatttagattgcatattgatgaaagtgaaaggtctatgatttgttactaacagttgcttgagtccttctatgtataaaccctagtgataggaaaatttaaaaatgatggaatggttgtgtacnnnnnnnnnnnnattactagattcatggatgtcctaatcgtgaccttaaaaaaagctagaactactaactaaagtttgcatgcttgatatctattctaaatgcttagtggtggaccatccgatggtcattaagataagaaagtgtttgttttaacaaatactatttttcaaagaaaatgactaagtctgaaaacaaagtagcaaagtagaggagatattttttcttgattccaaagtgttctatcatcttattctatgtaagatggtccactgcatctattgtcttaacacaaccgatgaggtcaataccatttagattcttagatagaaagtcactgtaccttgtcgtagtgggagggttgcaaggaactcaccctgttatgacttggaagacacttgtgattaaaatcaattgttagtttaaacaagaaacggatactctaaataaggaactaagaagcaaagccaagagaactatggttaaaacaattcatataaagaaaccaaaagttttctattacaaggacaatataggaaattttgaaaataaatctattcaatggactnnnnnaaacttcttgttcctagtattaaaggttt

SEQ ID NO: 142187 - DNA, 529 bp, Cannabis sativa
gaatttggtgttttattatgtgtgaagttctgacaaaccagattctgaagcagaagcatgttaggtcttcattttgggattccgcatatgcccatgagttgactaatttctgcgagcatgtccattccggtgaagtttggtacaatatactttacctcaggcctacttacttatgtaattctaaaaatcggttttgggatttcttctttttattgttctttagtttatttttatgatagaaaataaaataaaataataataataaaaagtttgactactttgtgaatagattaaatttttttaattttggcttttatagttcattaaattcattgtaccttatttattttagatcttattggtatttggtctttttttcctttaaaaaaaatagttgaaaatattgtaaaaatattttgaactttagttggagattttatcaaccaggtaaattctatattttagaaaataatattattttatttttcaaagtgtattttttttttttttatattccttctttcaatca

SEQ ID NO: 142188 - DNA, 527 bp, Cannabis sativa
tttgctcggcgacaatagaaaatgggatggatggctagtttgatcacatgggtaagtttagatccttatttcttagtggaaaatattttagagaaaataaaatatcgatgttgtgcggggttatggaatttgaccattttaccccttgtttgcgaaatacctaaattgtaacttggagggcaatttagtaatttcgtatttaaggtgattaggtggctgcctaattagatgacacctagcaataattatttcagccaaggttaaggttttaacctttatttcattgagagaaattaaaggaattaacaaagaaaagatcaaaaaaatagaaagagctatctttctttccctctctctcttcgaaccagcccaagacaaggggaattgctgctggttttttgggtgtttcagcaaggattgaaggattttttagccaaggtaagccctagcttctctaccccttagttcttgaagttttacttggtttaaatatgtgattttgagtattagtggctgttagggttagg

SEQ ID NO: 142189 - DNA, 979 bp, Cannabis sativa
tcattttatgggaaactttgttgtgcttggttgattttcatttaagacaatatttggttttttttaatgttttttaggtactctatacgtttgatgttataaaactggttatcaacttataggatatttaaaattaaccattatactatgttcattttctttatgttttaatagcaattgtgttatgattttacaattaatatgtttggtatatttttaagcgtacaactttaaaaaaaccattatgcaactgtatacaaactcaattggtagttaaaatatttatcatttcatttctaacatcttatctcaatagattaccaactgttatgcaactttttgtactttttattatacaacttataaaaactcatattcgacttttaaaaactttttcttatgaaattcttaataagtatcaaaactgtccagaaactattttgcaactactaataaactatttcaactttgataattaatagcaatatatcaaaactaacatttcatgttgtcaaaattctcatagagatttaaacaattcaaataattctgctgtatctatttaattgcttgattgttgcatgtctttcggttgtgaccatgttgaccacatttgctgcacttattctgtttttttgtatcccaatcagctacaaatcttcttttccttggtcttccagatcttattttctggtttggtggcagaacaagaatatcttttatgttctgtggtacatcccatgttgtgtgattgagtacaagatatattgacccacagtatgtttcaagccatgttcttgtcgtgtaataatgtgaacagtaattgtaaacgtttaagttcatatttttttatcacagcaagcccatgagcacaccgtaattcttcaatttggaatctgttgcaactgcatgtcttctcctttagattgacactactagaaaattgggttttagtgacacacattaagtaactctaaaa

SEQ ID NO: 142190 - DNA, 1372 bp, Cannabis sativa
atgggacctattcttccaaaatccaagcagatcaaaaaacaaagggagtaaaacaaaataaaccttcattgcattcctagctacagaattcatttaggcagtcctcaaagaaaatataatccccttattcaaataaagacggccaaaaacccaatgactttccttcctaagatttatgatgaataggacatgatcgacttcataccaaagcttagaacatggaattcgcagtcctcttatataatgcgctattgggtgagcagcatgtatgtgagacatctttgttttcattgccttggctttgcagaacttgtggtataacgattgaatggaatcatcgaaaaggcagtcagttgttgcgaaattcagtgtaacagcagaagaatatttaccttttttcctaaggtaatagaagatagtattcatatactgaaacaaaacaacaaagaaacacaaaatagaaagttaaaaaatatttaaaaaaacttaattatagtaactaaactaaaaaaacaatgataaaacaactgtaaaacaactatcaaaagtttaaaagaaaacataaattttaccgagtgattgataaacatgtcacagcaagccaaatgataaaatcaggttatatcttcgacataatcaacacctaatctaaaccgaaggtaatatattgaattcaaataattggaaaaataaaaacagaattcaaagaaataaaaaaatacaaaacagaatgaagaaaatattcacctaggatgttttggcaaaccttcgccaatccaagcatcaaactttgcctcaatttcatgagagacggaatcaacaaatgtctcgttaagagcgaaaatgcccttcacataagtaaccatcttaaaatccctcccatctcctccaaattgagaacttgatgacattatctccattggattgctgctcacatcagctgacccaaaatcaataaaaggcgatttcaatgccggtgcatgctttctcttatccaaaagaggagtataagtaatagtgtcatcagcttcttcatcagaaggaatggaaactgccttttcaacagcaacacttggattggatctaggacctgaaaagataaaattggaaaatcagaaaaatcaaaagttgaaaaacaaatataaaactgtcaagcaactaaaataaaacatattttaccaacaaagaatataaactacacttacattgattttaccaacagcttctagaccagccaacacaacttgctcatcatcaatttcaagctggctaaaaccatcaaaaaaatcatctccctttaaactaggttctttggccttaacattctcaacatccttagccctctcttttcacattagtagcaggaacatca

SEQ ID NO: 142191 - DNA, 722 bp, Cannabis sativa
aacatgacaactaaaagactaattaatactatcgagaacttattgacaatatgttgataatcaagcatacataaattaaaagaagttatcattaattttcataacttttgaacaactacaatcaatatttatagaggacctgccgagaacccatcaataatcagtaaatatagggccaaacatgacaactaaaagactaattaatactatcgagaatgtatcgacaagacgttgataataaagcatacataaattaaaagaaagtatcattcatttcataaacttttgagcaattgcaatcaatatttataaagaacctgcagagaacgcattgataatcagtaaacgtagtgccaaacacgtcaactaaaagactaattaaatactattgagaatatgtattccaatacaaataatatataatcgatctaaattaaccacagaaaaactaacaataaacttttttttaaacagcacattgccgataacctatcaagaatctttcgataaataattgagaatatgcattatttttattttcctcaactaccgccacactagattgaaaaacaccataaccaccatataaaactgaccataaattaagaaaaatttatcaaaatgaagtgtatttcaacacaaataatatataatcgatctaaccacaaaaaaactaacaataaacttttttttaaccacacatttgttggaaattattttac

SEQ ID NO: 142192 - DNA, 511 bp, Cannabis sativa
ttcagtttcaagttcaatccttataaacttaattcatttctaagaatgagtcatacgtgtataattagaaatacataaatttacacattttgtaaatgctatggttattgtaagtctaaatatataaatatatgattaacggttttgtatttatttaaattttttttaaaagaaaatctctaactaagtctaaatatttttgttatcaataataataaattagttcattaatttaaattaataataataacttaactaattaattaaatcaaagtggtaattatttaaaaggtaagtgtgatgtttttttttaaaaaaaaaaactgtgatcaaatatgtaacccttgaacaaatatgtaaattatatgcaggattgtattgtgtatttataaaatttaagcatgaggagaagatacttggggttagctcaagtggccataggtgggtgtgtgagtgttggaggtcctgggttcgagtcccaggtaaaacatgatgtaatatataaacgctt

SEQ ID NO: 142193 - DNA, 1486 bp, Cannabis sativa
  modified_base (46)..(79): a, c, t, g, unknown or other
  modified_base (1398)..(1403): a, c, t, g, unknown or other
atttaagaacacaaataatgtaacagaactagaacctaaccatctnnnnnnnnnnnnnnnnnnnnnnnnnnnnnnnnnngtgatattgaattaaatagatactacagtgagtttattataactgatccaagttcaatatcggtcccttcaaatgcatactccatacatccaacccaagcctactttaatcaataccttaaaaaggacataacacttatccaaggtgtaagtatactacattgtaaattatcctattagttaaaccctatgtactgataaattatatgaatatatttaatcacacaatcttaattactttccattgtgttgacaacataataaacaagaatatcaatatgataaggatttagatagatttataaatcaaataaataaataaataatgacatgaactaaataagatattaaataagtaatgaaaataaatatgtttctttgattgataattgaatagaaaagattacattaaaatagagatttatttagggcacaaagctcaacaaactgtcatatgcctagttatcccatgctcattacacaatctatcaagctcagtgttcatgaattctagaccattatcagttctaagtgtcttaacctttaaatttgttttgttttctacctgagctttccatatcttaaattattatagacactcatctttggtcttaagtaaataggtccaaacacatctactaaaatcatcaataatagataggaagtagtgtttacgtgaatgtgttgggactctacctggcccccaaaggtcagcatgcacatactctaggattgcatatgtgttatgagtagctgatgtaaacttgatcttgtgttgctttccataaacacaagtctcatagaatggtaatgcacatgtctgaagcttttcaatgactcccttcttgtgcaattccctcatgccttgttcactcatatgtctgagcctttgatgccatagctgcatatcactttctaaaccttcgactgtatctgcctcggtcacaagtacaatttcaccctcaagtacatacaatccatgtactctctttcctttcatcataagcattgaagcttttgtgatctttaagctcccatttaaggacttatagccataaccttcatcttccaaggttccaagtaatatcaggttcctcctcaattttagaatatgcctcacattatgcagaatctttattccatttttgaattgccttatagccacctcaccaattcaaacaaccctgcaagaaacatcattacctgttagtactctaccaccattattggtttctttataatcaaagaaatattataagttgggacacatacgataagtgcatcttgaatcaatgatccactctttactgttattatttnnnnnnatagaaaataattccccatctgaatttccatctcactgctctcagccatagttgcagagtcttttctttgatttccatgatca

SEQ ID NO: 142194 - DNA, 1062 bp, Cannabis sativa
gttccagtcccggtcaacttccggtttttgttccaattttaggtcacagggtacgagttcgggtccttgttagggttagggtccagggctgtgtcccaaatcctgacaccgactacgggttttgtcaaagccatgggtctagatctagatcccaatctcggttcccaatctggttccatttcttgtgccgggtcacgagctgggtcctaggttcaagttcgggaatgggttggaaactaggtccctgtcctagttctgtttcccaagtccctatccttattatgggtccaggtcccggttattttgtgtgttcgggttcgagtcctagtctcggttcgggtttacgtctctgtctgggttttgatctgggttcgggttcgggtttaggtcactgtcctggtcctagtcctagttcggttctagttccatttgcgatgctgagttcgagtttgggttttagttcgggtcggagttctagtcctggtatgagtttgggttcgggtccgaatttcaatctaagtccaaatcaggctccgggtgtgggttcgcgtccttggtcttggtctaggttgggtccgagtctcaagttccaatcccaatctgagtctagattaaattctgggtctaagtccatggatctgatcctcgtgtgggttcgagtttaggtctgggtctggatctagctttgggtctgagtctaggtgtcggtgtttgagttcaggtccgagtctgtgtccgggtttgtgtctaggtctggaccctgatctgggtctaacttcgggtccaggtccaagttaaggtctcgagtgcgggtgcaagtttgggtccgggtcaagatctcggtccagatctaggtccaacatttcgatcccagtctggctcttggtccgagtccaggttcgtacccagatccctatctaggtccaagtctgtgtttgggattgggtcctaaattaagaaccaggtctgggtctcaatttcggtatgggtacacgatcgtgtccaggctcgagttccagtctcagtttgggtctaaggctaggtctgggtctgggtcctagt

SEQ ID NO: 142195 - DNA, 649 bp, Cannabis sativa
caacacgaagtagtaaagttgctttaatcatgggtggaacagaaccttatgaattgaagggcctacctaagaaggattctttgtctctgtttttcaagtatgcatttcgaggtgaagaagatgcatcaaaatatcctgaactcaaaagaattggtgaagaaattgtggaaaagtgtagcggggttcctttggcattgaagacttttgggcagtctccttcagttgaagactgaagctcatgagtggaaaacagtaagagatagcaaaatttgggagttagaacgagaagaaggtcacattttacctgcattacggttaagttacaatgcaatgtctccatctttgagacagtgttttgcttattgctcaactttcgaagaggatactttgatgtcaagcattgagttgattagtatttggatggcacttggaatccttccttcacctaaaatcaaagaggacctcgaagttattggtgactcatgctttgtagagttgtgcaacagatctttatttcaagttgatcctgatgaagattatattgaaatctcccaagagttcagagtgcatgatttaattcacaaccttgcatgctcaataacccaaaatgagtgctcaattgtaaattccaacgacgatagagagattt

SEQ ID NO: 142196 - DNA, 909 bp, Cannabis sativa
aatgtaataatttttagaaagtatcactaaccaattgcaagaatacatttaaaaagtgctaagcaccactggtgccaataacaatccttataaaaaaaaaaaaaactttgaaggatggtggtgggatgtgttctcatttttttattttcataattgtatttttaaaaatgagaatagaatactggctattttaataatttaataatgtagctctagtttttttaaaatattttcaattttttttattaaaaaagtcaatattttacatcatactatgacatgaattcatcttatttcagatcggacttggagctgaactgaaattcagatttagacttcggatctagactcagacccagacctctaacccaaactcggactcgaacttgtttctgggtttgggtctgggtctagggccacagttcgattagaggtgggatgggtttatgttcgagtccaaagtaagagtttgggtcccgattcgattatgtaagtaaaattgtaaaaattattactatgttagactaaaaaagttaatattaaaaataaaaataatattttaatatttttctgttttctaatattaataatgaatatcaccctatatataagactttagaattgaaaaataatggtatcaattaagttttcatacacaattaatgtggtgcttattttctaacattctctcaagataatagtgttatttggctctttttgactcacaatccctaaaattctaaattaataaagtatatgtgtagaaggggtatttattaaaccgcttaaatcgttcgcactgcaaaaaaatatggtttgaaattctttacgatgcggtcgcagtttgaatttttcctaaaccgcgcggtgcggtcgcagtttgaattttcttaaaccgcgtggtgcggt

SEQ ID NO: 142197 - DNA, 516 bp, Cannabis sativa
cagaagtatgataggtggcttactgtatctcacagcgagtcgtcctgatatatccttcagtgtaggtttatgtgccaggtatcaagccaatcctaaacagccccatctctctgcagacaaaagaattctaaaatatctggctaggacaattaactatggtctttggtatagttgtgacaccaatacttctttggtaggatatagtgactctgattgggaagggtatctagatgataggaaaagcacttcagggggatgcttctacattgggaataacctagtctcgtggtatagcaaaaaacagcagtccatctcactttctactgcagaagcagaatatattgcagctggcagctgctgcactcaattaatgtggctgaataaaatgctcactgattatggacatacacagcacacactgaccattttctgtgacagtacaagcgccataaacatctctaaaaaccctgtgcagcactgattagtggttaaaaatacacttttatttattttaaa

SEQ ID NO: 142198 - DNA, 512 bp, Cannabis sativa
tatagtgtaaaaaaaatattttttgatattttctttaattaagtagttaatttaagcatgaaaatttaaaattcttttttattatttgtcatcggatcaaaatctaataatttaatatttcatgttattctgctcgctgccaatggcataccctatacataactacttttgttattagtaaatattttaacttctcttgtaacagttgatattttttggtagatttcaatcaacagttcatattttgttttaattgaatgcaatccttaaaaaaaatctcttatagttgcgtaaatagatataaagtgtattagaacaacaattttatagatttttccaaaaaaaaaaaatactaattttacattatatatgtattactttaagctaattagcaatttttctccttgaattttgacatgtactattatgtcttctaaactttttttgccgttaaaaattttctctgaactattaagattgttagattcaaggacttttgtctaattttagta

SEQ ID NO: 142199 - DNA, 1413 bp, Cannabis sativa
  modified_base (371)..(373): a, c, t, g, unknown or other
  modified_base (800)..(802): a, c, t, g, unknown or other
  modified_base (1295)..(1297): a, c, t, g, unknown or other
attccggttcctacaggtccctctgaaccggaattccagttcagtgcaagattcactcaaaaattcataactcaaccaaatcaaccccaaaccctatgaaaccttctagacctgctacttagacctcaaagaacaatatcaaagcaataaaacacttccacatgctcagaaacaaaatatgccattaaagagccaagcttgagctctaaaactcaaagcttgctcaaacatcaaaccacccatcacaacaagtctaaaacaacatatctaagcataatttatccattgaaaacaataacaaacactagcagcaactacaacaacaaaactcacaaagcatgcataattccataacttaaaacccaagaaannnaagaggaggttgctagagactatatcttggcttagattacactttgaactgctgaaaatcactgaaatgaaggagaaaaatcaagaaccctagctggttctaggtgggttcgaaaagagagagagagttgagagaaaatgagatttttcttctattttgcttttttttttttgaaaaaatgagataattaccataggttaaattcaaataaaatcaacttaattaaacttataatcagattaatacatcccactaaaagataaaatacaacttgacaaaatgaccatttttccccttcattctaaaaaccactaaaggtcagtaaggcgtaaattaggaaattctaaaatcccaacaattcccgacattcccaatgtcctaactatatcgccccgctatactaaaaaaaaatactaggatgtgattnnnatagccaaacaccgcgttccaatgctaccgggcactgaataagcaaaaatatgaaatttctatatgtgacatagaaatgcattatgaattcaaataaatccccataaattaataatttaaaattaataaataatttccattattaaactgtaattatctgctaatttctaaattaaagctaagcggtctttacactttatcttagttttgacaggtaaataggatggttgtacaaactcgaaggggaggccttgctgatcaaggcgacccaatggtgacagatcccaatgtgcaaactaactcctggaacacgagagagaggaccatcagggacaaaccccgagcagactaatacacaacctcctaatgtaggccatggagtgacttccttttggctgggatcacactaggcatacaagagacttgaaacaccagttcggtagccgatcaaaccactcctagcactgaggttgttgaaaatattttaccaggnnntagatttactaacaagtgtgtttcattcacatcctaatatgaatttctaaaataatgaaataaaaacatataaagtttaagaaagcttacactgagtgcagcgaaatataatgact

SEQ ID NO: 142200 - DNA, 637 bp, Cannabis sativa
atattgttgcttattgtatattttctttcattttcttattgtcatgggactgctaatagtgtgactcactttttaacaaaactaacttttatctttgaatgatcactatgtatggtgaccgggctactctaattttacgattgcctctttgcagtcggattttattgattaatatattcctcgacacttttttcccttttgagatttcgctcattgggtttactcaagaggtttcgatgaggctagtttcttctaaaaaaatcatcaacgataatgacacaagtcgtattaaatgaagaggaaaataccactgttattcctcattagacagtcacagtaccaaattatagttggagagttttaaagaacctatctcattatgccttgacagtaaaattaacttgctggttagtaacactagtgacgacgaactattttcctttaggcaatggataatgttgataaggaattgagaatcaaactcgtagcagtgaaacagaaaatggatttcgtgtattccaattcaatcttaaacttgtagtagcaccaagtgacgttagggttattaggtacaaaatgaatctactagaagaaaagagacattaatggacaagtcaaaaacttgttgtgaaaatta

SEQ ID NO: 142201 - DNA, 973 bp, Cannabis sativa
aataaatagtttaatacgattgaaatataataaaacaaataaagacaccagaattttatagaggttcagcccagagtagttcagtaatagcctaatccccattatttgtattgacttatgaacaaaaagaatagttccttttcttagagctcttacaacaatttctctaaatatgaattcttagacaaaatctttgaccctttgcctagtgaacatgagtcactatttatagggctatgagcattggtgggaagtatttcccttctgattacaatcgatatgagtagaaacattgcataataaatacagaatacaccgattgtgggatttggagagcttgccatatctctgtaatctgatcccaaaattagggggatttctctgatgacacgatgcaaaagctgaattcgcaagtgttgtcattctgcgcagattgctcacggattcatctgagcaagtgtttgaggtgccctgttcggcctatgatttgcgagcaggtactcagattggattccacgtgtcaccatcatgtgctgccacgtcagagtgcaaaaattgggataacaacaacattaaaatttcccaatcacttacagttaactaccattataaagtgaattgatgtaacctagacaatagaggcaacatttctcatactagctaagcatttctcgaaatctcatctaataacaattaattaaagatcattccttgatcctgaagtttcttttatgtgtttggtggaaatcttcataatcttttcaaacacattttgaaatatacatacctcaagtatattctctgttttattgataatcccttcgcatgaactactatgcaaacttatagtgagttccccgttgataatgctgattcatcaacatctaagattctcgtgttattttcaatcattaccactaaggtttcactccctagttcatacgctaccaatgcttccttgcaatcatcacta

SEQ ID NO: 142202 - DNA, 755 bp, Cannabis sativa
  modified_base (572)..(574): a, c, t, g, unknown or other
catgtattcgcagaatctactcgcagaatctacttcactacagaatctacttcactacggatgaatatttaagatattcaaagtctacttagcatgcatagataattaattataaaaacaaaaagttagtgaatgtatatacctatagcaagataaaatccgatcaatactgaaatatttcgaatcttaaaaattagctcacaacctacaatataatgcaatacaataaaattagaattttaattatttaattacttactagttatattaaaaaatatatatatatcaagttactagttactaaattctataaattaatttttgaaaaaaatagcatatacatatacatatataatcaattatatatcaaactaacataattttaaaaaaattatttgtaaactaagttaatccctactatctcattctcattcacaacaaatatatatacatgttcatgtacaatacaattacacaagttacacaaatagtatatacacaatatatacacacacaatatatataaacgcatatttaataacaaaacacaatatatatacatatatattatnnntcaagttaataaatatttaccttataaatgcaatctagcaacaaattgcgacaaaaattcaaccacctatagcacacacacaatataatataataaaatataaaaggctaattagtaatttttcctcttgaactttggtatgtactaaatcgtgccacctgaacttttttggccgttaaaa

SEQ ID NO: 142203 - DNA, 522 bp, Cannabis sativa
attctctgagcagatactcgaagtcgattccacgtgtcaccatcatgtgatgccacgttagagtgtaaaaattgggatagcaccgggctttaagcactcttgctagaagagagtcagggatatccaatattcgccatgcttgcttcgctaaaagggcctgattaaagtgaatgaatgatcgaaagcccatgccaccatcagcttttgaggagcacatgactttccatttcttccaatgtattttggaattatttgtattagaaacccaccaaaagttagccatcatagactctaattggttacaaaatttcttcgaaagactgaaacaactcatggcataagttggaattgactgaacaaccgcttttaaaagcacttccctgccaccaatagaaaagagcttagcatgccattgattcatgagtttccatatacgatcacagtgtgtaacactttttagtggtatctcaatcatagtgtgtaagactgtggaaaattaaccaacaagaaggagaatcaaca

SEQ ID NO: 142204 - DNA, 530 bp, Cannabis sativa
gcacaagttttggtatatagtttaagataatggtactgaaaatgattttatgtagagttattttttttaataagtgtaattattttatgttatgtttatatttaattttatttccttatttattttttttataatcatttgtcaaaattactcatatctaccaaaaaaaatattttttggtggatatatgatctcagaagagaaatatgtacaatttttttttttacattgttctttaattttgctattagagaatttttgagtctcaatctttattttttaaaaaaaaaaatatcaaacctcttagttttgtttatagtttagattttttgataagcaacttttaagaatttttagagaaaaaaaaaagaagagaaaagaaagaaatgaatgatagtttttttttaaggaatgatagtgtttttaactaatataattatatgtgtaaaaaaaataaataaaaaaaataatacttaagaacataaaataaaataatgatacatattaaaaaaatgattcttttttttttc

SEQ ID NO: 142205 - DNA, 574 bp, Cannabis sativa
ccacccccacccagcctcggtcgtcatcgatcccccactctgtctcttctcttctctttgactccttatcggcgccacctcctccatagctaaaaaatgtgttaaaaaaaactgcccaaaccggtcaaactcacattcgttgacccaaaacttggttaactcgatcaagtccacaggcgggtttgggtgatgttttctttaactcataacctgtagactcaaaacccggtaagactgcctgatatttagccttagttcttactctattattattgatttaaaccctttattattatccctatattgtttatctttatatgtgttcatactccattatagtattattaagaatcataagaatccttctaaattctcaatagtatcacgacataacacgataacacaattcataaacatgtaatgacacaaatataaaattgacacgcttaatacacaatttgaaaaaccgagtttttgcaaatgtcaattatatatacgaaaatataaaactgtatacttctgcagaagcagaaagtaattctgttgctgtagaaaccagttttgcattgacaaa

SEQ ID NO: 142206 - DNA, 509 bp, Cannabis sativa
  modified_base (225)..(242): a, c, t, g, unknown or other
  modified_base (468)..(475): a, c, t, g, unknown or other
tctagatagttagttctagtactagttattttttctaatatttaattatgaaaatattttaagttgaaaattcattatttattttaattaattttcgaccaacttatttttaaaaacattttccaagtattaaattagaattaataattgagtttcttttaagcttaattatttaattcttgtgtttaatacatttaattaaattaaaaattaaatatttaagtnnnnnnnnnnnnnnnnnnttaaatattattattttcatgaaatttaattgaatagaaaattattttaagttgtagattttttcaaacaacttaaatttgaataattttcaaaatatatttatttttattttattaattattattttcgaaatagcatatattatgcaagaaatttttattttttatgaaaagtatattaaagttgaaaattaattatttattttaattagttttggaccaactnnnnnnnntgattttttcatttaacggttaattaaaataaat

SEQ ID NO: 142207 - DNA, 750 bp, Cannabis sativa
  modified_base (246)..(253): a, c, t, g, unknown or other
gaattttgattactatttaggttgctttgctgaattatatgtgagttgctgtgtgaatttctgtaaaaatacaaaaagataaaatactttgaagtgaaaatgaaaaaactccagaaggtaaatataattttagaccatgtgttatgcaaaatttatcaattggactatctgttttgtaaataacaaaatgaaccatgtattttttaaaatagtacaaataagatcatgaactgattttttgtcaannnnnnnnttaataataatctgatctagaggtgttatgacaaaacttgttacattttctgtatctgttcctataaagaatagtctttaaattggttatattaaaaaaattattaaaaattgagcccggggtcttatttttacagttttagaaaatacaggatctattttaacattttacgatatagagagtccaataaataacttttacaaaatcataaatgtcacatatatatgtatattaacttttaattactttttaaaataatttatttatgtggctaagtatcacatatattattttgagtgtttacttaattaatcttaatttaataggtggaagtagaatttatttaaataagtatcactacatgcattatgcaaggttttatttttataatactttttgattcattagttttaattacataattataaaacattgaacttataaaagaaggtaacggttagaaaattacaaattcaaatttttgttttttgtttttt

SEQ ID NO: 142208 - DNA, 1056 bp, Cannabis sativa
gcataaaacccaacacataattccctctactatgatatactgtgcagccttccttctcatctttcgagcttcatttcgattatctaggagtttcctagtattgaggtaggatgttattggcgtcatctagtttggggaagtatccatcatttcgatctcttccgtgccaatgatgctaggctctttgaggaacttgataggaaccaagttcgctttatcacttacattactacttgctagccgagctaacacgtctgcagccgtgttttcttcccttagaatttgtttgagaccgtagcttttgaattgtgcgagcaggtcatgtattttgctcagatatgctatcatcttttctccccgacccttgtattctctagatacgtgatttaccaccagctgtgaatcacttcagattttgatgtgttcgactttcatctcccgagctagttttaggccagcgatcaaagcttcatattcggcctcgttattggatgccttgaatccaaatttgattgcagcgtgcaggtgttgcccccaagtgtgacaagggaaattcctgcaccgaatagttaatttgtagccgacttgttcacatgtagtttccaagtcagcttgtcttcactgttacttggctgaggtatttgtactggctcaggcttgccttccgatatgcgttcttctttgcctatgcattctacaacaaagtctgctaaggcatggcctttgattgttgttcagggttggaaagtaatttcatactgacccagctccacaacccacttgagcaaccgtctagaagcgtccgacttttgcaatatttggcgtaacggttggtcagtgtacacccgaacaagatgagcttgaaaatagggccttaattttcttattgctagaatcaggtagtaagtgagtttctctatcaatgggtaccgactttcgaccttaatgagtcttttactaatgtaatagaccgggtgtcatatgtttcttcctctctgattagcacggaactcacagcatgctccgtgacagctaagtatattcaaagttcttctc

SEQ ID NO: 142209 - DNA, 680 bp, Cannabis sativa
accaaatttttcactctttgctcaattttccaccaaatgctaccaaaccttccagagtacctaattagggtatacacaacataatccaaccagtatgtcacagaaacataccaaatcaatttatgccattaaagacctaaacttgagtttcaaagctcaagtctactcaattccctcaccatagctcaaaactaatatccagagcttaagatcatttcaaaataagcttagaaatcagactacacaatctttaaaccctaacagccactaacttcaaaaatcacatactcaaactaaagaaaaagcttcaaaacacatactcaagagttctagggttttaccttttctttagacttgattaatacttagaaaacactagcttggagatgaatttccccccttgtttttgccccagccgaaagagagaaagagagagagaattctatattttggtttttctttaatttcctttactttgtttcaaatgaaaagggattgattaattaatcccttgcagaaaatactaattgctatgtgtcatctaattaggcagccacctaatcactttaataataaatgacgaaaaatgccccttaaacttaaaactagggtatttcttaagctaggggtaaaatggtcaaattccataaccccgctttaccccgatattttattttctc

SEQ ID NO: 142210 - DNA, 536 bp, Cannabis sativa
catcatcctcaacaggaagctggctataacctttgaaaaaatcagcatcaacattttcttttttctcatcgttaaaataatcttttggtacgtcaccaacattaccacaatctcctttaccattaccatcactaacatcatcctgatcattaatgacaccttcattatcattcttctcgtcctgagaaacatcctcatcacacccccttccttctcttcattctcatcctttccattatcaccctcgtcattctcaccctcttcattcacaccctcatcagtctcactctcttcatcatcaccatcatcctcatcatcatcttccaaatcatcctcatccccgtgagaagcctcctcaatctcagcatcttaatcattatcgtatttttgttaacatcaggagaatccttgacataaaaaaagaaatatcaaaaataaatattgataattaaacaataattagcagtttaataacaaattacaaacaaaccttgggaggaggtcttgacaacaacttgtcaatttttttatgtaca

SEQ ID NO: 142211 - DNA, 954 bp, Cannabis sativa
  modified_base (918)..(923): a, c, t, g, unknown or other
acttcaagaaaacaaagaggaggttgcaagaactataccttggcttggattcacttgaaactagctaaaaatcccctagagctgctgaagaaaacccaaccctagctggttctatgggtttcgaaaatgagagagagaattaagagaaaatgagattttcctttactttgatttttcttgaaaatgagataataccctttttttttaattcaactaatatcagccttaaacattaataaaaattagatttactactaaactccactctcacaaaaagacaaactaaggctcggcaaaatgacaattttgcccttccatactaatagccactaaaggtcactaaggggtaatttgggaaattctaaatttccgactattctcgacattccgaatgtctaactatatcgccccgctataataaaaatactaagatgtgattctaatagccaaacatcgcgttccaatattgtcggacactgaacatgcaaaattatgaaatttctatatatgacatataaaatacattctaaattcaaataaaacatcttaaattaataatttagaattaataaataatttctacaattaaaccctaattaactactaatttccaaattaaagttaagcggtctttacagatctcgtgagtatcaatttcagggtccctttataagtgatttcaccgcccttatatagatattcatataggatttaaaatcccttaaacataggtataccttcccgtaattatagttgggttaggtttaagatacaaaataataataaaataattatttaaaaaataaatatctcttcacttatcattttttgactatattttcggaacagctctaaaagcacatttctctcgtatttagcggactcggatggtcatgggtacatgaggggagctaattnnnnnngttcgtgcccatcaggtccttgagataattt

SEQ ID NO: 142212 - DNA, 663 bp, Cannabis sativa
acactatataaacaacttaaatattttttttataattaatgaaaaatcaaaaaaataattaattacacatacaattgctatttatatggatttaatgttaactaataatttccaattatgatactaattcttaaggtatcaaaaatttatatatatgtatatgtatatttttgtaacttttctagtaataaacttttaacattctttttgtcaataattaaataattaattaaaatttcatcttaatacttttttcttaatgataattgctatttagtgaaatggtattaagacaaatagtatttacgcacattatatatattttgtagtacatacatatattaattaaaaaaataaaatagtaaaacaaaattaatatcaaattaagataattgttattagtcagtaataagttttttttcttcaagaaatatatagttaaaagtaaatttatgttttggtctctaaaatacattttatttaaataatattttttataaagtacttttctttttacgaatgcacatatattaataataaattatattaataataaatttttattgtataagaaaattattataatgaaatatggctcataaatttatgttaatgattgatattcttatatgttacatatatatacaaacaattttttttcat

SEQ ID NO: 142213 - DNA, 1593 bp, Cannabis sativa
tatttctctttcttactaaaattggttgggatgattccccaagccaatcttgccaagcggtcaaactgagttgtgtatttagtaacactcatattttctttctaagtcagttgagtaaatttctttcgttttgcacttctgactgcttcattatagttcttcgcattaaacagttccaggaacttttcctaggtcatcgtagtaacatcttgggttagggataccatgtcccaccatacaagagcgtcttattgaaactggaatgtggcacaggccactctgtcattgccggtaacgcccatgaaattcgaaattctaataataaccattagccacttctcgactttcataacatcgagacctaccaaaaaggctaaaggtgcctacttgcggaacctttcatacaggggtttcattcagctcaccgcagtgactggtcctgcatgcacagtaggggcaggagctacctgtatttcttgagtagggattataggagcaccttgatgtctcaagcgtctaatttccttgtcttcttgttgttgttcacattaattatggcttgcatttctacaaacctattttgccattcttgtgcagcttgtgcagcctgcggtgggttaacatcacccctaccgcgtgccctgcctctagggcctctacttcggccacgaacatttgggggaatctgactctctaaacaccactatgtctgagcgagtaccctgacgcatggttttttgcctagcatccatactattcgaacagcctgcataaccaagagctagtctgctcagatcgtgatcaagtaaaacttactcattccccttatattggaaatttaaaacatgcgcctattcagctatcaggctactaacatgcttcctatcaggcttttcataaatcatactattaaaagaaactactagagcaataaaagcttactgaaccgtgagacgagcggatcgctgatgatgattgcacatgtcctgacgatcttcggaagacaacctggcagctctgataccaaattgtaacactctaacaattttaggcatgttaacgagattttaatttattatgtagctcgttgctagtcagcgagattattaaaaatcgtgattaattaaaattttgcttaagtaattataaacataaaataacatacatataaaatttagggatcgcgtttacaaaagcatttacaaaagtttcactgtacaaatacaaaagtctatcccctagcgactatacaaaataagccctgatgtcccgacatgtacaatctccatctgctcgctctcacggctgctcagccttagccttgcccgtccctagacatggaaataacaacagtgaatcaacagactcagtaagaaaagtataaataataacatagcaataacctgcattatgatcagacgcacatacccccaatcataaccctattcccgtgtcctacatggtcctgagtctagaacgttcgtacgacagtactagtactctatgtgtaccaatgtgatactatcgagttgtaatgcccggaattaagaaaaggattagcaaaaccctaattagataattatgagttaattg

SEQ ID NO: 142214 - DNA, 640 bp, Cannabis sativa
aaagttaatgttgatggggctttatttgaacaagaggggcattttggcatgacttctgtagctcggaatcatcatggtgctatggtagaagtatttaagaaggggaagattggttgtatttaatccgaaattgctgagataataggcattaaagaagctttgagttggattgcaactcattcacaggatagagtcatgttagaaacagatagcttggtgtgtgtccaagcgatttagagtggtatttttatgccttcacagtttagtcttattgttcaagatgttcgaaatttacttttggctttatcttttgttgatttgtgttttgtaaaacgatcttcaaataagttggctcattgcttggaaagagactcttatttctttacaggtcgtgtacttcagctggaggattgttcctctgaagtgcgttctattgttttgaatgaatttattaattaataaatcttataatttttagtcaaaaaaagtaagagtgtcacaaataatataaaaaagagacaaaataaatggtttttttttttttcttcagttttaactaaaaaaaatagcaatattataaaaatacttccagctgaccaaataaacaaatatacagcccaaataaatttttttacacaaa

SEQ ID NO: 142215 - DNA, 574 bp, Cannabis sativa
  modified_base (474)..(474): a, c, t, g, unknown or other
agagagagagagagagagacggacgggaggtggtggtggtccaacgtatgagacagagatgagagggacatcgatgggaggtcgtcataatttttttttattatactatacccgacggtttataaggctctcctaaaaattcccattttattaaaaaatatcgcctattttgtttactacgattttaaaccgtcggaaatactaaatttttcccaacggctttaaatggttacttaattttttagcgacggtcccttaaaaaaatcctttttaggaccgtggcgaattttgatatttgtaggaacaaaaaaatgccatttttagtgacaaccttttagttacaataaaatcttttttgtgactaaatgtgacttttttagttacaataaaaaattatttgtggctaaacgtagtatttagatacaaattatcactaatttagttttagtcactacaagtattgtgactaaaaanacatttagtcacaacaaattgtgattttcgtgactaatatttttagccacagagtttttaatcatagcgtaagaatgataatttataattagttataact

SEQ ID NO: 142216 - DNA, 520 bp, Cannabis sativa
  modified_base (247)..(261): a, c, t, g, unknown or other
  modified_base (287)..(289): a, c, t, g, unknown or other
  modified_base (434)..(439): a, c, t, g, unknown or other
atttcaaccacttattcttattttcaataataccatattttctaattcaaccttaaaatgccaaaaatatttatttaataattataattcattattaaataaaattatcatttgtttaattcattaattagaccatacaaagtctcttaattaacaaattgaccccaaaacctcttttcttcacaattaagccattacttagtaaaaattcataaataagaaatagtataattttagaattataatnnnnnnnnnnnnnnnaattaactgagtctgcaagtagtatnnnctcaactagtgaggggaccattggcctatataaccgagctttcaatgagtagatctagaattcactaagtaaattcttaacttattaattctgccttgctccactatagatctggaattgaaatacactctcagttatatagaannnnnnatatgtaccacgatatagatgcgttataattatccgttgttacaatcctaatagtcaaggattctctatagatgatctaca

SEQ ID NO: 142217 - DNA, 692 bp, Cannabis sativa
atactttatttccacatgtttggtcctgtcatgaaagacatgatttttgcataagtggatacaactttggctatcagagtagacaataggttcttcattaagtagctttagttcttctagtagtcctttaagccaaatagcttctttaattgcttcagttacagctacatactcatattctgttgtagataatgctaccacaggctgcagttgtaccttccaattgatgcaattcccccaaagtgtaaagaaataggcagaggtagatttcctactatctctgtcacctgcatagtttgcatcactctacccagtgatcattctgctcttgtccgttcttttgtagtttaatccaacttctgtagatcccactaagtagctgaacaaccatttcattgcttcccagtgttgcttacctgggtttgccatgtacttactgagtacactaatggcataggctaaatcaggtctagtactgaccattaggtacataactgatcccacagcactagaatagggcacttcactcattgcttccttttctgctacagttttaagacattggtctttgcttaactagtactgattggtcataggttgcttagtttgcttggcacttgtcatagaaaagttttctatgactttctgttggattttgtgcccaaataaaacccattacaatctaatctgat

SEQ ID NO: 142218 - DNA, 599 bp, Cannabis sativa
  modified_base (268)..(271): a, c, t, g, unknown or other
attgggataagtgttgttccattgaaccctgtgggctggtaactgcttggtgaaagatcccggtccgtgaggcctattgctgtgaaatcatcttttaataataaattcacagaactcccgttgtcaattaggactctagccacaatcttgttggcaatgggagtatctatgaccagggggtcatgaggagggaagcgcactgtcttagcgtcctcttctctgaatgtaatgggctgatccattagtcggggcctttgagctgggagtnnnntaacctcccaaacctcattgtgctctacgacccctgcgtaatgtttcagttcctttcgggtagttcctccgatgtgaggtcctcctgagatcatggctactctaccgttgggtctcgatggcaggccaggaatttgctgggcttctccggggggagcaactgaggctaatgctccggctgtaccccctggtgctccttggggcgaaggtcctgttgcctgaacaggattgaggtgaggcaaccagttcttgatccattcgtaaagatgtcccaatcggatcaagttttcgatcttgtccttgatatttttgcattcattggtgctatg

SEQ ID NO: 142219 - DNA, 664 bp, Cannabis sativa
ctcttgaaatgactctttaaagtcactttaaaaataccatttgatatttttagttttctcaacaaaactaaaatatcaaactcacatcatcactttgattatttaagattaaaaattgcttcttcaatttggttatcttttcacaatttttgaatccacattgattcactttatttgagtctaaaattgctcttccaatttatgactcatttcacaagtttagatccactatgatcttaattgttcttgctatgacaagacaattctcataagtgtaactctcatagtccactttttcttatttcaaatatgagattattatctcttataatccagtaaaagatgtaactcaaaatccatcttttattatctcataaagtgagatgttcaccaccaaattgaaaagaattcaaaactattttttattcacaaaatagatgataataatttccacatcaatagcaataaaaaatattatattactctcaatattattataatactatataactcatacattaatataatatgtatgttacaaaataacatctcatatgtgtaacatacacataatatcaatattaaatagacaaatacatatgttacacatctcatatacatataacatatatactttaatatatatatatatcatatacacata

SEQ ID NO: 142220 - DNA, 766 bp, Cannabis sativa
  modified_base (485)..(523): a, c, t, g, unknown or other
taaaaaatatatattaaaataatagattttaattaaatttgagtatgtctaatatgttttctaaacacactttttagctaaaataagggttgagctttcaaaaaaataagctccaaccataaaaaaaatagctccttataatagaaaatggatagagaactctctacttttttaataaatttttttaataatattttaatcaaaagtattattattttttcattatattttaacaaattaatttatatttaacaatattaaattataaaatattattaaaataatcaaataataattaaaatggagagcatgattgaagtaaaaataaaaaaaaatggcagtctattttaattttttagctattttagcttatatttggctaaaaaataaagagtgcagttggagatgctcagagcatttggacttcatattaaagaggcactctatactttaactatatatatatattgttggaaatattttannnnnnnnnnnnnnnnnnnnnnnnnnnnnnnnnnnnnnntcctaatatgaatttctaaaaatatgaaataaacacataagggtttaagaaaaccttacattgttattaaaataatcaaataataattaaaatagagagcatgattgaagtaaaaataaaaaaaatggcagtttattttaattttttagctattttagctaaaatttgggtaaaaaacaaagagtgcagttggagatgctcagagcatttggacttcacattaaagaggcactctatacttta

SEQ ID NO: 142221 - DNA, 874 bp, Cannabis sativa
aatttgtttaggtagttttatttgtcaatgatgcagaaaaatttgccggagtttggtgccggtgccgaaaaatcacctgagtagcagtcggtaccagaaaattcgtcagagttgctgccaacgccaaaaaattcgtcggaattggcattgtcgccggaaaaatcactgaaaaatcactaagaaactagtttcttgaagaagaaatcggtttcttggtgttttttccggtgacaatgccaattttgacgacttttctgacattggcagctactccgacgacttttccggcaccgaaaacaaacttcagaaaagtcattggaattggcatagtcgccagaaaaattaccaagaaactgatttcttgatgaagaagccagtttcttggtgatttttccggtggtttttctgacaactatgccaattctgatgatttttctggcattggcagcaactccgatgactttttcgacaccggcaactacttcagtgacctttttggtatcgaaagcaaactctaggaaattcgtcagaattagcattgtcgccggaaaaattactaaaaaaattgctagtttcttgataatttttttgtgattttttcggtgataatgccaatttcgatgatttttttggcccagcagcaactctggcgactttcccggtgccgaaagaaatttcggcgactatgccaattctgatgacttgtttcagttaactttattgtttagcatttatatttcgttataattttttatagtgtcaaatctgatttctgagggttcataagttcaaaattggttttacaggttttaagggttttgtaatgaggttgctttattttatgatgttattgtatattttttattttaagttt

SEQ ID NO: 142222 - DNA, 770 bp, Cannabis sativa
ggtaaaataaattccaacatacatatatgcaaatttcttattagaaagtcatatccttgtacaaatatctatttgcacaccctataggtcttacttcactttatgtgagtaaacttgtctggactgcgtcatattattttggccaaattagaaaatgtatgtcgataattctcgacaaatttaataccatgattcttgctatctcatgttagtttattgcatatgcaaacatttaacatctattgtcaacagaatttttattatatgatattttcctcccatattgacataacttataaagatctctttaaattatatatttttcaaatatgtatatcatttataggtacctatatagaaccactttaatgattcaattatgatcaaatataatatgtctaacttctttagggagactcttctaaagtaccgtttccatcacgattattattttaaaattatcaataatttataacattaaggtatctccatgagtatctctagatttaatgttaaatgccaaaatattacatacttaatattatacgaatacaaaattaattaaattttaaataatattttcaagaaattaatgcattatattattatgttgaaattaatgcattataccgtttcccattggaaagattagagctcgtatgctcacctcaccagggacggagggactttagcccatgtgtgggctaaagccttcactcaaatatatacatcaaattttttatatgtagatatatacatatattaattca

SEQ ID NO: 142223 - DNA, 793 bp, Cannabis sativa
gaaatctacggtttctgaaattttctctcgaaagtgttcttgagaagaaatggcgaagtggtgaaagtaaccaaatgaaaaagaaaagctagcttttataggcaggaacgggtgtaaaatagctgtgatcaggcgccatcgtacggtgggaagcgcgatcgattcacattctacagatccaacagttgggataaatgctcatcagggcggttaaaaacgcttaagtatttttctgcaccgattaaatgcgtcggatcattaatggacgggaagcgaatcgttgcctgcaaaaagaaataaatgttaatgatggctatcataaatgcagctcacgcgcccaaagcacgtgccatgtaatccatgagtcaaccggaaacatcaaacaagcctcgtttactctacaccaaacaaggcttgggggtatatgttacccttaattttgcccaaaatacattgaccggaataaagatgacacgtggagcttagaggttcagctcctaaggaaatcatccaagtcttggatgtaagaagagtgtctctggaaagatgactcccggagaagatatgagaatgacctctatgctccaagaggccagggccatattaaggcagctccgggaggtactgaaccctattgagcaatcacctcacatttaatgctgcatgggggagaacgtattggaaccatcataaacaatatgactgacggcgtaacccctcagttgcagctattacgctgtgattaatgaggctagtgacggctacttaatgaaggatcacatcaatcaagaag

SEQ ID NO: 142224 - DNA, 971 bp, Cannabis sativa
aaaaatggatcaacaatataccttatgtcattctctttaaactcaaaactcaaatttcaatttcaaactaaatccaaacaaaattcaaaactcaatcaatatacattcattagtaaaaaaaataatcgatttaccacatatccatatatccaaactcaaaagcatgtatgatgtccctataaatattaaaattttcataatagtattataataaaataaaataatagtttgttagcagtaaataaagaaataaatttggggtaggctacaaaattttactaaccaataacatacaaatatagatgaagaaaaaaatagtctaaacaaagtgtgttgtatgcaattaagaaaagtctgattatggtatctgatctcgagcctctcatcataagttcatacaaagatatcaaaagagaaaagagagaagaccttgaataattgtcttttggtgaaaaaacattgagttgagtttttattatagctaaaagagagagagagagagagaaatcgtgtaaattaattagattaactttagagtttatattatatatagtatattttgagttttgtttaagtacacgatttataggatgatatttttgtatattttttaaattgatattgggttaaaaaattagaaaataataatagagtatagagagagattttagatagatgtatgattaatttttttttttttaaaataaaaaatcacacaataatatacatttttttttaaaaaaaaatcaccaataacttctcataaaccaagaattcagttatatagccacattttatatagaatagatatctttttttcaaagtatgtatagtttaaaaactaactgtataataatgtatctataataaattaattaattaaaaaattattatttatttagtttcaaataattagaataattaagacattaaaatataatttatttttctcatgttattttttttttttt

SEQ ID NO: 142225 - DNA, 1160 bp, Cannabis sativa
  modified_base (586)..(589): a, c, t, g, unknown or other
gagtcttagtctgagtctgggtatgggtttttcgaatcccgatctgggtccaggttcgggtcctgggtctgggtcccaggttcgggtcttggtcctaggtttgggtctagatctgcggctaggatagggtctagttcccgtgtttcgatctcggtcttgatctgggtctgggtcggtattcgggtccaagtctaggttcgtgtccatgtcatgtttctgaatcaaaatttatgttaggggatttttttgggtctaggatcaagtatcgagttcgggttcgggttaaagttcgagtcgcaatcctagtctgggtttgggaccgggtctaggtataggtctgggtctgggtccgagctcgagtttcggggctgggtactggtctagtttcaggtcccgttctgggtttaggtcttggccacgaccccagtcctattagggtcttggccaggttctagtacaagtttcggtttcgtgtcctaggtcacggtcttggtccaggtcctagtcctgcttcgggtccttctctaagtcctagatcaagacaccatctatgggtcttgtccaagccccaatttccagatcccgnnnnaagatctggatcccaatcacgggtgccaatctggtttcagttcatgttccaggtcctggtctaggtctcggtctagttctgggactgagacttgtgtgcaattccaggtcccaatcccaattctgggtccctagtcttgttcactgttcgggtctgagctcaagtctgggttcgtgtctcgagtcctagttcaggtttttattcaattttgggacccaatctgtgggtgggtctgtgtccgattgcgggtactagtccggttacaattttgggtcttggtccaggtcctggtcctgctcctgagtcccgatccgttcatagtttcgattctagtttcaagtcagggggtacgggttcaggtccagtttcagtccgagtttgggttcaggtcttgatttgggtttcgagggaggtgggtttcggtgtcggtgagggtccttggtttggtcggtttccaggttccggtctgggtcaaggtcccagtcccattccaagatcctagtctggttccaattcaagttttggttttagttggcgagtgtgggtcagggtctgggtatgtgtccgagtc

SEQ ID NO: 142226 - DNA, 2036 bp, Cannabis sativa
agtaaagaagaattaaaggaaactttcaacaaagacttaccctggtgaattccctcaagactcctcccatcagcaactccagggaagactcgttattagcaccagccagctagtcacttaccttaggaaccaaccggttcatgtaatgggagagcatctctttgcctttcttggcctttggaagcactggccaaggtggagtaggagcccgcacctgctcagatccgctcttggccagcttggatcccccgtttgattgctcaggcctgtccgagcttcctcctcgagaatctttggccttagcaacttttggagtagatggatccaaaacagtaagctcctcggaaaggtcaagaaccttccccacaggtgccctttcctttgaaggggtcgcctcatcgcccatagatttcttggccgaaggagatgagcttgagcttcctccaactctcttcttcagagcatcgagcatcttctgagatatgtctgcacgaaatacaaacaacatggttagaggaaaaaaggcatcagaagcataaagcattgtagtcaaaaagtttaaaaacaagatggaatatcctgcaaagcggttgtccgagcaagactcaagagtccatcatcacctgacaagtcccttatatctaccatggcaactttcccttttcctagtacgggagaagatggccgatcaagcaaaatgggctccctaatttgaatggcatgttcaacaagcctaggttgggccagaagtttcttcttccttttgagcagagtcacctgctcttccttagcctcatcttcaggattcaagggctcatgagcatactatttggcccttgcacctcccttcaacgtagcttcatgcttgagatgaatgggttcatcctcctaatgagctctctcatcccgtccagcaccagatttcctcttcctctccttcacttgcttaggaatgaaatcctttggatagagcccgaactttaaaaagttttccttggaggtcagctgaatgatatttccgttgtcccccggcagtcgagcaagcctttgagttctatctactggaactgagtatgggtggttctcatgccttccacaatgaagtactcgtaaaaaaaatgcccaattttgctaacggccttatccctggtgcccatcaaccacttgaagtctggttgagagaaatagaagtaccctaactagccttgattaggggtggacttcaaatcaaaaaacaagcttacctcatggggagagggcatatcccatttctaggaggcatagagaacgaagagggcgaacaaatagttaatgcccttaggagtaaattgggtcgggcagaggaggatgaagtctgccacattcctaaagtacgggtgcaaaggcaacaatgccccttgctaggaatgagcacctgaccaggcgcacattcccctttcagggtttgtggcccgattattattggcaggaatgtaacagtctgattcgcccaggtagccatcttggtcgagatcccgtagacgcgcctcagtaaccttggacggagggctcacccacctggcacccaaagtaccttgccttctatgaggaaccgcatcagtaagttcctcacttgtgtagtccacaccctcaaccaggacgtcactattagcatcaactagctccccgacctcattgtatcccccatagtttggaggtgcaaccgcctcctcttcctccgcttcagagggattgctaggacgaacatcgtcctgctcctagatctcctggaccgtagcgtccccttcttgatcctcctcctcctggacggctggatcttgttcggcgctgggtaaggtggcatgcagggccacttgagggtcttatgcgtcgaccctatgcattgtctttttagtacgagccatcatcctatggctgaacaaaagacttaaggaagaatgactgtcactcgaagaagttggattacaacgaagacgaggatgatcctcgtgcaagagttgaagcagatcctatcgatttggtgtttgcttccccaa

SEQ ID NO: 142227 - DNA, 816 bp, Cannabis sativa
atttatgatatataatatgatatgctgttaagttagaggtgagattcaacttattcaagattatttcatttgtgcgcataacaaatatatcttccggttgtaattaatggtgtagaattgcaactgcgttctgaattaatatcagttttagaataggatttacataactgtatctctaccttactaagctctttatctgatcatccccttttcactcatcatttcattatttttaattcattcacatttctatcattttctatttatactaatctttagtggtaattttcctccctgtggatacgacatatagcccgtttactaaagcgaccgcagtgtaactaattgggcgacatcaatttttggcgccattgcccggaaggtttctgcgctactagaggttggtatagtagtttatttatttattatttttttagtacctgtttattttattttgttgtctctcttttttgtttatataaaaaaaatagttaatatatatttttttagttatatatatagattcaaaaaaaaattactatatattattattattttttctcttcttttctcttttagtaaaaaaaaagtaagtagtttaatttttttttagtttatttgttagttgtatttattattttgctactatactagggtgttagtatttttttttaacattcttttattttgtatacttttttttttcttttaggatgagccatttttttattttatttattttaggttagttatagacttttatcctttaggctaaaaaaaaagttgtgcatcaaaaatattttcataaacttttta

SEQ ID NO: 142228 - DNA, 644 bp, Cannabis sativa
cttattatgatattttctgaatacaagatacagtatataattgataatcttttttctctcaaattctccgctcctttttttgttgaatttgcccatatttataagaatataggttgcagttatttatttgggatcaatttaaaatgtaaatgttcatgaaacatggacaatccccacgtatcatttaatggtatgtaggataatatttgatagctgcataactgctttttgttcttatcttttttaatggttaatgctgatttggacaattgtatctcgcttaacccaagttatcttcattgttcatcttgatttgaagaaattgctaagtgttagcagatggtttgcctcgttaagtttcattagttaaaatagtgagatgactatctcgctatacccgaggttgccctatgtgattgtatttattctactttgaatagatgaatatcttctttgactatgtactctgaggcaggcgcgtgttttgtcaataccagttttaataaccttttatccttatctcacttaagactttatactcatcgagttatgaatattttctattaaacctttgttaatgagttattttatcttacatttaatgatataactttattatatcaggtggttcatattccactgca

SEQ ID NO: 142229 - DNA, 583 bp, Cannabis sativa
ttttgattttcctttcccgtcggataggttttaaatcaaaaattatagttgtttgatcccttcttcgtgaaaaggtttaatcaaggtgttataacgattcgacccctctttcgtcaaaaaggttgagtcagggagttataacggttcgactccactttcgtcaaagaggtttagtcaagaaccgttgaatttcaaaaaaaatggaatgacgggtttgcattatacaaagtatttccagatgaatttcagttaatcatacataaatgccccttaagtaatttttaaagaacaaaactttgtaattacttaatataaatgattttctttattcgtaactgaagtcaaaagtttacattagtaatgtgacatcatttatttattggtagtagggtcacaaatgttctatgttctagtagttctttattagcaagccatcaagtcgatccaatttatagactccgactccaactactgcttcgatgacatatggaccctcccaatttgggttgaacactcctgttgatgcatctataatattttcaaagactcgtcttagcaccaagtctccaacattgaatagtct

SEQ ID NO: 142230 - DNA, 602 bp, Cannabis sativa
cacgttatacgcctatgttagttagggtgttacacccaacttttataaacataaaccctaaaatctcaaagaaacaatcaaaggtagctcttgatacgacttgttagcgttttttatcactcataaaatatgcaataacaagatttaattctatagataacatattacatataattataagtatgaaaaacataaatctatagagtacgtttgtcgattcgaagaaaaaaactcaaatagtggaagcgtaccttaatccatagatagtgatgatcttaatccatcttgtagagataatctttgtggtaatattaggtaatgatcatccaaaaaaataagacttggtgtcttctaattttctctcttgatgggggaagatgagaagaaattttcacttatttcttgaggaccaataccaatttataacctcgtagctaggttattaattttaagtatttctaatttagcttctcaataaattagagatattgcttagggtattcatacatttaatccattatactttaaatacccaatgacccacaattactaaaatgatcactttattttgggccaagcttcaaatagcaatacactaatat

SEQ ID NO: 142231 - DNA, 879 bp, Cannabis sativa
aggcgatgtgggattgcacagcttacctgatactttttcttacggattctgggactactaactgtcacatattatatatttatatgaaaagaatttgggtagggagctaagatcaccatatagtgatcattattcaagtaaacataaaaattaatggcatgtcattgtagtagttctacaaaattgtgatttttgaggctttataacccgacaagtaaataatagcttgttctgttttaatttatttatcagtatttttggaattgattctttttttttttttaattataaccaattatcgagttattgtattttagttattttaatcatttagttgtagaacggttctattttaatttatgtctcaactggtttttatttaagtaattttagaaaacagttattgaattatatttatttcagaaaatgatttttgatttaattgattcaatgaacttgtttttaatcaagttgttttgggaatcgatttttgatttagttaaaacaaggaaccaatttttaatttatttattttatttaactattttttgtgtgtaaatttttatcttggttgctttacataactagtttatttatctcagatttttagttagttgataaatataacaggtttttttatcatataatttaagttattatgtgttatttattttttacttattttattatggaatcgattcagtttagattcatgcctcggtatttttagaattgatttctattttttttaaaatataactgatttttgaggaattatgtattatccatttttactaaatttgttgttgaagtaatttagtttttaatttatgtttcagtgttttatgaactgattttctttttgttttttaattttaa

SEQ ID NO: 142232 - DNA, 655 bp, Cannabis sativa
caacataattaatttcgaaatataagaaattaatttttcatcagattattttgaaattaatttcagaaaaacacacttagtttaatgaaaattttcaagataaagttgatgcatttttctatatttaattaaataaaggaagttataactagttagattcttctggatacttaattatttgaattttcatagaaaatatatttaagttgaaaattagttttttaaatattttcaaactaattttggatcaacttaatttagaatattttgaaattaataattaagtagaatcttctagaaaattagatatttagatattctttaaaatattttttaagttgaaaattggttaattttggatcaacttacataggaatatttttcaaattaaggttactagttcaaggtacttaatttgatatttaataaatttttgaaaattatttaagttgaaaattttattattttagaccaacttaaattagatatttttcagaaatttattttgttatattttataatattttgaaattttatatttaattataaatgaattgtcgaaattattgtttaaaaattaaattaaagttgaaaattaattttttaatttattttggatcagcttaaattaagtaatttttattattaaaatata

SEQ ID NO: 142233 - DNA, 517 bp, Cannabis sativa
aaatggcaaagggccacggactctacatctaagttaaatcgttaggtggagctcaaggtatctttgaaaatctcttgcatttgtcacacttcttaacatagggttttgaaacttcaatcatcgtaggcaagaagtaacattgccttagaattttcttagataagctttgcccggcagcatgatttccacaaaatacgtcttgcacttcagataggagtcgtgcagcttcttcttgagtaacacatctgagcaatgacattgagaatcctcttctatacataactccctctactatgatatacagtgcagctttccttctcatttttcgagcttcattccgattatctggcagtctcctagagtcgaggtaggttgctattggtgtcatccagtttggggaagtatcaatcatttcgatttcttttgtgccagtgatgctaggctctttcaggaaatggataagaaccaagttcaccttgtcacttacattgctgcttgccaatcgagctaacgcgtc

SEQ ID NO: 142234 - DNA, 535 bp, Cannabis sativa
gttagctttcacaaacaactctaagaacataaataatacaattgagatcgaacataaccatctcagaattaaaatctattgacttaagatcaaccagtgatatatattgatcttagaaagataaaatggtaagtttatgatatcttatccaagttcaacatcggtccagtctgatgtatactccatatatccgatcctatcatactttgccaataccctggaaggacataaaacttattcaaggtgtaagtaagctcttatcgctgattatcatatcagtttaaatccagtgtactgacaaaatcatgggacttatactttaaaacatataatcataattacattccattgtgttgacaacactataatcatgaataattaaatgttctagatttaatagaatttataagttaaccatataattatgaaataaatcatttgaattatgtaacataaaatgatttttaattttaataattaataatatggtttttaaggtataattttgtaaaaatatgggttttttttttttttt

SEQ ID NO: 142235 - DNA, 1073 bp, Cannabis sativa
  modified_base (568)..(577): a, c, t, g, unknown or other
atgtttgattatattctataatctaacatcctaaacatgaatttcctaaaaataatgaattaaacacatataaagttctagaaagccttacactggtggcagcagaatattatgactccttccgttcagatctttatcccttgttcttttttatcgcagagtattaacaagatctgaacgttgatcttctctgttgatggaattcttcacaatcttctacactatgattgaatgggaaatgtactcttcactatagggacttcaaaatttgaagagagaagagagcgagaattcgaaaatagagaggagcctttttattttcaattaggttataagcctatcactatctatttataggattccttctagagttaggatttaaattatatgaaattaaaaaaaaaaaaataaaggctaacaaaatcctttaagtggtcggccatgtattgggccctactaattttaattttgccatttatttaacatcatatctttttcttttacaaattaataccatattttaatttcaatcctttaattgtaaaatctatttatttaataattatannnnnnnnnnaaataaaattatcatttatttaatttattaattagaccttacaaattctcttaattaacaaataaaccctaaaacctcttttcttctcacttaagcccttgcttagagaaaattcataaataagacatagtctaaattaaaattataattagttaattaaaaccaattaactgagtctacaagccaatatttatctcaactagtgcggggaccatgggcctatataattaagcttccaataggtagttctagaatttactcagtaaattccataacttataaattcttttggactccactatagatttgaaatggcactcgtaattatatagaacgctctatatgttccaaatatagatacgctatcaattatccattgttataaaccaaataatcaaagatcctctatagatgatttagatcaagcaagaacaagtttaatgttctacgcttcaatatattttatccttaaaatacttagcttcctataaatgat

SEQ ID NO: 142236 - DNA, 985 bp, Cannabis sativa
agcttgatgaagccttcgacacggtcaacaaaatcactcattgagtctactgacccgttcttccttatatccttccaaagttcaccaaggactccaatgcccctcggtatcgcggataactttccatcattagttacccgtgaaactttggtcgcatccgtcatgaatctgctgatgtatgctcggagaggttcgcttggtctttgcttgacttcaaccaggtctcccagatgcaacggaagttggagagaggaggagaactgtgcatggaattccgaagagaaggctttccatgaactgaactttctaggggccaacttgaaataccattgttgggcggcttccgacaaggtagcaggaaagattctgcaacacatgtcccctcgtaccccttgcaaatcaatttggatttggaaatacttgatgtgagaaagaggatcttctcttcctgtgtacattttccatgttggcattttaaacttgtggggcaattccagaagattgatctcgggagattaaggagttcttgcgtgctcggtccagctcgagatcaatatttctttgtccagccatgccttgaaacatattttttagttcgtctagtagttcctgtacggctgggctaacatgctcagcattctggtcgatttgaatcatctttctgagccggaattttagcacaggctccgagctgcacgatcgtctattcctctccttcagctcaggtcattccttaggtcacgagtcatccccaacctttcgaatacagaagcatctggctgtcttagcgatggatttacttggttgacaggtggaatgaaaccgttaacctggttggaactatcaggtatgacctctcttgatgaattactagacaaggtctgcccgcctaccgctaggccaacaactggaactcatgatcggggatttggcggctgaccattcacagtctaggaagtattcatcgttggatcttcgtccgtct

SEQ ID NO: 142237 - DNA, 562 bp, Cannabis sativa
aatatgaacaaatttattattaatttttaactaactacatgaatgataaccctttacgtgacaattacgtgacaacatctcataatttgttattttttttatttaaaaataagtaacccaataatttaatttataataatttaaaagagaaaattgtatgtaatattattcataagactgttccgatttataatctgtactatgtattaattttatttggatatccaatcaaatttggtaactcaaaactattaaaatattttagattgattattttttatattgaattatttaatatttattaaaaaagatttttatttacattacttacaataaaataaaataaattgttatttttatatatttaataataaattaaaataaataaaataaaaaaatagtaaattcatgaaagcaagaaaaaaattgtacctactaaaaaatatttaattttttatagatttattttttaataaacaaaaatgaaatatatatttgacgtattattaattttaaattattattttttacattaaatatcaattgtatatataattttttt

SEQ ID NO: 142238 - DNA, 787 bp, Cannabis sativa
  modified_base (751)..(752): a, c, t, g, unknown or other
ttttaaagagttaaactttgtaattacttaaataatagaaatgattctctttattcataattaaagttaaaatattacatcagcaatgtgagtttcatcatttaattattggtagtagggtcgcaaatgttccacgttccagtagttctttattagtgagccattgagtcgagccaatttgtaaactccaattccaactactgcttcgatgacatatggaccctaccagtttgggttgaacactcctgcagatgcatctcttgtatttgaaaatactcgccttagcaccaagtctccaacattgaataatcttttcttgacttttttgttgagatatcttgtaactcggtgttgataggctgcattagtgacttgcgactcagtttgtttttcatcaagtaggtccaaggataactttagaagttcctagttttcttcttgattataaaactctcttctgtgagtcgatatgttcacttcaacaagtagcattgcttccgagccaaatgctagcgagaagggagtgtgtcccgtttccatcttctcggtagtcctgtgagcccagagtacttgaagtagctcatcgacccacctacctttggcagcgtccaatttcttcttgatagcatcctttaatgtttaattgacaacctccacttttccattcgcttgagtcctagatactgacgagaaactcttaattattttgttcctctcgcagaactcagtcgccatcaaattgggttccatnntcggatactatcttcatggggattccaaacctaca

SEQ ID NO: 142239 - DNA, 555 bp, Cannabis sativa
atcggaccatatcatcgggctaccatcggaccaccctcggacattcgtcttcaatctttactcattttaacaacaggaaagcatcagaccaccatcggacctgataaaaaaactatttttttgcccaaaactcagatctgactattttcgaccctaaatctaacatctactcacagataacaaacattaatgatacaatttattcctttgacgacattgcccatcataaatcaccaaaaaaaaaaatcaatgacaaaaataaaaaaaatgggccgaatgcttaccttcgacatctcggaggtagtcaggtctcacggtggtcgtctgtttaggcggtgaggggtaggcggtctgtgtaggcgatgaggggtaggttcggttttggtgaggatgagatgttagagagagaaccaagagagatagaggagagagagttgaggtttgaaaatgagaagggtatttttggctttgttataaagtggtcatattttttaaattttgaaatgcattagtttaggcataaatttttagggtattttatgcatattttttcaa

SEQ ID NO: 142240 - DNA, 1047 bp, Cannabis sativa
tttatacttagtttgtatatcatgtcatatacgctaagtgtttttattgttgtcatatctcttccacgcgacgaggttaatgcctcatcatgcacactgtcactcacatggtttctcgttgatacatgagttagcagttcgtacatttctgtctcgcttaagactgttcagccagccgagttataaacatactctgcaaattaggtttctaatgagttgttccatgccaagccatgccaagtgtaattacaattgcttacaattgcgtacaattgcgtgtttgagttcttcgttcttcccagctcaacacgtgtcctcttctaatgtgctcacaaaattttgggtataacaattgcttaaaaaattctttttttttttattaaaaagagatttttaatgattacaaatagtatttttttcatgctcctcttttttgaaaagacacatgtcctttgattttggcggttatgcggtttcgaggtacatcagaattaaatgaccatcttttccacttctactttgaattatgtccataggatcaaacccttctctcatctaacgaagccactatcatgggcatagagtaagaaaaaagggaccacctttgcattatttccttcattttagaaagtctgaaaaaactcttaagcttcttctcatcaaggatcaccacatttagagtttttgtccgaggacttgcatgccatctttgtccttgaccttttttctacgagtttcttccgacttcatcctctcaatgtgatccttgcttcgttcgaagatttgcatacagagtaccaatcattgccccaagccttaacttcaaacagtaagttgctttcttctttctcatgtttgttacattgtgtggatttattacttagtttgtttgtatcattgtcatctcatctagttttggtagtttttacggttaaattttatataggcccatactagggttcaggaaatatgtaggttgttttaagatctccaactcattaccttcgagtttgataaaattctctccagggattaggactgcttttt

SEQ ID NO: 142241 - DNA, 569 bp, Cannabis sativa
caaccttaaaatttttatagtatattccatacattattgtttaaaataaaatttttaaattattaaattaatttaaaagttaaattaataataaataataatacaatcatgttattacaagagtagcaattcgattgtttatagtacgtttgaagtatcttataattaaagttgtcataaactataaaatttggatgagatcgacagtaaatcgaaaatgttcagatatttttttagtacaaaatttttcatctacttataatgtattttttttatttgaaaaaatttattattcaattttttatttgacaaactttttatttgattattattattgcatgtgttattttattgttcactattatatataatgtaatacaaccatctatatatattaacaaataaaagtttagaaaaaaaatgtatagtataagaattgttcaattttagtaaatattaaaaaaattgaaatattgtttagaaaaaaaataaaaaaaaataaaattattaaattaatttaaaatcttaaattaaaaaaaaaaatcatatcttttgaaatgattgaactc

SEQ ID NO: 142242 - DNA, 505 bp, Cannabis sativa
ttctagattcaagtgtgctggccgacctgaacgaaaagtctcgtgctagatggatgccctaatcacataatgaaactgggtaaatcacatgatcgaagccctcatcctgggaaacccaaacctacaactctaggttctgttatatcctctagggattgcactaactcaggaaatatggaaacacccaactacgacactgaaatggatgagaattgagaaaataaagtattcggggaccttgccaaaactggctagccagttttacaggtactagtaaaaccggctagctgatttacaccagttcaccccaaaatttccacttcttgctcaatcctccaccaaatgcaaccaaacattccagagtacctaattagggtataagcaacataatccaaccagtaattcactgaaaagcatactaactcaatttatgccattaaagatcaaagttttgagttcaaagctcaaacttgcataaatctatcacaacacaaccaaaccagct

SEQ ID NO: 142243 - DNA, 1296 bp, Cannabis sativa
  modified_base (435)..(436): a, c, t, g, unknown or other
ggtggtctgctgctgctagcgattgacgagcatgtcatcgatatatacttccattgacttccctagcatgtctgtgaacatctgatttaccaatctctgatatgttgcacctctttagtcgaaatggcatgacctcgtaacagaaggtccctcgttctgtgatgaatgatgtcttctcttgatcatctgggtgcataaggatctagttgtacccagaaaatgcatccatgaaggtaaggagctcatgcccagctgtagcatcaacaagcatgtcgatgtgaggcagcgggaatgaatctttggggcacgccttgttgaggtctgtgaaatcgatacaaatcctccactttccattcttttttcgtccaacaactacattggccaaccattctggatagttgacctctctgactgatccaatgtcgatgagctttnnaatttcttcattgatcactttgttacgttcgggagcgaactgtcttcttttctgcttgactggagggaaattggggtctacctgcaacttatgcataacaatgttagggtctatacctgtcatatctttgtgagaccatgcaaagctgtcatgatgcctaatgagaaattcgatcaactttgctcgaagttctagtttgagcttggccccaatttgtactttgtgcttcgagaattctttgctaatgctcacttcgtctagctcctccatattaggctcatttggatcaatcattgcattcaattgctgtagttgctataaggttgattgtttttcttttaggctgctctgataacactctcacactgctctttgtgcccatgatatctgctttattccccatggtgtaggaaatttgataacttggtggtatgtggatggcacagctttcatctcatggatccatggtcggccaaggatggcattgtatgaagagggacagtcaacaacaatgaacttggtttggaggtttactccttttgcccaaacatgcaagttgacctctccaatcgagtgcttttgctcaccactaaacctgattaagactgtggatttgcgggtgattgttgactcgtcaactttcatatccctaagagcattgataaataaaatgttagcagacctcccattatcgatcaatacacgtttaataaaacagtttgcaatgtataatgaaatgactaaggcatcatggtgagggtgaagcaagtatgtggcttcgtcattgacaaagctgatggactgtccaacgattgtctctggctttctcggctttccttgactgttgattggttctcgtg

SEQ ID NO: 142244 - DNA, 969 bp, Cannabis sativa
  modified_base (755)..(771): a, c, t, g, unknown or other
agaggttaaatgtacttctatgtatgaattaccagactcctacagttgagtgggagccatctaagatgtaatcaaacaagaaacattaggagatagtgaaggaagatctttgaaagtgacctatatgttagatgataggggtgtacattagaatccttatatctacaccaactcataaccgattagagatggtggttactctgggggtggagcaattattctagaaggatgtaaaaatccatctatgataatttaagcttcatcagtgaagaagcataactttgttgctttcgaaaagcactggaaagttattcaattgaagaaagttattactgtgttatgtctattccatattggatagaattagagacaagtcttctatatatatagatgcactttataagtagtaaagaattcagtatccctagatgagtaaagcatatagaaaatgatgttgcataatgtttaatgaacacaaagggagtaatggtggggaaagcatttgcttattacagacttacagttccagtaatttgggtttagtcaaatacactatacttgatctggatatcaagacaatagattgattgaaatgcactacttgttttatgtgagtgcaagtgggagtttgttgggattttatgccctaaataaaacccatttcaatacaatctgatttgttatcaatagaagattataagtcatttatcttggtaaagatattataatattatcgttgtatctttctaagtcannnnnnnnnnnnnnnnntagatcaaaagatcttaatcctggcatgcttaggttaattctgaagagtgttatttgtgttccttgatctgttagttaagcctaccttttgttccgggtgatacgtaccttttcggaacatgatagtacaattgagtgggagcactaaacatagatatagaatctatagtttctatatggacatagaagtgaaatgat

SEQ ID NO: 142245 - DNA, 967 bp, Cannabis sativa
  modified_base (659)..(665): a, c, t, g, unknown or other
cactgtagacaaaccctcattttgcagtgataattgctgcctccttggagcattaaccacttcatttttcaatttttgctgcctccttggaggtgctcttaaaaatgtcattttgtgttatatttagcttattaattaaggtggtgtttggtaacatttttttttaattagttttctatttttaaaattagaaaagtgaaaaatatttttttaaaacatgttctataaaactgttttcacttttttaattttttaattgataataaaaaatttaaaataaaaagaatcactttcaatattttttttttcttaatcaatattttggactccgaccaaatctggacacaaatcctcccccccacagccctggcactgaactcgtcctctgacctgaactcgaatctgatcccggatctagacccgacttaaataaaataaaaaaataaaaataaaaataaactttataaaacacacttttgtttattgtttttaaaattaaaaaaataaaagtggttacagaacgcatttttgttttttaaaaacaaatgtggcgtttgggaacactttattaatcaattttttatttttaaaattagaaaagtaaaaaatattttttaaaatcatgttctataaaattgttttcacttttcaattttttnnnnnnnaatcaaaattttaaaaacaaaacaaaatcacttttaatatttttttcaacagtttttttttcttaatcaatattttggactccaaccagacccgacccaaacccaacggccttggcgctgaatccgggctctgacccaaacccaaaatcgaccccggacctagacccgacttaaataaaatcaaaaaataaaaatgaactttacagaaaacacttttattttctgtttttaaaattaaaaataaaagtggttacacaatgcatttttattttttaaaagcaaaaattttactttcattttgt

SEQ ID NO: 142246 - DNA, 725 bp, Cannabis sativa
gacctgaccaacttgcccggactcgacccgctcaacccaaaatttttaaaaaacttgttctgttcgggcaggtcaggttcaactcggtacaccatcgggcgggttcacgagttggttttatatgatcaccgggtttcgagttgaacccgaacctggccgccaacccgatcactttttattttattttttatttttattacatatataatatattaaaaataaaaaaaaaaaccctaaaatcgaatcattttatttttattacataaataatatattaaaaacaacaatatataatatattatatacagtttggaacttgacttttgtattttaaatttaaaattaatgcattttttatttttttaatttaacgaatatagattatggtgttataagtttataacttgtatgcttaatttaatatataaaaaaattacataagatttgatttttttaaaaaaaataataaattaacgagttaatcgggtcaacccggtcaactcgaacccgtagacccgcgaggccgaaacccgcaaatccgaaccatttcacgggtcgggtccaggtacaattttttgaacccgaaacccggtcaacccgcctgatgttcacccctaaccaccaccacacaagactcaaccctaactcctctttcccataaccaccaccataaaatacaccatacagaaaccaccaccacccaaccaggcccggccctgggcata

SEQ ID NO: 142247 - DNA, 660 bp, Cannabis sativa
atctacctttttgcaactttttgaggtcctgcttgctttttttattttcttttgttttaggagctgtttggtactaaaaattgaattaggttacacatattaatttgttcaatctaatattttagcatgttgagagtctagataattaatctatctaatctcatttattatgatgggataaataattcgatacatgtaagattttttaaatcgtttatttttattttttgagtgtagcgtaatagttttttacaatcatatattagcttaaaggtcctgagttcgaacccacgacctctccttttttctcatccctccttcaccactaagctagccttagtggctttattttttatttttttatttactaagaatttaaatgaaagaattactgcaaattatttttaaaaaaattatcaaaatttttttcattaaaattagtaaaaatttataattttaaattatcatacatacatttttcaaatttaaaataatattaattaaacaatagttactaaaataaatttcaagagaaacaatacgataataaaattatagggtgattctataatgcaaatgcacccccttaaaagggatgtaccgatacaccatctacttgtttcggcatctaaaaaaaaattagtttatttctttttcata

SEQ ID NO: 142248 - DNA, 863 bp, Cannabis sativa
taataaatattataaatgacaattctatttgataattattttaattgttcaataaatagttttggcatttataggtttgaaagtgcaaaaagtagtatttgtgaaaaatactagtgtagggcccactatgtagtaagataaaatagttgagaaaaatgacaaaacccaaactagtgtagggcccactatgtggccggccactagatgggtttttcactctatttttattccaaataaatcaaccctagatccaggtaaaatatattccaacagaacagtgttgtgcgagacagaaatatactaattgttaacttgtgtatcgacgagaaaccatgtaaatacaagtgtgcatgacgaggcattaacctcgtcgcgtggaggagatataataataaaaatacttagcgtatatgacacggtatacaaactaagtattaacagtttggtggatcaaggtgacatatagcgaggcgtttatcgcgctgtaagatgggatgcatgcgggaaagatcgtctcgacaccagaaactgtagttatcagaattaaagcaatatcaacatcgagaagttatatgaagagcactagctcgccatcaaggttaactcggctccattcccaggaatgcatccccatgagataaggcttaccgtacatctttaatatgcgttcatctcagcccaataaaagcgggatattcacagcggtgtaaattctaaataaaaatcgcatttacttagtgtaatttgtaatccaatcccatgactctaaaagataatcgttgtaaaaagattacattcaactttgtaattaactgcccactatgtaattataaatagtggcagacaaggtcaaagaaggggac

SEQ ID NO: 142249 - DNA, 581 bp, Cannabis sativa
  modified_base (527)..(540): a, c, t, g, unknown or other
tccgctcttgaccagctcggatccaccctttgactgctcgggcctgtccaagctccctcctcgagagtctttagacttagttatttttggagctgaagggtccacgatggttggctcctcggaaagatcgataactgcttcagacggtgtcttctctctggacggagttgtctcaccacctctagacttcttggccggaggagataagcccgagcttcctcccactctcttctttagagctttgagcattttctgagacatgtctacacgaaataaaagcaacatggttagagaaaagtactagaagtatgaaagcataataatcaagaaagttaaaggaaagatggagtatcttgcacttcggaagaagcatttgcccgagcaagacctgatggctcatcaccatctgacgagtctctttgctcctctagacggctttcccctttcctactacaggagtggatggccgagaaggtaaagtaggctccctgatttgaatcgtatgttcaatatgttgggttttatgnnnnnnnnnnnnnncatttcatataatcagatttactcattaataaagatcagaa

SEQ ID NO: 142250 - DNA, 907 bp, Cannabis sativa
  modified_base (861)..(866): a, c, t, g, unknown or other
aagaggaatgttgattacaattaatggtaataaataaaagatttggacatccacatgattattaatatttataacactcactatttttgcattgtttttgcttaaaaatagaaaatgagaatcctctcaatttataggcaaatacccctcggctttgattggcaaagactcatttaattaagaagcttaatcaaacactatgttgtgcccaattggggtggtaagtgaaaacaaatatggtttgtccactatgatgtgataagtttagatacaagccgctaatgtttactacaaaaaatagactttttatctcattttttaagttaacaaaaataaaaaatgcaataaaatatatattaaaatattttatcccacttttagatttagcgcctcaaatatgcattgatccatgacattctctttaaatccaaagataacatcataaaattttaaataccatcggcgggatgcttattttaatctatagatggacttcttaagcttgcataccaaatgctccccttcgctagaggagaatcttctggttgtttcatgtatacctgcagtgcacctccagatcactattcaggaaagcagtttttacatccatttgctcatccagctctaaatcaaaataagcaactaatgccaacatgactctgatggaataatctttctctgatacaggagaaaaagtctcagtgtagccaatccttcttcttaagtgaattatttagtaaaaaatctcactttgtatctctcaatgttgcctgatgattcctttttaattttatagacccatttacatcaaatgaccctcgctccattaagcaactttacaaatgttgggttttatgcccnnnnnnaaactccatttcaatgtaatccacattattcaatatcaata

SEQ ID NO: 142251 - DNA, 978 bp, Cannabis sativa
acactctcccggatgatgtttctaacaatgtgggcactcagggtaagagtaaccctggcgtccacctctgccttggttcccatggaaccgcttactctgcccgagccaccagatgttggggtaactttcctcttctgatcagtggtggaatcagcaccatccctaccataagcaggagtaggaagggtaggggtcccaccaacattcagagtcactcagggctcctgaagaaattttactgcaccctcggctcgcagagctttttcaaccatcctcgcatatgatgttgcttcattagtagtaatcaccagatcatgtctaatcttcacattcaaaccggccaggtacttttctttcttactgaaatctgttggcacgatacccacagcgagtttggccaaacggtcaaactttgtggaatactcagtaatcgacatcccctcagtttgcactaactcagtgaactctttctgcttagcactgcggatggctttattataatacttggagttgaataactctcggaactctacccaggtcataactgtgacgtcccgagtgagggacaccaactcccaccacacgagagcgtcctcctggaactgaaatgtggcacaggtcacccgatcatttccaaccacccccataaaattcaaaattcgctcaatcaccgtgagccactgctcggccttcatcacatctgaacctcccagaaacactggaggtgcttgcttacggaacctttcatataacggctccatacggttgctagcaacatgttgttctgctagcactgctggagctacaacggcctgagcttgctgtggaggcacggcaggatgaccctgctgccttaacctcaaaatttcttcctcttcttggcagattcaatcttgcatctccgcaaacctctcctcccaatctggagaagcttgtagtggatttacaggacgaccaccctgaactctgccacggcca

SEQ ID NO: 142252 - DNA, 537 bp, Cannabis sativa
tcattatattcatttgtttggttgtatattaaagtgttggaatgtcattccaatggaatggcctttctaccatcttggtggaatgacaatttcattttaaaatgaaataaaagatcattccattgcaggatgggaaaaaatttaataattgatttagttcgtgatttcaatattataattttaaaataaaaaaaattgagtttataacttaaaatgtgtttttgaaagtatgattgatttagtattagtaaatagtttttttttttttattttaaaaaccttagatcaatgattagtagaaaatttaaaaatataataatattagtatatgtgattggtttaactgaatctatagaaaaatttagattgttgacactgaaaagtggtcaacactagctcgctagattgacaagatgaataattaatgcaagtatatagaaacacaaaatttataatagattcactccccttttcgcgaaggtaatggagctacgtccacttcgagcttttatttctcacgagattacaaaaaaaaaa

SEQ ID NO: 142253 - DNA, 529 bp, Cannabis sativa
  modified_base (327)..(348): a, c, t, g, unknown or other
  modified_base (501)..(504): a, c, t, g, unknown or other
aagattagaaaatgataaatgatattgcaaaatttttttttagttattttcaaatcatttatcttattagatatttattttaatttaataaaataatacaaataaatctagatattttaaaattagtttcatttttgaattttaaattttgaaaagatatttaaggttatttttaacaaccctaaattttcaaaatagttggttagataaaataataattcaattatatatatattttatttcacatttgttacatggacattgtttgttatatttaaattgtttattcaaaactttttttgaacaaacctattatttatttgatcnnnnnnnnnnnnnnnnnnnnnntgacagatccaatgatctgatttaaatcatagtccaattgtcattagatcctataaataatttgtaacaggtaaattttgtatttcttttatctatgtaaatttagaaacatgatagggcccatccaaatcaatttgacctgtgtgagcctannnntttgcttttgggcttagatgcatat

SEQ ID NO: 142254 - DNA, 735 bp, Cannabis sativa
tttttataggtagcttccaaaaaataaaggttttcttttcaggtatttggctctcaacaccctggagcaaagagtttgatcctcagtaaggagggcccatccccacttagccaggagagcttgattcaactccatagttttacgaaaaccaaggcctcctctagatatgggaagacaaatgtggtcccaggccttcaaatacaagccccgatttccttgctcacagccccaccaaaagtctctaatcatcccatcaattctcgaagcaagtttcttagagagcttggtagtttgcatagtgtacaccagaagagtcagacccacagatttaatgagcgtggcacgaccagctttagacaataattttaatttccaacgatgcaacttcgacacaaggttgtcaataatgaaattgaaatctgcatccttgcgattagatcaaaagagcgggagccccaagtaattaatattcgtggtagccaggttcaaccctagtttctgcatgatacccttttcattccttcactggtattattgctaaaaaagacagaggttttgagcttatttacacattgccccgaccaactgcaaaatttcttaaggcagctccaaaagcccttagcctcctcaatagtcgctctgcccaccagaataaggtcatcagcaaagaagagatgagataaactagggccatctctactcagcctgatacctttaatggtgccatggtccatg

SEQ ID NO: 142255 - DNA, 1306 bp, Cannabis sativa
  modified_base (290)..(291): a, c, t, g, unknown or other
cccagctaagcccagaaagcttctaacttcagtagctgactctgctgtcggccaatcccaaacagcttcaattctggccggatctgccatgatcccatctttatccactatgtgccccaagaagaagagacgagataaccagaattcacctttttgaatttagcatacagcttatggtcccataatcgttgcaaaaccgatttgagatgaaactcatgttctttatctgattcaaattacacaaaaatgccatcgataaacacgatcacacatctattcaggtaatcctnnaacgtccgattcatataatccatatcaaatatactacctagctttggcccattattcaccctgatggtgattcttgcatttcggacattcaagatatgacttgaaagaggatccgtaaccttgacggccacctcaatttccctgatgctttctattaccctctgatactccgaaagcctcagccttgcgtttgtgatcagggttgccacggtcggtccccttactgatgttaccactagcaggaggattcgatgtcgtgacgacatcctttgcggtctgttcttttactacatattgctcagcctcctcagcaattaaggctagccctatcactttcttctacaaagtgtcatgtgaagtggcaaccttcaagtcccgactgattgtggcattcaatcctctcttcatccactgctcgacctttaatatgtcactacctcctagaaaagtgggagattgcagcttcacgaacttctcaaacaccaagtctcgatgcggcataacaaacccctggttacccaccactgacacgggtgctggtggtaacacttgatcaataagggcagccggttgccttaatcgtcgcaactcttcttcttgacgaagtatgaaacttcacatttcttgaaacatctgctgccaatcagtagaaggattaacattgccaacccccgcaatattccccagattctgcggaggtggaggcagtgtcaatggattggtttggtctacaccaggctctactaacttgccctgtggtctggatgattaaagagggtccattactagtacccatgtaatcaacaaccccagcgagttaagcaccaataccacacttatgcacttattgctctacaccctaactcatccatttaccccatataaattttcatttcatttacagcatggcattaaataacatataaatactctagatgtttgcatactgcctaaaatggaaagcggtaaacagatgatcacacaaacagtcaagtatttactctcaatacttact

SEQ ID NO: 142256 - DNA, 597 bp, Cannabis sativa
atatatatatatatttttactataggatgatattttttttttcaaaaagaatttgttatatattaaagtttaactgatttatactaatttttttgagtcttttacttattcaatagatgtatgtgatatttgtattagaatggttctttcaaaaaaaatttgtattaatttaaattttctcataattttcataaaataatgtcacattttatattattttacttattcagtacaacaactgaaaacttaaaaaagataacaaatattattcagtattgtgcgaagcacagattagttctctagtatatatataatggaatgcccaacaaagatcatatagcgtactatattaaatctcataaataaaattaagagtaatttgcagcattacctccataagtccatagtttattacaactaatctcaaatttcaaaattttagtggtaaaactctttaaactcatgttctgttagcacttagccatttccatctatatttagcagttaactgccatgtgggcatgtgttggaaattattttaccaggatctagattttctaacaagtatgtttcatcaacatcctaatatgaattcta

SEQ ID NO: 142257 - DNA, 1730 bp, Cannabis sativa
  modified_base (427)..(433): a, c, t, g, unknown or other
tctccaaggcattgaccttctccttcaacctgtccacctcagccgaaagctcctcctccttgcttccttttcctccttcatctgatgaggaactgctcaaagggaagtcctcttgttctgaagactgtttacctcagcagataaggtctcgatggtctcctcaaaacggtcaggaacctcgagatccttagtcagcacagtgattttcttctgagtggcacacaacttcttcttggcttcacccaattccaactgaacagctccgacatttgccctggcttctttaacatccttccttgcaaagtcaacctccaccctcagggtgtcggacagagccgtgttcttggaagcagcagacttagcctgggagtaagtgtaagccaacttcttaccggcttgcacaaggaaaaaactttagcatttgagnnnnnnntggaagattaaagggaagtattaagaaagacttaccctggcgaacacttttaagactccgcccaccagcaattccaaagaagagtcattgtcagcaccagccagttgctcactgacctaaggaaccagtcggttcatataatgggcctattctaaggaaaagacgcctaccagggaagtcattgatctttctgaggacctgacagttgcaaacccctctactccaaaaggtgcaaagtctaaggagtcttgaggagggagtttggataggtctgaccaatcgagaggtgggtctgagctggtgcagacccctactccacctttgccagtgcttacagaggccaagaaaggcaaggagatgctcgcccactatatgaacctgttggttcctgaggttagtgagcaattggccggtgctgacaatgactcttctctggagctactgatgggaggagtcttaaaggaattcacaagggtaagtctttcttaacaatttcctttaatcttctttacttggctcaaatactaaagtttcttctctgtgcaggccggtctgaagttgccttacacatacttctgggctaggtctgctgcttccaagaacgcggctttgtccaacaccatgatggcggaggtggacttgccacgaaggatgctgatgatgccacaacggaactctgagctgtttggatggagttgggtgaagcgaacaagaagctttttaccgcccagaagaaaataactgagccgactaaggatcttgaggcttcggaccgatttgaggagaccatcgagactttatctgctgaagtgaaccgccttcaagatgaaaggacatctcttcgagcggtccttcatcgagtggaggaggagatgaagtgtaaggaggaggagcttacggtcgaggtgacgagcctgggagagaaagttcatgccttggagacagccgatcttgatctcttttatgacttttggaaggctaatcctcaagcaaacttcgactacttgggtgaagccaaggacatgtaccttgagttctgtgcttcccaagtggcttatgatgagaccgaggtggctgcttctacctccggccagaatgctgatgtacataccgttcaaatagcagatcctccaactcctacaggcccagaagacccgaaccaagagcatgggactccagctgtttaaatacttcttcttttatccttttatttttacattatgttattcggccataaggccttttttaagacatcatgaccgaccaagcggtctttaaacttggaattatttttcat

SEQ ID NO: 142258 - DNA, 820 bp, Cannabis sativa
atttcggtttgtaatttttatcgatttttccggttcggtttgggcgggttattcggtttgggcagtttacaaatttttttgtacaaccctagagtttactaatatttttttaattaattttttgttttttaaaattaaaaaatttaaagtatttttcaaaatcaaacaaaatttttttacattttttttaaataattttttttaattaatattttggactccaaccctaatttaaaccttgaaacctaacccagacccccaccgagacccctaattcgaaccctgaaccaagacctcggatcccaaacccaaaccacgggccaactcgaaccccagacctgacttgaactccaaaatcggacattggacttgacctagaccctaaatcccagattgaacccgaatttagccccaaatccgatctcagactcgaacctagacctggctccagccccaatcccaaacttagacccgaacccaaattcggtcccagttcccacctcagacttggacccagaccttatttaaataaaattaacaaataaaaatgaaatatacaatatacttttttttttattttgtcggttaaactttgtttaatagttgaaaatttgacaatgctacaaagtctattttagttatgtaaactttgttttttttttttttaacaatttgataattttttttttatgacaatatatttagaattgacattaatattcaggttagaatcacatataacatgtttttttaaaactaaattagtgtgtttagttgatttatttttttttttaactttttaatttctttttttttaaaa

SEQ ID NO: 142259 - DNA, 514 bp, Cannabis sativa
ttacaatatatgtaagtgttttttctctacatactttttgaataaaacaataaaagtaaatattaaatttagaagttatattacaatttattttatttcatgtctctaaccagtaaagaaaaaaatggatttattgtgttatgaaattaaaatttaatttgtatttatattttatgtactcttttataagatttgtttccttatgataataattttgtgcactctaatatagtctcttttctttttttagtcttctaatataaaacttgaataattttgtagggatagcattaaaataaaattaatataatataaatagattgaataaaaaatatttattattttgaattaatattattgaaaagaagtaattttttttcttgaataattatgttaagagtaaaaaaaatgatataaatttattaagcaatattttgtatctaattattaataatatatgaattttgttacaaatgattagagcataaagaaatttatatattgtactaaaatt

SEQ ID NO: 142260 - DNA, 726 bp, Cannabis sativa
aggtccctaccccaaggaaccagagggagagggtggtctatggacttgaagatttcccaaggaaccaagagaggactaagaatcacccctctaacaaggttccccgcaataataatcgactgcctctggccgatgagcaagttctacccggtcatcatatggaacgtgatgactcccacaatgtccgtctaaggtggactggtggaggaaactctagaaacaacaatggtgaccgtggcagaaacggtagaaagacgccccgacatagggagtggcaaccccgcgaccaacgcgatcaaccacgagatgtcaatgatcggccaagaaatagtaggtctaggggaagaagagaagaccccgaggtcaacactgactaccgtccaaactaccttgacggtcatggtgatgatgaagctgaaagttgggctaacaaacaaccaaatcctgagttgggggttatcaagccggagggccgtatgcccctaataggcaacatcaacctcagaatccaccctaaaggggaaggaatgaccaagtatcacccccagctgatggaagggctgacagtcagaacgccggaggaaggctaaaaaccgggtcagttttttaaaaggtaggcccccgagggaatagagacttgcgagacgccctcaacagaaatagagacaatcgtggttccaacatagtgaacccacctgagccggtccaaggggaccaagcaaatgt

SEQ ID NO: 142261 - DNA, 504 bp, Cannabis sativa
tataccactctacttgttcacgagatgcgcgatcaagtggccggagattgccttttgtgatgggtcgacattgagattgaaacacagaaagctttcgtgagacaacgtcatcaatttttttattacattttttaaaaataatcaattgtatatcaattttatatatgtatatatatatttaaaagttgtttattattctaaaatattaatgatatataattttttgagaaaattaaacactaaactctataaattacatttaatattacataatatatacaacattatataacattatattaaatatacagtatatacagtgtatatacagtatatacagtttatatactgtactgtatatactgtatacacattatatacactgtatatactgtacacacggtgtataaactaacaatatatacactatacaatatacaatacacagtatatatacaaaatatataatatacaatatacaatatacacaaaacaacaattaaa

SEQ ID NO: 142262 - DNA, 684 bp, Cannabis sativa
  modified_base (620)..(641): a, c, t, g, unknown or other
atagggatccggatacgaacctggactcgaaccgagacctggacacagactaggatcaaaacacgggacctagatccggaccgagaccgtgacccatacctagacctagacccgcaccagagacctgagctcagacctggacctgaatccagacccaaaccaggatctagacctggatccagacctagaccaaaagtcaaacagggactcagactccaagccagacccaaacccaaaaccgaacccagacactatatcgaaatcgatattgggactaggacccaaacccgaacatggacccagcccgagacctacgacacgaacctggatggggaacctgaacctggccctcaaaacccaaacccagatcggaactcgagactcatacccgaacgtggacctagactggaacccaaatctggacccataccgagattagaacccgaacccaaactcggacaaggacttgaaccccaactgggtcttgtactcagatcggggcctagggctcggacctagatgggggacctagactcaggacacaggcatcagaattaggaccgagaccccggaccggaccccgggcccagaccctgaccgagtgttgggttttatgcccnnnnnnnnnnnnnnnnnnnnnnaatcatatttacttattaataaagatcagagatcggaagagcg

SEQ ID NO: 142263 - DNA, 980 bp, Cannabis sativa
agacttgccaaataaggtatcttttaaggataacttcttctggacgtctggtctctcctccgttggcacaaccacgtttcgcaaacttcgtaagtgattatcctcttcttatttacatcaatcttcctttttcaagagcttgactaatgttttgtttgttctgacaactcttatggtgagacctctacccccgagatggttagcaggcacaagcgcctgctgactctcccttacagtcttcgatcatgcaaattccttttgaacgaagctaacttgtgatcggcgggtctcctcactgataaagaatacacttacgattacaaggttcccaagtactcttcttggcagcaaataattgttccacccaaagactaggcctgggatcacttggcccaagcacaatacctccaaagcattgcccctcgggaattcggtgaaggagcatcccgaggtaatcaatgtggctggtcacttgtaaagaccgcttagctttaatttggaaattagcaaataattaggatttagttatggaaattatttattaattttgaattattttcttacgatgatttattttaattcagaatgcattttatatgtcatatatagaaatttcataattttacatgttttgtgcccagcaacattaaaacgtggtgtttggctattagaatcacatcctagtattttagtatagcggagcaatatagttagacattaggaatgtcgggaatagttgggattttataatttccaaaagtaccgctaattgaccttttatgatttttagagtgggagaggcaaaatggtcattttgctcttgagtgttttgtctttttgtgggatgtattaaatctgatttttaaattttaattaagttaattttagttgaataaaacatattgtatttatctcattttcataaaatatcaaaatagaagaaaaacacattttgctctccttgctctctctctctctct

SEQ ID NO: 142264 - DNA, 1339 bp, Cannabis sativa
acctccggtgtccgtttgacgagatgccttcaccactagacttagcttgtcgaggaaaacaacctacactaagctatttcgcccaactcgctattttttaccagtaatgtttttgtagctccaccctttttcggcaactttttagcaatatcgtgtaccgttttgataaacggttggtatgggtgtgatctactcgttgaggtgattgttttgatatacagtacccctattttcggcgatgcatccggtacaccaatttttaccaccattgatagttaatgtgcactgttgaagtgagggttcagaaccttaaattttatttatagtcatattatatgttgttggactcgattttgaatgtagaatgcaattatgataattatttagccatttgatggtataggtgagagtaatatctaagattggactaaataattagagcttgagacttgagagcttaagaccatcttttggacaaattaacgacttgggagaggtaggaactcaactggattattcgacttgatttttatgtgtagtataacattagacatattctaaatttttatgatttgcaaattgtttgaaaaattaaaaacttaatatgcatatttttctggactgttttagggcactgagtgccaaatatatttttgtgtacaaatatttatgcaggttatgatttttggatttattcaaaatacaaccgttatgctgccgaattttttagaaaataaaaaggaatatgttcttttgttatttttattatttacctgctttggttatactgaagagagtcatattgatcatgatttgtccatattgttgtttcacaacctagtctttatgtcatcataggtagatcaggtgtgcactcacctgtaggtaaaatacctagaatttgtacagggagtgaattaaatctgagcccggtattatggtggatatcaggtgcgactacccagttttggatatcgttttctatgattagtattgagagctaggggtctagtggacggtgtgatatgcatttaacgtttgattttttgattatttgtggtctctctacttttttttatacattttgatactgatgatgagatattttatttttacaaagctaaccatgcatgaattttattaaaccaagaatcctttgatattagttgttttcctactggtctttataagctcactcccatattttctctcattttaggaattgagtttgatgctagtggataaggatggtaccgttgaggaagaaattcgttattagtttagtcttattctactctttagggtgcgtttggaagtaacggtgtaattactaggtaga

SEQ ID NO: 142265 - DNA, 560 bp, Cannabis sativa
tttcccaaaaatacccttaagtgctttttaacccttttagtgtgggaggggcaaaatggtcattttgccccataagcttttgtcctttagtggacttagtattacatgattatttggtttattttatgttgtgttggctgaaataaatggattaatgtattaattactcattttattgaaaaatcaaaagaaaagcaaaatctcattttctctgtagctctctctctttcaaccacacttagaaccagctagggttgttgtttcttcttgcttaactcagtgttttgcatcaactcttagtacaaatcaagctaaggtaacccttgtgtaactctcttttagtttcttgatgtttaaggaagtaaatatttgcatgcttaatgattttgatgatggtagctgctgtgtatgtttgtttttactttctaaagtttagatgtgtttatttgagtggattcaagctagttttgttgctatttagttggattaaaccttatgtaaagctttgaactcaaaactttggattttaatggtaaaatggtgttttggctgctgtgatc

SEQ ID NO: 142266 - DNA, 930 bp, Cannabis sativa
tctttcaccaatcctgcgataattcctacagagaatgtggttgtttctatacccattctccgctgtggtgtatcgcttccttttcacccattcatcgctgctattcttaaacggtataacgtatcccccttccaactaaccccaaacagttatcgcatagtccttgggttttatgcgatgtacatggagtacgcacataaggagccttcgatggaggacttcagctatttttatgacataaagaacgtgggccttcgtaacgtcttctattgcttcagcaaatgagccacttctgaaatcaatggggtggaaggcatggtttccaatatgggagattggaaatctaaatggttttatgtatttaaagtactaggaattaggactgactttaatcgtcgacctagtacgtcgcatttctcaatacttagttaatattaatgttaccttatgatatcgattatcatcatatactttttattgatcgcaaatagaccggctcgacctattctgaactcggttagtagagaagtcgctgaagttctcagttgcctccctgttcaagatcgcgactggcgattatattgtgcacgaccttgaagttgcgggaacacaaactaatttcaaagaacgccaggcttcatcgggagccagtatacaaggaaccatctgagaaacaaaatgaaaagatagacaagcgtctttctaaacagacctctcgaccaacatcaggtaacacatcgcatatatgtggtatatatatgagttattgtttatattttaacttatcttttcttgtcctcacagaaatgactttcctgaagcaagctcctgtgctcaactccaagccgaagactggaacagcgacgacctctcttgtcgtgtaacgcccttacttacgtaaaataagatgccataaataaactggcgtta

SEQ ID NO: 142267 - DNA, 935 bp, Cannabis sativa
tcataacacagccgttccgcccgttaccaatgttcaaacaaccattggagatgacactgaaatctagaacctccgtgctgctcttggagtcatgtagggtcataccgaaaccctgcatcacgattaggaggaactccgtgctgcggtgaatctcgcgtttgaagagcaaaggggcatgtttgctgaatggagagataaggagatggaaacgttaagggcttagcaagcagtcattgacgaccgtagtcggcaggccactgtgttgatacgaaaagcctatcaggctgccggacaatagcctgtaaacgtcatccccttgggcgagaccaacgaagatccagcgatgaacacctctcagactataaatggtcagccgcccaatccctggtcacaggttgcacctgtgggtcaagtggtaggcgggcagaccttgtctagtaattcatcaggagaaatcatacccaataatttcaaccaagttaatggtgccggttagcaaattggccaaattaatcagtcactgaggcagccatgtgtttatatatttgataggctggggcaactcaggatctcagaaacgatctgaacaggagtagaggattggacgaccagcttgaagcgccaatcgtgtagcccaaaatccgcgctcaaaatcccgctcaaagagatgctgatgtgactcaggtcggccaagaggccgaacatgttaatccagccatgcaggcacagttggacgaactaaaaaatatgttccaaggcctggccggtcagaggaacaacgatctcgagttgggccgagcacgtagaacccctttctcccatgagattaatatcctggaatttccccacaagtttaagatgccaacctggaagatgtatactgggaaggaagatcccttataccacctcaagtatttcgagatgcaaatggacct

SEQ ID NO: 142268 - DNA, 1196 bp, Cannabis sativa
gggggcatggctggaggttgaagatgacaactcgatgggcccgatggcctgatataggggtccgatggggcccgattccttgggcccgatgaggtcgatgggcccgatggcccgatggctctgtccgatggggcccgattccttgggcccgatgggcccgacaggtccgattctttgggccgatgggtccattttacgtttagggaaaagatgggaagagaggagttgatgtaattgggggagggtattttgggaaaaataataaagttgtcatatattaaaaatattggtaagtataagtgtaggaaacaaattttaagataatgtaagcatagaaattcaaatttcccttactaaattgttttttcttcattaaaaattaaaatttgtatttatttgaaaattattagttttagtttagtggttaagctagcttatggattcatggcatttaaatgttcaaatctcaacttgtgcaattttatttttaatttttaaaatttattttttgaaaaagatatttctaaaatttaaattcctattaataaaatttgtatttagtaccttaaccaatgaagccaactattttattgttacttttttactttaagttatatttaataatataaaaaatataattttttatccatttttgttatacccaaaattcggcgagaggacacgtgtcaagataaagggaatgtgaatcgatgtcattgctttttatggaataactcattaattacacaagtatcagagtatatttgtaatacgctgactgtaaggtcttaggcgaggaatcaatgtacaaactggcacttagtatattagcaagaaactatataccgctaaatgcaaacagcaagacaccaaagaaagcgacccgtatcaatcatggaggtgcttagcgtacaatgaacaaactaagtgtaaaagtcggatcggctctagaacaagcaagcgaggtgaccatctcgctacttcatcacgttagcgtcagcaaggcttacaatcctggtgagccagaagagagcattcaagtgagcctcgaagaattctttgaggataagaaccgtgatcaacaccagacatacattgtcgaccttgaacagaagaatggccccagctcgctattgggatcaatgtaaccaagtttctgtcgagacatctccagatacaacagctaaagatgtgtt

SEQ ID NO: 142269 - DNA, 519 bp, Cannabis sativa
  modified_base (473)..(493): a, c, t, g, unknown or other
ataatattatattattttgtttcattttttatggtaggtatatatgttttgttgtatggtattaatttttgttgtgtataatatatcatttattcaaaatgatatttaatttctatcttattatatataatgattatgtataaattttttggtataatagtgatatacataattttgttagcacaatataatattttttgagtattaatttattattgttataatttttttgtagtatataattttattactacaatatattaattttttagtgatacgatatatcaaatattgttgtatatatttaatgacttaatatatttatttatttttattataatatattaatatacaatactaaaaaatttatataactcaatttaattattatatttttttttttaaaaaaatattaatatgtaataaatatatttttatcatttttaacagaattaccccatatactatttttnnnnnnnnnnnnnnnnnnnnntttacggtttgggtttctaaaatggt

SEQ ID NO: 142270 - DNA, 530 bp, Cannabis sativa
  modified_base (482)..(484): a, c, t, g, unknown or other
ttaaattatgatatttttctttgaacttaaaatagaattaattattaagttaattttattcaaaatacttaattatgtgtttctatttcatgaaatttaattaaatatgcaagatatatttatgttgaaaattaattaacttaaattagaatatttttcttaaatattaaattaaaattaataattaagttgatttcattctagatacttaaatgaatttaattaaattagaaaattatatttaatttgaaaatttgttaatttcacatcaacttaaattagaataattttcataatatattttattttattttaataatcaattcccacataattttgaattgcattattttaatgcagatatttcaaaaattttcaattttgaaaattatattaagttggaaattaatttgaattattttagatcgacttaaatcaagtaattttcattaatgatttatttaaaataaatagactaaaannnattatattttaattagaaaattagcaattagtttatgaattatcta

SEQ ID NO: 142271 - DNA, 575 bp, Cannabis sativa
taattggattggatcggatgatgattttctaaatccaattactaattggattggatcggatgaggaaaaaaatgttggattggatcggatgcccaaccctagaatgtaccttggatttattaataagatgataacttggtgtaaatgatatacaagttcaaaaattcatggacatatgaagagaaagtcttcttatatttaatgcatttgagataaaaaaaatatatatatatatatatatattaaaaaaaacaaaaattgaaaccctataaaagaaaaagagaaaaaaaaaatgagagaaaaaaataggaattgagatccgtaatgaagcttagatcttatttatataatcaaatatggaaataatagtaattaatttgtgaaataataatagttacgtctattatacctagatatttttatatttatatatattttctaaattatattttgataaattatttataaacctaataaaaaattagaataatgagagaattaaggagagaacagatagtgctatttgaagtgattttagaccgccacatcaccatcaccgcttcatacttctcctt

SEQ ID NO: 142272 - DNA, 653 bp, Cannabis sativa
actttggtgtgcataagctgcacagccaaagactttcaaatttgacaaatctggaggttttccagaccacacttcctctggtgtcttgtaatcaatagcactggctggacatctattgattacataagctgcagtcatcacagcttctccccaaaatgctttggcaagtccaaattgcagtaacaagcatctgactttgtccatcaaagtcctattcattctttcagcaactccattttgctgaggagtgagtctgacagttctatgtctttgaacccctacttctttgcaatagctgtcaaaaatatcattacagaactccaaaccattgtcagttctaagatgcttaagtttgtaatcagtgatattttccatcaaggttttccattgaacaaatctactaaatgcatcatttttatttttaagtagaaaaatccaaactttcctagagtgatcatccactatagacatgaaataggcattacctccatgtgttagagtcttttcaggaccccataagtcagaatgtacatattctagagggtgtttagttttgtgtatacctgtcttgaattttagtctatggtgttttcccaaaatgcatgattcacaaaagtcaagtttccccaccttgtctctgcctagtaggtttt

SEQ ID NO: 142273 - DNA, 566 bp, Cannabis sativa
ctaaaatcatgggatttgattacaaatcaagccaaataaatgaggtttttacacagctatgaatatcccgcctttattgggtcgagatgaatgcataattaaagatacacgataagctgtatctcatagggaagcctcgccgaggagggagccaagatcactttgatagcgagcagctgcttgtcattttagcttctcgagactaatattgtcctaactttgatagttatactatctggggtccaaaggatctcccttgcatgcataccatcttttagcgagataaatacctcgctatctgttatcttggctcatcatgctatctatactcagtttgtatatcgtataatatacgctaagtatttttagtgtcgtcgctatctctttcacgtaacgaggttaaggcctcgtcatgaacgtatgcacttacatggtttctcatcaatacataaattagcagttcgtatgtttctgtctcgtgggaggctattcagccagccgagttataaacctaccctactaattatatttccaacgaattgttccatgcttagcgtacttgtcgt

SEQ ID NO: 142274 - DNA, 865 bp, Cannabis sativa
tttatttctcatagaaatctattctcactcaaatttactcattaaataaaatattcccatgtacagtgttgtatagaggtgactcggggaccatagatctatattttgaagctccaatagacacttgtgtcactacaacaaaagatagtattaggggcgataattttaggggtgacaaataattgcctctaataacccattattagggacgatattcattagtcgcccctaaattattgttcttttaattcaatttaaaaatttaaaaggggcaatgtttaatatttttaggggcgacttatcacccctaataattggacaataaatattttatgtaaaataattatataaaaagactttgtggaaataattgttattaggggtgcctttttaaatttttagggacgacttttgtcgctcttaaaattattttttatttattattagtattattttagtaacatttttattttcttaataattaatctttatgttttttttattaaatattttttttcacattttataaataatgataattttttttgaaagaaatagtgatgaaattttaaatactgaaagtctaaaacccagttcaggatttctaaaaaaaaaaccatattgaggaaaaaataaatgacaaaaactcaaaacacatgtgagtgttcattcccatttcgtgttccctctcatatttccactcagttccgatggagctcctcaacccctaaaatccaaaacgcctacgctcttcttctccctcgtgcccatttcttaccgtcgacgacatttgtagtgtgtgattggcgaaggcaaagatcgattgaaggagatacagtgatacaccctaactagcataggcgtg

SEQ ID NO: 142275 - DNA, 785 bp, Cannabis sativa
cacaggctcccaggaaccggaattccggttctgaactgggaaccaaaaatccgacccccacacctcaatttaatcccaaattttacaaaaacttccagaatacctgtacacactattgtaaatcaatcccaagcaaaaagattcaataatatacccaaaatccatacatgccataagagctccaacttgagctcttaactccaaatgactcaaatatcaaaatacacccttagcttatcacaaaccagcagtaatcaacacaatctaacttcagaatacacattcaaatcatccttaaacaaacagccaccaaaacccccaattcaataaacaacttcaacctagtcttaagaaaaacaataagagaaagctaagaaggattaccttagattggaacctttagaactcaactaggattcttgatagcaaactgaaaattcacagcccttgctgcctaggaaaaatcgagagagagagagagagagagaagaaggttgaggaaaggtgaaggttcttctttctattctagcactttctccttttctcaaaaaataaaagagtaaatctcttttcttaatattaatattcttaaaaccataagctaaagagtaataaaagaataaatggaataatcccctaactaattaccaatgatttaaataaaagggctcctaaggtattttaaattagcaaagtaatccaactaataaccaatactattaaacctacaataataccccaaaatttaacattctaagcatataaaatatgactctctaaaggcc

SEQ ID NO: 142276 - DNA, 522 bp, Cannabis sativa
atctcctgaacttgtcctccagctagtttatctgcaattggattggatcctcttgctttggaccaagctgttggtgaaggtcaggtttcttccgattcaagtgctcttgtgaatctggttaggagtaattactggcagatctcgtcttactcatagactgcgtcctactcatagactttgtctttaagtgtggatttactggttcccatactttcccgatcattagcttgttgagtactttctgctcttcgagttgatctgctatgggttctagatcgcctcgaattcacactttcttcttcacgctttgttctttcctctcgagagcggtttgtcgtgtttcccccattagggtacgtatgagtcctcgctctataggtttgggaagaatgttggtgattcctggcacgtgatcttcgttctcccgaataagttccaagatcctcctcattttcatgagggatttctcattcatcagtttccgattgtctcctttctggctgttcatcctgattcttaggg

SEQ ID NO: 142277 - DNA, 525 bp, Cannabis sativa
tgggtgtttggtttgggggttcttgtacgggtctgacatctggtccaggtcccaagttaggggtcctggttcaaattttgagtttgggtccccaatctaggtctggtcctaggtccaggtctgagtctccaatcttagttcaagtcctagctttgggtcttggtccatgtcagtgtttgggtttaggttcgcgtcttgagtcccgattcgagttttgatttgggtccgcgtcccgatctgggtctggttctaaggtcctagtctgattccatttcccgaactcaaacctagactcagactcggacccatgtctggggtacgggtctaggtctaggtctgggtcagggtctgggtccgagtctaggtatgtgtcctaaatccaaacaatgactacgggtcaggtccaagccccgagtccagattctgatcacaatctccggtaccagtttagttccacttcgggtcccaggtcctaggtcccgtccatgtcctaggttagggtctgggtctagggtcaggtcttgg

SEQ ID NO: 142278 - DNA, 528 bp, Cannabis sativa
tttacgtggctcgccacgtaacttccatctactgtaacatataagtattatatataaaaaaatttaaatataacacatatataaaatagttttatagaaaaaatataatttttatgaaaacatacatacacaaatattgtaagaactaacctccaaatatttagacatccgaaagtgatcctctaaccgatcccggcgtgttacttagatttctcctcccccaccgactatttatctcaaactttaaagatggagaaaaaattagatattaagaaaaaaataacaatatgtaaaaaaattaaaaaaaacaaaaacaaaaaccaatagcattaccagtgcactggtggtgcactagcggtgtcggggaaagaatggccggagaagtgggggtttggaaatggggaaggggcggactgtttgaaaatggggaagggggacggtggaatgaggaaatggcaaaatgggttttctgaaatggggttgggaatttatagaattttaataccggtgggacccgccggtattaat

SEQ ID NO: 142279 - DNA, 824 bp, Cannabis sativa
cataaaacccaacaaattcttcaatacaattcaaggactttatacaaagcttttagtgattctaatccaaggtatcactccttagcccttcccttattgattccttaagtttcaagctatgttttgcatgactttcttggagtttctgatgttaagtttgttatgttaggtttttagaggctattaattatggtttgagctagttttgttctatttggggggttgttgttgtgtttgagccaagtttgaacttagagctcaagcttttctctcacatggtagattttgctcctatggatttattcctgttttattacatggattttgtctatttttgtataaataggtgttctggaggttcttgtgaagtctggggttgaattgagttgtttgggttgtttttggtgttatctgcactgaaccggtcgaccagttaagggggacctgtaggaacctgctgaccgattggtccccaagaaaccccatagaactagaattctgataggggaaccgatctaccagttgggacatttagggaatcctagtttttcccatttttatgatatttagggtattgacatgttatccttcgatagggaaatttttagtttacattttaaatccccagaaagttatttagcatgtccactcaccagttttgcgaataatgttatttaggggtctgtaaatcgtgaagcagctactctactcaggttcgctgggacacctgaattcaaaaacgaggtaagattagtataatgagatgcatatgtgtttacatgtttagcgtacatgttaaataagcctgttagattacattataa

SEQ ID NO: 142280 - DNA, 551 bp, Cannabis sativa
ccctttttctacgtggtcgactatgttcacatgtgccttcattattgtttctagtctaattaatttaaacaacagccagtaattatattattcctcaaaaagttttgttgtcttattattttagtttttttttctcttatttcatcatttctatttttttttaattattatttgtgctacactctcaggttaaatctctattcaatctgtcacgcggccaaaaaattcagtcttgtatagggatgataattatacttgcgggtacccgcttttaatggggcgggtacaggggttaacttttgagggcggggcagatatgggtttaaaatttcatacgcgagtcgaaaacagagtgggggtaagagaatagatacccgccccaatatgatatatgtatatatataagttttaaaatcataactattataattaaaataacttcatgctttaaatttttttattcattatattcttttttttttactatacacactgttccatttaagtttattgttttactaagtttttatgattattttttttaattctct

SEQ ID NO: 142281 - DNA, 2750 bp, Cannabis sativa
  modified_base (65)..(69): a, c, t, g, unknown or other
  modified_base (639)..(641): a, c, t, g, unknown or other
  modified_base (2160)..(2160): a, c, t, g, unknown or other
ccaattaattgagtctacaagccagtattaactcaactagtgcagggaccatgggcctatataannnnncttccaataagtagttctagaatttacttggtaaattatttgactgattaattcatcctgactccactattgattgggaatcacactcttaattatatagaacgctctatatgtttcaaatatagatacactattaattatacatagtttcaatccaaataatcaatgctcctctatagatgatctacatcgagtagggacaaatttactgttcttttttcaatgtattttatccttaaacacttagctacctataaatgaaatttaagtaaactaatataattactaaaatgagtactctaccatttatctctattaggccatgctcgaaggaaatcatcgcttcacttctatatatttatagaagctaatgattccgtatctatgattagcgctcccacttaattgaactaccatgttctcaagatgtaagtatcgggaagatccaagtggtcaactttaacgaacaaatcaaagaacacaaataaaataattgaactagaacttaaccatcacaggattgagatcattgatctaagatcaactaagtgatattaacttagaaagatnnnacagttagtttatgatatcttatccaagttcaatattggtccaatctgatgtataacaatatatccaatctaagcttacttttccaatgccctagaaaggtcataacatttatccaaggtgtaagtaaactacattgttcattatcatattagtggacatcctgtgtactgataaatcgtaggacatatttaatcacataatcttttttactttccactgtgtagataacacagtaattatgaataaaaatatgataaggatttagatgaatttataaatgaaacaaatgatcattaaatacatgtgaaccaagtaatacattaaacaagtaatgaaataattctatttctttattaataaatgaatattcaagattacaccgaaatagagttttagttagggcacaaaaacccaataaactcccacttgtactaacataaaataatcagtacatttcaattaatcctagattctctctgtgctttttaaatgcagtctctatcaaagtcttggtgaatgggttggctaggttatcttctgtgtcaacctattctaccagtacgtctcctcttgccacatattcttttatgacgtggtatttcctctcaatgtgtttactcctcttgtggctttgaggctctttactattggatatagaaccagtgttgtcacaaagtaacactagtggaatttccattcctggaacaacaccaagctctgtgaagaactttcttagccagactagttccttaccaggctcagtggcagctatgtattcggcctccatggtagagttagatattgcagatttcttgacacttctccaaacaactgctccacccccaagagtgaataccatcccagatgtagatttcctgtcatcaagacaagcttgaaaatctgagtcgatatagcctacagaatttaaagcaccacccttgtagactaacacataatcccttgtcgtctttatgtatttcagaatatgcttcacaacagttcaatgttcctttcctgagttcgactgatacctgctcacaatttccactacataacaaatgtctagtctagtgctagcataacatacattagacttccaactgttgaagcataaggaaatcttctcatatcttctatctcttagggatcactgggacattgttccttaaatagtcacacatcatatctggaaggcataactgcccctttggtattgttcattgggaaacgctctagcaccttattaatgtaagatgcttgcgagagagcaagtgatttgttcttctagtttctaatgatttgaattcaaagaacataattagattcacccaagtctttcattacaaattgagtttttagccattcctttatgccagtaattttcttgatattgttaccaataatcaaaatgtaatcaacataaaggaccaaggatactaccacttgattatccttgagttggtaaacacaaggttcatcctcattttggtgagagccgtaggttttgattatttcatnaaaccttttgttccaagagtgagaagcttgcttatgtccataaatggaccaatttagcttgcaaactttctcttcttgtcctggaagtttataaccttctggttactccatatagattgtctcgtcaagagttctgttaaggaaagttttcttgacattcatttgccaaatttcataatcaaaactggctgctatggagagaagtattctgttgatttgagcatggcaaccgaactaaaagtatcctcatagtccacaccttctctttggatatagccctttgctacaagtctagatttaaaagttttgacttctcaaccagtacctcttttcttcttgtagacccatttacatctaattggatgataatcatcaagtgcatctacatattcccaaactttgtttctcttcatgaaatccatttctgaatccatgtcagctgaccattatttttgttctagacttgacattgcatgttgttatcactactacaatctggccttttagtgacactatttagtgacacacattaaagtgtgtgtcactgtagagttaggaatgatttttagtgacacacacaattagactct

SEQ ID NO: 142282 - DNA, 543 bp, Cannabis sativa
ataaactaattttaaaataaatatctcaaattatatgtcaaaatatctcaaattaagcttttttcaaatttctacaaaaatatctaagttatttaaatgttttaaatattatttataaatgcctgataagtaaactgatataaaatatcatttttctaactcataatttataaagaataaaatattctacaaaataaccacttttgaatttgaaaatactatggttagaatatctataaaaaatatctaggttaatttcaaaatttattaattttttaaatcatcttataagataattttaatataatattttaaattaaaataacaatactatcttttgatttaaaatatacccaatattaaaatatctaaccttttaattaaatcaggtctgagcataaaatccaaaaaactgaaaaaatcgttcaaactgacctaccgaataccgctggaaccgaaaccgacggaaccgaaaaccgaaaaaactgccaacagtttaaaccgccaatagtcggtcggtttttttggaccgtaaaccgacca

SEQ ID NO: 142283 - DNA, 662 bp, Cannabis sativa
  modified_base (79)..(80): a, c, t, g, unknown or other
taccgttgctccagtttgaatacgccgtttcagagacatattgctctttgttgtcagagaattggagaatattgtgtcnngtgttttcaaagcagccccctatattaaaaaaatcaatagagtcctaccttgagactgtttggtcatccattcgtcattgtcaattggtagaagagcttaataccctgcgcgaagcacgtaaagacctggatcataagatagaaaattttgcagagcatattagagatcgggatcctccaccaagtacttggactcatgtacctttatgatttaggggtgcagatccccccctccccccccttttattttcttgtagcctcttttagtttcggtataaatatttatatatatatatatgtgtatcaatttcttttcttttttacaaatatgggcacataatatatatattttgtaaaacttttagaaaagataaaagaataaaataaaatagaaagtaatacatatgatttaaatattttatttaagaaagataacttcatgccatacacaatggtaacaaaagtagtgatgtaattataagatttcatcatccaaggtttggacttttatttattgtagtcataacttaagaaaagtatttcttaatgtattttatattagtaacagggagtgtcattcct

SEQ ID NO: 142284 - DNA, 1755 bp, Cannabis sativa
ggcacaaaacccaacagtaacttatgtagaacaacctgtcaaaatcttgtcgagaaagttaaaagtgttaaggaatagagagattccggtagtcaaggtcttatggaataaccacagagaagacgaggctacttggtagttagagtctgagatgtatatgaagtatcctcacttgtttaattttcaacttgaggctgtactttaaaatttcgggatgaaatttctttaaggaagggagaatgtgaagagtcagttttgaccgagtcaaaaggttatatgtatatataataataaataaataataataatgataaatatatatataatataataaataaataaagaaacaagtatatataaaataaataacgtttttctccatcaccatcagcattctctctctctttctctttctctttctctctcttcaagcttcaaagaagccataaccaccatcacgaccactctctggtgacccatctccggccaccgtccaaccccacgtgccaaaccaatcaaaagtccaagtaccgatgacctcaccccccaaacagcgctacttcttttgtcgctgttagctcgggatcgcaagtcaaagtttggcggttcaaactttgaacggattttccggccacctccggtgtccgtttgacgaactgtcttcaccactaggcttagttcatcgaggagaacaacctacactaagctatttcacccaactttctactttttctagtaacatttttatagctccgcccctttctaacgactttctggcgacatcgtgtactgttttgacaaacggctagcgtgggtgtgacatactcgtcgaggtggtcgttttgatatacactacccttatttttggtgacgtttttggtacaccaatttttaccgccaccgatagttaatgtgcactgtttaggtgaggctttggaatcccaaattttgaatatagtcatattatatgttgttggactcaattttgaatgtagaatgcaattatgataattatttagtcatttgatggtataggtgagagtaatatcgaagattagattaaataattggagatcaggacttgagagctaagatcgtcttttggaccaaagtttaacgacttgggataggtagggactcagcttgatttttatatgtgttgcataacattagacatattctaaatttttatgatttgcaaattgtttgaaaaattgaaaacttaatctacatatttttctggactcatatggggaattaagtcccaaatatatttttgtgtacaaatatttatgcaggttatgatttttggatttattcaaaatacagtcgttatgctgccgaatttttctataaaattaaaaggaatatgttcttttgttattcttattatttgcctgctttggttatactgatgagagccatattgatcatggtttgtgcatattgttgtttctcgatctagtatctgtgtcatcatatgtagattaggtgtgcactcacctgtaggtgaaagacctagaatctgtacagggagtgaattaaatctgagcctcggtattatggtggatatcaagtgcgactacctagttttggatgtcgttttctatgattggtattgagggtctggtggacggtgtgatatgcatttgacgtttaattttgtgattatttgtggtctctctactttgtttatacattttgatattgatgatgagatattttatttttaaaaagctaaccatgcaagaattt

SEQ ID NO: 142285 - DNA, 533 bp, Cannabis sativa
tgcaaactgcaaaccgctccgcgcggtttaggaaaaattcaaactgcgaccgcaccgcaaagaattttaaatcatatttttttgcagtgtggtgtagtgcggacagtttgagcggtttgatgaatcctaacggagagtatgcaatttatcacctctaaggaagatgatcagaatggaaggtttttttttttttttttttacttattgcaaaaaagttgaaaaaaaaaaccttaaagatatataacatttaaagaaatttatgtaatagatcattttaaaaggtcgttttggtagattctatgtcttttgatagctaaaataatttttttagtataattttttttatgattccgtatgttgtagctatataagaccacttataaatttttagaaaattttaaataatttataatgctgaaaattaagtttaaacagttacttaccacacatataaaaagaatagttgtacatacaataaaatatataaatcttatttttaacattataaattacttaattttttttgaaaattc

SEQ ID NO: 142286 - DNA, 514 bp, Cannabis sativa
tttttctattgcgattcaaatttttgctatggcgattatctctttgacattgagtattttaatcttgtctctgtgatataattgtttttattttgttgttggtttttttttattcttcgatgcttgccatcaaatcactattattggttggatataacaagtttttcggggctgaagaggttgttagtagtgcagttacgtactttgcacaataattgagatatcaagctacaaggttaaatgaacctgctgcaacagtttatatatactattgtatatcttgagccgtagataaaattgaacatatgtattcttaaggttaactatgatgttgtaatctttttcattattttttttttgtcaaatgatctaggaatgaacaactgattatgtgacttgttttttctaattctaatcttgttcgtgttagcaatgagggagatatcccgattagacctcgtgttttgcaaaaattaacgattgaacctttttttttttgttaaataaaaaattg

SEQ ID NO: 142287 - DNA, 680 bp, Cannabis sativa
  modified_base (463)..(489): a, c, t, g, unknown or other
  modified_base (641)..(646): a, c, t, g, unknown or other
taattataattattaaataaatagttttggcatttataagattgaattggaaaatatggtattattgaaaagaagaaaaagtggttaaaaaaattggcaaaaatctaactagaggttggtccattattgtgtacgaccattaagtattttttcccaatattttattcttttttaatccatataatttagtcctaagccctatttaaaacactataaaagcaacatgatgctctcatcttatcctcttgacaacttaacaaactaatgtcaacttgactatttaaccaaactagatgagagagttccttccttagtgattttaaacctccttcattgttcttacatattcaaacctatagtgaatgagtgacatgcccacacattgcaagtcaagtactctactatagtcaataagacggtggtaaccaaacacgaaggagagtaagagatccaggttcagatnnnnnnnnnnnnnnnnnnnnnnnnnnnatcaagggctagagattttgaacagaaggagtcattatattccattgcaatcaatgtaaggttttcttgacccttatgtgtttatttaatttgattattttagagaattcatattgaggatgttaatcaacatactgttggaaattattttnnnnnnatcttagatctactcagaagtatgttgtttaaca

SEQ ID NO: 142288 - DNA, 510 bp, Cannabis sativa
tatatcacaaacttttcatcactgactggcaggcttagaactggtgcagtaatctttaattcttgaaagttattctcgcatttatcaatccacataaacttataaccctttcgggtcagcttggtcaatggagtagcaatcttggcaaaaccttctacaaatcttcgatagacccggccaatcctaagaaacttctaacttcagttgctatcttaggtcgtggtcaatctcgaacagctttaatcttcactggatctaccagaatcccatccttagttaccatgtgtcctaagaaactcacttgggacaaccagaattcacacttcttgaactttgcataaatcttgtcttctcggagacgctgtaataccatacggagctgttgttcatgagcttctcccaattcagaatagactagaatgtcatcaataaacacaatcacaaagttatcgagaaagtcattaaatacccgattcattaagtccttaaatgctgctagtgcattagtca

SEQ ID NO: 142289 - DNA, 906 bp, Cannabis sativa
  modified_base (269)..(270): a, c, t, g, unknown or other
aatcactccaaacttcacagggcacatatataccatgtatactacaatcccaatgtaatcaaaattaaaagcaagcccttaaacagaaaacgccattaatgttcaaacaaagttttaaaaagttccaaactcaatttctaactcaaaatcacctcaatatcaaaactagtcacatagctaccaaagaacaattctataaagtcgaaatctccgtaactattctaaatcacaaagtcactatataaaaccaattgtttttagcttaaaannaaattaaaccataccttaagctttccctctttaagatttgttatgtcgctacaacctgagcttagatcactatgtttcaggttaaaaatcaaagaaaatagatagagggtttcgttcaatggaggatgaatagttttgttcgtactatttagtttataaacttaaaacatatatataaacttatcgttaaataactttttaataataatataataataatcgtaatattaataacaataataataatataataatattaataaaatttttattgtttatagttatcttattacttaagaaatctttaattgtagggtatttagtcaactccgagtaccccaaaatactccagtatttctaaaattaacttacttcaataatcccatcaatattactacctaattccgttgtgacatttttagcgtccaattgggtctctagggtcgccgaacctgaaaatagtttttatttcacaaataacttacattatatccacatatttcaaataaatctctgtcgttaataaagtacgcttatttatccacttatcgggtctccatggtcaccgaacctgaaaatatttttatttcacaaatagcttacattatatcaacatatttcaaataaatctctgta

SEQ ID NO: 142290 - DNA, 605 bp, Cannabis sativa
ttggttatgtttggtggagttttgagcaagaaatgagatttcttgggtgaactggtgcaagccgggtaaccggttttacacatacctgtaaaaccggttagccggtttcggcagggttccctgagtgtcttgttttctcaaaatcttgtccattatgtgtcttagttgggtgttttcctatttcttgagttagagtaatctcatgagagtataacagaacctagggtagtaggttctggtttccagaattagggttttaaccatgtgatttacccgattttattatgtgattagggcatccatctagcgcaagactttctgttcaggttggccagcacacttgaatctggaaagaaggtaagaactatgtataatgtgtaatatgaatatctgaatgtatatatgtgttaagtgtacatgcatgcttatggctaagttgcagtaccaacacttgtatagttttggtatagagtgcattggtatagtgaatattgtttatgggtacagtatagtgataccagcacaagtacgggaatgtactgagtgtgtgtggtatatcactcagtagtacttagggtacaagacaaaccctaccaacactcgta

SEQ ID NO: 142291 - DNA, 923 bp, Cannabis sativa
atttctctcaacaagacttcaagttgttgacgggcaccagggataaggccattagcaaaattgggcgttttgttgatgagtatttcatggtggacgacatgggcaccacccatactaggttccaccagattcccacatatcaccgccctcccttcactcttgctcgtagagatagagctcagaggcttgctcaactgctgggggatgaccgaaatatcatccagttgacctccgaggacaactttgtaaagtacgggctccatccaaaggatttcattcctaagccagtgaaggggaggaagaataaatctagtgcttgacgggctgagagagctcatcaggaggatgagcttattcaacttaagcatgaggctaggttgaagggaggtgcaacggccaaacagtatgctcatgagcccttgaatcctgaagatgaagctgaggaatagcaggtgactccgctcaaaaggaggaagaaacttccggcccagcccaggcccgttgaacaggcgattcgaattagggagcccaattcacctgctctgccaccttctcccgtgttaggaaaagggaaagcttttatggtggagataagagacttgtcaggtgatgatggacttttgagtcttgctcggacaatcgactcgcagtctactccatcttatttttaaacttcttggctatcatgctttacgcttcttatgtcttcttcctctaaccatgctatttttgttccatgcaaacatgtctcagaagatgctcgatgctctgaagaagagagttcgaggaagctcaagctcatctcctctggccaagaaatccaggggcggtgaggcgaccccttccaaggaaaagccaccggcaggggaggttattgacctttccgaggagctaactgttacgaacccctctactccaaaagt

SEQ ID NO: 142292 - DNA, 514 bp, Cannabis sativa
tttatttttcaaagtttcaaaaaattagaaagttagaaaatattcaaaggaaaaccatctttttctctcaactctctctctattttggccatcttagagcagcaagaacctggccattttcttgggatttcaagctagtttcaatctaaattggtgatcataagttgttggtatgtttcctttagctttcttttaagctttcttgaatttttgaggaaaatggataggttgcatgcttagttttgatgatgttgctgctgttaattgttgttgttgtttccatgtttaaaatgttgatttaagtatgtttagttaggttgaattgcatgctagttattcttgctctctagttggatagatttcttgttaaaaagcttgagttttcaaagagaaattgtgtgaattgttgctgtagttgttgtatgaattagggttaattttctgcagtgttattatgcttgtttatgaagttctaagctagttttgaggcctgttagtgagctttagccaagtt

SEQ ID NO: 142293 - DNA, 1340 bp, Cannabis sativa
caaccaagtggaaggcctccaagttaagaaagatggcaagtgggtccttgtgaagcctctcccaaatgctttcattgtcaatgtaggagatatacttgaggtaataatcatctcttaatcaactactatacttataattattgaagataattggttaaatagtatgtttggtgtgatttaatttaaaggtaaatactattttggatcctgtattttgtaaaaattattaattggattaataattttgttaaatgataaaatggaccctatatttttcaaaattacaaataagaccctgaattaattttttgttaaagaaaactttaataataatccaatcttgagatgttatgacaaaacctgttattttttttgcatctgttcgtattagaaattgtcttaattaaagttggttagattaaaaagaaaagttgttaaaaattgagtatagggtcctatttttactattttagaaaatataaggtccattttgttatttaacaaaacagatgatctaactgataatttttgaaaaacaagagatctaaaatagtacttgccttaaatttttttttaaaaaaatgtataaattttatgggtttttaaacatatgtgcaaaaatatgaatctttttcaaaaaattattttataggaaaaattaaaaaatatgaaaaagttaagtaatattttacgtatttgtgaaataatctctaatagaaaatgtcaattggattgggcctacttattaaacaaacaaataaataaaaaattgtcctttttgggagtttttatgtatgagtcagattttggggtcttgtgtttattgagccttaggcacgggcttagctggccttagcctagggttaggtttctgtatgtgtgttgcctcccacattattcatatgtactttatcaggtttatatgtattagtcttaactatcaagtcttattcccatgataaaattttagaaattaaatgttatattcgatgtgattatattaatccatcagattgggccttgaatttgaccatttgggtgagccctaagcacgggcttagcttgtcgtagcctgaaattaggcttgtgtatgaatgttatctcccacattttccatatatacgtgagcaatttgtcatgtttataattatattagttttagctaccgagtcttaatttcatgatagagtttttataattagaaaaatgttatatttagtgtgattaaattaatccaatatatatataatatttatgtaattttcatatgtatggtgcttgcagattttaacaaatggactataccctagcattgagcacagagttgtagtaaaccctaa

SEQ ID NO: 142294 - DNA, 559 bp, Cannabis sativa
aaggcatcaatcaataatgccaaaactcaagtgttgagatgatgttagggtaagcgtgtgagagagggagtaaggaagagagagagagagtttattagacacttagagtttagaagtaggtttcaagcttaaaggcaacttaggtttctaggctaaggttaaggcctttatataggaggcctcaaactgtaggttatagtttaaatcacttaatacttgcatagattgttagatatttacaaaagaccaaagtgcccttgattttaggtattattcagcctttttgatgggctttttggacccaatatgtagcccatatgttgttgtccacgtgtagaagtgtctaagaaatctttcagtgtacctcttggccggccaggcccctatggaggctaggctggccggccatcctgtagtcccaaggctcgccagccataaggcaggccaggggtggccgactgttggatatattttactaggatctagattgactaacaagtatgtttcattaacatcctaatatgaattctaaaagaatgaaataaacacatattaagtt

SEQ ID NO: 142295 - DNA, 544 bp, Cannabis sativa
  modified_base (507)..(511): a, c, t, g, unknown or other
ttttttgaattctcaaatgaatttgatagatttcgtactacacatccagaccttaaaactggaggagtagcatgagaaccatttgcaacatctttcgaacattcatgattagcagctagaaaaaaattgaaatcacgttgtacctcttcttgtctcagaatcgcattcaatgaagacctgggagttaggggttctggaaaaaaatcattcaaagtggctccctgatgtgcgatttgacgatcctcttcttcatcagaaagttcgaaaggttccacacccagcacctcgtccatcgatttcgttttcttcacatcagaggaggaagggcctcgtttattcttcttcacagtcaccttctcgattgattttagcttaccctgctgcttagatcttgtcttagccatggcaccagctcagagagctgcaaggtcgaagagagggaaagcttcgctggagattttctaaactcttatgtgattaatttcattgttttagagatattcatannnnngatgttaattcaacatacttgtttgtaaatcta

SEQ ID NO: 142296 - DNA, 552 bp, Cannabis sativa
tgttatttttataaacactgtaaatatatatataaaaaaatatttaaacgtaaagatttgaattttttacaaaaaataatattttatgtaattatctctttttacatttacaatttacctatttatttttgtttactttttttttctttattgaaacttttataaagttttttttttctttcttatatctttttgtattttttttcatggattttttttctttgctaacttctttctctctctctttttttctttatttttcttatgtaagcttagctgaccttttttttttattctcttctctctatctgtcatttttatcttttttctttcccgattctctctttctctctctttcaatttttttcatactaattttttttatctttatataaatatataataagtgtaaatttttatatcatattttttttctaacacttttttagtccctcaaaaaattttattttattattatattttaaaaaatacaaatacttattatatttcttttttcattttttacattttcttactattgaacactcaaac

SEQ ID NO: 142297 - DNA, 521 bp, Cannabis sativa
atatataattaaatattattataatatgtataaaattttaattgtatacaaacatgcttatcgtaagagtatacaccttatatgttaatgaacatatgatttaaaatcaatggtcaaaaaagctttcttgccagtaaaatttatgttaagtcttaccataatcttaccttatattatacacttcatatacttcaatattcatgcatacttgtacttgacattagagttaaaattgattaattttgttatgagtgttaaaataatatatgaatttaaaggcatatgaacaatcctatatggtaaacatatgcaagcttaaagagtttacctataaaataaaataaaattttcacaattaatattttatcttgttcttttttcttttagttttgaaaagaggtatgaattaattatatatcagaagatcactgggggtaatattatatatatatatatagacaatgtgttacttgcaagtgatgataaaagtttcatatatatggtgaaataatttatatctc

SEQ ID NO: 142298 - DNA, 544 bp, Cannabis sativa
tttagggcataaaacctaacacgtacttcccttaagaacgttcttatccatttggtgagcttaattattgagttcagggcggttaaatcacaaagccgacattgcattacttatatatatatgtcttgtataccttactaagtctgtcgacccatcagtttgctaccgtgtgtaggtaaaggaagagcaaagctggaggaacagtgagatggagctcggcaatgattgtacatatcgcggcagtgcaacttggagggtttcggtcttttactattttgagtctgtattttaaagttgcatgcttgcgaatatataaaaaaaatattatatgtacatattagcaaaatacttttaaatcgtattttgatactcgggatcccgatccatatagttataaagatatagtatattaaagttaattttcaagtttagtaaattttaaatgcggacgttacagtaattaaaataaataattaattcaatatctagaaattttaaatacattgaacatttaccttaaactaagttgaagaataagcatact

SEQ ID NO: 142299 - DNA, 879 bp, Cannabis sativa
ttaaactcttatgtgtttatttctattgtttgagaattcatattaggatgttaatgaaacatacttggcagtaaatctagatcctggtaaaataattccaacagtctttccgcagtgtgggccaataatacccttgccacatgatttttaaggcaagagaattgccaccggaatgattcccgcagatacccccatgtacctcgcggagtatatagtcgcattcttccccgtcaatgcatttgagtagtggatggctgaagcttttgtgatataatcttccatcatagatgacatatcgggcagcttgatgtcgcagttttctcgcttctattttgtcatcgggcaagatatccttttccaagtaagtgactatcggagtcatccaagtaacttctctggcaacgtctatctccatcacttcatctcgaccaaccgtcgggtgagttaacacatcaacaggaatcacatcgagcagttcagcttctctagttgaggccaagtgggccaaagcgtctgcgtgtgagttatgagcacgcggtactcgggagacaactactttcttgaatttctgcaacaactcgcatactatggcgaggtacttagccaaacgcccgcctctggccagatattctccgtttacctggcatacgacaatttgggagtcgctaaaagcctgtaagtattctatcttcatttcgagggcaagctttaatcttgcgatcaaaacctcatactcggcttcattgttagatgcagaaaattcaaatcgtaaagctgcgtgtaccttaaaattgttcgaactaataagtatgattctgccaccggagccttcgctatttgaagctccatcgacgtacaaagtgttggaatttattttac

SEQ ID NO: 142300 - DNA, 967 bp, Cannabis sativa
  modified_base (769)..(770): a, c, t, g, unknown or other
attttaaaatcttatttaatatttacatgaaaaagtttatttttttatgttttatattcataaaaattaattatatttatttacatttatatcatttatgttaaaaaatattatacttataagtatttttttcaataatataaatttatcttaatttttttattacatttttttttaaaataatcaattatatatcaattttatacatatttacaagttatttattattgtaaaatattaatgacacaaaattttttgaaaaaatttaatactaaactctataaattacatttattattacataatatatataacaatatattaaatatacagtatatacagtgtatataccgtatatatactgtgtatattatatatacagtgtatacactgtatatataatatacactgtatatataatataccgtatatatatacactgtatatataatatatactgtataaataatatacacagtatatatatacactgtatatataatataccgtatatatactgtgtatattatatatacagtgtatatactgtactgtatatataatatataatatacagtactgtatatacactgtatatataatatacactgtatatataatatacactgtatatataatatataatatacagtacattgtatatacctaccgtatatactgtatacactgtgcataaattgacaatatctacacattttccattcacaatacacagtatatatacaaaatatataatatacaatatacnntatacacaaaacaacaattaaaattacactaaactaaaatttttcaaatataacacattttccattcacaatacacagtatacatacatgtataatatttttgacagaaaaaaattatttttatgagatatatacacaaatgttgtaagaactaacctccaaatatttagagcaccaaccgatcccggcgttttact

SEQ ID NO: 142301 - DNA, 1035 bp, Cannabis sativa
tttagtttattccagataattttttgttgtatatataatatatgtgcatttgttttgttatttttatgttgtgttttagttgtttttaaatggttttcataatatatttttttgtttcactgttatttttgagttttttttattcatgtgcattttttatagtgtatatttatagtttattcgtgtcaatttcttttgttgtagatgtgcttttttgtagatgtagatgcatatatttaatttattttttgacatattttttaaaaaatacagcgataagatttttcatttttttaattaacacaatgtacactagtagatattgacatactaaaattatattgttatctatttaaattttttgctgttttaattatattatgggtaaatactattttggaccttgtatttcgcaaaagttactaattggaccctttgtcttgttaaatgacaaaatggaccatgtattttctaaaatggtataaataggaccctggattgattttttatcaaaataaaatttaattataatctgatctaaaagtgctatgacaaaattatttctattttctgtatctgttcgtattaggaattatcttcaagtttgttatattaaaaaaaaagttgtcaaaaattaagcccatggtcctatttttaccattttataaaatacatggtctattttgtcatttaacaaaacaaagggtccaattggtaacttttgcaaaacacaaagtccaaaatagtactcttatattactcaatatatcatataccccattttaaaattataagatttattgtatttattattaatgtaaccatttatttaacttataaaaaaataaattgtcattttaactcactaactcaaaaaagaagagaaaaaaaattgaaagtgtgaagttgtaattacaaatttcatggagaaaaataatatagtagtatgaaaagataaatcaaattgtcaaaactaagtaaaaaaaaaattgttttataaatacatgctgaggagttgatatttttttacttatt

SEQ ID NO: 142302 - DNA, 638 bp, Cannabis sativa
atattataaaatattttattcttttaaaagtacctctaataatatataaataatattttatttatattttaatgatataatagtatatataaattaaaaagtatattatttaaataatatggagatagaaaatagaaaaattaaggtatggtgtaaaataaaaattgaaagtaaaataaaaaaaaaataaattttagtgttgcaatttaaaaaatttaaagaagctaatagggatctaatacaaaaatttcctaaattttatatgtatattatttatctgtatacaaaaaagttgagtttaatttaagggtataaaaagaagttatagaagctactttttaaaaggagataacttgcttaattttgtcaaaattctaaaagggaaatgtgtacgcaacggtattttgaaaagtcaaagcaattaaatatagaccaagcattttataaaatttatgattatagtatgttattgtatgttgtgttattgtgtgttgtgctggttatttacttgtacttttaaaaaatagatcgtgtttattaggcctgcacatgggttgggttgggcggtttttgggcggtttgacaatttttttatttaacggttttttaaaatcacaacccatacttgcccaataaaa

SEQ ID NO: 142303 - DNA, 1281 bp, Cannabis sativa
  modified_base (1204)..(1208): a, c, t, g, unknown or other
tttgactcggcactccgtttgggatgttctttatatccttggaaagatcttttcgagctctatgtgaatatttagaatttaaatgccaattttataatttgttgaaaataatttagggattaaccctatacttgtgtactccgggtttgtgactaggattaccgtcacttggtcaggagcaccggggatttggaatgtccatatttgtgggacatcaggtaagacagtagttagcacgttgagatatgagcaatggcgcttatatggaatgtgatatatatgaaaaactagaaaccgggattagagttattactctaaagtgagcgctttattggcttagggttattacccaagtaaattattaatatgtaattattgtgccatgatatatataagtgtatattgaagtaaagggttatgtgttcaagacataatcaggttggactctgtaactagaaccgagataaaccgttctaaggccttaatgtaaatagacgtgtgagcgtaacacgtaggtctatgccacatggatataaataggtgtgtgagcgtaacacgcgggtgtgtgtcatacagacaaaaatggaatggcattaatatttatgttatgtgttaattatgattgttgataattatattgtcttgttgggcttggctcacgggtgctctactctacaggaaagggtaaatcggtttctaatcagccatgagtgtaggagtgggacgataaatgtacatgttcaggccacactagaccaagcgggttggggtctaccagtgttggaacttttgtaactttgttttgccgcttaggtcggctaagggaaaagacttgtaatattttgtaaaacaattttcgggattccaaaacatgtaacttttgtttgttaggttaaaattattacaagtttattttttatttcgttttcgtttaaagtttaatttccactctcattttattagtgatcccatttaggggattagggtttcgtaatcatcttgggtagcgtgcctaaatgttagggcgttacaacctgcaaatcctatactctggcgaagcatcatattagcaaatagaggccttaagacataaatgaatggtttcatttaaccataccataaatgcataaggaaacccaggtaacttgtatgttttactatttcctttcgtctgtttgtgtttcaccttaggttttcccttacnnnnngaatcatcagacaaatctgttctttttctgcccctcaaagcaatcatcaaattgtgcaatgtaagatcaaaaa

SEQ ID NO: 142304 - DNA, 778 bp, Cannabis sativa
  modified_base (38)..(39): a, c, t, g, unknown or other
  modified_base (259)..(263): a, c, t, g, unknown or other
  modified_base (729)..(741): a, c, t, g, unknown or other
ttcataaataattataaaataacaaaaattagtgctanntgcctttactaatccaaattactaaagcggtcattacagaacgtgtcgggaggaagttgcacttggtagacaaaacgctcagaggagttgttagacaaaaaggtatattcaaagaccgactttcagtggacgcggagccaacgagttcagtcaaacagcgaatttattttaccatgatctacatttactaacatgtatgtttcattaacaccctaaatannnnntctctaaaacaatgaaattaaagacataagattttagaaaacgttacattgatggcagtggaataatatgacttctttcgctcagatctctacccttattcctttctgttgtagagtaataacaagatctaagcctggatctctttctctcgctccatcgggtttggttaccaccatcttccgcactatgattgactacttgactttctatgtgtgggcatggtactctatcactgtggctcgaattggtgaagaacattaaatgagagtttgaaatcactatagaaagagtctctcgtctattagttgtcagagaatgaaaactaggtttaatgtggttgaaagtgatgagttggatgagaatgagagcaccatgtccttttatagtatttcaattaaggtttaggatttaactatatggattacaacagaataaaaatactatttattttatttattaattagnnnnnnnnnnnnntcttaattaataaataaatcccaaaacctcttttctt

SEQ ID NO: 142305 - DNA, 578 bp, Cannabis sativa
taaatggtaaaatagagcattaggtaaaatagagcattagtcgccagccataggatgtgggcccaccacttgcaattttgccatttttcaactatttatcctaatatttcacaaatgccatatttttgtaaaaaaaaaatgtagaaattccatatttataaaacaataataagtttcaccaaaaaagtcaccatcaccgaaaaagtcactggtaccagaacagtcaccaaaaaagttatcgcaaaagtcatcgttgcgcggaaaagtcatcgtcgccataaaagtcaatataaaaaataataaaaatagaacaactaattttataacataatgaataaaaacaaatatggttaattgtggcaaacccctaatagtttcattttacttgcaattaacccccaaaacccaaattttggcggtaaaactcctaaaaccagcattctgttagcaaaaacacacttccttttccttgactccgttatttgccaacgtggctcagtttagttcagccaacgtggacacgatgtacacgtggcacaatattattggtccacgtaaatatatatttttttaaaaaa

SEQ ID NO: 142306 - DNA, 635 bp, Cannabis sativa
atattattaatttaaaatttatatctaaggttaaatatattaaaaataatattttattttaattttagggtttgaaaattgcaaaaattcgaaatttggggaaaaatcccacaaaaatcgaaagtttggggttgcaggcagcaaggctgcacgtgcagccatcacaggctgcaaatagccctcatgcgcgcgcgggaggaggagattcaacctccttgaccgagaaacctcggtcaggtgcagcattcgtgtgtgggcggaccgtgtctgaagttagggacgagacacggcttcagacaagaattttgtctgagatgcgcgcgcgttggcgtgccttctccgagcgcctggtgcactcgatgcacctactcgacaccatatgcatttgatttttcaaaccttcataacttcttcgtttttcatcagaattgagttccgtaaaaacgaaagttgcttaatttttcacaaggcatcaaaataaaatattttcagaaagaaaataaaattattttcatggaaaaatttcataattactatacattcatcaaataatcacataaactaacatgaacacatccaaatcaacatgcaaacaatattcatcgttttacatccatattttatgaaagtaaatc

SEQ ID NO: 142307 - DNA, 933 bp, Cannabis sativa
aatctgaagatcttgaaaattaccagcgggctagagatagaacaaggagataaatgtacctagaaactaccaagaagcaatcaacaacaaacactccaagaaatggatggagagatcacttctctaaagaagaatagaacctggatagttgtattgaaaccagatggacagaaagtaattggatacaaatggatttttagagtcaaagatggtctaactacagatgaaccaaagatttacaaggctagattagttgcagaaggattcacacaagttgaaggggtagattacctagaaatcttctcactagttgttaaaatgaagacaataagaatgatgtatgccattgttgttcaacttgactaggatagaacaaatggatgtaaaaatatcatttttaaatagaaaacttgaaaaaaaactatatacatggagcaacttgaaggtttcaaggtggaatccaaagaaggggagctagtttgtctactgaagaggtcattgtatggtctgaagcaatctctaaggcaatggtacaagaaaattgactatgtggtcacagaagttggttacatcagatccaagtttgacacatgcttgtatttcacaaatctgaattcacaagctgcaaccttcctactgatctatgttgatgacttacttatcatgggaaaagatcaaaccaaataagcaaactgaaatatgtactaaatagtgattttgagatgaaagacatgagagttgctagaaaaattctaggcattgaaataaggagagataggaaagagaagaagctcctgctgacacaacaatcatacattgaaaaggtcattaagaggttccatatggatgatggaaaagaaactcaagttcctttagctggccattttgcattcacaacagagcaatccccaaaagatgaaaaatctaagaaaa

SEQ ID NO: 142308 - DNA, 503 bp, Cannabis sativa
ggaagccttccagtaaggggagagataggtggatttagactaaagaaggaaacggtaaatttaccactaagtctgcttatttgcttcaggcttatgagagagcccccgtctgtgtggttgtgccaacattatggaacaaactatggaattctaagattttggaaagacataaaatcctttggtggggtatcctttcgaatgctttgtcggtccgcggtatcctggctaagagaatccaaattgaagacgagacttgccccttgtgtggggaggctgaggaatcaatggaacacttgttcctctattgcaacttcgcttaccatctctggaggtcttctccctggggggtgttcccgatccatgactctggtggtcgggtctgggatcggggtagactcggataagctattcctctatgcttcagtcatcgtggaaacaatatggagaacccaaaatgacaaggtacataaattgcaaccgagtaacattataatgaccattga

SEQ ID NO: 142309 - DNA, 880 bp, Cannabis sativa
tatctttctaagtgggaatttgagcacgacatccgggttgcactaacggcgtgccaagctgatcgtctactcgtctccttctgttcaaatcatttctgagatcatgattcgttcccaacctttcgaatactgatacgcctggttgtcttagtgattgattggtttggttaatgtgcttaccgacacaattaacctggttggaattattaggtatgacttctcctaatgaactactagacaaggtctgcaacctactacttggccaacaagtggaacctgtgactggagatttggcggctgaccatttatagtctgagaagtattcatcgctggatgttcgtctgtttcacccaaggggatgacattcgggggttactgcccaacagtttgataggcttttcgtattagcacaatagcttgccgactatgattgtcaatctctgcatgatgagctattaacgcttccatctctttgtccatccattcggtaaacatgcgtctctgttcctcgaacacaagatttatcgcagggcgaagttcctcctgatcatgatgtagggtgttggtatgaccttgcatgagtccaagagcagcgtggaggttttggatctcagtatcatctccaattgtcgttcaagcattggtaacaagcggaacggctgtgttatgaatgccctggctgggtgctgaactggtattcctactttcttgcacactaggcgtgattgcatccaaaggagtcgtcacaccatgacccgcgtttgagggatgctcaggattaacagctggcagaacccttgttctgcagtgcaggatccaccgcctgtggatttgccggatcaaccaggcccctactagtctgtaccaacatcgtacttgt

SEQ ID NO: 142310 - DNA, 789 bp, Cannabis sativa
  modified_base (540)..(542): a, c, t, g, unknown or other
acatcaactttttatcacttaaaatacaaaaaaaataaaataaaataaataataagtaaacacatgcaaaactctagactgatacaaagaataatttttttttttgtcaaatagtattagaatacacaaaataggaagacggtataaaaatgtactgtaaaaaagaaattacggccgtatcacagtataattaaaataaatggggaaaatatagtatgaggtgtaaatttccctaaataataatatatgtttcaccaacacaataaaaatatacataatctaatgtatatacacagtctttttgacataaaattaaaaaatatatatttaaaattttcaaccccaccaaataatggtagaccaataaaagttaaaatgcggctcttgcctatgttcatttttttttctaagtgtatacaaaaaaagaagtttaagataaaaagtaagggcttttttcagttttaaccaaaaaaaagtaataatattacaaaaatactttcagctagccaaataaacaaatatacagcccaaataaaaaannntacataaataccacttacacacaccttcaactcaggatccatgcttcctgggcaactatcgtgcaactacgcagcaacccaaagcaaccgaaataaaaattcaatgagaaagagaaccaacattaattccggcgacttcacctgaaaagacgaccagaattaattaaaacaggggttgcttcaaattcataaaaaagtgtagaaaaactactaagaaactaaaattcaactagaaatctaatttaat

SEQ ID NO: 142311 - DNA, 737 bp, Cannabis sativa
  modified_base (623)..(640): a, c, t, g, unknown or other
gtatcaggatctaaaaccctatttttggtggtatgggatgaaaagagatgtggtagactacgtgtccaagtgcttaacctgccaccaaatcaaagctaagcattaaaggccggcagtattgcaacctttagcccttcctgagtggaagtgggcggacattgcaattgattttgtcactggtttgcctagaactactggaatgtatgactcaatatgggtcatagtggacggattcacaaaatcagctcactttctgccaatgaaagttacatatgcagtggatcaatatgctgaactgtatgtacaggagatagttcgtctccatggagctcctaaatccattgtttcaaatagagatccaaagttgacatcaaaattttgggtgagtctttaaaaagctatgggtacaaagctaaaaattagcacaactttccacccttagacagatgggcaatcagtaacaacaattcagatactggaggatttactgcgagcctgtgttatggactttgagggtttatggagtaagtacttgcctttaattgaattctcctacaacaatagctaccagagtacaatagtgatggctccctacgagatgctattgttgggttttgtgcccnnnnnnnnnnnnnnnnnnatataatcagatttacttattaagaaagatcaaaaataacatttttctgttccatggttcacaagatttatttcatgattatatgcatataatgtat

SEQ ID NO: 142312 - DNA, 1368 bp, Cannabis sativa
ttatcacttgaagattgcattgaaagatggaaatgatacctttgaacagcttgctaagaaaaagatgattgagaagggttacaagcttaaaggatttcctcttgtgtttcttatttggctatacgagatcattccgtctttgtcacctcgattttgcaaaagaatcaacaacaagattcctcgtgttctgaattgggagaatagccctacatcagaatttagtgagttgattcagggtgtgtttaactatccaaaagtaatttttttattcaaatttcatttttttggttattgtttgtttaatttttctttggtttttttaaattgttttgtgtttttatctttccagattgttataaaggattttgttgctttgagtagtgaaaagtctcaaagtcttttttctaaatttaagtttgatcctaaatatgtattgaagaggattggtggtgttgtgtcctctgatgaagttaatgatgaggtcaaggtattaaaaaccgatttctatgtgtatttcttttgtgtattttggtaattatatgtttatcattacttactttcatgttttttatgtataatattcaggtttctcgtggaaagttggaccaaatttgtgttgaactgaattctataaaagagtgtgaacaacaaattaaggatggtatttctagtttgaggattgagtttttgagtgagtttgctaaattagcagaaattatcaatggattgaagaagaagaaggagaatgatggcagttctaagaattctgaatttttttcatcccctataagagaggtaactagtttctttgtttcgtgttatttgattataggtttgttattttttgttttattatagtttttttatcaacttgttgaaactagtttctgtattggatgttttgttatatgatttccctagttagttgaaacaggtttctgtattgggttgggttgagatacgttttttcaatttcttgaaactggtttctggtctgtgtttaggtctctgttgctgtgtttttttctataggaaaccagtttctgtatttatgtttgaaatctggttttcaattaatttattgttcaggcatactatcaggatatatcggatgatggtggtgagttacagttgtccgttcattctgttcaagttaaggtacaagctttttacatttatattttgcttgtttgaattttattgtttgttctaaatattttttcttcaattttgtaggaggaaaaggacactttgaattttaaaaatgtgtttatcgatcctgattttcttaagggtgtggttgatagcactgttaagagtgctttgaagacagatgatgtttcatttcatgatgatagtgataagttg

SEQ ID NO: 142313 - DNA, 700 bp, Cannabis sativa
aaattggattgatttatttggcattattatttatgagtgataatctgaaatttgtttgaaattgtttatgcatgaattgacaatggtgcccttgaatgactaattatgtgggaattggccctaggggcaaaaaggtcttttggccttattttctaagtttaataaaatggattttagagagtaaatgaaagaaattctgggttctttctctttgtctcacccgacccctctctctctttttcactaaaaaccctctttgcattcaacttggattttggaaggaaaatcttggttttggcttgatttggagctagagtttggaggaagattattgctcttgctttggtgtgaattgaggtagtttttacagattttctaattgagtttcttcttgaattttatggtggtaaaagcatgtcttgagttgtgttcttcttgtgattgcatgttcttagatgttattgtgatgttgatgaattgagtgtgtgattgcatgatttggttgagaattttattgttgagcatggattttgattataggttattttccagagtggattcatgtgtttttgggatattttcatggctgaaattgggttgagttgttggaagtgaactcttgttcaagagcttggttttgccatggttgtgcatgaattttgtgattttttttatgcaatcaaaattctgggatttagat

SEQ ID NO: 142314 - DNA, 946 bp, Cannabis sativa
aaacaagttaagagtgcatcaatatattccttttaagggggtgcattgtagaatcaccctataattttataaaataatataattttaatatttatgattagagttaccctaacaagcaatgaaaaggtaagcaaagtgtgattgaggcagtcatggtggacggttttggaattgattggcattaatgaatgtattgtttattccgattccaattacaatttagtaaacgtgccatattcaaaattcaagtgaaaattcataaccacttcttttttttttttagcaaacaatttctcaaggcaagtgagtggggggcctcatccaacagtgacacacgtaagtgggacttctcaacattcacaatgctaactgccaaaataattattccttatatgtactatatatatatgctttttttgacccacacctctaattattttcttcagtctaatcttcctaaaaatctaaaataacaaaaaataataaaattaaaattactaaaatatataaataaataacaaaataatttatttatacataaatcaatatagcaagaaaaataaacatgactaatctgaattaaataaataattaataaaaatacaaatacaaaaaataattaaaattgttaatgtttaaatacttaataaataaatatatataaaaataatttagtataatgataataataaaattgacaataaaaaaatatctatgagtaatttagtgaaattgtattttttttcttgtgccgccaaaattttaattttgattatttagtttaattatagttaagtgttgacgcgatttttcattaatttaatctaagaagataattaattagacaataaattcaagaaattctgagataaaaataataaataaataccagatatttttacgtaattttgtagttgaaatctacacaatcaatatttatttttga

SEQ ID NO: 142315 - DNA, 715 bp, Cannabis sativa
  modified_base (79)..(90): a, c, t, g, unknown or other
  modified_base (325)..(328): a, c, t, g, unknown or other
  modified_base (515)..(517): a, c, t, g, unknown or other
aatagatattacagtaaatttaacaaatctaatcaaagttcaatattggtcccatcaaatgtatactccatacattcgnnnnnnnnnnnntttgccaatgccctggaaaggatagaacacttattaaaggtgtaaggatacccatcgctgattaccatgccagtctaaatccaatgaattgacaaatcagggaattaaacttttgaacatataaatatgactatattccactgcgctgacaacactataatcatgtacaaacaaatatcttctggactcaatagaatttatacattaaacaataataatgaaataaatcatgtgnnnnatgcaacattaaaatgttacttctaatatttattaactagtaaatctgattatattgaaatgacttttatttacggcacaaaacccaacaaactcccactagcagtaatataaaacaaaagtgcatttcaaataatctcaataccccgatatacaaatcaaatgtagtatgtagtatactctccgtnnnaggatctgacaggttgaatgaacataaccttttctccaccattacatttccttaatcacaaaatacttgattttgtgaaattcctctctatatgtcaactgctgttgggatactggattctttactattggcaacttcttttgtgttagtcaggaagtaacactagtaattaaaaaatgttggaacaatgccaaaaat

SEQ ID NO: 142316 - DNA, 730 bp, Cannabis sativa
cggcaaaaaacatatgagtgatgttgggagctcctcgagcaacttgacagcctttaatccaccctttattttcataatttcgaatgagagaagaaagatcctcagtacaaataatgagaagataaggggataaaggatcaccctgacgaattccccgagatggaataataggatccaactgttgcccacccgaaatgatccagtaacgaacagaaacaaccaaagccataatcaactacacacatctaggatgaaaccctagcttcaagagcaacacttccaggaaagaccattcaactcgatcataggccttactcatgtctaacttcaaagccatttgaccaaccttgcccttgctctttcttttgagataatgcatgatctcaaaagacaccaaaatgttatcagtgataagtctaccagggacaaaagcactctggttctcagagacaatgtcatttaagaagagcttgagtctattagccattaccttagagatgaccttataaaccacattacagagtgcaattgggcgaagatcacccatcctttccggattcttcttctttggaatgagcaccagattagtattgttcaaagcttcaggaatagaggcggatacaaagaaatctcgtacaagctgaaccacatccgaacccactatgtcccaacacttctggaaaaaacccggagtcataccatcaggaccaggagatttgtcaggatgcat

SEQ ID NO: 142317 - DNA, 524 bp, Cannabis sativa
ttcttcttcttcttcttttttattctttcttcttcttcttcaaaccctaatctttctctttatctctatctcgcatctctccctctcattctctgttagccatcaacgaaccctcaatacccagattaacaaccaatccttatatccagaaaaccccaagacccaaaaacccctaccccgattctttctcggtctcgtgctcctctctcggtctctctcgcgctcactctcctctctcgtctaactatctgtttgacgaaaaagggcagtggccacaggcccccatctccgatcgtcaatcgttgaagacgttaggcgatgaaccccgcccttcctctctcggtattggtattttttttcagatctattttttttgtttaattgtcgtggaaagaattacaagcatggaataagaggggaaaaaaactttctgaggaaattgataaatctaaaaagatactagctaaattggcagctgcccaacaacccaatgcttgagttaaaattaagagggaggagaaaaa

SEQ ID NO: 142318 - DNA, 850 bp, Cannabis sativa
ttgcacaacacttcaaactgagtgttactcagatgccaaaagatgagattgagaagtcagagatgtcaagagttccatatgctagtcttgttggctccctaatgtatgtcatggtttgtactggaccggacataacatatgcactgatcacattgagtagactcatgggaaatcctagaaaggagcattgggaagccctgaaatggattctacgttatttgaatggaactgctgagaagggactgttatttggtatgaataaccagaatgaagacttgttatcaaaatggttatgtgtggaactctaattatgcagggtgtattgatacccagaattctttgactggatatgtgtttactatgtttagaataactattagttggaaagaaaaccttcagaaggttgtggcgatgtcgacaattgaagctgaatatatggccttgacagaagctatcaaggaagcactgtggttaactgggttgatggaggagctgaagctcaatcaaaaggttattattgttcattgtgataatcagagtgcaattcaattaactaagaattgtgtgcaccatgaacgtactaagcacattaatatcaagcttcatttcatacgagaggttgtggagaaagaagttgtgaagattgccaaggttctaactgaagacgatccttctgataggataaccaaggtagtgccaaacaacaagtttgagcattgcctgaagctgattggagtcagttgagcctagaggggctgacgggacaacaacatttaaaataatgatttatcaagtgccttcaacttaaaaccaaggtggagatttgttggttatggttataagttttgtc

SEQ ID NO: 142319 - DNA, 697 bp, Cannabis sativa
  modified_base (642)..(665): a, c, t, g, unknown or other
actttagattacttcgtatatttttattgcttgtatgaatagttaagccttctattcacaccttaggttatgtattttttcaaggcatcttggtacctcgtttaatacattccgataaaatacgagccattaaatatccaactttgcatgtagcttagtgttgtttttatgagttaactctcatttagagctgctatttttgactttgcgtcgtccataaaaaactttaaaatttttaaaaatggagtgggtttgcaatatattatgtatttctagataaattccagttgatcatacagatatattcccctcaagtaattttaaagaataaaactttgtaatttcttggaaaatactccaactttattaataattgaatttttaaaatattacatcagaaggaaagattacaacattagtttactggtattaggattgcaaatgctccacgttccagtggttctttattagcgagtcgttaagtcgagctaatttataaacgccaggtccaactattgcctcgattacataaggacactcctagtttgggttaaatactcttgctgatgcatctctcgtatttgcaaatattcgccttagcactaaatcaccgacattgaagagccttttcttaactttttnnnnnnnnnnnnnnnnnnnnnnnngttgataggctgcattagtaatttgcgactca

SEQ ID NO: 142320 - DNA, 512 bp, Cannabis sativa
tcaaattgttttggtaaattatcgagatttctccgaaaaggtgatgaaatatttttctctcatccatttattcgattcattcgttggatccaatcattttcccttaattcctcacaatcgaaaacgatgaagctctgctcattttcttcttcttctagttttcttacatctccaaattacaatgattacccccaaacaacagtctcagtgaaatttttctgtcggtggtacatacattttgtattatagtatatatattttctatggtataccattcaaaaaataaaataaaaattggattgtatattaattttgttgtattatgcatacatatatttttaatcaaagaataccaatctttagttttttctttctttctttatttcattcgtcatattaagatgtgtatttattcataaaaaccactattttttaagttttttctttatttttcttgtagcacataaaaaggatatatttgtaaattaaatggatatcccatagtgtaaaat

SEQ ID NO: 142321 - DNA, 675 bp, Cannabis sativa
taaaacttttgacgagagaggggtcgaatcgtgataacgctttgatcaaacctttatgacgagaaagggatcaaacaactgtaatttttggttagaaggaaaataaaagttacgactagcgcataaagctgaatactaacggctcgcggtaagggaaaagtattaaacaaggcatcaaagtgtcttgaaaagctgcttaaacctaacacatgggtagaagattttactactcatgtaagaaataaaaaatatatacaagatgacaaattcattaaaagtacatttgagtttgcttaaaataagatcatttctgatgattgcgaggctgaataaaggatggctcacagattgagggccgggcagataagttgctcgcgcataaagtaggtaattaactacttagcgtaagaggaaaataagagcaacggaaacccctactaaactttatgcatgttatttgtttaaattgagaatgaaacgcaagcaaacatccacatactaaagtttaagcttaaaagtatgacacattaaaaagaaaagttggccatccaacttcgcaaatctgtctttacaaaaatgtgttgccaggggcaaaccattttcttggccaaaatgccattttatcaaaaaaaaaaaaaaaacgagaaaaacaaaaaccaagtctacatgttggga

SEQ ID NO: 142322 - DNA, 530 bp, Cannabis sativa
aattaattaattctaaaaaagaatgtctacctattagtaacgtactattactaacccatatatatagtaataaaataatatattatatatggagataaaaaaaaagtttgatcctaataataataattatttaaaatatagaataatttttttaaaaaaaatcttattttaaatatttagtaaatgaaattattaatactaacatttcattaatattatattagaattatattgtttaaattactaattgttttttattattgttgccacgaatttttctcaaaatacgtggtcgcggctgcgtatgacacgtggatcacaagaacacctctctcaaaaaattagctaagttacatatagacgggcaagtgcacttcagggagtgagtccccggagaggcacatagagcatgcctcttctctctgggagctagaatacaacaaagcatcttcgggagaaggagaacctgttcgaacagttacttcgcatttaatgcagcatggggaaaacgtcttagaacgcccataaga

SEQ ID NO: 142323 - DNA, 639 bp, Cannabis sativa
gcatagagcttatgatcccataactattgcaaaactgctctgagatgcaactcatgctcttcttctgactcagagtacaccaaagtgtcatctataaacataatgacgcatcgatccaggtagtccttgaacacctgattcattagatccatgaatgccgtcagggcattagtgagtccaaaagacatcataaggaattcatagtgtccataccgagtacggaatgcagtgttcgagatatcttcctctcgaattctcaactgatgatagcctgagcgaagatcgatcttagaaaagaccagcttccctttcagttgatcaaacagatcatcaatttgaggtaaaggatatttattcttaacggtaagcttgttcaactcccggtaatcgatacacattcgcagggttccatctttcttcttcacaaacaacaccggagcaccccaaggtgagtagctcggtctgatgaatcccagattcagtaactcttacaattgtatcttcaattcttttatttccgctagagccatttgatacggtgctttagataccggatccacccccggaaccaattcaataacaaattcaatctccctggtaggtggcgatcccggtaagtcttccggaaagacatcgagg

SEQ ID NO: 142324 - DNA, 766 bp, Cannabis sativa
gtacatatcaaagttcgggggaaaaaattactaattaacctaaaatctattacaacttcttaaccaattgttgtgcttgaaaacattttccaaaatattttatctttgcattgttatagagtttcttgtgattaaattctctcaactattattttatttacacttaattttttaagctcaaattttaaagtaaatttaaagtgtcatccattttttacaattaattataaatatagacggtttatgtgtacacttttatacatgtatcaaattttatattagtacatctaatattattattttaaaaatataaaaattattttaaaatttatgatattttttacttttttaaatattttattttttataattttatttaattttaaaataaattttaacaaaactgttataaacgacatagagagaaatctacatattcaaccattttaacaaaactgttacaaaaggttcttatttacacaagtgaatgcaactaaaacacaaaacagaaagtacaacttactaatgaactaactgcttaactaactctaacaaccaaaactaacaagtctctttaacaagatggtgatgcaaccaagtaagattagacgatgacaactgttttaaaattatatatgataaattatctataaatttagggattttcataaaatagccgattcaatccaatccgcatgatccaatctaatcaagtgcggattggattggattggaaaattcaaaagtgcggattggatgttgattg

SEQ ID NO: 142325 - DNA, 1344 bp, Cannabis sativa
ttgagtaacctcccaaacctcactgtgcttcacggcccctgcgtaacatttcagctcctttcaggtagttcctccgatgtgaggtcctcctgagatcatggctactctttcgttgggtcttggtggcagaccaagaattggctgggcttctcggggggagcaactgggtccaatgctccggttacaccccctggtattccttggggcaaaggtcctgctgcctgaaccggattgagatgaggcaaccggttcttgatccattcgtaaagatgtcccaattggatcaagttttcgatcttgtccttgaggtttttacattcattggtgctgtgcccaatgtcgttgtggtactcgcatcttttattgggatccctccaggagctatccctgtataaaggagatggtctccggtagtgcgtatttttcctggttgcgaaatacaaacgctcttgggagtccgttagctccgtgtactgggtatactggggagtgtacccccttttctggcgcttatcctccgtccgattgctgccttttgaggacctcttgctctgagagccttgagagggacctgctaagctagtgggcggagtggagtgtgacgggacttgtccactcatccctgaaggattcccaaagtgagaagatgcaggggctacggcctggccctgactgtatccgggggtagcggaaaattgtatgccgctcattggtggggcggctgttggtaaggttcctgggagctgagctctgggtacatatcccgctatctcggtaaggtaatatcccccataggccactatctgggcctcttctaggttgatatatttttggacacttttctggaagtcttgaaggttggaggctccttttgctgtaactcgttccagaacggagtccccgtacggatccctgcttaaagaagggcaagctgttgtacgtcatcaactttcttggtctttgaggcttgttccttgaacctctttatgaaattcttcaatgtttctgtaggcagctgcttgatgttagtcaaggcgctaacctccagattaactttcctcgcggcgacaaactgtctccggaagctggtttgcagcttattccagcattctatggatcctggctccagtttcttgaaccactctttcgcggacccgctcaatgttaacggaaagcataaacacttggcgtcattggtgactctcatgactgtcatgacttggttgaaccgtgacaggttatcgcttgggtccatgttcccggtataagttgccattttgggcatcttgaaatttttggggagctccgattccaggatgtgcctggcacatggctcccggtctt

SEQ ID NO: 142326 - DNA, 556 bp, Cannabis sativa
tctcttagtatctcaccaccgtttataaaccctaaacaatcatataaacgtcttatatatagttctaaccctaatataaccctagatcaacaatttaaaactttaaaaaacaaaatatatatatatacataccacattctatactaattgataataataatactaataataataataatgataataataataataatattagaaataatgataataatatttgtaataatatgctcacacaagcagcagaaaatctattctataagtgatatactcacacaaacagtcaaaagccttcatcactatcacataataacaattcataatataaaatctcataagcacatgaacattaaacccacaataaagttgtatctttcaacatataccctgtgtacagatgtccactcttcttacctcagttgttaagaacaccttcttgctactccaagcacctcactgaattttcttgttgagaattaacacaacaatacactcaaaatacattcaagtatgaatctctaaactcatacagaaacttacgtaaaaatacgta

SEQ ID NO: 142327 - DNA, 1381 bp, Cannabis sativa
agctttttcacaaaggctctcaatgaaagcaccaaactcttaatgcagattttcgttaaccaaatttgagcctaatagtgataatctcacacagaaagataaaagttgtaaaattaaaaagtattaccacaaaggattttttacgtggttttgcagttaaattctgcatagtccacgagtcaatcttattagatttctgatagtttttcagggccttttttgtatgattttttcatcctttttttgatcttacttgccactatttataatcatataaaagggaattaattacaaagttgactgtaatctttacaacgttttttccctgaaatcatgaggtttgattacatatcacgtagtataaatgcggttattatttgaaaatcacacagatgtgattttcccgcttttactgggtcaaaatgatcgtgtatttaaacacgtcttcaattgtagcgttctgggatacctcgacaggaacttggttccagtgatcttgatatcaagctggaccctttttttcctatctcttcgaggtcgataatgtacacctcgttgcttctttgtttaattaaaagcttaacgcttcattgtgacaatcgcagtttttatcaacaaagagtttctcgaggctcatttgaatgtttagcttttgactcgtcaagattgtaagtctcactgaaaagatgtctgaagttaaattgtggaagttacagggatgagccttcctatagcaaaataggcacctcgcttactcagtccactcgactgttatacttggtttatgcattttgcactaagtgttttcacagtagatatgcgttgttttttgccttcccagatgtaacgaggttgatgcctcgctttatgcatatggtttctcgttaatattctaaataacagtttgtatatcttttcctcgcgtaagaccttatagtcagggagttgcaagtatactctgttacttatgcaattaatgagttattccattagaagtgatttcatcgatctatattacgtttatcttgacgcgtgtcctccactaaaatggtagccgaatttcggtattacagagtctaaataaattattttttgaacaaaaaataaaattatttcatggaaattttttgtaaatcacattcaatcatcaaataacacataaaccaacatgaacatatccaaatctacacaaaaacaatattcatcgttttaaatctatattacatgaaagtaaataattaccatggctctgaggccatttgttgggaatattttaccagtaactagatttactaacaagtatgttgaattaacatcctaaatataagtatctcttaaacaatgaaattaaacacataaggatttaagaaaaccttacatt

SEQ ID NO: 142328 - DNA, 851 bp, Cannabis sativa
ttctaataagtaaaatctaattatcctaatttaatttatacattattatgtttattttttttctttttctaaaaagttagaggggggccataatcattctatagatgtatgtagttccgccactgtgtgtactgtatagtgtatgcaaatattttttctttgagttttgatatgcatgagtcatgagtgggtgttacggcttcgttactagtgactgcatttactattatcgtatatatttattcataaaaatggtatattcgcatataactctaatacttaagccttaatgcaaggttttacattacggaaataccaaaaaatggatctatgttgtattatatatatttttcttataaaaaaaaaatatttttttagtagctagagatgttagattgaaattgcaaggaagaataagagaaatttggtatgaaatattatttgtggatgtctaaattatcaaattaattattgttgtatttttttttattatattgatttagtttcgtattcttttagtcatatttttatataaataggagttaatcatccattaaaataattgagaaattttcattcagtttttctttctctcttcatctttatcttttttttttatatatataactttatattattttataacaagttatcagcacgagtctctgcccaagcctcaagctaaatattttgttaaaattcttgaattatttcaaagtcacgatacactaaacatatatttatatattataatctgactgaaacaatttcaagatttttttttctttttcttttttatttatatatctatatctattctatataaagtgtccttatataactgaattctt

SEQ ID NO: 142329 - DNA, 573 bp, Cannabis sativa
caaaaataagctccaagtaactcgtagcaagacccttcaggcaccagaaatcggccttcaacactagaagctaattttcaccgttagattatcatcaacagtggtaaacactttatttttatttttctcctattttgttgggtctccttcacctataaaaggagagctcccttagctcaattttcacattaaaaaaactacctacaaggtcagactttctctctctagagtttggagtctctgatacttaaataactgttgtaattaccatcttgtgagaaataaaaactcaaagcagacgtagtccaattaatatcgcgatataggggtgaactactataaactaatgtgtctctattaattacttaacaaacttttcattctcgccaatctagcgagaaaatgtggcttagaagtctaatctagatttttgagtcaacaacttgaacctccaattgaaagaaattcacctctccagcctgcgacagttgtaggcaggctagagattgtgattggaggctctcacctagctagaaattcaaggaaggccttagaattgtatgcaagatcact

SEQ ID NO: 142330 - DNA, 1102 bp, Cannabis sativa
tttattcaaaaaaaaaagtatatatatttaatatttattttttagcacataattaaatactcaatatttataaaactgtaattttactttaattttgttactacatgttgttattgtcttaaacataacatatataagactcaaattataaattattagaaaacatgcaatatttacttttaaatatttttttaataaatttaaaacggagtgtgtactgataaaattgaaaaaaaaaattatagttttagaaacattgagtactttattactatttaacctatatgcaataagatattttaaatttataaacattggtaggtatttactagcatgaatggtataatttagtattttaaatttaaaaaccaaattagattactagaagaaaagcacctaactcattcacaccaccaagagtacctaaataagttggcataatttggttatgttttttttttaatttacaataatatatattttttttatctaatttagaataattacgatttatcattgacgtaccacgttaactataaacctgacttttttttttttattaaatctttcattttcaaaagtaattttttgcgttgataagaaatcaattagttacacttatataaaaaaagctatttttatatcatataatttaagatacattttgattatcttcaaaatttatttgtatacatcctagtaattaattagttatttttaaattatattatggtagcttataatttaaaatacatttaagtaaccttaaaaattattttctaacctaattaataatgagtttccataaaatataacaagctacaactttactataccaattattatatatatgtatttattattttgaaaactaattaattatcgtataaatataatagagtatactcaatataatataattcacttaacaaatttcttcaattaatgttaactagttaagatttagataaaatatataaaatagtaactaattactatattattaattaaatggtttcttttctgaaaaatagcagaaaaaacataagcttcccacatcttgaatgttcacattgaataaagcgagtgaaatataattttt

SEQ ID NO: 142331 - DNA, 1108 bp, Cannabis sativa
  modified_base (1034)..(1036): a, c, t, g, unknown or other
acttttaaaaatacaagaaaaaaaattaaaaaaaaaaaaatcagaaaaagtaagaaaacttcagctgtggctgacgtgatacacccgtaatagtagtaacgttactattgtaaattaggtacaaaaaaatatatattgttgtaaactttactaaaaacagaagaaaaaaaaattatagattgttaaaagacaacatataatatagttggagccctaactttcaaaaactgaaaatagaaaaatacaatcatgttttcaaaacgaaatggccaaacaaaaaatagataaatgtcaatgggccaattcatgagttttataatggtaaatttataggtaaaaaaacttgaaataatatttttgttaattaagatttttgcccctaaaattttgacatatattaaatcaatactctcttaacttttctaactgttaaaaattctctttgaactattgagattactggatttaaggacttttgtcaaatttcattcaattttactaatttagtgattgtttatatactaaatcatgctccctagactttgatatctaccaaatcatgctcctcgaattttgatatgtgccaaatcatgccccctaaattttcatccatgttagatttttcttactaaattagacaaaagttcttaaatctaacaatctcaataaattcaaaataatttaaggagtatgaatttgatacatgtcaatgttgtaggggtaagaatcctaattagcctagtatttttattacatagagagcaataaacattacatattataattcttccatgtatatgtattaggggtaggttgaataccacttttattaatcaattaatcaaatttacctctaatttcatatttaattgaaacatacattttcttatatgtattgtacccaaaataccttgacataagagagttacatggagagtatcttgaaatgacaggggcaaaattggtacaatgtttaaaaaaaaggtaaaaatgatagactttaaaaaagagagtaaaaataaaagaggacaatnnnaaaatggtatagagtgtaattttctcattggtattgtaaaggaataattacataaggcaccattttttgtaa

SEQ ID NO: 142332 - DNA, 534 bp, Cannabis sativa
gaatgtattttccaaaaaaaaaaaggctgaactcttctatcttttttttttataaggagtcatttactcaaaaaaccaaaccagagtcaaaaaatgaagtcaagctcctccagaaatgaagcaacctcaaactcgaatagaaaaactcatacttagtttttctagttataaaaaaaataatttaatatcatttaaaaataattaattatttaaaaatttattatacaagaagataattataatttgtgtaaagagaaatctaatttttgtaaaaaaaaaattaaagcttcattgtaaatattataattaaatgatttaactgttaaaataattatagtatggatttatataaaaaaaattatttataattattaattgctaaaaaaagtcttgtttaatattcaattaattattttaagaaaattattaattataattaattgattctaaaaaatgatgttttacctattagtaatgtaaaagaaaaatataatcattgagtagtcacccttaaataattattaaattaaaata

SEQ ID NO: 142333 - DNA, 1113 bp, Cannabis sativa
atgagaacgcttgaaccagaaaaacctgatcttcgttaacaacttggtccaaagcaaaaggatttaatccatttgtgaatagacgagttggagaataagttcaagagacatcaagtcagggagtcaggaaaacaatcgggatgtgattctgttgaagaattcgagtcagaagcttcatggtcaaagagggaaaacgactctaaaaggttgtccaaagataagaaacaaaagaaacactgcaaatacgtacccatttatactgtctataccgagcttaatgaaactcgggaaagtatctacctcacgcatgaacagaaggttactttgaataaaccaaagcccatgaaacacgcgagacgtaaaagggacccaaccagacgatgtgaataccatggagatattgggcatacaacggaagtgtgttgtcagttgaaagatgagatagaaggcctcatagcgcgaggacacttccaacaatatgtgaagggacaggacaatgtccatgaccaacccaatctacccagtaacccaagagaccaggaaccataaccttcttttgtaggaggaaagggtaccttaattatctcgggaggagaacatattgcaagaaaaattggacaagggacaattagttcggtcaagcaattaagtaaaagtattgtaaagtaatcaaataccggctcgcaatggctgccgtatagagctgcaacacagaaaagccagtcgacgaccaatggctgttcgagcagcaacaaataaccaagatcatttcacctggaaccgtggggatatggcagggattgaccctgaatatcaaaacccctgtgggaatatgctagggattaaccctgaatattaaaacccgttttatcaaaccagatgcttctgaaagatcgataaaataagcaattgaaccgggaaaagtctcatgggagtaaatcgatggtaaattaatgattgtaaactgcatcgctgatgtaatattttgaacttcagtcgtgaataagataatcatttctttcgacaagtaattatatagcatgaccctttaaaattacttgaggggcatatatgtataattaaccgaaatttatctagaaatatatgacataa

SEQ ID NO: 142334 - DNA, 814 bp, Cannabis sativa
aattttttttttaatcttttattcctataatttaaaatccatactacatgattttcattttcattttcattcaaaattttctttcacataatatatacgtgatatatattaaaataaaatatctcttttttaaattatttttgtatatatacgtatgttatttttgattatttgattttttatttataattttcctatcttttgtgaagagaaatatggcccaaatcaaaagagtacatcaaagaaaaaatattagtgttattgtcaacctcctattacaacctcttagtcaatctccgtatccgaaaatatatgccagaatattttttttcatggcagtattaattatacttataacatcattcttataaatttctaaaaattttcgaatattaattacaatgccgaaagtacatttgaaattttttgaacgtacgtggtagactggaatatcaggaactctgttttcggtattgtaaactatttgaaatttttcaaaaatttacaggaatgatactgtaactataacaaataccgctataaaaaaattaaaaagacattaactaagaatagatataacggtaagattataatatttttgcttttcaatatttgtcaagtcaaatctaaacctatacattcgatacaagtctattttaccaatgtcctagaaaagacataccgcttgccatagtgtaagtagactacatcgtcgattatcatgtcagtgcactgataaatctcaagactaaaatatcagcatataattagaatttttttctactatgataacatcactataattatgaataat

SEQ ID NO: 142335 - DNA, 721 bp, Cannabis sativa
aattttactaataagttatgtgagtttttttttttttttttttaactttattgcaacttattagtttattaaatagacttgaaattaacataaacttttttacaaaagtaaaataaaaattaagtaacgtaaaaatatttaaaataacaaattaatttaatataatctaaaaaataaacacataactttcaaaataaaaaggtatattaaataattagaaaataaaaatagtaacttattatattatatgacaattcattaatcacgaaaataaacattaaggttatccaaatgtattttaaataataacatagaacaatataagttgattgattatggagatgtttacaaataaagttttagaggtaaccaaattgtatctcaaattatataaatttaaaaataaagtttttttcaatgtaaaagtaactaattaatttcttctgagcatcataagtaaacaaaaaattacttttgaatacccaggaaaataattaaaaaaacatgattagagattaatttcgcttcaagcatattattttaaaattaaggtattttttaatgacgtagcaaaatattattgtaattgagatttattaaaatatttttataaataatttatattttatgtatattattgaaaaaattcttaaaatatataatctcattcattttttatttaataaataatataaaaaccgcttaccccatacaccattta

SEQ ID NO: 142336 - DNA, 890 bp, Cannabis sativa
  modified_base (48)..(49): a, c, t, g, unknown or other
tttcctgaaatcaaacataaaatttttattattagtcatgtggaaagnncaaccagagtcaaggatccattcatctttgatggatggtccaacttggtacacttcatcactttcatatccatcaattacatttgcatcatgcatatcaggtttattcttagagtttgagtgtttagaatctccctgtccatgtggttattgcctgttatttcttttcaagaaataacaatctcttttaaaatgcccaggtttaccacaattgtaacaaccattagtttcatcaggattccttgtgtttgaatttgatttgcctctttgatgtcctcctggtttgtttgaacctctgccttggcttctgcctctgttgttccaaggttttcttggacctggtctgcctctactcaaattcacttcaccatttgagttcccacctttctctgttctcatctctaaatctttagactttagtgcagaattcacctcctctagggttatagatgtccttccatacttaatagcagtcttaacttccctataggattcaggtagagaatttaggatgattatagccgggttttcatcacttagagccttattttccccagaatttgcaagttcaattgcatccttaagaattcatccaaattttgatcaagagatttggatgaactcatcttaaaaccaaagatcctttccttcaagaaaatcttgttggttagggatttttgttgaaactgttcttctagtttcttccaaatctgggcatgggtttcttccttgtctattaatttgataatggcatctgataagttgaatatcatgatgccagttgcagtttccaagtattcttcttgttgaatcttggtagtcccttctggccattctatagg

SEQ ID NO: 142337 - DNA, 504 bp, Cannabis sativa
cagagtgtcaaatttgggataacagtatttaaatagtaattttatttgataattatttataattattaaatatatagaattagtatttaaataactagagcagaaaaataacattagtgaagaacgacaagtttgtttcattaacgaaacaaaataatggcaaaattctaactcatgggcttcactaaagggttcggccatgagatgaattctagagaagactctagactctctcttgtctgaaaaactgaatccctataaatagaacgttaagggttttgattctagagaagactctaaactctctaggaacacgacacgttttgccacctatctaggtaaagtaacttccaagaaaatttatatttttctttacaattccagtttcaataatagcaaaacgtgtcgaaatgggtcaacacgaacatgacacaatcttttacgatatacacatatatgtatattggtttgaatacatatatattttagtgtaaatctaaaaat

SEQ ID NO: 142338 - DNA, 1089 bp, Cannabis sativa
gattcatataggatgcaaaattgatagtcgttctagagatttccaataggagagaatatgttaacaagtaaagatttacaagttatcaagatgtgtttatgttagtaggtaaataagaaactttaattgagtatctatcagaaataagtacttaacttgttactaagtgaagttagtagatcagcttgggaggtctcatagcaggaataaaaagatataattataaattatggactatgggatcttatgatttcgaccaagtagtagtggttggacatgctgagttaatatgttgtctatcggtgtagacaatttatacaataaatgaggatatggaattcataagaaggaatagtctaatcttgtgaaattacaaggttgatatctttggctataatgttaagaattaaagaaggctattgagaaccatggagattaaagcaaaactagtatgatgttttatttttgaaaggtgggtaacctgagaagaataatggaatatttgataaatgtaggggtgttcataaaaaccgataaactgaaatcaaccagactgtagccaaatttttggttgcacgtcatcactgaatttggcggtcggtttcagttttggtttttttggcatggcggttgctttcggtttttgaaataaaaaaatggttaaaccaaaaaattgccaaaactgcaaaagaccacaataaacttccaaaaactgccaaaccgaaaaagcattaaaaactgccaaaaattgtacggtcagttttataaggttataatttctaaatagtctgttacagtttttgtaaaataaaaaccgtaaccgaccggtcggtcggttagaaaattgtaaaaacagaccataaccgaccgattttcacccctagataaaggttagattatcttagaataatctcttcccctgatgaagtgtatatctaaaagtgataattaaatgcactattggttaggtactttaataagtgtggtacgagagaaatattagacacctattcactggagtagtaggccagttagcttatcaactagccttaactcctgcgttgtccggagtatataatgtgtttcatg

SEQ ID NO: 142339 - DNA, 607 bp, Cannabis sativa
  modified_base (26)..(40): a, c, t, g, unknown or other
  modified_base (567)..(572): a, c, t, g, unknown or other
ggtgttaaataacatacttgtgagtnnnnnnnnnnnnnnngtaaaataaattccaacaaatcatgctccggggtttttcaatagcaataataaccctagcagcgagctggagtttacaatgagtatgccttcctatagtaggtcgacatcttgctatccgttatctatgttctccttggggttgtgccttctgacgcaaaatggtttctcgtcaatacgcgaatcaatagtttgtacattcttatctcgccaaagactgtgcagtcagtataactattaattctatatttaatgagttattacattttaatatttattgatataattatcaatatatttgttgatttatctttcctaaggttgacacgtgtcatcctctgaagtaccagtcgaatttcatgtataacaatttctatttataaatataagttgaacatttttatacatgcttgaacgttaaattattaacatttaaaattaaataatttagataaacatcacaaaattctttattcatacatgaggttgtgacttgtattgtacaaagaattgttgggttttatgccnnnnnnaaaactctttacaatctgattagctatcaatataa

SEQ ID NO: 142340 - DNA, 643 bp, Cannabis sativa
ttattaatattacataacgattactaatttaataaatacgaatacccgttttaaaacctactaattctataaattaataacaaccatttgattaatgactagactcaatctaacagctagtacaatcatggattgtatacccaaaagtacaataacggaacaaaatcatatccctatatatacatatcgattccaaacattaatatctattatttttccaaagtgatattattttttgtaatatatatatgatatgtattgaaattaaactctagctcaaaaagtcttgattttccatatatatgtgaaaaggagacctatatatagctacatatatattttgtatatatatgcttgtcaatttatgaatatcaattatggttatatacatatgccaatttgtgaacatctctataaatattgtgataattataggtttgactagaaaaaaagaacacaaacaaaatggaaaataaagatgggttcaaaatcattttggtgtgaaatgaatggccttaataataagttaatagataattttttttttctttttaaagaaatatagacaattaaaataacatttatataatagacaatttatatgtataaactgaaatatatgtatgtgtatataaaatgcgga

SEQ ID NO: 142341 - DNA, 600 bp, Cannabis sativa
agtcggctccaaaccacagaagaccaatgtttcttctcacctgcaggcactagtttattgtaaccagttgctattgtatacctgctacaacaatcatgtctttcctttgcatcaaaaaagctccaagactctaccttttaatgtaactaatttcctccaataccaactatcatttgcactagcattgtattgccaccaatcagcccccttaatataaacacaatgaacccatttcacccatagattgtcctctttttttgccactgcccaaacgtatttaaacatcgctgcaatgttccaatctccaacagatttcaaacccaaaccacctgctgattttgtgtgacaaaccttactccaagcaacagcagccactcccgtcaagtgatgagtcccactccaaaggaagcctctacaaatagcctcaatctccttaataatggtcttgggaagaaccattatttgactccaataagagtggattgccattaagacggagttgataagcacaattctacctgcaaaggaaaggtttctagaactccaagttctaattcggccaaccattttttcaactaaaagatcacattgcttagcaga

SEQ ID NO: 142342 - DNA, 1002 bp, Cannabis sativa
  modified_base (144)..(144): a, c, t, g, unknown or other
tattgtatttaagattagtgagtcaaagatatagaataaactaattccaactttactaataatttactatgagttaacttacaccaaatataggattgttgaagattacaacgtgtttttataaagggattattttacaaatanacaaaaacaataaaaaaattacaaaaatacagtttcatagaattttaaatatttttttaattttatttacaaaaaatacgggttctttatgttgtactcttgttaatttgttgttgattttttgttatttgtatgctatttttttgttgttgttttggtgttatttaaatgttacttttatgtagttttcttattgttttcgtgttgtttttatagaaaatcgtaaaaatgtaaaaaaaaaaaataataataatctataaacgtttacaaaaaatgatgcttcatgtaattatctcttttatttatagaattaggataggaataaggaatgtgtttgattatggggcttttttttataaatatggaatttcttaaatgcattttgaaaaatatggacattatttatagaatacctataaaaggatatttccatttataaaattcacacccaaaatatcaaaattcacatatcgtgcgattctttcttcttctcctccgatttctcaacgatttctttccttcttctctggtgtgattatcattcttcatcttattgttcatgttcctactagcaatgaagaaaatcaataaaatctgaactcaaaataaaggtaagaaactattgaatttgattacattcttgacgtagttaacatattatttaggaaaaatgataaggagttttaattttagatttttattttggttctcataataatgtgttgtgattataatttttaacaaaaaaaacactcatatcttgaaaaagttcacctgctagttcaatcttaaggttttatattgcctctgaatgtaacctgaaactttaaatttgaatatagttgtgtttgttgtgtt

SEQ ID NO: 142343 - DNA, 3176 bp, Cannabis sativa
  modified_base (2618)..(2642): a, c, t, g, unknown or other
gggtttttaaatcccaggggaaaaggagtattcatgatatctgggtggtacagctcgagctcctcgtctgagtcaaatccagattgtctccctaatttccccacttgatatctcctaaacttatcctccaacttatctatttccaattacttaggatcctcttactttgaaccgagttgttggcgaagatcaggtttttttcgattcaagtgctctcgcagatctgagtgggagtaattactagcagaccttgtttcattcacagactgtgtcctactcacggaccttgtcttgctcatggaccttgtcctcgagtgactcacggatttactagttcccatgctttctctatcattatcttgtcgagcactctctcttcttcgagctgatcgactgtgggtcctcgaacaccctgaggtcacacttgcttcttcacgctctattcttccccctgagtgtggtttgtcatatttcctccattgggatttgtacgagacctctctctatgggttcgggaagaatgcttgtgattcttcacaggggacctacgttccccaagttgagtcccagggtcatcctcatttccatgaggaatttctggttcattggtatctggttgcctcccattctcatttctatgagagggttcaagccaatcattcgaattttcagggggaatgtcattttccccaagttgttcttcctagacattttcctgtcttctggttcgtgagccatgaggcctacttcgtggtcttctcactccaggtttaggttgattttcagtgttagtcccctgtgccgccctagctgcagctgcatcacgctcaaattcagcgttcctccgttgtgcctcctctaagcggtgtctaaggtggcagttttccatttcataatttctctctcccataggctgagtacctcctcgattgggtccctcacccctcattccaagattctggccattcccacactgagttctcctcgagcgtgttgtttgcgtactgggaccaacgttaggctgagtcctccagggactagcggtctgagtgcttgggccaccctcaggtttagtcctcctagagcgggtggttcgtttagaccttgggttggaagaccttctggagcccacaggctctttcccagaacggtgatgagtttcttcatgtggtgaattaacgtttttaaggttttcagccatgaaggagatggtttttcttttaaaaaaggagggtattttctaagctttttcacgaacgctctcaatgaaagcacaaaactattaacgcagattttcattaaccaaaatttgagcctgaatggtaaacttgcactaaaaaataaagatggtaaagaaaaggaaaatatgaacacacatgatttttacgtggttttgcagtgaaaattctgcatagtccacgagtcaatcttattagatttcggatgatttttcagggccccttttcttatgattttttcgtcccttttttaatctaacttgcctctatttataatcacatagtaggcagttaattacaaagtcgactgtaatctttacaacgtttatcccctgaaatcgtggggtttgattacatatcatgtagtataaatgcggttaatatttgaaaatcacacaagtgtgattaatctgcttttactaggtcaaaatcatcgtgtatttaaacacgtcttaagtcataacattatgggatgtctcgacaggaacttggtagcaatgaccttgatagcgaggtggagcttttatcctatctctttgaggttgatgatgttcgccttgttctttctttgtttgaagacataacacttcattttgacaatcacagttctttatgacaaaaagggtgcttcagcaaccatcattcgaatgtcagctttcgacttgtcaagactataagtctcactgaaagatgtcttgaagttgattggtgaaagtaactggagaacgtcttcctatagcgagataggggccttgcttattaggtcttgagtccacctaactgttatacttagtttgtatattatacgctaagtgttttcacagtcaatatgcatcgctttcgtcttcccaggtgtaacgaagttgatgtctcaccttatgcatccaatgtcgtatggtttctcgttaatacatgaggcaacattttgtatatctttacctcgcataagacctcatagtcagcgagttacaagtatactctgtcacttcggcgtttaatgagttattccataaaaagtgatgaccgttacatgcatagatccatattccccttaatctggacacgtgtcgtcgcttgaaatggtagccaaatttcgggtataacactagccataatattttaaaaataaattggttattttgtgaaatatttaattgtttataaattataagtttgattttttttatctcattttacttataaaaaatttataaatagtatattaaatatttaaataacctagatatttttgtagaaatttagtgaaggcttaatttgagatattttcacatctaatttggatttattattttttttattttactcttaaaataatattttctaatcatttctatttaaaattagtttattttgttattnnnnnnnnnnnnnnnnnnnnnnnnngaaaatgatattgaaaatattttttttttggttattttcaaatcatttatcttattagatattcaatttaatttgataaaataattctaatgaacttagatattttaaattagtttcattttttaattttaaattttgaaaagatatttaaggttgttttaacaaccctaaattttcaaaatttagttgatcagttaaaataataatttaattatataaatatcttacttcacaatttgttacatggatattgtttttgtttttatttaaattgtttattcaaagctttctttaacaaacatattatttatttgatctaaattgatatgatgaacttgttgaaagattaaatgatcttattttaatcataattcaattgtcaatagatcttataaataatctgtaacaggtaaattttataattctttcacctctgtaaatctaaaaacatgatagggcccatccaaatcaatttgacctgtgcgagcctatatgttttcttttaggcttagatgcatataggcagcccattta

SEQ ID NO: 142344 - DNA, 692 bp, Cannabis sativa
atacacagtgggttttacaataaatatgtaaaaaagtaaatgatcatttatattaaaaacaaaataagtagttgagtgcatttctttttagaaaataaatttgtagcatcccactgagctcagattactttactataaaaaaacaaaaccaaggctccaccggcgttctaaaccgtttgctcgtccatagcgcctcgcagtatacataccagaattgacccaactcatcaaatttatattcaatgttccctgtctattgcctatagggggaaagtaagggggtgagctaaaagcccagtaaggaaatgcttaacatacaatagcatttaatacactaaacatatcttaaaattcataataatatgattctttataccattaacgtattcagtcttaacaatattatataccttaactcataattgtaatttaataactccagatatggaaagctatatcataataccatatatttgtactaaacgaaaccattacgtatatgaagggatcacaaccctgacatcatactcatagcacaatcatagaaacaacatataataattatttcaatcatataatgtctttaccataatgtgaaatatcatagccattacatacacaacctgggcctaactggccctacaataacttatgcacatttagccctaccattgctatggaataaggtatct
